United States Patent Application Publication US 2006/0107345 A1 - sequence listing, part 4

SEQ ID NO: 11744 - DNA, 1872 bp, Arabidopsis thaliana
acttccgccatgagaaaaacctgcacacacgcctgaaaaaccaaatcatcctcatcatcttctgatctaatgtctaccgacactatcccttccctctcatctccaccggcgccggagtttccttccaccacaccagacacggcgacgtcaccagctccgtctcagccatccatcatcggaccttcttcgttggctccgttcccggagacaacaacaaacattgatggaggctcgagaaatgtagcattaactggacttattactggagtagttctcggagctacgtttgtcctactcggagtttgtatctttgtctgtttctataaaagaaagaagaggaagttaaagaagaagaagaaagaagatatcgaagcttctattaacagagactcactagatcccaaagataatagcaataatcttcagcaatggagttcatcagagattggacaaaacttgtttacatatgaagatttgtctaaagcaactagtaacttctccaacactaaccttcttggacaaggtgggtttggttatgttcatagaggagttcttgttgatggaactttggttgctattaagcagcttaaatctggaagtggacaaggtgaacgagagtttcaagctgagatacagactattagtagagttcatcataggcatcttgtttctcttcttggttattgtatcactggtgctcaaagattgcttgtttatgagtttgtgcctaataagactctcgaatttcatttgcacgagaaagagagaccggtaatggagtggtcaaagaggatgaagattgctttgggtgcagctaaaggattggcatacttacatgaagattgtaatcctaagacaatacaccgcgatgtcaaggctgcaaatattctaattgacgatagctatgaggcgaagttagcagattttggacttgccaggtcttctttagacactgatactcatgtctccactcggattatgggaaccttcggttacttggctcctgaatatgcttcttcagggaaacttactgagaaatcagatgtcttctcaattggagtggtgcttcttgaactgataaccggacgccgtcctgttgataaatcacagccttttgctgatgatgatagcatcgttgattgggttggttatcttgtttcccttaccaccacttttaataagcttttaaactttacctcatgctctaggcaaaacctctgatgatacaagcgttaaacgatggaaactttgacggtcttgttgacccgcggttagagaatgattttgatatcaacgaaatgacgagaatggttgcttgcgctgctgctagtgtccgtcattcagctaaacgtcgcccaaaaatgagccagatagttcgagcattcgaaggaaatatatctatagatgacctaacagaaggagctgccccaggacaaagtactatttacagcttagacgggagctcagattatagctcaacacaatacaaagaagacttgaagaaattcaagaaaatggcgttcgaaagcaaaacatttggtagcagcgaatgcagtggtttgactagcgacaatgctcagaacccatcaggctcgtctagtatcaccgaaggccaacgtacaacgcaggagatcgaaccggagaagaataccaaggacacatgaactttaaacagaggattcttggtaatagttaagtcttatcattttggggtaggaccggtaggtttaggtgtaaaacacattattcattagacgcgctttcacttttaattatttccatgtgtggctctaatcaaaactgtcatgagcctgatattgcacgtgaatattatttgttggagatttttttgagtttggtgtgaagatattg

SEQ ID NO: 11745 - protein, 383 aa, Arabidopsis thaliana
MSTDTIPSLSSPPAPEFPSTTPDTATSPAPSQPSIIGPSSLAPFPETTTNIDGGSRNVALTGLITGVVLGATFVLLGVCIFVCFYKRKKRKLKKKKKEDIEASINRDSLDPKDNSNNLQQWSSSEIGQNLFTYEDLSKATSNFSNTNLLGQGGFGYVHRGVLVDGTLVAIKQLKSGSGQGEREFQAEIQTISRVHHRHLVSLLGYCITGAQRLLVYEFVPNKTLEFHLHEKERPVMEWSKRMKIALGAAKGLAYLHEDCNPKTIHRDVKAANILIDDSYEAKLADFGLARSSLDTDTHVSTRIMGTFGYLAPEYASSGKLTEKSDVFSIGVVLLELITGRRPVDKSQPFADDDSIVDWVGYLVSLTTTFNKLLNFTSCSRQNL

SEQ ID NO: 11746 - DNA, 1853 bp, Arabidopsis thaliana
gatagacctcctccggtcctccctctcgctttacctctggagaacttgacggcgactgcgtcttcctcccccgtcgaaacacaaaaacccgtcaggtgacttcatctacttcgctactctccgattttagaagccttaacactggaatgtgatgatttgtgtctgaattcgtgcgaattgcgtccttgttgtatacttagtattcgaggttgtctctgtggaatcttcggttcaattttgtgagcaaatatgctttacgaaggctatttaaaatatatgaaagcgaaatacggcgaacggtcgcagggaacttacttcatggctggagaggatctgataagcaaattacctgattctctgataactcagatactcttgtatctcccaataaaggatattgttaggactagttctttgtccagtaggtggaaaagtctctggcttttgattcctcggttggatttggactctgaagagttccaagattacaatgcctttgtgggttttatgaacaagttcatagatttctctggggaagaaaaaatatgcttggacaagcttaagctaagtagtcggaagactgtgaatgatctgccttgtgtcacgcggtggatagactttgtggttaggcgtaaacttaaacatcttgatgttgagtgtcttgtgaatcgtaagtttttagaggagatgcctttaagtctttatgtttgtgacacactggtaaatctaagactccatcgggtattgttgggtaagtttgaggctgtgtctttaccttgtttaaagactatgcgtttagaagaaaatgtatatgccaatgatgtggttctagagtcacttatctcgtcttgcccagttctcaaagatttgatcattcttagaatgtttgaagataacgtaaaggtcctacgagtgcactctctgacactaaccagtcttaatatagattttaattttggggagggtgatgacttcgttgatggttttgataaaaaagtctcaggggttttgattgatgcacctcgactcaagtatttgaaattccaagatgatctatcggggagtaaaatcataaccaattcgggctccttagccaaggtcaatgttgtttatgtcttcaatgagaatgattgtgctgatgttgttgacataccaagacgaaatatggtccgtaatttcttaaccagtatctcgggagttagcgatatgaagatctctcagcattttgtggagtttctctattattacaaggacttcgacccactgccacagttttgcaacctttcccgtttaaaagccgagatttctttatactttctggaaattctgccaaccattcttgagagctgtcccaatctgaaatcactcgtcatggtgttggaattttatctgcaggaggaggatgagccaataatattctcatccgtacctcggtgtttggtttcgtcactcgagtctgtagagataaaaaaattcaacggaaggcctgctaaaatggaagtagcaaggtactttttagaaaactccggagttctccaaaaacttgttctgcatttgaggtgttccacgcatgaagatggattttacattttaaaggatctccttgcattgcccagaggatctagcacatgtcgaatcgtagtttgttgacggcttgaaaggttttaggtggggctgtaatcagattaagactagcaatctagcattcccagctgattacttaaattgtacttggatttctcattttgttgcactctattatgatgtctttgtgagcttttggctactagttctggatgatgttgagaattctttgtgtctcttcccttctctgaagccatctttcttgtctt

SEQ ID NO: 11747 - protein, 466 aa, Arabidopsis thaliana
MLYEGYLKYMKAKYGERSQGTYFMAGEDLISKLPDSLITQILLYLPIKDIVRTSSLSSRWKSLWLLIPRLDLDSEEFQDYNAFVGFMNKFIDFSGEEKICLDKLKLSSRKTVNDLPCVTRWIDFVVRRKLKHLDVECLVNRKFLEEMPLSLYVCDTLVNLRLHRVLLGKFEAVSLPCLKTMRLEENVYANDVVLESLISSCPVLKDLIILRMFEDNVKVLRVHSLTLTSLNIDFNFGEGDDFVDGFDKKVSGVLIDAPRLKYLKFQDDLSGSKIITNSGSLAKVNVVYVFNENDCADVVDIPRRNMVRNFLTSISGVSDMKISQHFVEFLYYYKDFDPLPQFCNLSRLKAEISLYFLEILPTILESCPNLKSLVMVLEFYLQEEDEPIIFSSVPRCLVSSLESVEIKKFNGRPAKMEVARYFLENSGVLQKLVLHLRCSTHEDGFYILKDLLALPRGSSTCRIVVC

SEQ ID NO: 11748 - protein, 457 aa, Arabidopsis thaliana
MKAKYGERSQGTYFMAGEDLISKLPDSLITQILLYLPIKDIVRTSSLSSRWKSLWLLIPRLDLDSEEFQDYNAFVGFMNKFIDFSGEEKICLDKLKLSSRKTVNDLPCVTRWIDFVVRRKLKHLDVECLVNRKFLEEMPLSLYVCDTLVNLRLHRVLLGKFEAVSLPCLKTMRLEENVYANDVVLESLISSCPVLKDLIILRMFEDNVKVLRVHSLTLTSLNIDFNFGEGDDFVDGFDKKVSGVLIDAPRLKYLKFQDDLSGSKIITNSGSLAKVNVVYVFNENDCADVVDIPRRNMVRNFLTSISGVSDMKISQHFVEFLYYYKDFDPLPQFCNLSRLKAEISLYFLEILPTILESCPNLKSLVMVLEFYLQEEDEPIIFSSVPRCLVSSLESVEIKKFNGRPAKMEVARYFLENSGVLQKLVLHLRCSTHEDGFYILKDLLALPRGSSTCRIVVC

SEQ ID NO: 11749 - protein, 443 aa, Arabidopsis thaliana
MAGEDLISKLPDSLITQILLYLPIKDIVRTSSLSSRWKSLWLLIPRLDLDSEEFQDYNAFVGFMNKFIDFSGEEKICLDKLKLSSRKTVNDLPCVTRWIDFVVRRKLKHLDVECLVNRKFLEEMPLSLYVCDTLVNLRLHRVLLGKFEAVSLPCLKTMRLEENVYANDVVLESLISSCPVLKDLIILRMFEDNVKVLRVHSLTLTSLNIDFNFGEGDDFVDGFDKKVSGVLIDAPRLKYLKFQDDLSGSKIITNSGSLAKVNVVYVFNENDCADVVDIPRRNMVRNFLTSISGVSDMKISQHFVEFLYYYKDFDPLPQFCNLSRLKAEISLYFLEILPTILESCPNLKSLVMVLEFYLQEEDEPIIFSSVPRCLVSSLESVEIKKFNGRPAKMEVARYFLENSGVLQKLVLHLRCSTHEDGFYILKDLLALPRGSSTCRIVVC

SEQ ID NO: 11750 - DNA, 2105 bp, Arabidopsis thaliana
gttccccgttggatccagcctaataaaattccccattccaacacacacagatctcgcatcccggcagtggcgacgaatctcgcggggcggaggtggtggcgcgacagaggcggtgtcgactccgacgaactcgcagccaccggtggatacgcaccagcagcaccggcgcactccaccgacgttcatatttaaggacttggtttggatagttctactcgtcaacaaaagtgattaaaaatggtggttcttgcagcttcaatcgtttcaaagtcggggaaagcacttgtttcaagacagtttgttgacatgtctcgcataagaattgaaggattacttgctgcgttcccgaaactggttggaactgggaaacagcacacttatgttgaaactgaaaatgtgcgttatgtttatcaacctattgaaggattatatcttctacttatcacaaacaagcagagcaatattcttgaagatctggacacattgaggcttctctccaagcttgtgcctgaatactccccttccttggatgaggacggtatttgtaaaacagcatttgagattatatttgcttttgatgaagccatctctcttgggaacaaggaaaatgtgacagtgcaaagttaaacaatattgtgagatggagagccatgaagagaaggcaaacaagctgatgatgcaagccaaaatcaacgaaaccaaggatctcatgaagaagagggctaatgaacttgacaaaatgaggatggaaagaggcaagcttgacaaaggaggatactcatcaatatctggtccacgcgtgattgaaaaaacgtttagtgacatgagcatcagtggttctggatttggtagtggttctggattaggtggactgagcactgatatggactcatttgccagcaagcccaaaggtcgtccatctacagcagctactgcacctggtaaaggttttggtatgaaattaggcaagacacagaagacaaatcaattcctcgagtctttgaaagctgaaggagaagtcattttggaggatgtacaaccaagtgcagtttctacaagatcatctgctcttccaccaagtgaccctgtcacagtgaacatagaagagaagctcaatgttgttgttaaaagagatggtggtattagtaactttgatgttcaaggaacacttgctcttcaggttcttaatgatactgatgggttcatccatttgcagattgaaagccaagatatgcctgggcttagcttcaaaacacacccaaatatcaataaggatttgtttaacagtcagcaaattttgggagcaaaagatccaaacaggccctttccgagtggtcaaaatgaaactcctctggtgaaatggagaatccaggggatagatgagtcatctttacctctgtcagtcaattgctggccgtcagtatctggaaatgaaacctatgtgaacattgaatatgaagcttctgagatgtttgatctgcacaacgttgtcatatctatacctctgccagcacttcgggaggctccgagtgttagacagatcgatggagagtggaagttcgactcaagaaactctgtgttggaatggtctattctccttatcgatcagtcgaatcgcagtggttccatggaatttgttgttcccccagctgacccatcatcgtttttccccatctccgttggattttctgcatcgagtactttcagtgatctgaagattactggaattcttcctctgaaggaaggcaaccctcccaagttttctcagcgggctcgtttgctcactgctaactaccaagttgtttaacgcttgtaccgcgagtgttggtccacttgaatactccaatagcagatgttattgccgtggacttatgcaagccatggcacgggagattattttgtgtttggaaaatttcttcactatgcgcttctcattgttatagcatattgcacaaatgttgttctaatgtattgccaccagagaaataagtaatgtttttgcaatttgttggcatgcattttgtacccgtctctttcctcctatgaggatgttgtcaggacagtgttatctcctgggcttggtgtaatgtgatcgtagcatctcc

SEQ ID NO: 11751 - protein, 388 aa, Arabidopsis thaliana
MESHEEKANKLMMQAKINETKDLMKKRANELDKMRMERGKLDKGGYSSISGPRVIEKTFSDMSISGSGFGSGSGLGGLSTDMDSFASKPKGRPSTAATAPGKGFGMKLGKTQKTNQFLESLKAEGEVILEDVQPSAVSTRSSALPPSDPVTVNIEEKLNVVVKRDGGISNFDVQGTLALQVLNDTDGFIHLQIESQDMPGLSFKTHPNINKDLFNSQQILGAKDPNRPFPSGQNETPLVKWRIQGIDESSLPLSVNCWPSVSGNETYVNIEYEASEMFDLHNVVISIPLPALREAPSVRQIDGEWKFDSRNSVLEWSILLIDQSNRSGSMEFVVPPADPSSFFPISVGFSASSTFSDLKITGILPLKEGNPPKFSQRARLLTANYQVV

SEQ ID NO: 11752 - protein, 377 aa, Arabidopsis thaliana
MMQAKINETKDLMKKRANELDKMRMERGKLDKGGYSSISGPRVIEKTFSDMSISGSGFGSGSGLGGLSTDMDSFASKPKGRPSTAATAPGKGFGMKLGKTQKTNQFLESLKAEGEVILEDVQPSAVSTRSSALPPSDPVTVNIEEKLNVVVKRDGGISNFDVQGTLALQVLNDTDGFIHLQIESQDMPGLSFKTHPNINKDLFNSQQILGAKDPNRPFPSGQNETPLVKWRIQGIDESSLPLSVNCWPSVSGNETYVNIEYEASEMFDLHNVVISIPLPALREAPSVRQIDGEWKFDSRNSVLEWSILLIDQSNRSGSMEFVVPPADPSSFFPISVGFSASSTFSDLKITGILPLKEGNPPKFSQRARLLTANYQVV

SEQ ID NO: 11753 - protein, 376 aa, Arabidopsis thaliana
MQAKINETKDLMKKRANELDKMRMERGKLDKGGYSSISGPRVIEKTFSDMSISGSGFGSGSGLGGLSTDMDSFASKPKGRPSTAATAPGKGFGMKLGKTQKTNQFLESLKAEGEVILEDVQPSAVSTRSSALPPSDPVTVNIEEKLNVVVKRDGGISNFDVQGTLALQVLNDTDGFIHLQIESQDMPGLSFKTHPNINKDLFNSQQILGAKDPNRPFPSGQNETPLVKWRIQGIDESSLPLSVNCWPSVSGNETYVNIEYEASEMFDLHNVVISIPLPALREAPSVRQIDGEWKFDSRNSVLEWSILLIDQSNRSGSMEFVVPPADPSSFFPISVGFSASSTFSDLKITGILPLKEGNPPKFSQRARLLTANYQVV

SEQ ID NO: 11754 - DNA, 1664 bp, Arabidopsis thaliana
gccaaccgccgccgccactcgccactctcacgtctcgcccatcccgccactgctgctctccagagtccaggcgacccaggctgcgcggtcgctcggtgttgttagtcccgatcgccgccagccatggcatccaacggcatcgctcccagagatgtatgtgttgttggtgttgcacgcacccctttgggtggtttccttggtgccttgtcttccttgcccgcaacaaagcttggctctatagcaattgaagctgctctgaaaagagcaaatgtggatccagccctcgtgcaggaggtctttttcggaaacgtcttgagtgctaatttgggacaagctcctgcaaggcaagccgctctaggtgcagggataccaaacactgttgtttgcaccactgttaacaaagtctgcgcatctggcatgaaagctactatgttcgccgcacagtcaattcagctgggtatcaatgatattgttgtggcaggtggcatggaaagcatgtccaatgccccaaagtacattgctgaagctaggaaagggtctcgttttggacatgacacacttgttgatgccatgcttaaggatggactttgggatgtatacaatgactgtgccatgggaatgtgtgccgaactttgtgctgacaatcatgccctcacaagagaagaccaggatgcttttgctatccaaagcaaccagcgtggaattgctgctcgtgacagtgatgcttttgcatgggagattgttccgattgaagttcctgttgggagaggaaaaccacctgtacttattgagaaagatgaaagcctggataagtttgacccagcaaaactgaagaaacttcgcccaagtttcaaggagaatggtggtaccgttacagctggaaatgcttctagtataagtgatggggcggctgcattagttttggtgagtgggcagaaggctcaagagcttggcctgcaagtccttgcaaggatcagaggatatgcagatgcagctcaagctccggaactttttacaaccaccccagcacttgcgataccaaaggctatatcaaatgctggattagagtcatcccatgttgatttttttgagattaatgaagcattttctgctgtcgcacttgcaaatcaaaagcttcttgggattccttcagaaaagattaatgtccatggaggagctgtgtctctagggcatcctcttgggtgcagcggtgctcgcattttggtcacccttcttggtgtccttagggaaaagggcggcaagatcggtgttgctggtgtctgcaacggcggaggtggagcatcagctcttgttctcgaactcgcataagaagcattggcttaaagcactggatatgtagctaattcagtcgcattcatctatacatgatgaagtattgaaaaaaaaagaccctacgatatctatgccgggtgccactgtctgcttaattcaacagaatatgattgtgcaatcattctgccgtgctgcttttgctgaccttaggaacacggcggcggaggcgcgatcattctggcaattagcaccagctagctccctgaggggcgaccttgtactctctacattgatgtatgtgtagtgctggacattcttaagttaattcggcaataaagtgtgctgtgcttctgctaaaaaaaaaaaaaaag

SEQ ID NO: 11755 - protein, 401 aa, Arabidopsis thaliana
MASNGIAPRDVCVVGVARTPLGGFLGALSSLPATKLGSIAIEAALKRANVDPALVQEVFFGNVLSANLGQAPARQAALGAGIPNTVVCTTVNKVCASGMKATMFAAQSIQLGINDIVVAGGMESMSNAPKYIAEARKGSRFGHDTLVDAMLKDGLWDVYNDCAMGMCAELCADNHALTREDQDAFAIQSNQRGIAARDSDAFAWEIVPIEVPVGRGKPPVLIEKDESLDKFDPAKLKKLRPSFKENGGTVTAGNASSISDGAAALVLVSGQKAQELGLQVLARIRGYADAAQAPELFTTTPALAIPKAISNAGLESSHVDFFEINEAFSAVALANQKLLGIPSEKINVHGGAVSLGHPLGCSGARILVTLLGVLREKGGKIGVAGVCNGGGGASALVLELA

SEQ ID NO: 11756 - protein, 303 aa, Arabidopsis thaliana
MKATMFAAQSIQLGINDIVVAGGMESMSNAPKYIAEARKGSRFGHDTLVDAMLKDGLWDVYNDCAMGMCAELCADNHALTREDQDAFAIQSNQRGIAARDSDAFAWEIVPIEVPVGRGKPPVLIEKDESLDKFDPAKLKKLRPSFKENGGTVTAGNASSISDGAAALVLVSGQKAQELGLQVLARIRGYADAAQAPELFTTTPALAIPKAISNAGLESSHVDFFEINEAFSAVALANQKLLGIPSEKINVHGGAVSLGHPLGCSGARILVTLLGVLREKGGKIGVAGVCNGGGGASALVLELA

SEQ ID NO: 11757 - protein, 299 aa, Arabidopsis thaliana
MFAAQSIQLGINDIVVAGGMESMSNAPKYIAEARKGSRFGHDTLVDAMLKDGLWDVYNDCAMGMCAELCADNHALTREDQDAFAIQSNQRGIAARDSDAFAWEIVPIEVPVGRGKPPVLIEKDESLDKFDPAKLKKLRPSFKENGGTVTAGNASSISDGAAALVLVSGQKAQELGLQVLARIRGYADAAQAPELFTTTPALAIPKAISNAGLESSHVDFFEINEAFSAVALANQKLLGIPSEKINVHGGAVSLGHPLGCSGARILVTLLGVLREKGGKIGVAGVCNGGGGASALVLELA

SEQ ID NO: 11758 - DNA, 1400 bp, Arabidopsis thaliana
gatcgaagatgataaacaaacagtgtagttatcaacaagcttcaaaaatgggggaagaagaagagaaccctaattcgatcgacattcttcccgagctacttgaagaagttctccttagattgcccacgaaatcgatcctcaaatgcagaatcgtctcaaaacaatggaggtcactcctggaatcgaggaggttcgcggagaggcatatgagtcttcaaaacagccgccggagaatcttagctgcttacaactgcgactgcggcggacggaggaagctcctacccgagtcacggtttgaaggggacgaagagattgtctatctgcactgcgacgcctcacgaccctcgatgacttgccaaggtgtgatctgcttccccgagcaagattggatcatcgttttgaacccatcgactagccaactccggcgattcccttccggcttgaaccataactgcagatttagaattggattatggaagactttctctccgggaaactgggtaatggggtttggtagagacaaagtgaatgggaggtataaagtggtgaggatgtcttttactttctggagagttaggcaagaggagcctgtggtggaatgtggtgttcttgatgttgatactggtgaatggcggaagctgagtccacctccttatgtggtcaatgtgggaagcaaatcggtatgcgtgaatggatctatctactggttacacattcagacggtttacagaatactagccttggatcttcacaaagaagagtttcataaagtcccagtgccgcctacgcagatcactgtggacactcagatggtgaaccttgaggaccgtctcgtacttgctataaccagagttagccctgaatggatactagaggtatggggcatggatacatacaaagaaaatggagcaagacttactccataagtttggatcatagagttgtttcctggcgaaggcagaaaaggtggttcacgcccgtggcagtttctaagcaagcgaatcttgtcttctatgacaataagaagaggctattcaaatattatccagtgaaagatgagattcgttgtctctccttagacatttgtgttctgtctccttacgtggaaaacttggtccctcttccgttaaagccaagccatccgcatcctactccgaaaaattcagattttgaaatgaggatatcaagatgccgcttgttttcgacgccaggttcttggatatccaaaattttgaaacggaatgttatgactctagagattttgtttacctctctagcaatagttggttatatatgcttacctctctaggagttatttatcttgtttcaaaatattagttggttatatatgctttcgagatctttctgatatttattctgccaactcatttttcttcctc

SEQ ID NO: 11759 - protein, 307 aa, Arabidopsis thaliana
SKMINKQCSYQQASKMGEEEENPNSIDILPELLEEVLLRLPTKSILKCRIVSKQWRSLLESRRFAERHMSLQNSRRRILAAYNCDCGGRRKLLPESRFEGDEEIVYLHCDASRPSMTCQGVICFPEQDWIIVLNPSTSQLRRFPSGLNHNCRFRIGLWKTFSPGNWVMGFGRDKVNGRYKVVRMSFTFWRVRQEEPVVECGVLDVDTGEWRKLSPPPYVVNVGSKSVCVNGSIYWLHIQTVYRILALDLHKEEFHKVPVPPTQITVDTQMVNLEDRLVLAITRVSPEWILEVWGMDTYKENGARLTP

SEQ ID NO: 11760 - protein, 305 aa, Arabidopsis thaliana
MINKQCSYQQASKMGEEEENPNSIDILPELLEEVLLRLPTKSILKCRIVSKQWRSLLESRRFAERHMSLQNSRRRILAAYNCDCGGRRKLLPESRFEGDEEIVYLHCDASRPSMTCQGVICFPEQDWIIVLNPSTSQLRRFPSGLNHNCRFRIGLWKTFSPGNWVMGFGRDKVNGRYKVVRMSFTFWRVRQEEPVVECGVLDVDTGEWRKLSPPPYVVNVGSKSVCVNGSIYWLHIQTVYRILALDLHKEEFHKVPVPPTQITVDTQMVNLEDRLVLAITRVSPEWILEVWGMDTYKENGARLTP

SEQ ID NO: 11761 - protein, 292 aa, Arabidopsis thaliana
MGEEEENPNSIDILPELLEEVLLRLPTKSILKCRIVSKQWRSLLESRRFAERHMSLQNSRRRILAAYNCDCGGRRKLLPESRFEGDEEIVYLHCDASRPSMTCQGVICFPEQDWIIVLNPSTSQLRRFPSGLNHNCRFRIGLWKTFSPGNWVMGFGRDKVNGRYKVVRMSFTFWRVRQEEPVVECGVLDVDTGEWRKLSPPPYVVNVGSKSVCVNGSIYWLHIQTVYRILALDLHKEEFHKVPVPPTQITVDTQMVNLEDRLVLAITRVSPEWILEVWGMDTYKENGARLTP

SEQ ID NO: 11762 - DNA, 1696 bp, Arabidopsis thaliana
ggttcttcttcttgtccaaaagagaagacaaaacctaaatgtctttaggttacgcagagaaattatccttcattgaagatgttggtcaagtcggcatggctgaattcttcgacccatctcatcttctacaatgcaagattgaagaacttgctaagttgattcaaaagagtaagcatctagtagtctttactggtgcaggcatttcaacttcttgtggtattcctgatttccgaggccccaaaggaatttggacgttacagcgcgagggcaaagatttacctaaagcatctctgccatttcaccgtgcaatgccgagtatgacccatatggctttggttgaattagaaagagctggcattttaaaatttgttatcagtcagaatgtggatggcttacatcttcgatctggaataccaagagagaagctttctgaactgcatggagactcttttatggagatgtgcccatcatgtggagcagagtacctgcgtgatttcgaggtggaaactattggattaaaggagacatcaagaaagtgttctgttgaaaagtgtggagctaaacttaaagatacggtcttggattgggaggatgctttgcctccaaaagaaattgatcctgcggagaagcactgcaaaaaggctgatcttgtactctgtttgggtaccagtttgcagataacccctgcttgcaatttgcctctcaagtgtctcaaaggtggaggcaagatcgtcatagttaatcttcagaaaacaccgaaagacaagaaagcaaatgtagtgattcatggtcttgttgataaggtggttgcaggggtcatggaatcgctcaacatgaagattcctccatatgtcagaattgatcttttccagataatcctaactcaatctataagcggagatcagaggtttattaattggaccctgcgtgttgcgagtgttcatggattgacttctcagttaccattcatcaagtctattgaggtttctttctcagataaccataattacaaagacgcagttctcgataagcagccttttcttatgaaaaggagaacagcacgaaacgaaacttttgatatattctttaaagttaactacagtgacggttgtgactgtgtctccactcaacttagcctcccatttgaattcaagatttcaacggaagagcatgtagagattattgacaaggaggctgtgctacaaagcctgagagagaaagcggtagaagaatccagttgcgggcaaagcggtgtggttgagagaagagtggtttctgaaccgagaagtgaggctgttgtgtatgctacggtgactagtctcaggacttaccatagtcaacaatctctgcttgctaatggagacctgaaatggaagctggaaggttctggaacatcccgtaaacgctctagaaccgggaagcgaaaatcgaaggctctggcagaagaaaccaaggcataggaagaagaaaagaaagcttttggtgtatataaagaaacactagtctaaccggaataggtaatatggaagttattggcgttttgagagctgagtgaattttgtttttggtccacattcggttctcttgaaacaaaagctaaccaggaattgaaagagataatcttggttcgttgtcaaaaaaaaaaaaaaaaaaaaaaaaaaaaaaaaaaaaaaaaaaaaaaaaaaaaaaaaaaaag

SEQ ID NO: 11763 - protein, 473 aa, Arabidopsis thaliana
MSLGYAEKLSFIEDVGQVGMAEFFDPSHLLQCKIEELAKLIQKSKHLVVFTGAGISTSCGIPDFRGPKGIWTLQREGKDLPKASLPFHRAMPSMTHMALVELERAGILKFVISQNVDGLHLRSGIPREKLSELHGDSFMEMCPSCGAEYLRDFEVETIGLKETSRKCSVEKCGAKLKDTVLDWEDALPPKEIDPAEKHCKKADLVLCLGTSLQITPACNLPLKCLKGGGKIVIVNLQKTPKDKKANVVIHGLVDKVVAGVMESLNMKIPPYVRIDLFQIILTQSISGDQRFINWTLRVASVHGLTSQLPFIKSIEVSFSDNHNYKDAVLDKQPFLMKRRTARNETFDIFFKVNYSDGCDCVSTQLSLPFEFKISTEEHVEIIDKEAVLQSLREKAVEESSCGQSGVVERRVVSEPRSEAVVYATVTSLRTYHSQQSLLANGDLKWKLEGSGTSRKRSRTGKRKSKALAEETKA

SEQ ID NO: 11764 - protein, 454 aa, Arabidopsis thaliana
MAEFFDPSHLLQCKIEELAKLIQKSKHLVVFTGAGISTSCGIPDFRGPKGIWTLQREGKDLPKASLPFHRAMPSMTHMALVELERAGILKFVISQNVDGLHLRSGIPREKLSELHGDSFMEMCPSCGAEYLRDFEVETIGLKETSRKCSVEKCGAKLKDTVLDWEDALPPKEIDPAEKHCKKADLVLCLGTSLQITPACNLPLKCLKGGGKIVIVNLQKTPKDKKANVVIHGLVDKVVAGVMESLNMKIPPYVRIDLFQIILTQSISGDQRFINWTLRVASVHGLTSQLPFIKSIEVSFSDNHNYKDAVLDKQPFLMKRRTARNETFDIFFKVNYSDGCDCVSTQLSLPFEFKISTEEHVEIIDKEAVLQSLREKAVEESSCGQSGVVERRVVSEPRSEAVVYATVTSLRTYHSQQSLLANGDLKWKLEGSGTSRKRSRTGKRKSKALAEETKA

SEQ ID NO: 11765 - protein, 383 aa, Arabidopsis thaliana
MPSMTHMALVELERAGILKFVISQNVDGLHLRSGIPREKLSELHGDSFMEMCPSCGAEYLRDFEVETIGLKETSRKCSVEKCGAKLKDTVLDWEDALPPKEIDPAEKHCKKADLVLCLGTSLQITPACNLPLKCLKGGGKIVIVNLQKTPKDKKANVVIHGLVDKVVAGVMESLNMKIPPYVRIDLFQIILTQSISGDQRFINWTLRVASVHGLTSQLPFIKSIEVSFSDNHNYKDAVLDKQPFLMKRRTARNETFDIFFKVNYSDGCDCVSTQLSLPFEFKISTEEHVEIIDKEAVLQSLREKAVEESSCGQSGVVERRVVSEPRSEAVVYATVTSLRTYHSQQSLLANGDLKWKLEGSGTSRKRSRTGKRKSKALAEETKA

SEQ ID NO: 11766 - DNA, 1651 bp, Arabidopsis thaliana
gacaacaatagaagtcttctttttctcaaatctctctgcgatcagatccgttgtgtatacttgcattgaccaatgggaggttgtatctctaagacttcgtggagcaatgaagagcctatgcatcgcccatgtcttgggatgggatgttgtgggagcaaaatggggaagagaggtttttcagaccgcatggtttcacttcataacttggtttctataccgaatcggatcattgggaatggaaagagcaggagttcttgcattttcactcaacagggacgcaagggtattaatcaggacgcaatgattgtgtgggaagattttatgtcgaaagatgttaccttttgcggtgtgtttgatggacatggtcctcatggtcatcttgttgctcgtaaagtgagagattcattgcctgtaaagttgctgtccctcctgaattccattaagtcgaagcaaaatggacccataggaactcgtgcaagcaaatccgatagcctagaagctgagaaagaagaatctactggggaggataaattgaatttcttatgggaggaagctttcttgaaatcattcaatgctatggataaggaactgcgatcccatcctaatctagaatgcttctgcagtggctgcacagctgttacaatcattaagcagggatcaaatctatacatgggtaacattggggattctcgggcgatacttggatctaaagacagcaatgattcgatgattgcagttcagctaacagtagacttaaaacctgacttgccaagggaagctgagaggatcaaacagtgtaaaggtagggtctttgcactgcaagacgagccagaggtgtcacgagtttggctaccatttgataatgctcctggattagccatggctagagctttcggtgatttctgtctgaaagactatggagtgatttcgataccagagttctctcaccgtgttcttacagatagagatcagttcattgtcttggcctcagatggagtctgggatgtgctaagcaacgaagaagtagttgaagttgtagcatcagctacaagccgggcatcagcagctaggctcgtggtggattcagctgtacgcgaatggaaacttaagtacccgacttcgaagatggatgattgtgcagttgtgtgtttgtttctcgacggcagaatggactcagagacatcagataacgaagaacaatgcttctcttcggcaacaaacgcagtagaatcagacgaaagccagggagcagaaccgtgtcttcagagaaatgtcacagtcagatcattatcaacggatcaagaaaacaacagttatggtaaagtgattgcagaggctgataatgcagagaaggagaaaacgagggaaggagaacagaactggtcgggactagaaggtgttactcgagtgaactctcttgttcaacttccgagattccctggagaggaaccaaagacttgagaatgactattgattgttttcagaactgattttgggtcagggaaaaattgtcttctgctcaacataatcttctttattgcttaaagcatatgtaaatgtcttaggtctttagtctatatctctctctctctgcctcaaaatctgtgcttgatgatgaactcttaaaaaatatctaatgagtacttaaaac

SEQ ID NO: 11767 - protein, 462 aa, Arabidopsis thaliana
MGGCISKTSWSNEEPMHRPCLGMGCCGSKMGKRGFSDRMVSLHNLVSIPNRIIGNGKSRSSCIFTQQGRKGINQDAMIVWEDFMSKDVTFCGVFDGHGPHGHLVARKVRDSLPVKLLSLLNSIKSKQNGPIGTRASKSDSLEAEKEESTGEDKLNFLWEEAFLKSFNAMDKELRSHPNLECFCSGCTAVTIIKQGSNLYMGNIGDSRAILGSKDSNDSMIAVQLTVDLKPDLPREAERIKQCKGRVFALQDEPEVSRVWLPFDNAPGLAMARAFGDFCLKDYGVISIPEFSHRVLTDRDQFIVLASDGVWDVLSNEEVVEVVASATSRASAARLVVDSAVREWKLKYPTSKMDDCAVVCLFLDGRMDSETSDNEEQCFSSATNAVESDESQGAEPCLQRNVTVRSLSTDQENNSYGKVIAEADNAEKEKTREGEQNWSGLEGVTRVNSLVQLPRFPGEEPKT

SEQ ID NO: 11768 - protein, 447 aa, Arabidopsis thaliana
MHRPCLGMGCCGSKMGKRGFSDRMVSLHNLVSIPNRIIGNGKSRSSCIFTQQGRKGINQDAMIVWEDFMSKDVTFCGVFDGHGPHGHLVARKVRDSLPVKLLSLLNSIKSKQNGPIGTRASKSDSLEAEKEESTGEDKLNFLWEEAFLKSFNAMDKELRSHPNLECFCSGCTAVTIIKQGSNLYMGNIGDSRAILGSKDSNDSMIAVQLTVDLKPDLPREAERIKQCKGRVFALQDEPEVSRVWLPFDNAPGLAMARAFGDFCLKDYGVISIPEFSHRVLTDRDQFIVLASDGVWDVLSNEEVVEVVASATSRASAARLVVDSAVREWKLKYPTSKMDDCAVVCLFLDGRMDSETSDNEEQCFSSATNAVESDESQGAEPCLQRNVTVRSLSTDQENNSYGKVIAEADNAEKEKTREGEQNWSGLEGVTRVNSLVQLPRFPGEEPKT

SEQ ID NO: 11769 - protein, 440 aa, Arabidopsis thaliana
MGCCGSKMGKRGFSDRMVSLHNLVSIPNRIIGNGKSRSSCIFTQQGRKGINQDAMIVWEDFMSKDVTFCGVFDGHGPHGHLVARKVRDSLPVKLLSLLNSIKSKQNGPIGTRASKSDSLEAEKEESTGEDKLNFLWEEAFLKSFNAMDKELRSHPNLECFCSGCTAVTIIKQGSNLYMGNIGDSRAILGSKDSNDSMIAVQLTVDLKPDLPREAERIKQCKGRVFALQDEPEVSRVWLPFDNAPGLAMARAFGDFCLKDYGVISIPEFSHRVLTDRDQFIVLASDGVWDVLSNEEVVEVVASATSRASAARLVVDSAVREWKLKYPTSKMDDCAVVCLFLDGRMDSETSDNEEQCFSSATNAVESDESQGAEPCLQRNVTVRSLSTDQENNSYGKVIAEADNAEKEKTREGEQNWSGLEGVTRVNSLVQLPRFPGEEPKT

SEQ ID NO: 11770 - DNA, 1242 bp, Arabidopsis thaliana
agacttccactttcgaaacctctcaccgaagctacaatgagtatcatcgcaggctcctacgagagattcatttggggtttcaagcttaaacccacgaagcacgacgccgaatctcaaaccctaactctctcccctctcttctcctacccttcccacatctccccaatcaccaccgtcgcttgttccggtcccgccgctgcttccggcggctccgacgatacaatccacctctacgatcttccctcggcctcttccctcggctctctacttgaccacaatcacacagcttcaatcactgctctctccttctacacaccttcttcactctccttccctcgtaatctaatctccgccgccgcagatggctccgttgctatattcgatactgatccttttgttttgcttaagtcgtttcgtcctcataagaaagcggttaatgatttggcgattcatccttcagggaagcttgctttagctgtttatcgtgatgagttctttgcgatgttgaatttagttagaggaaagaggagtttttgttgtaggttaggtcatgaagctagtcttgtgaaatttgatcctagtggtgaaaggttttacatggttgtgagtaataaagttggagttcatcagtctgaagatgctaagcttcttcttgagctcgagaatccgagccgcaaacgtatactctgcgctactcccggagagagtggaactctgtttacaggtggtgaggatcgagctataacagcttgggatacaaatagtgggaagcttgcttattccatagaagatgctcacccagctcgaatcaaaggtattgttgtgcttaccaggaatgaaagtgacggctccttggaagatccatacttgattggttctgcatcatctgatgggatcatacgtgtttgggacgtgcgaatggcggctaaagaaaatataaaaccattggccgagacaaatactaaatcaaggcttacatgtcttgccggctcagctcttaaatctatgagacggccacagattggaaagcaggaatctcagaaggtagacgaagagcatgagaactcagaataagagctgatttttgagtgtttattgaaaaatttgtgagctgacattaattttgatgcaagttttggtagaatccagtagattcttgtcgaattataactataaacattgtcttaaaccatcgattttgtgaaagaaacaaacaaacaaaaaaatcattctactattatc

SEQ ID NO: 11771 - protein, 357 aa, Arabidopsis thaliana
RLPLSKPLTEATMSIIAGSYERFIWGFKLKPTKHDAESQTLTLSPLFSYPSHISPITTVACSGPAAASGGSDDTIHLYDLPSASSLGSLLDHNHTASITALSFYTPSSLSFPRNLISAAADGSVAIFDTDPFVLLKSFRPHKKAVNDLAIHPSGKLALAVYRDEFFAMLNLVRGKRSFCCRLGHEASLVKFDPSGERFYMVVSNKVGVHQSEDAKLLLELENPSRKRILCATPGESGTLFTGGEDRAITAWDTNSGKLAYSIEDAHPARIKGIVVLTRNESDGSLEDPYLIGSASSDGIIRVWDVRMAAKENIKPLAETNTKSRLTCLAGSALKSMRRPQIGKQESQKVDEEHENSE

SEQ ID NO: 11772 - protein, 345 aa, Arabidopsis thaliana
MSIIAGSYERFIWGFKLKPTKHDAESQTLTLSPLFSYPSHISPITTVACSGPAAASGGSDDTIHLYDLPSASSLGSLLDHNHTASITALSFYTPSSLSFPRNLISAAADGSVAIFDTDPFVLLKSFRPHKKAVNDLAIHPSGKLALAVYRDEFFAMLNLVRGKRSFCCRLGHEASLVKFDPSGERFYMVVSNKVGVHQSEDAKLLLELENPSRKRILCATPGESGTLFTGGEDRAITAWDTNSGKLAYSIEDAHPARIKGIVVLTRNESDGSLEDPYLIGSASSDGIIRVWDVRMAAKENIKPLAETNTKSRLTCLAGSALKSMRRPQIGKQESQKVDEEHENSE

SEQ ID NO: 11773 - protein, 190 aa, Arabidopsis thaliana
MLNLVRGKRSFCCRLGHEASLVKFDPSGERFYMVVSNKVGVHQSEDAKLLLELENPSRKRILCATPGESGTLFTGGEDRAITAWDTNSGKLAYSIEDAHPARIKGIVVLTRNESDGSLEDPYLIGSASSDGIIRVWDVRMAAKENIKPLAETNTKSRLTCLAGSALKSMRRPQIGKQESQKVDEEHENSE

SEQ ID NO: 11774 - DNA, 1490 bp, Arabidopsis thaliana
gaatcccaacaacttcttaacaattcaagtcaatatacgatctaaagtctgtaactttcaattcaaacctgcattcttagtcacggattcatggctactacacccatctttaatgcttcttgcagctttccttcgactagaggaatcgattgcaaaagctatattggtctgagatcgaatgtgagtaaagtgagtgttgcttcttctcgcattgcaactagtcaacgtcgtaatcttgtcgtaagagctagtgaatccggcaatggacatgctaagaagcttggaatgagtgatgctgagtgtgaagctgccgttgctgctggaaatgttcctgaagctcctccggttccacctaaaccggctgctccggttgggacaccgataattaagcctcttaatctaagccgacgcccacgtcgtaaccgcgcttcccctgttactagagctgcctttcaggaaactgatatctcccctgcaaattttgtatatccacttttcattcatgaaggtgaggaagacacgcctattggagctatgcccggttgctacagacttggctggaggcatggtcttgtacaagaggttgcaaaggctcgagctgttggggtaaacagtatcgttttgttccctaaagttcctgaggctttgaagaattcaacaggggatgaggcatacaatgacaatggtttggtgcctcgaacaattcgtcttcttaaagacaaatatcctgatcttattatctacactgatgtggctttggatccttactcatctgatggtcacgatgggatagttagagaggatggtgtaattatgaatgacgaaacagtacaccagctctgtaaacaagctgtttcccaggctcgagctggtgctgacgtagttagtccgagtgacatgatggatgggcgagtaggtgcaatccgctcagctcttgatgctgaaggatttcaaaacgtctccatcatgtcatacacagccaagtatgcaagttcgttttacggtcctttccgtgaagccctggactcaaacccgcgtttcggagacaagaaaacgtatcagatgaacccagcaaactacagagaggcattgattgaggcacgtgaagacgaggctgaaggagcagacattctcctggtgaagccaggtcttccatatttggacatcatacggcttttgagggacaagtctccattaccgattgctgcataccaagtttctggagagtactcgatgatcaaagcagggggagtcctgaaaatgatcgatgaagagaaagtgatgatggagtcactgatgtgtttacgcagagctggagcggacatcatcctcacgtacttcgctcttcaagctgctacttgtttgtgcggcgagaagcggtagaatagacaacaagactgtgttttaaactgtttgagtatatctgttttaaatcatttgagactattgtgattttgccttgttctgatcccattcttttagtgtcgtgc

SEQ ID NO: 11775 - protein, 430 aa, Arabidopsis thaliana
MATTPIFNASCSFPSTRGIDCKSYIGLRSNVSKVSVASSRIATSQRRNLVVRASESGNGHAKKLGMSDAECEAAVAAGNVPEAPPVPPKPAAPVGTPIIKPLNLSRRPRRNRASPVTRAAFQETDISPANFVYPLFIHEGEEDTPIGAMPGCYRLGWRHGLVQEVAKARAVGVNSIVLFPKVPEALKNSTGDEAYNDNGLVPRTIRLLKDKYPDLIIYTDVALDPYSSDGHDGIVREDGVIMNDETVHQLCKQAVSQARAGADVVSPSDMMDGRVGAIRSALDAEGFQNVSIMSYTAKYASSFYGPFREALDSNPRFGDKKTYQMNPANYREALIEAREDEAEGADILLVKPGLPYLDIIRLLRDKSPLPIAAYQVSGEYSMIKAGGVLKMIDEEKVMMESLMCLRRAGADIILTYFALQAATCLCGEKR

SEQ ID NO: 11776 - protein, 365 aa, Arabidopsis thaliana
MSDAECEAAVAAGNVPEAPPVPPKPAAPVGTPIIKPLNLSRRPRRNRASPVTRAAFQETDISPANFVYPLFIHEGEEDTPIGAMPGCYRLGWRHGLVQEVAKARAVGVNSIVLFPKVPEALKNSTGDEAYNDNGLVPRTIRLLKDKYPDLIIYTDVALDPYSSDGHDGIVREDGVIMNDETVHQLCKQAVSQARAGADVVSPSDMMDGRVGAIRSALDAEGFQNVSIMSYTAKYASSFYGPFREALDSNPRFGDKKTYQMNPANYREALIEAREDEAEGADILLVKPGLPYLDIIRLLRDKSPLPIAAYQVSGEYSMIKAGGVLKMIDEEKVMMESLMCLRRAGADIILTYFALQAATCLCGEKR

SEQ ID NO: 11777 - protein, 282 aa, Arabidopsis thaliana
MPGCYRLGWRHGLVQEVAKARAVGVNSIVLFPKVPEALKNSTGDEAYNDNGLVPRTIRLLKDKYPDLIIYTDVALDPYSSDGHDGIVREDGVIMNDETVHQLCKQAVSQARAGADVVSPSDMMDGRVGAIRSALDAEGFQNVSIMSYTAKYASSFYGPFREALDSNPRFGDKKTYQMNPANYREALIEAREDEAEGADILLVKPGLPYLDIIRLLRDKSPLPIAAYQVSGEYSMIKAGGVLKMIDEEKVMMESLMCLRRAGADIILTYFALQAATCLCGEKR

SEQ ID NO: 11778 - DNA, 1548 bp, Arabidopsis thaliana
ggtaaagttttttttcccaaatagtactttttgttttgtttggccttcttatagaaagaagaactcaaagcacagagagaagatgagcgaagaacaaccacacgccaatctagcggttcccgcgtttaaaactgagaaagatcccgtaacgcaaacgcaaaatggtcaaagtagcgtttggcgtttcggtggaagtgataaggcagcgaaagcatccaccgtaacgcttagaggtgtcatctacatgatcttcgacaactgcagcaaagacgtcaataagaccattttacccctcggccacggtgaccttccgtctacccttgcttccgtacctgtatcgaagctgaagacgccgtcgtcgacgtccttcgctccggcaaaggcaattcttacggtcccggagctgggattctccccgcaagacgagccgttgctgattatatgaaccgagatcttccgcacaagttaacgcctgaagatatttttctgaccgctggatgcaaccaagggatagagatcgtgttcgaatcgttggctcgaccaaacgcaaacatcttgctcccacgtcctggcttccctcattacgacgctcgtgctgcttacagtggtctcgaggttcgcaagtttgatcttcttcccgagaaagaatgggagattgatcttgaaggtatcgaagccattgcagacgagaaaactgtggctatggttgtaattaaccccaacaatccctgtggaaatgtctactctcacgaccatctcaaaaaggttgcagagacggctaggaagctcgggataatggtgatctcagacgaagtatatgaccgaactatattcggagacaatccatttgttccaatggggaagtttgcttcgatagtccctgtattgacactagcaggcatatctaagggatgggttgttcctggatggaaaattggctggatcgccttgaatgatcccgagggcgttttcgagaccaccaaggtgttacaatccatcaaacagaatcttgacgtaactcctgaccctgccacaataattcaggctgcacttccagcgatcctggagaaagcggacaaaaacttctttgcaagaagaacaagatactcaaacataatgttgatttggtgtgtgataggctcaaggacatcccctgtgtcgtctgtcccaagaaacctgagtcttgcacttacttattgacaaagttggagctgtcactgatggataatatcaaggacgatatagatttttgcgtaaaactggccagagaggagaatctcgtgtttctaccaggggatgctctgggtttgaagaactggatgaggataaccatcggagtcgaagctcatatgcttgaggatgcacttgagagactgaagggtttctgtacacgtcatgccaagaagacagagacagaaactgagtcacttcaagctttgaaactgagtgataataatctcgaaatgtaaaacagaagaggatgtgtgtgcccaaaagaatattcttatgatagataattttgattcttgcttttccatttgatttccc

SEQ ID NO: 11779 - protein, 252 aa, Arabidopsis thaliana
MNRDLPHKLTPEDIFLTAGCNQGIEIVFESLARPNANILLPRPGFPHYDARAAYSGLEVRKFDLLPEKEWEIDLEGIEAIADEKTVAMVVINPNNPCGNVYSHDHLKKVAETARKLGIMVISDEVYDRTIFGDNPFVPMGKFASIVPVLTLAGISKGWVVPGWKIGWIALNDPEGVFETTKVLQSIKQNLDVTPDPATIIQAALPAILEKADKNFFARRTRYSNIMLIWCVIGSRTSPVSSVPRNLSLALTY

SEQ ID NO: 11780 - protein, 165 aa, Arabidopsis thaliana
MVVINPNNPCGNVYSHDHLKKVAETARKLGIMVISDEVYDRTIFGDNPFVPMGKFASIVPVLTLAGISKGWVVPGWKIGWIALNDPEGVFETTKVLQSIKQNLDVTPDPATIIQAALPAILEKADKNFFARRTRYSNIMLIWCVIGSRTSPVSSVPRNLSLALTY

SEQ ID NO: 11781 - protein, 147 aa, Arabidopsis thaliana
VKFFFPNSTFCFVWPSYRKKNSKHREKMSEEQPHANLAVPAFKTEKDPVTQTQNGQSSVWRFGGSDKAAKASTVTLRGVIYMIFDNCSKDVNKTILPLGHGDLPSTLASVPVSKLKTPSSTSFAPAKAILTVPELGFSPQDEPLLII

SEQ ID NO: 11782 - DNA, 3452 bp, Arabidopsis thaliana
ttatgccatggagcaagtctctcttcactttggcttcctcttgatctagtatttgaagatgcaatggatggatatcaagtaaacccaactagtgcgattgaaatcattaccggtctagctaaaacacttaaagaaattaatgggagcacttggcatgacactttcttggggctttggatagcagctctccgacttgttcaaagggaaagggatcctattgagggacctattcctcgactggacacaaggctgtgcatgtcattatgtattgtgcctcttgtggtcgcaaaccttattgaagaggggaaatacgaatctgtcatggaaaagctgcgagatgaccttgttacaagtttgcaggtcctcggtgatttccctggattgctggctcctcccaaatgcgttgtttctgctgccaacaaggctgccacaaaggcaatcttgtttttgtctggtggcaatgttggaaagtcatgttttgatgtcataaacatgaaggacatgcctgtcaactgctctggaaacatgcgccacctgatagtcgaggcttgtattgcaagaaacatactggatatgtcggcttattcgtggcctggctatgttaatggccgaatcaaccaaatacctcagagtctgccgaatgaagtaccctgctggtcatcatttgtgaaaggggctccactaaatgccgcaatggtgaatacattagtttcagttcctgcttcaaggtagaatgagttattatcttctttttgtttctttttcctctattagctccacactacttcatccacatagtcttccctccaaatcatacagtcagtggtaatttaaaattactatacaaaattaagctacggagtttcaaagtcgtaacctaaggaaaccattgccacaatgagaatagtggttgcattctagtttgacttaagttctgcttcttcttcagttattcatttttgtttcttagccaggtaatgctctttttttaatttaccgagagtaaagcaactgaaatacctcatggatttgatggaagcttagcagagctcgagaaactatttgaggttgcagtcaaaggatcggatgacgagaagatatctgctgctacagttctttgcggggcatctctcacacggggttggaacatacaggaacacactgttgaatatcttacaagattactatccccacccgttccagcagattattccagggctgaaaatcatttgattggttatgcctgcatgttgaatgttgttattgttgggataggatctgttgacagcattcaaattttctctttacatggcatggttccgcaacttgcttgctcactaatgccaatttgtgaagagtttggatcttacaccccgagtgtatcatggactcttccttctggagaagcaatatcagcatattctgttttctcaaatgcattcactcttcttttaaagctatggagattcaatcatcctcctattgagcatggtgtgggagatgttcccacagttggctcccaactcactcctgaacatcttctttcagtgcgtaattcttatcttgtttcatcggagatccttgatagagaccgaaacagaaagagactttcagaagttgcaagggcagcatcttgccagcccgtgtttgtggactcgttccccaagctgaaagtctggtataggcagcaccaaagatgcatagcagccacattatctggacttacacatggatctcccgttcatcagacagttgaagcacttctcaacatgacgttcggaaaggtcagaggcagtcagactttaaatccagtaaattcgggcacaagcagttcatcaggagctgcaagtgaagatagcaatataagacctgagtttcctgcttgggatatcctcaaagccgttccatatgttgtcgatgctgctttaaccgcttgtactcatggaaggctttcgcctcgtcagttagctacagggctgaaagacttagcagattttctcccggcatcattagcaacgatagtaagctatttctcagctgaggtgagtagaggtgtttggaagccagtattcatgaacggcgtggattggccaagtccagctacaaatctatccactgttgaggaatatataacgaaaattcttgcaacaacaggcgtcgatatccctagccttgctccaggagggagttctccggcaacgcttcctttacctctagccgcatttgttagtctaaccattacttacaaaattgacaaagcctcagagcggtttctcaacctggctggcccagctctggagtgcttggctgcaggctgcccttggccttgcatgcccattgtagcttcattatggacccaaaaggcgaaacgttggtttgacttccttgttttctctgcctctcgcaccgtcttccttcacaaccaagacgctgtgattcagctcctcagaaactgcttcagtgccactctgggtttgaatgctgcccccatgtcaaatgatggtggcgttggagctcttcttggccatggattcggctctcatttctatggagggatctctcctgtagcaccagggattctttatctccgtatgtatcgtgctctcagagatactgtctccgtatcggaagagattctctctctgctgatacattcggtggaggatatagcccagaacaggctctcaaaggagaagctggaaaagctgaagacagtgaagaacggatcaagatacggccaaagttctctagcaacagcaatgactcaagtgaagcttgctgcttcgctgagtgcctcgttggtatggctaaccggtggcttaggtgtggtccacgttctcatcaaagaaacgatcccatcttggtttctatcaactgacaaatcagaccgagaacaaggaccatcagatctagttgcagagctaagaggtcatgcccttgcctactttgtggtcctatgtggagcacttacttggggcgtggattcaagatcatctgcatccaaacgccgccgccaagcaatcttgggaagccacttggagttcatcgcgagtgccttagatgggaaaatatcagtgggatgtgaaacagcaacttggcgaacatatatttccggtttggtgagtctaatggtgagctgtttgccgctctgggtgacagagatcgatacagaagtgttaaagagtctaagcaatggactaagaaaatggggaaaagacgagctagcgattgtattactctccttgggaggtctcaaaacaatggattacgcagctgatttcatcattcatttgcgttcatagcttcttaaaaagttttgatcttctccagatttcagatagttgtttgatagatgtttttcttctagtgtttgcttccttgttgtgacttgtgttctctagctccagtgttgtgtgatgaaatcaatcacgcatatgtatagagagaaacag

SEQ ID NO: 11783 - protein, 684 aa, Arabidopsis thaliana
MLNVVIVGIGSVDSIQIFSLHGMVPQLACSLMPICEEFGSYTPSVSWTLPSGEAISAYSVFSNAFTLLLKLWRFNHPPIEHGVGDVPTVGSQLTPEHLLSVRNSYLVSSEILDRDRNRKRLSEVARAASCQPVFVDSFPKLKVWYRQHQRCIAATLSGLTHGSPVHQTVEALLNMTFGKVRGSQTLNPVNSGTSSSSGAASEDSNIRPEFPAWDILKAVPYVVDAALTACTHGRLSPRQLATGLKDLADFLPASLATIVSYFSAEVSRGVWKPVFMNGVDWPSPATNLSTVEEYITKILATTGVDIPSLAPGGSSPATLPLPLAAFVSLTITYKIDKASERFLNLAGPALECLAAGCPWPCMPIVASLWTQKAKRWFDFLVFSASRTVFLHNQDAVIQLLRNCFSATLGLNAAPMSNDGGVGALLGHGFGSHFYGGISPVAPGILYLRMYRALRDTVSVSEEILSLLIHSVEDIAQNRLSKEKLEKLKTVKNGSRYGQSSLATAMTQVKLAASLSASLVWLTGGLGVVHVLIKETIPSWFLSTDKSDREQGPSDLVAELRGHALAYFVVLCGALTWGVDSRSSASKRRRQAILGSHLEFIASALDGKISVGCETATWRTYISGLVSLMVSCLPLWVTEIDTEVLKSLSNGLRKWGKDELAIVLLSLGGLKTMDYAADFIIHLRS

SEQ ID NO: 11784 - protein, 662 aa, Arabidopsis thaliana
MVPQLACSLMPICEEFGSYTPSVSWTLPSGEAISAYSVFSNAFTLLLKLWRFNHPPIEHGVGDVPTVGSQLTPEHLLSVRNSYLVSSEILDRDRNRKRLSEVARAASCQPVFVDSFPKLKVWYRQHQRCIAATLSGLTHGSPVHQTVEALLNMTFGKVRGSQTLNPVNSGTSSSSGAASEDSNIRPEFPAWDILKAVPYVVDAALTACTHGRLSPRQLATGLKDLADFLPASLATIVSYFSAEVSRGVWKPVFMNGVDWPSPATNLSTVEEYITKILATTGVDIPSLAPGGSSPATLPLPLAAFVSLTITYKIDKASERFLNLAGPALECLAAGCPWPCMPIVASLWTQKAKRWFDFLVFSASRTVFLHNQDAVIQLLRNCFSATLGLNAAPMSNDGGVGALLGHGFGSHFYGGISPVAPGILYLRMYRALRDTVSVSEEILSLLIHSVEDIAQNRLSKEKLEKLKTVKNGSRYGQSSLATAMTQVKLAASLSASLVWLTGGLGVVHVLIKETIPSWFLSTDKSDREQGPSDLVAELRGHALAYFVVLCGALTWGVDSRSSASKRRRQAILGSHLEFIASALDGKISVGCETATWRTYISGLVSLMVSCLPLWVTEIDTEVLKSLSNGLRKWGKDELAIVLLSLGGLKTMDYAADFIIHLRS

SEQ ID NO: 11785 - protein, 653 aa, Arabidopsis thaliana
MPICEEFGSYTPSVSWTLPSGEAISAYSVFSNAFTLLLKLWRFNHPPIEHGVGDVPTVGSQLTPEHLLSVRNSYLVSSEILDRDRNRKRLSEVARAASCQPVFVDSFPKLKVWYRQHQRCIAATLSGLTHGSPVHQTVEALLNMTFGKVRGSQTLNPVNSGTSSSSGAASEDSNIRPEFPAWDILKAVPYVVDAALTACTHGRLSPRQLATGLKDLADFLPASLATIVSYFSAEVSRGVWKPVFMNGVDWPSPATNLSTVEEYITKILATTGVDIPSLAPGGSSPATLPLPLAAFVSLTITYKIDKASERFLNLAGPALECLAAGCPWPCMPIVASLWTQKAKRWFDFLVFSASRTVFLHNQDAVIQLLRNCFSATLGLNAAPMSNDGGVGALLGHGFGSHFYGGISPVAPGILYLRMYRALRDTVSVSEEILSLLIHSVEDIAQNRLSKEKLEKLKTVKNGSRYGQSSLATAMTQVKLAASLSASLVWLTGGLGVVHVLIKETIPSWFLSTDKSDREQGPSDLVAELRGHALAYFVVLCGALTWGVDSRSSASKRRRQAILGSHLEFIASALDGKISVGCETATWRTYISGLVSLMVSCLPLWVTEIDTEVLKSLSNGLRKWGKDELAIVLLSLGGLKTMDYAADFIIHLRS

SEQ ID NO: 11786 - DNA, 1725 bp, Arabidopsis thaliana
gaacaaaaaacaaatcaagcaaatttatttatcttggtcaagagacattgattctcttaaatttctgcaaaattaagctcagagattcacaccgcatctgaaattgtgctcagaggggttccaaatattaccagtcgttaggaagcaatcacgagttgttttaggaattagtgaacgtgataatggctagcaatgagatggaaaaatcgagtaaagagaaggaacctaaaacacctcctccttcttctactgcccctccctcttcacaggaaccttcatcggctgtgagtgctggcatggctactccagattggtctggttttcaggcatattctcctatgccgccgcctcatggttatgtggcatctagtccccaacctcacccttatatgtggggagttcagcatatgatgcctccttatggaactccgcctcatccttatgttgcaatgtatcccccaggtggcatgtacgcacatccttcaatgcctccgggttcttatccctatagcccttatgctatgccttctccaaatggaatgactgaagtttctggcaatactacaggcggcactgatggtgatgctaaacaatctgaagtgaaggaaaaattgcccatcaaaagatcaagaggaagcttaggaagtttgaacatgattacaggaaagaacaatgaacctgggaaaaactcaggagcatcagctaatggagcttactccaaaagtggggagagtgcttctgatggttcaagtgaaggaagtgatgggaactctcaaaatgattcgggatctggactagatggaaaggatgctgaagcagcatcagagaatggtggttctgccaatggtccgcaaaatggaagtgctggtacacctattctaccggtgagccagaccgtaccaatcatgccaatgacagctgcaggtgttcctggcccaccaacaaatttaaatattgggatggattactggggtgctccaacttcagctggtatccctggaatgcatgggaaagtatctacaccagttcctggagttgttgctccaggctcgcgagatggtggccattcacaaccctggttacaggacgatagagaacttaagcgacagagacggaagcagtccaatagggagtctgctcgaagatcaaggttgcgtaaacaggccgaatgtgatgagctggcccaacgcgctgaggtgttgaacgaagaaaacacaaatctcagagcagaaatcaacaagctcaaaagccaatgcgaagagcttaccaccgagaacacctctctcaaggaccaactttcattattacctccacttgaaggcataagcatggacaatgaccaccaagaaccagacaccaatcaaacaggtgccgcagagagaaaggttgattcatacaaagactcaacgtgagaagacatagagcaaaaccaattcctaacacaggtataaaaaagtagcagcagcagcaacaacaacactcggcggttctttgctaacagatggtttgtaggattttaggcatcagagatcgattggttccgaatagtttattgagggttgttggtccagtgtatgtgtgtgtaagttacgaaattagatattgggagaaaaaattccctcgtttaatgttttactttgcctttgctctacttgcagaagcgaatctgaggcaatgtgcttatctgtatcaaaattgttaccctttttattagattttcctatt

SEQ ID NO: 11787 - protein, 409 aa, Arabidopsis thaliana
MASNEMEKSSKEKEPKTPPPSSTAPPSSQEPSSAVSAGMATPDWSGFQAYSPMPPPHGYVASSPQPHPYMWGVQHMMPPYGTPPHPYVAMYPPGGMYAHPSMPPGSYPYSPYAMPSPNGMTEVSGNTTGGTDGDAKQSEVKEKLPIKRSRGSLGSLNMITGKNNEPGKNSGASANGAYSKSGESASDGSSEGSDGNSQNDSGSGLDGKDAEAASENGGSANGPQNGSAGTPILPVSQTVPIMPMTAAGVPGPPTNLNIGMDYWGAPTSAGIPGMHGKVSTPVPGVVAPGSRDGGHSQPWLQDDRELKRQRRKQSNRESARRSRLRKQAECDELAQRAEVLNEENTNLRAEINKLKSQCEELTTENTSLKDQLSLLPPLEGISMDNDHQEPDTNQTGAAERKVDSYKDST

SEQ ID NO: 11788 - protein, 404 aa, Arabidopsis thaliana
MEKSSKEKEPKTPPPSSTAPPSSQEPSSAVSAGMATPDWSGFQAYSPMPPPHGYVASSPQPHPYMWGVQHMMPPYGTPPHPYVAMYPPGGMYAHPSMPPGSYPYSPYAMPSPNGMTEVSGNTTGGTDGDAKQSEVKEKLPIKRSRGSLGSLNMITGKNNEPGKNSGASANGAYSKSGESASDGSSEGSDGNSQNDSGSGLDGKDAEAASENGGSANGPQNGSAGTPILPVSQTVPIMPMTAAGVPGPPTNLNIGMDYWGAPTSAGIPGMHGKVSTPVPGVVAPGSRDGGHSQPWLQDDRELKRQRRKQSNRESARRSRLRKQAECDELAQRAEVLNEENTNLRAEINKLKSQCEELTTENTSLKDQLSLLPPLEGISMDNDHQEPDTNQTGAAERKVDSYKDST

SEQ ID NO: 11789 - protein, 371 aa, Arabidopsis thaliana
MATPDWSGFQAYSPMPPPHGYVASSPQPHPYMWGVQHMMPPYGTPPHPYVAMYPPGGMYAHPSMPPGSYPYSPYAMPSPNGMTEVSGNTTGGTDGDAKQSEVKEKLPIKRSRGSLGSLNMITGKNNEPGKNSGASANGAYSKSGESASDGSSEGSDGNSQNDSGSGLDGKDAEAASENGGSANGPQNGSAGTPILPVSQTVPIMPMTAAGVPGPPTNLNIGMDYWGAPTSAGIPGMHGKVSTPVPGVVAPGSRDGGHSQPWLQDDRELKRQRRKQSNRESARRSRLRKQAECDELAQRAEVLNEENTNLRAEINKLKSQCEELTTENTSLKDQLSLLPPLEGISMDNDHQEPDTNQTGAAERKVDSYKDST

SEQ ID NO: 11790 - DNA, 1524 bp, Arabidopsis thaliana
gatccattacaaggccacattaacccaatgatccaactcgctaaacgcttatccaaaaagggcatcaccagcacactcatcatcgcctccaaagaccaccgtgaaccttacacctccgacgactactccatcaccgtccacaccatccacgacggtttctttccacatgaacaccctcacgccaagttcgtagatcttgaccgtttccacaactctacttctcgaagcctgaccgatttcatctctagtgcgaagttgtcggacaatcctccaaaagctctgatctatgatccatttatgccctttgcattggacatagccaaggacttggatctatacgtagtggcatatttcactcaaccatggttggctagtcttgtttactaccatatcaacgaaggcacctacgatgttcccgttgatagacacgagaacccaacacttgcatcgtttcctggtttcccattgttaagccaagatgatctgccttcgttcgcctgcgaaaaagggtcgtaccctcttctacacgagtttgtggttaggcaattctctaatttattgcaagctgattgcattctctgcaacacttttgatcaacttgaaccaaaggtagtgaaatggatgaatgatcaatggccggtgaagaacattggaccggtggttccatcgaagttcttggataaccggttgccagaagacaaagattacgaactcgagaactccaagacagagccagacgagtctgttttgaagtggttgggaaacaggccggcgaagtcggtggtttacgtggcgtttgggacattggtggctttgagcgaaaaacagatgaaggaaattgcaatggcgattagccaaaccggatatcacttcttgtggtctgttagagaatccgagagaagcaaactaccctctggttttatcgaagaggcagaggagaaagactctggacttgtggctaagtgggttcctcagctagaggttttagcacatgaatcaatcgggtgtttcgtgtcacactgtggatggaactcgacattggaggcactatgcttaggggttccaatggtgggcgtgcctcagtggactgatcagcccacaaatgctaagtttatagaggatgtgtggaagattggggttagagtgaggaccgatggagaagggctttcgagtaaagaagagattgcgagatgcattgttgaggtcatggaaggagagagagggaaagagataaggaagaatgttgagaagcttaaggtgttggctcgcgaagctatctctgaaggaggtagttccgacaagaagattgatgagtttgttgctcttttgacttaacaatttgaaactgagatgtcatcagtttgttagttgattacctaataacggcttctttgtcatctaaatttgaattatcctgttggttccattggttgtcccctgcgaacaaatccatatatgaactctgtattaaaaaacggagatgtttgaatttgaagcataacaagaataaagagctttcttgat

SEQ ID NO: 11791 - protein, 444 aa, Arabidopsis thaliana
DPLQGHINPMIQLAKRLSKKGITSTLIIASKDHREPYTSDDYSITVHTIHDGFFPHEHPHAKFVDLDRFHNSTSRSLTDFISSAKLSDNPPKALIYDPFMPFALDIAKDLDLYVVAYFTQPWLASLVYYHINEGTYDVPVDRHENPTLASFPGFPLLSQDDLPSFACEKGSYPLLHEFVVRQFSNLLQADCILCNTFDQLEPKVVKWMNDQWPVKNIGPVVPSKFLDNRLPEDKDYELENSKTEPDESVLKWLGNRPAKSVVYVAFGTLVALSEKQMKEIAMAISQTGYHFLWSVRESERSKLPSGFIEEAEEKDSGLVAKWVPQLEVLAHESIGCFVSHCGWNSTLEALCLGVPMVGVPQWTDQPTNAKFIEDVWKIGVRVRTDGEGLSSKEEIARCIVEVMEGERGKEIRKNVEKLKVLAREAISEGGSSDKKIDEFVALLT

SEQ ID NO: 11792 - protein, 435 aa, Arabidopsis thaliana
MIQLAKRLSKKGITSTLIIASKDHREPYTSDDYSITVHTIHDGFFPHEHPHAKFVDLDRFHNSTSRSLTDFISSAKLSDNPPKALIYDPFMPFALDIAKDLDLYVVAYFTQPWLASLVYYHINEGTYDVPVDRHENPTLASFPGFPLLSQDDLPSFACEKGSYPLLHEFVVRQFSNLLQADCILCNTFDQLEPKVVKWMNDQWPVKNIGPVVPSKFLDNRLPEDKDYELENSKTEPDESVLKWLGNRPAKSVVYVAFGTLVALSEKQMKEIAMAISQTGYHFLWSVRESERSKLPSGFIEEAEEKDSGLVAKWVPQLEVLAHESIGCFVSHCGWNSTLEALCLGVPMVGVPQWTDQPTNAKFIEDVWKIGVRVRTDGEGLSSKEEIARCIVEVMEGERGKEIRKNVEKLKVLAREAISEGGSSDKKIDEFVALLT

SEQ ID NO: 11793 - protein, 345 aa, Arabidopsis thaliana
MPFALDIAKDLDLYVVAYFTQPWLASLVYYHINEGTYDVPVDRHENPTLASFPGFPLLSQDDLPSFACEKGSYPLLHEFVVRQFSNLLQADCILCNTFDQLEPKVVKWMNDQWPVKNIGPVVPSKFLDNRLPEDKDYELENSKTEPDESVLKWLGNRPAKSVVYVAFGTLVALSEKQMKEIAMAISQTGYHFLWSVRESERSKLPSGFIEEAEEKDSGLVAKWVPQLEVLAHESIGCFVSHCGWNSTLEALCLGVPMVGVPQWTDQPTNAKFIEDVWKIGVRVRTDGEGLSSKEEIARCIVEVMEGERGKEIRKNVEKLKVLAREAISEGGSSDKKIDEFVALLT

SEQ ID NO: 11794 - DNA, 2066 bp, Arabidopsis thaliana
gatcttcatcttcgtcatcgtttccaatttccgatataatctgatcaaatcatcgccgacgatcaccgattcagcgatgcaacagggagattacaattcgtactatcaccaccaatactctcaatttcaaaatcctactccgaatcctaatcctaatcccaatccttctccgccggcgccggcaaccgtagctggtccgaccgatcttactcgaaacacgtacgcatcagcgccaccgttcaccggcggttacggttccgccgattactctaactattcacagaattacactccttacgggcaaaactctgagcatgtccctccttcagctccttccttcacttcaccatcacaacctcctccttctccgccggcgacatcactaaaccctaattcttattcaaccttcaaccaaccaccacctccacccacgattcatccacaacctctatcctcttatggatcatttgattctactgctccgtatcagcaacctacctcgcaacatatgtattactcaccgtatgatcagcatcaaacctctggctattcatctgcgcctcctccttcatctgcgcctgcgccgaatcctaatcccgcgccttattcatcatccttgtactctgcacctccttatagtagcggaggatcatccatacctccttcgtatgagaaaccgtcagtgaaatttgatcaatctggttatgacggttataaccggagcagatcggatttaggatctgatctatacggaaaacgatctgatagcggagaatatcctgcttttgaagattcctatggcgatggcgtttatgcttatcaaggaggcaaagttgagccatacggttctcgtggaactgcgccgaaatcatcgaattcgacattgttcgatgattatggacgatccattagcttttcttcttcagggagagattcttctgttagctcgaattctgctaagatcgtgagagctgttcctaaggctgatgtgcaggaagattccactggtggtgtgcagaaatttcgtgtcaaattgttggctgagacttatggacaaaccacaacagatgttctttgtcagattggtttggatggtcttcgtatgcttgatccaagtactagccgaactttgagaatatatcctcttgagaacatcacaagatgcgaaaaactagattcgtctattctggctttctggtctaagactccggtagacattgaagctaaacgtatcagattgcaatcaaatagttacaccaccaacacccttctggacactgtgacggctgcaatgtttcaggccaaggagatcgggggaagtagcaggcctcccacctctggaaaactggttgaacaaactgctgagaagaaaaaaggattgggtgattggatgaacattataaagcctgttaatgaggagaaagatcattgggtacctgatgaagctgtttctaagtgcacatcatgtggttcagatttcggtgcatttatacgaaggcaccactgcaggaattgtggtgaagtcttctgtgacaagtgtactcaaggcaggattgctctcactgctgaggataatgctcctcaagtccgtgtttgtgaccggtgcatggcagaagtgtcacaaaggttgagtaatgccaaggaaaccactggcaggaatgtgagcctgcagagccatgaagaccttgctagaaagttacaggaggaaatggagagaaaccgcaagtcttcgtctggtttgagggaaggatctgggaggcggatgaaagaagtagcttgtccaaaatgcactgtgcacttacaggtccaggttccagtctcaggatcagagaccattgagtgcggagtttgccaaaaccctttcctcgttagcgcgcattgatcttcctacccgcttttttgcttgacatatatatcaattataagtatgagatttggttcatttggttattgaattgggtttgatcacatcaaaataagttcttgtcctgtctcatgtggatggtgtttcccctttgtgtgtatatgaaagtcttttgagtgatgaacatcttatacttttcatg

SEQ ID NO: 11795 - protein, 626 aa, Arabidopsis thaliana
IFIFVIVSNFRYNLIKSSPTITDSAMQQGDYNSYYHHQYSQFQNPTPNPNPNPNPSPPAPATVAGPTDLTRNTYASAPPFTGGYGSADYSNYSQNYTPYGQNSEHVPPSAPSFTSPSQPPPSPPATSLNPNSYSTFNQPPPPPTIHPQPLSSYGSFDSTAPYQQPTSQHMYYSPYDQHQTSGYSSAPPPSSAPAPNPNPAPYSSSLYSAPPYSSGGSSIPPSYEKPSVKFDQSGYDGYNRSRSDLGSDLYGKRSDSGEYPAFEDSYGDGVYAYQGGKVEPYGSRGTAPKSSNSTLFDDYGRSISFSSSGRDSSVSSNSAKIVRAVPKADVQEDSTGGVQKFRVKLLAETYGQTTTDVLCQIGLDGLRMLDPSTSRTLRIYPLENITRCEKLDSSILAFWSKTPVDIEAKRIRLQSNSYTTNTLLDTVTAAMFQAKEIGGSSRPPTSGKLVEQTAEKKKGLGDWMNIIKPVNEEKDHWVPDEAVSKCTSCGSDFGAFIRRHHCRNCGEVFCDKCTQGRIALTAEDNAPQVRVCDRCMAEVSQRLSNAKETTGRNVSLQSHEDLARKLQEEMERNRKSSSGLREGSGRRMKEVACPKCTVHLQVQVPVSGSETIECGVCQNPFLVSAH

SEQ ID NO: 11796 - protein, 601 aa, Arabidopsis thaliana
MQQGDYNSYYHHQYSQFQNPTPNPNPNPNPSPPAPATVAGPTDLTRNTYASAPPFTGGYGSADYSNYSQNYTPYGQNSEHVPPSAPSFTSPSQPPPSPPATSLNPNSYSTFNQPPPPPTIHPQPLSSYGSFDSTAPYQQPTSQHMYYSPYDQHQTSGYSSAPPPSSAPAPNPNPAPYSSSLYSAPPYSSGGSSIPPSYEKPSVKFDQSGYDGYNRSRSDLGSDLYGKRSDSGEYPAFEDSYGDGVYAYQGGKVEPYGSRGTAPKSSNSTLFDDYGRSISFSSSGRDSSVSSNSAKIVRAVPKADVQEDSTGGVQKFRVKLLAETYGQTTTDVLCQIGLDGLRMLDPSTSRTLRIYPLENITRCEKLDSSILAFWSKTPVDIEAKRIRLQSNSYTTNTLLDTVTAAMFQAKEIGGSSRPPTSGKLVEQTAEKKKGLGDWMNIIKPVNEEKDHWVPDEAVSKCTSCGSDFGAFIRRHHCRNCGEVFCDKCTQGRIALTAEDNAPQVRVCDRCMAEVSQRLSNAKETTGRNVSLQSHEDLARKLQEEMERNRKSSSGLREGSGRRMKEVACPKCTVHLQVQVPVSGSETIECGVCQNPFLVSAH

SEQ ID NO: 11797 - protein, 457 aa, Arabidopsis thaliana
MYYSPYDQHQTSGYSSAPPPSSAPAPNPNPAPYSSSLYSAPPYSSGGSSIPPSYEKPSVKFDQSGYDGYNRSRSDLGSDLYGKRSDSGEYPAFEDSYGDGVYAYQGGKVEPYGSRGTAPKSSNSTLFDDYGRSISFSSSGRDSSVSSNSAKIVRAVPKADVQEDSTGGVQKFRVKLLAETYGQTTTDVLCQIGLDGLRMLDPSTSRTLRIYPLENITRCEKLDSSILAFWSKTPVDIEAKRIRLQSNSYTTNTLLDTVTAAMFQAKEIGGSSRPPTSGKLVEQTAEKKKGLGDWMNIIKPVNEEKDHWVPDEAVSKCTSCGSDFGAFIRRHHCRNCGEVFCDKCTQGRIALTAEDNAPQVRVCDRCMAEVSQRLSNAKETTGRNVSLQSHEDLARKLQEEMERNRKSSSGLREGSGRRMKEVACPKCTVHLQVQVPVSGSETIECGVCQNPFLVSAH

SEQ ID NO: 11798 - DNA, 1265 bp, Arabidopsis thaliana
aatcaggttccacatttggctttgcacaccttccttgatcctatcaatggcggatctgaaatcaaccttcctcgacgtttactctgttctcaagtctgatctgcttcaagatccttcctttgaattcacccacgaatctcgtcaatggcttgaacggatgcttgactacaatgtacgcggagggaagctaaatcgtggtctctctgtggttgatagctacaagctgttgaagcaaggtcaagacttgacggagaaagagactttcctctcatgtgctcttggttggtgcattgaatggcttcaagcttatttccttgtgcttgatgacatcatggacaactctgtcacacgccgtggccagccttgttggtttagaaagccaaaggttggtatgattgccattaacgatgggattctacttcgcaatcatatccacaggattctcaaaaagcacttcagggaaatgccttactatgttgacctcgttgatttgtttaacgaggtagagtttcaaacagcttgcggccagatgattgatttgatcaccacctttgatggagaaaaagatttgtctaagtactccttgaaatccatcggcgtattgttgagtacaaaacagcttattactcattttatcttcctgttgcttgcgcattgctcatggcgggagaaaatttggaaaaccatactgatgtgaagactgttcttgttgacatgggaatttactttcaagtacaggatgattatctggactgttttgctgatcctgagacacttggcaagatagggacagacatagaagatttcaaatgctcctggttggtagttaaggcattggaacgctgcagtgaagaacaaactaagatactatacgagaactatggtaaagccgaaccatcaaacgttgctaaagtgaaagctctctacaaagagattgatctcgagggagcgttcatggaatatgagaaggaaagctatgagaagctgacaaagttgatcgaagctcaccagagtaaagcaattcaagcagtgctaaaatctttcttggctaagatctacaagaggcagaagtagagacatactcgggcctctctccgttttattcttctgacatttatgtattggtgcatgacttcttttgccttagatcttatgttcccttccaaaaatagaatttgagattcttgttcatgcttatagtatagagacttagaaaatgtctatgtttcttttaatttctgaataaaaaatgtgcaatcagtgat

SEQ ID NO: 11799 - protein, 231 aa, Arabidopsis thaliana
IRFHIWLCTPSLILSMADLKSTFLDVYSVLKSDLLQDPSFEFTHESRQWLERMLDYNVRGGKLNRGLSVVDSYKLLKQGQDLTEKETFLSCALGWCIEWLQAYFLVLDDIMDNSVTRRGQPCWFRKPKVGMIAINDGILLRNHIHRILKKHFREMPYYVDLVDLFNEVEFQTACGQMIDLITTFDGEKDLSKYSLKSIGVLLSTKQLITHFIFLLLAHCSWREKIWKTILM

SEQ ID NO: 11800 - protein, 216 aa, Arabidopsis thaliana
MADLKSTFLDVYSVLKSDLLQDPSFEFTHESRQWLERMLDYNVRGGKLNRGLSVVDSYKLLKQGQDLTEKETFLSCALGWCIEWLQAYFLVLDDIMDNSVTRRGQPCWFRKPKVGMIAINDGILLRNHIHRILKKHFREMPYYVDLVDLFNEVEFQTACGQMIDLITTFDGEKDLSKYSLKSIGVLLSTKQLITHFIFLLLAHCSWREKIWKTILM

SEQ ID NO: 11801 - protein, 179 aa, Arabidopsis thaliana
MLDYNVRGGKLNRGLSVVDSYKLLKQGQDLTEKETFLSCALGWCIEWLQAYFLVLDDIMDNSVTRRGQPCWFRKPKVGMIAINDGILLRNHIHRILKKHFREMPYYVDLVDLFNEVEFQTACGQMIDLITTFDGEKDLSKYSLKSIGVLLSTKQLITHFIFLLLAHCSWREKIWKTILM

SEQ ID NO: 11802 - DNA, 2295 bp, Arabidopsis thaliana
gactcagcgaatcttctcgtcgtcttcttcgtttctctctacctcactcatcgaagtgttagggtttcttcgatttggcagaatattatttcaactatctctgctgaactcgctttcctaacttctctctctgtcactctaactctttgtcggtaccaaattcttcttcactcgaagaactgtttaggtcaagtatgacttaattctgccaaatttctggtgtttattcaaagttcaaagtcaattgaacaaaactttttatcagataaactgaagcaatgtataccgagggagcctctgattttgtcattgaccagagcatgtattatcccacttattactcttcaggttatgattcatctgtgggtcttcagggtgggcaaaatgaaaatgctccctatatctgctatacaccaagttatggatatgcacagtctccctacaatccctacaatccttacataccaggagcttcaataggcgttgattcttcttttgttggattccaacaatattactcagaccctccgtatgaaagtgctgcatcttcgcctacttatgttccatatgttattcagcctgatatggtctcgaatagttcaacagactctttggtagcgaatggtggtcaatctgatggaagaggatccatgcagagaaatggttcagcaattgccggactcccaaaagatgctccaaagtctaccactactggccagtataaacagccaggaatccccaagaatgtttccacaacagcttctgcacattctctccagggaaaaactgcttacgcgaacacactcttgccttatgggaaatcagacattgctaatggggtctcatcaattgcttcatatagttataaaccttgttccaagatttatgatgccagaggtgataacaacacaactggaagtacatatacgagtgaacaaaatcgaggatcgagaacgagaagatcaagaaatcaactaattgtcaaagcatatacaaccaaagctggaaatgctgatgcggaaggaaatattgtgataaatcctgatcgatataataaagaagatttcagtattgaatacagcgatgccaggttttttgtgattaagtcgtatagtgaagatgatgttcacaagagcatcaaatatggtgtctggtcatctacattgaatgggaacaagaaattgcagagtgtatatgaagatgctcagagaatagccactgagaagtctcgtgaatgtcctattttcttattcttttctgtcaattccagtggtctgttctgtggcgtggctgagatgaccggtccagtttccttcgaccgagacatggatttttggcagcaagacaaatggagtggaagctttcctgtcaagtggcacattattaaagatgttcctaatagctatttcaggcacattattttacataataacgagaataagccagtgaccaacagccgagacacacaagagataatactgaaacaaggactcgaggtgctaaaactattcaaacatcatgcggaaaagacttcactattagatgattttatgtactacgaagaccgccagagactcatgcaggaagagagagctagacttccatttaggacctttcgcaggccatttcccgtgctcaatctagatttttctgacagaagcaagaaaagctccaaggatgtcggtaagaagccttcagtgacctctgcagaaacaaaggttgtgcaattaaaaaactcagatggggatgaaaagagcaatacacaggaagcaacagacgaaactactccttccactctgaagtttggctctctcgccattaaaccaactgctggtaccacctttaacccaacccaagccaagcctaaaccgaccccatctctcggctctgaccacaagtcagactcttctgaagaggttactgggtctctggctgatgacattgtcagtgtaggatcgttgcccataaaagtaaagggatctaaagaattatcctccaagatcgcagcggtgggtacaagtcctctctcaactcaagatcagttcagaagtaaaccagggttttgacattgtctttgtctaacttgtttatgcataatagaaagcatggtcgatatggttcgagaaagagaaagagattgagtatgtatagattggttggttttaccttttaaatggtctgattggtcgtttgagaatccttgtttatcgtctcagtttggacaaatgattgttgccagtggttgcgttttggtttgttgggtttgattaaacagttggttccgtcttttgatcg

SEQ ID NO: 11803 - protein, 595 aa, Arabidopsis thaliana
MYTEGASDFVIDQSMYYPTYYSSGYDSSVGLQGGQNENAPYICYTPSYGYAQSPYNPYNPYIPGASIGVDSSFVGFQQYYSDPPYESAASSPTYVPYVIQPDMVSNSSTDSLVANGGQSDGRGSMQRNGSAIAGLPKDAPKSTTTGQYKQPGIPKNVSTTASAHSLQGKTAYANTLLPYGKSDIANGVSSIASYSYKPCSKIYDARGDNNTTGSTYTSEQNRGSRTRRSRNQLIVKAYTTKAGNADAEGNIVINPDRYNKEDFSIEYSDARFFVIKSYSEDDVHKSIKYGVWSSTLNGNKKLQSVYEDAQRIATEKSRECPIFLFFSVNSSGLFCGVAEMTGPVSFDRDMDFWQQDKWSGSFPVKWHIIKDVPNSYFRHIILHNNENKPVTNSRDTQEIILKQGLEVLKLFKHHAEKTSLLDDFMYYEDRQRLMQEERARLPFRTFRRPFPVLNLDFSDRSKKSSKDVGKKPSVTSAETKVVQLKNSDGDEKSNTQEATDETTPSTLKFGSLAIKPTAGTTFNPTQAKPKPTPSLGSDHKSDSSEEVTGSLADDIVSVGSLPIKVKGSKELSSKIAAVGTSPLSTQDQFRSKPGF

SEQ ID NO: 11804 - protein, 581 aa, Arabidopsis thaliana
MYYPTYYSSGYDSSVGLQGGQNENAPYICYTPSYGYAQSPYNPYNPYIPGASIGVDSSFVGFQQYYSDPPYESAASSPTYVPYVIQPDMVSNSSTDSLVANGGQSDGRGSMQRNGSAIAGLPKDAPKSTTTGQYKQPGIPKNVSTTASAHSLQGKTAYANTLLPYGKSDIANGVSSIASYSYKPCSKIYDARGDNNTTGSTYTSEQNRGSRTRRSRNQLIVKAYTTKAGNADAEGNIVINPDRYNKEDFSIEYSDARFFVIKSYSEDDVHKSIKYGVWSSTLNGNKKLQSVYEDAQRIATEKSRECPIFLFFSVNSSGLFCGVAEMTGPVSFDRDMDFWQQDKWSGSFPVKWHIIKDVPNSYFRHIILHNNENKPVTNSRDTQEIILKQGLEVLKLFKHHAEKTSLLDDFMYYEDRQRLMQEERARLPFRTFRRPFPVLNLDFSDRSKKSSKDVGKKPSVTSAETKVVQLKNSDGDEKSNTQEATDETTPSTLKFGSLAIKPTAGTTFNPTQAKPKPTPSLGSDHKSDSSEEVTGSLADDIVSVGSLPIKVKGSKELSSKIAAVGTSPLSTQDQFRSKPGF

SEQ ID NO: 11805 - protein, 493 aa, Arabidopsis thaliana
MVSNSSTDSLVANGGQSDGRGSMQRNGSAIAGLPKDAPKSTTTGQYKQPGIPKNVSTTASAHSLQGKTAYANTLLPYGKSDIANGVSSIASYSYKPCSKIYDARGDNNTTGSTYTSEQNRGSRTRRSRNQLIVKAYTTKAGNADAEGNIVINPDRYNKEDFSIEYSDARFFVIKSYSEDDVHKSIKYGVWSSTLNGNKKLQSVYEDAQRIATEKSRECPIFLFFSVNSSGLFCGVAEMTGPVSFDRDMDFWQQDKWSGSFPVKWHIIKDVPNSYFRHIILHNNENKPVTNSRDTQEIILKQGLEVLKLFKHHAEKTSLLDDFMYYEDRQRLMQEERARLPFRTFRRPFPVLNLDFSDRSKKSSKDVGKKPSVTSAETKVVQLKNSDGDEKSNTQEATDETTPSTLKFGSLAIKPTAGTTFNPTQAKPKPTPSLGSDHKSDSSEEVTGSLADDIVSVGSLPIKVKGSKELSSKIAAVGTSPLSTQDQFRSKPGF

SEQ ID NO: 11806 - DNA, 3292 bp, Arabidopsis thaliana
gcatggccagaacaccatactctaggcctcagtccagtgtgaagattgggtctctttttcaagcatctccaagcaaatgggaagaaagcttaccttctggttctagacaagggtttcaatcgggtcttaaacgcaggagctcagtcttagataatgatataggatctgtgggccctgtaaggaggatccggcaaaaatctaacctttcatctcgaagcttggctctgcctgtttctgagagcccactttctgtccgtgccaatggtggagaaaaaactacgcatacatctaaagatagtgcagaggatattcctggttcaagttttaaccttgttcctaccaagtccagtgagatggcgtcaaaaatattgcagcaacttgataaactggtttcaacaagggagaaatcaccaagtaagttatcaccatccatgctacggggtccagctctcaaaagcctccagaatgtagaggcgccaaagtttttgggtaatcttcccgagaagaaggcaaattcgcaagattctagttatcaaaagcaggaaatatctagagaaagtgtctccagagaggttttagctcagagtgagaagactggtgatgctgttgatggaacaagcaaaacaggttccagtaaagatcaggatatgcgtggtaaagctgtttatatgcctctcacgaattctttggaagagcatcctccaaagaagagatcatttcgaatgagtgcgcatgaggatttcttggagttggatgatgatcttggtgcagcatctactccatgtgaagtagcagaaaaacagaatgccttcgaagtagagaaaagtcatatcagcatacctataggggagaaaccacttactccatctgaagccatgccatctacatcatatatttctaatggtgacgcctctcagggtacttctaatgggtctctggaaactgaaagaaacaagtttgttgctttccccattgaagctgttcagcaaagtaatatggcctctgagccaacttcaaagttcatccaagggactgagaaatcgagtatttcttctggcaagccaacctcagaagagaaacgtatccctctggaagagcctaaaaaacctgctgctgtatttcccaatatctccttttcaccgcctgccacgggcttattaaatcaaaacagtggtgcatctgcagacatcaagttagaaaagactagcagcactgcgtttggagtatcagaggcttgggcaaagccaactgaatcaaagaaaacgttcagcaacagtgcttctggagctgagtcatctacctcagctgcaccaaccctcaatggtagtatattctcagctggagcaaacactgtcactccacctccgagtaatggctctcttacttcaagcccttccttcccacctactatttcaaatataccttctgataattctgtgggtgatatgccgtccactgttcaatcttttgctgctactcacaattcctctagtatatttggaaagttgcctaccagtaacgacagcaactcacaatcaacttcagcatctcccctctcttccacatcacctttcaagtttgggcaacctgcagctccgttttctgcaccagcagtgtctgaatctagcggtcagatctcaaaggagactgaagtaaaaaacgccacatttggaaatacaagcactttcaagtttggaggtatggcttcagcagaccagagcactggcagcgtttttggtgctaaatctgctgaaaataaaagcagacctggttttgtgtttgggagctcctccgttgttggtggcagcacattaaacccttctactgctgcagctgcagcacctgagagctctggaagtttaatatttggtgtgacatcgtcctcaacccctgggacagagaccagcaaaatttctgcgagttctgcagctactaatactggaaatagtgtatttggcacttcctcttttgcatttacaagctctggtagtagcatggttggtggtgtatctgcaagtactggaagcagtgtttttggattcaatgctgtttcatcagcttctgctactagctctcagtctcaggcctcaaatcgttttggtgctggaaatgctcagacgggtaatactgggagcggaaccacaacatcaactcaaagcatcccctttcagtttggttcatctccatcagctccttcatttggtttgtctgggaactcttctcttgcatcaaacagttctccatttggattttctaagtcggaacctgctgtatttacttctggctcaactcctcaattgagttcgacaaactcctctgcaagctctagtagtacaatgagctctcccctatttgggacaagctggcaagctcccaactcttctccaaactctggtccagtcttcagttcctcgttcaccacatcttcaactcctaccaccttttcctttggaggatcttctgctgctactgcttcgagcactactgctcccatttttggtgcatctaccaacaacaccccgtcgccttcacctatctttggtttcgggtcaacccctcctaccactccccagcagccggtatttggtaactcagggactccatcacagtctctgtttggtaactcaactcctgggtttgcatttggtgcacctaataatggaaatggtatcaacaataaccaacaagtgagcatggaagacagtatggcagaagacacagaccaagctaatagagcatctatggtagccccaatgtttggacaagcagcagtctcgatgcctcaaccaaactttgccttcggtggaggagcagcaacgcagcctccatcaatggcaaaccccttccagtttggaggccaaccaatggcaagcacgttacagaacgcatcacctttccaggcatcacagagtctagagttccaaggaggtgggagcttttcactaggcagcactggaggcggcgataagtcaggccgcagaatcttcaaagcaaagaaatccaccaggaagaaataagaaaacacattgttcaagagtcattttatcagccttatggtctttttgttcgctatatactccgggaactttggggattacgagcatatcgtcgtttaatgaaagaggtaaagtatgagaatgtgtatcgtttatgctcttgatcgtctctgtcattttagtacgagccaggattttgggggtcaaattgttcagggttataaaagttgtaggaaagttttgtaattttcagaaagtactggtgtctgtaagagtaatatagctctgtgcctctg

SEQ ID NO: 11807 - protein, 1004 aa, Arabidopsis thaliana
MARTPYSRPQSSVKIGSLFQASPSKWEESLPSGSRQGFQSGLKRRSSVLDNDIGSVGPVRRIRQKSNLSSRSLALPVSESPLSVRANGGEKTTHTSKDSAEDIPGSSFNLVPTKSSEMASKILQQLDKLVSTREKSPSKLSPSMLRGPALKSLQNVEAPKFLGNLPEKKANSQDSSYQKQEISRESVSREVLAQSEKTGDAVDGTSKTGSSKDQDMRGKAVYMPLTNSLEEHPPKKRSFRMSAHEDFLELDDDLGAASTPCEVAEKQNAFEVEKSHISIPIGEKPLTPSEAMPSTSYISNGDASQGTSNGSLETERNKFVAFPIEAVQQSNMASEPTSKFIQGTEKSSISSGKPTSEEKRIPLEEPKKPAAVFPNISFSPPATGLLNQNSGASADIKLEKTSSTAFGVSEAWAKPTESKKTFSNSASGAESSTSAAPTLNGSIFSAGANTVTPPPSNGSLTSSPSFPPTISNIPSDNSVGDMPSTVQSFAATHNSSSIFGKLPTSNDSNSQSTSASPLSSTSPFKFGQPAAPFSAPAVSESSGQISKETEVKNATFGNTSTFKFGGMASADQSTGSVFGAKSAENKSRPGFVFGSSSVVGGSTLNPSTAAAAAPESSGSLIFGVTSSSTPGTETSKISASSAATNTGNSVFGTSSFAFTSSGSSMVGGVSASTGSSVFGFNAVSSASATSSQSQASNRFGAGNAQTGNTGSGTTTSTQSIPFQFGSSPSAPSFGLSGNSSLASNSSPFGFSKSEPAVFTSGSTPQLSSTNSSASSSSTMSSPLFGTSWQAPNSSPNSGPVFSSSFTTSSTPTTFSFGGSSAATASSTTAPIFGASTNNTPSPSPIFGFGSTPPTTPQQPVFGNSGTPSQSLFGNSTPGFAFGAPNNGNGINNNQQVSMEDSMAEDTDQANRASMVAPMFGQAAVSMPQPNFAFGGGAATQPPSMANPFQFGGQPMASTLQNASPFQASQSLEFQGGGSFSLGSTGGGDKSGRRIFKAKKSTRKK

SEQ ID NO: 11808 - protein, 887 aa, Arabidopsis thaliana
MASKILQQLDKLVSTREKSPSKLSPSMLRGPALKSLQNVEAPKFLGNLPEKKANSQDSSYQKQEISRESVSREVLAQSEKTGDAVDGTSKTGSSKDQDMRGKAVYMPLTNSLEEHPPKKRSFRMSAHEDFLELDDDLGAASTPCEVAEKQNAFEVEKSHISIPIGEKPLTPSEAMPSTSYISNGDASQGTSNGSLETERNKFVAFPIEAVQQSNMASEPTSKFIQGTEKSSISSGKPTSEEKRIPLEEPKKPAAVFPNISFSPPATGLLNQNSGASADIKLEKTSSTAFGVSEAWAKPTESKKTFSNSASGAESSTSAAPTLNGSIFSAGANTVTPPPSNGSLTSSPSFPPTISNIPSDNSVGDMPSTVQSFAATHNSSSIFGKLPTSNDSNSQSTSASPLSSTSPFKFGQPAAPFSAPAVSESSGQISKETEVKNATFGNTSTFKFGGMASADQSTGSVFGAKSAENKSRPGFVFGSSSVVGGSTLNPSTAAAAAPESSGSLIFGVTSSSTPGTETSKISASSAATNTGNSVFGTSSFAFTSSGSSMVGGVSASTGSSVFGFNAVSSASATSSQSQASNRFGAGNAQTGNTGSGTTTSTQSIPFQFGSSPSAPSFGLSGNSSLASNSSPFGFSKSEPAVFTSGSTPQLSSTNSSASSSSTMSSPLFGTSWQAPNSSPNSGPVFSSSFTTSSTPTTFSFGGSSAATASSTTAPIFGASTNNTPSPSPIFGFGSTPPTTPQQPVFGNSGTPSQSLFGNSTPGFAFGAPNNGNGINNNQQVSMEDSMAEDTDQANRASMVAPMFGQAAVSMPQPNFAFGGGAATQPPSMANPFQFGGQPMASTLQNASPFQASQSLEFQGGGSFSLGSTGGGDKSGRRIFKAKKSTRKK

SEQ ID NO: 11809 - protein, 861 aa, Arabidopsis thaliana
MLRGPALKSLQNVEAPKFLGNLPEKKANSQDSSYQKQEISRESVSREVLAQSEKTGDAVDGTSKTGSSKDQDMRGKAVYMPLTNSLEEHPPKKRSFRMSAHEDFLELDDDLGAASTPCEVAEKQNAFEVEKSHISIPIGEKPLTPSEAMPSTSYISNGDASQGTSNGSLETERNKFVAFPIEAVQQSNMASEPTSKFIQGTEKSSISSGKPTSEEKRIPLEEPKKPAAVFPNISFSPPATGLLNQNSGASADIKLEKTSSTAFGVSEAWAKPTESKKTFSNSASGAESSTSAAPTLNGSIFSAGANTVTPPPSNGSLTSSPSFPPTISNIPSDNSVGDMPSTVQSFAATHNSSSIFGKLPTSNDSNSQSTSASPLSSTSPFKFGQPAAPFSAPAVSESSGQISKETEVKNATFGNTSTFKFGGMASADQSTGSVFGAKSAENKSRPGFVFGSSSVVGGSTLNPSTAAAAAPESSGSLIFGVTSSSTPGTETSKISASSAATNTGNSVFGTSSFAFTSSGSSMVGGVSASTGSSVFGFNAVSSASATSSQSQASNRFGAGNAQTGNTGSGTTTSTQSIPFQFGSSPSAPSFGLSGNSSLASNSSPFGFSKSEPAVFTSGSTPQLSSTNSSASSSSTMSSPLFGTSWQAPNSSPNSGPVFSSSFTTSSTPTTFSFGGSSAATASSTTAPIFGASTNNTPSPSPIFGFGSTPPTTPQQPVFGNSGTPSQSLFGNSTPGFAFGAPNNGNGINNNQQVSMEDSMAEDTDQANRASMVAPMFGQAAVSMPQPNFAFGGGAATQPPSMANPFQFGGQPMASTLQNASPFQASQSLEFQGGGSFSLGSTGGGDKSGRRIFKAKKSTRKK

SEQ ID NO: 11810 - DNA, 2381 bp, Arabidopsis thaliana
aaacagaaactcaaaaccctaggcacacactctctctctctctctctatcctcaaagcttcttcttcctcgatatcgattgagagaaacttcgttctaagattcgaaatcatggcggcggttgttgatattgatgtcctaacagctcagttagggattaattggtcagatgttaatctcgattcaatccaacttcctcctggaaacgactttgggatcgaaagtgatgatgaaagtgtttaccaagatgaccagtcagaattcgacactggattcggtaacattatcgttgtcgatcacctccctgttgttcccaaggagaagtttgagaaactagaaggtgttgttaagaaaatttacaaccagttaggtgtgattaaggaaaatggactgttgatgcccgttgatcccgatactaagatgacattgggctactgttttattgagttcaacactcctcaggaagcacaaaacgctaaggaaaagtctcatggctacaagttggacaagtctcacatatttgctgttaatatgttcgatgatttcgataggttgatgaatgtgaaggaggagtgggagcctcctcaagaaaggccctatgtccctggggaaaatttgcagaagtggcttactgatgacaaagcccgggaccagctagtcattcgttttggccatgatactgaagtttactggaatgatgctaggcagaagaagcctgaacctgttcataagcgttcttattggacagagagttatgtgcagtggtctccaataggtacataccttgtgacacttcacaagcagggggcagctgtttggggtggtgctgatacatttacgcgtctcatgcgttatcagcattcaatggtcaaactagttgatttctcgcctggtgagaaatatcttgtaacttaccatagccaagaaccaagcaatccgagagatgcaagtaaagtagagattaaggtctttgatgtgagaaccgggaggatgatgagagatttcaagggtagtgctgatgagttttcaattggaggacctggtggtgttgctggtgcctcttggcctgttttcagatgggctggcggaaaagatgataaatactttgccaagctgagcaaaaacactatctctgtctatgagactgagactttcagcctaatagacaagaaatccatgaaggttgataatgttgtggatatttgctggtctcccactgattcaatcctttcattgtttgttcctgaacaaggtggtggaaaccaaccagccaaggttgctctagtccaaatcccgagtaaggtagagctgaggcagaagaatctcttcagtgtgagcgactgcaagatgtactggcagagtagtggagagtatcttgctgttaaggttgatcgatacacaaaaactaagaagagtacatactctggatttgagcttttccgtatcaaagaaagggatattccaatcgaggttcttgagctggataacaagaacgataagatcattgctttcgcgtgggagcccaagggtcacaggtttgctgtgattcatggtgaccagccaagaccggatgttagtttctactcgatgaagactgcacaaaacactggaagagtttcaaagctcgcaactttgaaggccaaacaagccaatgccctcttctggtcgcccacaggcaagtacatcattcttgctgggttaaaaggtttcaatggccagcttgaatttttcaacgtggatgagctcgagacaatggccacagctgaacacttcatggccacagatatcgaatgggacccaactggaaggtacgttgcaacctcagtgacaacagtccacgagatggagaatgggttcaccatatggtctttcaatgggaatatggtttaccggatactgaaggatcatttcttccagttggcttggcgtccaagaccggaatcattcttgactgcggagaaggaagaagagatagcaaagaacctgaggaattacagcaagaggtatgaggcagaggatcaggacgtgtcgttgctattgagtgaacaagacagagagaagaggagggcattgaatgaagagtggcagaaatgggtgatgcagtggaagtctctgcatgaagaggagaaactcgtgaggcaaaatcttcgggatggtgaagttagtgatgtggaagaagatgagtatgaagccaaagaagttgagtttgaggatcttattgatgttactgaggaaattgttcaagagttgatgtaagtttctcggtctcttttgttaccctctcttagtcttcgatctcttagatatcgcgttctccacacttcgaagagaaattttgtttcctttggatattgttttcattatttaagttttcgtaattcc

SEQ ID NO: 11811 - protein, 750 aa, Arabidopsis thaliana
TETQNPRHTLSLSLSILKASSSSISIERNFVLRFEIMAAVVDIDVLTAQLGINWSDVNLDSIQLPPGNDFGIESDDESVYQDDQSEFDTGFGNIIVVDHLPVVPKEKFEKLEGVVKKIYNQLGVIKENGLLMPVDPDTKMTLGYCFIEFNTPQEAQNAKEKSHGYKLDKSHIFAVNMFDDFDRLMNVKEEWEPPQERPYVPGENLQKWLTDDKARDQLVIRFGHDTEVYWNDARQKKPEPVHKRSYWTESYVQWSPIGTYLVTLHKQGAAVWGGADTFTRLMRYQHSMVKLVDFSPGEKYLVTYHSQEPSNPRDASKVEIKVFDVRTGRMMRDFKGSADEFSIGGPGGVAGASWPVFRWAGGKDDKYFAKLSKNTISVYETETFSLIDKKSMKVDNVVDICWSPTDSILSLFVPEQGGGNQPAKVALVQIPSKVELRQKNLFSVSDCKMYWQSSGEYLAVKVDRYTKTKKSTYSGFELFRIKERDIPIEVLELDNKNDKIIAFAWEPKGHRFAVIHGDQPRPDVSFYSMKTAQNTGRVSKLATLKAKQANALFWSPTGKYIILAGLKGFNGQLEFFNVDELETMATAEHFMATDIEWDPTGRYVATSVTTVHEMENGFTIWSFNGNMVYRILKDHFFQLAWRPRPESFLTAEKEEEIAKNLRNYSKRYEAEDQDVSLLLSEQDREKRRALNEEWQKWVMQWKSLHEEEKLVRQNLRDGEVSDVEEDEYEAKEVEFEDLIDVTEEIVQELM

SEQ ID NO: 11812 - protein, 714 aa, Arabidopsis thaliana
MAAVVDIDVLTAQLGINWSDVNLDSIQLPPGNDFGIESDDESVYQDDQSEFDTGFGNIIVVDHLPVVPKEKFEKLEGVVKKIYNQLGVIKENGLLMPVDPDTKMTLGYCFIEFNTPQEAQNAKEKSHGYKLDKSHIFAVNMFDDFDRLMNVKEEWEPPQERPYVPGENLQKWLTDDKARDQLVIRFGHDTEVYWNDARQKKPEPVHKRSYWTESYVQWSPIGTYLVTLHKQGAAVWGGADTFTRLMRYQHSMVKLVDFSPGEKYLVTYHSQEPSNPRDASKVEIKVFDVRTGRMMRDFKGSADEFSIGGPGGVAGASWPVFRWAGGKDDKYFAKLSKNTISVYETETFSLIDKKSMKVDNVVDICWSPTDSILSLFVPEQGGGNQPAKVALVQIPSKVELRQKNLFSVSDCKMYWQSSGEYLAVKVDRYTKTKKSTYSGFELFRIKERDIPIEVLELDNKNDKIIAFAWEPKGHRFAVIHGDQPRPDVSFYSMKTAQNTGRVSKLATLKAKQANALFWSPTGKYIILAGLKGFNGQLEFFNVDELETMATAEHFMATDIEWDPTGRYVATSVTTVHEMENGFTIWSFNGNMVYRILKDHFFQLAWRPRPESFLTAEKEEEIAKNLRNYSKRYEAEDQDVSLLLSEQDREKRRALNEEWQKWVMQWKSLHEEEKLVRQNLRDGEVSDVEEDEYEAKEVEFEDLIDVTEEIVQELM

SEQ ID NO: 11813 - protein, 619 aa, Arabidopsis thaliana
MPVDPDTKMTLGYCFIEFNTPQEAQNAKEKSHGYKLDKSHIFAVNMFDDFDRLMNVKEEWEPPQERPYVPGENLQKWLTDDKARDQLVIRFGHDTEVYWNDARQKKPEPVHKRSYWTESYVQWSPIGTYLVTLHKQGAAVWGGADTFTRLMRYQHSMVKLVDFSPGEKYLVTYHSQEPSNPRDASKVEIKVFDVRTGRMMRDFKGSADEFSIGGPGGVAGASWPVFRWAGGKDDKYFAKLSKNTISVYETETFSLIDKKSMKVDNVVDICWSPTDSILSLFVPEQGGGNQPAKVALVQIPSKVELRQKNLFSVSDCKMYWQSSGEYLAVKVDRYTKTKKSTYSGFELFRIKERDIPIEVLELDNKNDKIIAFAWEPKGHRFAVIHGDQPRPDVSFYSMKTAQNTGRVSKLATLKAKQANALFWSPTGKYIILAGLKGFNGQLEFFNVDELETMATAEHFMATDIEWDPTGRYVATSVTTVHEMENGFTIWSFNGNMVYRILKDHFFQLAWRPRPESFLTAEKEEEIAKNLRNYSKRYEAEDQDVSLLLSEQDREKRRALNEEWQKWVMQWKSLHEEEKLVRQNLRDGEVSDVEEDEYEAKEVEFEDLIDVTEEIVQELM

SEQ ID NO: 11814 - DNA, 3033 bp, Arabidopsis thaliana
tcactagtccccccccccccattgccctctggcgttttctgtcttgagctaaagaaataacaaataaaccgaaaaaaataaaaatagaaactttttttttgtttatttgttctttctccaaaactccttttttttctcaccattatctcatgaacgtgagtggaggctctctgagtagagagagcctacccttgaaaataacctagggatttctccaattttcaagctttacccattcaaaagaatcgtccttttttcctatttctgactttgagctatgatgatggtccattcgatgagcagagatatgatgaacagagagtcgccggataaagggttagattccggcaagtatgtgaggtacacgccggagcaagtggaagctctcgagagagtttacactgagtgtcctaagccaagttctctaagaagacaacaactcatacgtgaatgtccgattctctctaacatcgagcctaagcagatcaaagtttggtttcagaaccgcagatgtcgtgagaagcagaggaaagaagctgctcgtcttcaaacagtgaacagaaaactcaatgccatgaacaaactcttgatggaagagaatgatcgtttgcagaagcaagtttctaacttggtctatgagaatggccacatgaaacatcaacttcacactgcttctgggacgaccacagacaacagctgtgagtctgtggtcgtgagtggtcagcaacatcaacagcaaaacccaaatcctcagcatcagcaacgtgatgctaacaacccagcaggactcctttctatagcagaggaggccctagcagagttcctttccaaggctacaggaactgctgttgactgggttcagatgattgggatgaagcctggtccggattctattggcatagtcgctatttcgcgcaactgcagcggaattgcagcacgtgcctgcggcctcgtgagtttagaacccatgaaggttgctgaaattctcaaagatcgtccatcttggctccgagattgtcgaagtgtggatactctgagtgtgatacctgctggaaacggtgggacgatcgagcttatttacacgcagatgtatgctcctacgactttagcagcagctcgtgacttttggacgctgagatatagcacatgtttgatggaagctatgtggtttgtgaaaggtcgcttacttctgcaactggtggccccactgggccaccttcttcaaactttgtgagagctgaaatgaaaccaagcgggtttctcatccgtccttgcgatggtggtggttccattctccacattgttgatcatgttgatctggatgcctggagtgtccctgaagtcatgaggcctctctatgaatcatcgaagattcttgctcagaaaatgactgttgctgctttgagacatgtaagacaaattgcacaagaaacaagtggagaagttcagtatggtggagggcgccaacctgcggttttaagaaccttcagtcaaagactctgtcggggtttcaatgatgctgttaatggttttgtggatgatggatggtcaccaatgggtagcgatggtgcagaggatgttactgtaatgataaacttgtcccctgggaagtttggtgggtctcagtacggtaattcattccttccaagctttggtagtggcgtgctttgtgccaaggcatctatgttgcttcagaacgttccacccgctgtgctggttcgattccttagagaacaccgatctgaatgggctgattatggcgtggatgcttatgctgctgcatcgctcagagcaagtccttttgctgttccttgtgctagagctggggggttcccaagtaaccaagtcattcttcctcttgcgcagacagttgaacatgaagagtcacttgaggtggttagacttgaaggtcacgcttactcacccgaagacatgggtttagctcgggatatgtatttgctacagctttgtagcggtgttgatgaaaatgtggttggaggttgtgcacagcttgtatttgcccctatcgatgaatcatttgctgatgatgcacctttgcttccttccggtttccgcatcatacctcttgaacagaaatctactccgaacggtgcatctgcaaaccgtaccctggatttagcctcagctttagaaggatccacacgtcaagctggtgaagccgacccaaatggctgtaactttaggtcggtactaaccatagcattccagttcacatttgataaccattcaagagacagtgttgcttcaatggcacgtcagtacgtgcgaagcatagtaggatcgattcagagggttgctctagccattgctcctcgtcctggctccaatatcagtccaatatctgttcccacttcccctgaagctctcactctggtccgttggatctcccggagttacagccttcacactggtgcagatctctttggatctgattctcaaaccagtggtgacacgttgctgcatcaactctggaatcactctgatgcaatcttgtgctgctccctcaaaacaaacgcttcaccggttttcacattcgcaaaccaaaccggtttagacatgctggaaacgactcttgtagcccttcaagacataatgctagacaagacccttgacgaacctggtcgtaaagctctttgctctgagttccccaagatcatgcaacagggctatgctcatctgccggcaggagtatgtgcgtcaagcatgggaaggatggtatcttacgagcaggcaacggtgtggaaagttcttgaagacgatgaatcaaaccactgcttagctttcatgttcgtgaattggtcgttcgtttgaagaataataagaaataagaagaccagattttactccatttttcccttggtagggaggttatttatgtaagatattaaagttaggtgccactatgctccaaagtcttttgaaattcgaggacgaatatgtaatatgacgaatgtctgatcttgtatggattgttcttgttcctatgttacgttatatggcaagattattatg

SEQ ID NO: 11815 - protein, 561 aa, Arabidopsis thaliana
MFDGSYVVCERSLTSATGGPTGPPSSNFVRAEMKPSGFLIRPCDGGGSILHIVDHVDLDAWSVPEVMRPLYESSKILAQKMTVAALRHVRQIAQETSGEVQYGGGRQPAVLRTFSQRLCRGFNDAVNGFVDDGWSPMGSDGAEDVTVMINLSPGKFGGSQYGNSFLPSFGSGVLCAKASMLLQNVPPAVLVRFLREHRSEWADYGVDAYAAASLRASPFAVPCARAGGFPSNQVILPLAQTVEHEESLEVVRLEGHAYSPEDMGLARDMYLLQLCSGVDENVVGGCAQLVFAPIDESFADDAPLLPSGFRIIPLEQKSTPNGASANRTLDLASALEGSTRQAGEADPNGCNFRSVLTIAFQFTFDNHSRDSVASMARQYVRSIVGSIQRVALAIAPRPGSNISPISVPTSPEALTLVRWISRSYSLHTGADLFGSDSQTSGDTLLHQLWNHSDAILCCSLKTNASPVFTFANQTGLDMLETTLVALQDIMLDKTLDEPGRKALCSEFPKIMQQGYAHLPAGVCASSMGRMVSYEQATVWKVLEDDESNHCLAFMFVNWSFV

SEQ ID NO: 11816 - protein, 529 aa, Arabidopsis thaliana
MKPSGFLIRPCDGGGSILHIVDHVDLDAWSVPEVMRPLYESSKILAQKMTVAALRHVRQIAQETSGEVQYGGGRQPAVLRTFSQRLCRGFNDAVNGFVDDGWSPMGSDGAEDVTVMINLSPGKFGGSQYGNSFLPSFGSGVLCAKASMLLQNVPPAVLVRFLREHRSEWADYGVDAYAAASLRASPFAVPCARAGGFPSNQVILPLAQTVEHEESLEVVRLEGHAYSPEDMGLARDMYLLQLCSGVDENVVGGCAQLVFAPIDESFADDAPLLPSGFRIIPLEQKSTPNGASANRTLDLASALEGSTRQAGEADPNGCNFRSVLTIAFQFTFDNHSRDSVASMARQYVRSIVGSIQRVALAIAPRPGSNISPISVPTSPEALTLVRWISRSYSLHTGADLFGSDSQTSGDTLLHQLWNHSDAILCCSLKTNASPVFTFANQTGLDMLETTLVALQDIMLDKTLDEPGRKALCSEFPKIMQQGYAHLPAGVCASSMGRMVSYEQATVWKVLEDDESNHCLAFMFVNWSFV

SEQ ID NO: 11817 - protein, 495 aa, Arabidopsis thaliana
MRPLYESSKILAQKMTVAALRHVRQIAQETSGEVQYGGGRQPAVLRTFSQRLCRGFNDAVNGFVDDGWSPMGSDGAEDVTVMINLSPGKFGGSQYGNSFLPSFGSGVLCAKASMLLQNVPPAVLVRFLREHRSEWADYGVDAYAAASLRASPFAVPCARAGGFPSNQVILPLAQTVEHEESLEVVRLEGHAYSPEDMGLARDMYLLQLCSGVDENVVGGCAQLVFAPIDESFADDAPLLPSGFRIIPLEQKSTPNGASANRTLDLASALEGSTRQAGEADPNGCNFRSVLTIAFQFTFDNHSRDSVASMARQYVRSIVGSIQRVALAIAPRPGSNISPISVPTSPEALTLVRWISRSYSLHTGADLFGSDSQTSGDTLLHQLWNHSDAILCCSLKTNASPVFTFANQTGLDMLETTLVALQDIMLDKTLDEPGRKALCSEFPKIMQQGYAHLPAGVCASSMGRMVSYEQATVWKVLEDDESNHCLAFMFVNWSFV

SEQ ID NO: 11818 - DNA, 1670 bp, Arabidopsis thaliana
gataatttcggagaaaaaaatccacaaaagtttcaaacttttggcaaattaagcggtttttgttaggttttaattattttttccgatgatgaagcggcgatgagtgtcgtcgtcggagatagatcggagagtactctgatgcggagtgactataaagctcctccgagtcaagctattcccaaagctcgattacaagtttggttctttagagtttgttcttgcattttggtttggacttgtttgattcagctcttttggcattcccaaatcttcactggtttaaccaatcacatttctagattctctctcccggttcagtcagttccattacctcctcctcttcctccaaggaattacacaagtaatggaattttactagtgtcctgtaatggcggtttgaatcaaatgcgtgcagcgatttgtgatatggtgactgttgctaggctattgaatttgactcttgttgttcctgagcttgataaaaaatcattctgggctgatacaagtgactttgaggacatttttgatataaagcatttcattgattcgttaagagatgaagttaggatcataaggagacttcctaaacggtatagtaagaagtatggattcaaattgttcgaaatgccgcctgtgagctggtccaacgacaaatattacttgcaacaggtattgccgcggtttagtaaacgtaaagttatacatttcgttcggagtgatacgcgattggcgaacaatggtctttctcttgaccttcaaaggctgagatgccgagtgaatttccaaggactgagattcactccacggattgaggctttgggatcaaagttagttcggattcttcaacaaagagggtcttttgtggctttgcatttgagatatgagatggacatgttggctttctctggttgcactcatggttgtaccgatgaagaagctgaagaactcaaaaagatgaggtatgcatatccatggtggagagagaaagagatagtttcagaagaaaggagagtgcaaggactgtgtcctttgacaccggaggaggcggttttggttcttaaagcattggggtttcaaaaggatacacagatatacattgcagctggtgagatttttggtggtgcaaagagattagcccttctaaaggaatcatttccacgaattgtgaaaaaggaaatgctattagatccaacagaattgcaacagtttcagaaccattcatctcaaatggcagctctagatttcatagtatctgtagccagcaacacttttattcctacctattatggaaacatggcaaaagttgtcgaaggtcatcggaggtaccttgggtttaagaaaacaatcttgctagaccggaagagacttgtggagcttttagacttgcataacaacaaaacgctctcttgggatcagtttgcagtagctgtcaaggatgcccatcaaggacgacgaatgggagaaccaacacatcggaaagttatctccgttagaccgaaggaagaagattacttctatgccaatcctcaagaatgtatcagttaaaatgatatagatcactaaccactagagcaggatttgattagttcttgtttctttctttgtttatagacctttttcagtttctgtaaagtaagatgaagctaaaaagattgtgtcatcgttgtacc

SEQ ID NO: 11819 - protein, 481 aa, Arabidopsis thaliana
MSVVVGDRSESTLMRSDYKAPPSQAIPKARLQVWFFRVCSCILVWTCLIQLFWHSQIFTGLTNHISRFSLPVQSVPLPPPLPPRNYTSNGILLVSCNGGLNQMRAAICDMVTVARLLNLTLVVPELDKKSFWADTSDFEDIFDIKHFIDSLRDEVRIIRRLPKRYSKKYGFKLFEMPPVSWSNDKYYLQQVLPRFSKRKVIHFVRSDTRLANNGLSLDLQRLRCRVNFQGLRFTPRIEALGSKLVRILQQRGSFVALHLRYEMDMLAFSGCTHGCTDEEAEELKKMRYAYPWWREKEIVSEERRVQGLCPLTPEEAVLVLKALGFQKDTQIYIAAGEIFGGAKRLALLKESFPRIVKKEMLLDPTELQQFQNHSSQMAALDFIVSVASNTFIPTYYGNMAKVVEGHRRYLGFKKTILLDRKRLVELLDLHNNKTLSWDQFAVAVKDAHQGRRMGEPTHRKVISVRPKEEDYFYANPQECIS

SEQ ID NO: 11820 - protein, 468 aa, Arabidopsis thaliana
MRSDYKAPPSQAIPKARLQVWFFRVCSCILVWTCLIQLFWHSQIFTGLTNHISRFSLPVQSVPLPPPLPPRNYTSNGILLVSCNGGLNQMRAAICDMVTVARLLNLTLVVPELDKKSFWADTSDFEDIFDIKHFIDSLRDEVRIIRRLPKRYSKKYGFKLFEMPPVSWSNDKYYLQQVLPRFSKRKVIHFVRSDTRLANNGLSLDLQRLRCRVNFQGLRFTPRIEALGSKLVRILQQRGSFVALHLRYEMDMLAFSGCTHGCTDEEAEELKKMRYAYPWWREKEIVSEERRVQGLCPLTPEEAVLVLKALGFQKDTQIYIAAGEIFGGAKRLALLKESFPRIVKKEMLLDPTELQQFQNHSSQMAALDFIVSVASNTFIPTYYGNMAKVVEGHRRYLGFKKTILLDRKRLVELLDLHNNKTLSWDQFAVAVKDAHQGRRMGEPTHRKVISVRPKEEDYFYANPQECIS

SEQ ID NO: 11821 - protein, 379 aa, Arabidopsis thaliana
MRAAICDMVTVARLLNLTLVVPELDKKSFWADTSDFEDIFDIKHFIDSLRDEVRIIRRLPKRYSKKYGFKLFEMPPVSWSNDKYYLQQVLPRFSKRKVIHFVRSDTRLANNGLSLDLQRLRCRVNFQGLRFTPRIEALGSKLVRILQQRGSFVALHLRYEMDMLAFSGCTHGCTDEEAEELKKMRYAYPWWREKEIVSEERRVQGLCPLTPEEAVLVLKALGFQKDTQIYIAAGEIFGGAKRLALLKESFPRIVKKEMLLDPTELQQFQNHSSQMAALDFIVSVASNTFIPTYYGNMAKVVEGHRRYLGFKKTILLDRKRLVELLDLHNNKTLSWDQFAVAVKDAHQGRRMGEPTHRKVISVRPKEEDYFYANPQECIS

SEQ ID NO: 11822 - DNA, 2340 bp, Arabidopsis thaliana
aaaaaagacttcagcatctgcttcctctcgacaatttcgacattactctttcgtttttcaccccttccttcttctcctttagccgcccgtcgtcgatctctgcaacactttccgacgatttctccgtctgatctcaagtgacagtgaaaaccatttaaattcgttacttgtgagcctccttagaagattatgggtgatttagagaacttgcttttggaagctgctgggagaacaaattcagcagggaggagtcgtcatcctccatcatcgaggagacgtgagggttcttactctgatggtagtagcgattcaagggatgattctgatgaagatcgtggctatgctagtagaaaaccctctgggtctcaagttcctttgaagaagagattggaggcagagagagaagatcgagctgctcgagttgaaggtggttatggagatggaccatctgatcgtgaaggtgacagcagcgaggagtctgattttggagatgacctttacaagaatgaggaagacaggcagaagcttgctggaatgactgagtttcagagagagatgattctctctgaacgtgctgataagaaaggtgataagaacttcactgagaaacttaggtccaagagagaaagtgagaaaacccctgtttctaaaaaggagactcagcctcttccggcctctcgtggtgtgcgttcatctgctagatctgcagacagagccgctgctaaggatgatgccctgaatgaattgagggcgaagcgtatgaagcagcaggacccagcagctctcaggaaactgagagatgcatcaaaaggtggttcaggtagtcgagatttctcatcaacgaagaggaaaccgttagcttcctccaatttgagtagttccagccaaagtgacagtgatagtaggtctcagagtgatgatgaaggctcgaatggaggaatgctagacagtgatgatgacaggtcagatgtgcctacgtttgaggatgttaaggaagttaccattagacggtctaagcttgccaaatggctaatggagcctttctttgaagagcttatagttgggtgctttgtgagggttgggatcggaaggtcaaagagtggtccaatttacagactctgctgggtgaagaatgttgatgcaaccgatcctgacaagacctacaagctagagaataaaactacacacaagtaccttaacgtcgtctggggaaatgaaacctcggcggctcgatggcaaatggctatgatctcagatggtcatccgctggaggaagagtataggcaatggatcagagaggttgagcgaacaaatggtcgcatgcccacaaaacaagatatatcggagaagaaagaagcgatacaaagaacaaacagttttgtttactctgcggaaactgttaaacagatgctgcaggagaaaaaatctgcgtcagtcaggccaatgaatgttgcggccgagaaagatcggcttagaaaagaattggaaattgcgcagagcaaaaacgatgaagcaggtgtagagaggatcaagtcgaaaatcaaacagctcgacgcttcacggaacaagaaaggggtagataaaaaagcgcttaaacttgctgagatgaacaagaagaacagagccgagaatttcaagaacgcatctgaggtaaaatcaataactgctagtctcaaagccggtgaagcagggtatgatccgttttcaagaagatggacccgatcatcaaactactacaacgggaaaaacaaggggaaagatggagaagagaacgaggcagtggttgcagcagcggttgagaccaatggagcagatgcaggagcagatgcaggagcaggtgttgaagcgacagaagcagctttagaagcagctgcagaggcaggaaagctaatagacacaagagctccaataggtcaaggagcagaacacaatcagcttcataactttgaattgtcgttatcgctaacggctttacagaagtacggaggacctcaaggagtacagaaagcgttcatggcgaggaagcaactgaccgaagcaactgtgggatgcagagtcgcagagaacgatggcaagagacatggccttacgttaactgttagtgattacaagagaaggagaggtcttctctgatttatttgcatttttttcaagtctcagtgtttcattatcttctgaaaactgcttcttggttcttcttttcttcatatctttcttttgtactccacaaaatatgtttagatgagtttgttttttcttgaaatatttttgtactcgtttttgtgtgaactctcctgattagtgtatgactgcatgaaattagaaaatcaagtcttttgc

SEQ ID NO: 11823 - protein, 647 aa, Arabidopsis thaliana
MGDLENLLLEAAGRTNSAGRSRHPPSSRRREGSYSDGSSDSRDDSDEDRGYASRKPSGSQVPLKKRLEAEREDRAARVEGGYGDGPSDREGDSSEESDFGDDLYKNEEDRQKLAGMTEFQREMILSERADKKGDKNFTEKLRSKRESEKTPVSKKETQPLPASRGVRSSARSADRAAAKDDALNELRAKRMKQQDPAALRKLRDASKGGSGSRDFSSTKRKPLASSNLSSSSQSDSDSRSQSDDEGSNGGMLDSDDDRSDVPTFEDVKEVTIRRSKLAKWLMEPFFEELIVGCFVRVGIGRSKSGPIYRLCWVKNVDATDPDKTYKLENKTTHKYLNVVWGNETSAARWQMAMISDGHPLEEEYRQWIREVERTNGRMPTKQDISEKKEAIQRTNSFVYSAETVKQMLQEKKSASVRPMNVAAEKDRLRKELEIAQSKNDEAGVERIKSKIKQLDASRNKKGVDKKALKLAEMNKKNRAENFKNASEVKSITASLKAGEAGYDPFSRRWTRSSNYYNGKNKGKDGEENEAVVAAAVETNGADAGADAGAGVEATEAALEAAAEAGKLIDTRAPIGQGAEHNQLHNFELSLSLTALQKYGGPQGVQKAFMARKQLTEATVGCRVAENDGKRHGLTLTVSDYKRRRGLL

SEQ ID NO: 11824 - protein, 532 aa, Arabidopsis thaliana
MTEFQREMILSERADKKGDKNFTEKLRSKRESEKTPVSKKETQPLPASRGVRSSARSADRAAAKDDALNELRAKRMKQQDPAALRKLRDASKGGSGSRDFSSTKRKPLASSNLSSSSQSDSDSRSQSDDEGSNGGMLDSDDDRSDVPTFEDVKEVTIRRSKLAKWLMEPFFEELIVGCFVRVGIGRSKSGPIYRLCWVKNVDATDPDKTYKLENKTTHKYLNVVWGNETSAARWQMAMISDGHPLEEEYRQWIREVERTNGRMPTKQDISEKKEAIQRTNSFVYSAETVKQMLQEKKSASVRPMNVAAEKDRLRKELEIAQSKNDEAGVERIKSKIKQLDASRNKKGVDKKALKLAEMNKKNRAENFKNASEVKSITASLKAGEAGYDPFSRRWTRSSNYYNGKNKGKDGEENEAVVAAAVETNGADAGADAGAGVEATEAALEAAAEAGKLIDTRAPIGQGAEHNQLHNFELSLSLTALQKYGGPQGVQKAFMARKQLTEATVGCRVAENDGKRHGLTLTVSDYKRRRGLL

SEQ ID NO: 11825 - protein, 525 aa, Arabidopsis thaliana
MILSERADKKGDKNFTEKLRSKRESEKTPVSKKETQPLPASRGVRSSARSADRAAAKDDALNELRAKRMKQQDPAALRKLRDASKGGSGSRDFSSTKRKPLASSNLSSSSQSDSDSRSQSDDEGSNGGMLDSDDDRSDVPTFEDVKEVTIRRSKLAKWLMEPFFEELIVGCFVRVGIGRSKSGPIYRLCWVKNVDATDPDKTYKLENKTTHKYLNVVWGNETSAARWQMAMISDGHPLEEEYRQWIREVERTNGRMPTKQDISEKKEAIQRTNSFVYSAETVKQMLQEKKSASVRPMNVAAEKDRLRKELEIAQSKNDEAGVERIKSKIKQLDASRNKKGVDKKALKLAEMNKKNRAENFKNASEVKSITASLKAGEAGYDPFSRRWTRSSNYYNGKNKGKDGEENEAVVAAAVETNGADAGADAGAGVEATEAALEAAAEAGKLIDTRAPIGQGAEHNQLHNFELSLSLTALQKYGGPQGVQKAFMARKQLTEATVGCRVAENDGKRHGLTLTVSDYKRRRGLL

SEQ ID NO: 11826 - DNA, 2902 bp, Arabidopsis thaliana
ggagaaaggtgaagctgaagaagaagaagaagaagactctctaatggcggactcaaactgatttcgaggattctgatttcgttttctagttgaagatctttcaactcttaatctcattaggaagatgtccgacatttccattgacgcattgggccaaactatgggggactttagtaatcatgagaaacttggatttgatttaggagcatttgttggagacttggcttttgaagaagattcaggcagtgaggatatttcattggaagggcttcaacaagaacttgaagaatgtgaaagtgatgaggtaagttattcacttaactgagatcaaacttataaagctagcacctcggttcttctttttcgaagtattgtttctactctcatttgagttactttggagtacatggattgatcatagaatgttagatccatggatatgatgtcctttctatcttgtttgtgtgaaatgtcaggttgttgccaatatactgtctagtggtgacaaacttagagaatatgcaaaaggggttgaaaacaatctacgcaaggttgaattggattcaatcgaggattacataaaggaaagtgacaacctagtctcacttcacgatcagattcgtgactgtgacagcatcctgtcacaaatggaaactcttctcagtggatttcaggaagagattggttctataagttcagacataaagattcttcaagaaaagtcaatggacatgggtttgagattgaaaaaccgcagggtggctgaatcaaagctagcaaaatttgtcgaagacattatagtgccaccaaagatgatagatgtaattgttgacggagaggtgaatgaagagtatatgaaaacgcttgaaattctgagtaagaagctaaaatttgtagaagcagatcaggcagttaaaagttcaagcgttaaaagatgtagagcctgagctcgaaaagcttcggcagaaagctatttccaaggtgtatgattttattgtccagaagcttatagccctgaggaaacccaaaacaaacattcagattcttcaacagagtgtgttattaaagtacaagtatattatctccttcctcaaggaacatggaaaagaagtgtttatggatgttcgtgctgcatacattgataccatgaacaaggtgttaagtgcacattttcgtgcttatattcaagcacttgagaaactacagttagatatagccacagcatatgacttaattggggtagagaccagaaccaccggcctcttctcaagagctagggagccactaaagaaccgctctgccgtttttgctttgggtgacaggataaaaattataaaggatattgatcaacctgctttgatcccgcacatagccgaagccagctctctcaaatatccttatgaagtgctcttcaggagcctgcacaagctacttatggatacagctacttctgaggtatatgttttgtgatgatttctttggtgaagagtccatattctatgaaatttttgcgggtccattttctgtcatcgatgagcacttcaatcccgttctttcaaactgttttgatgctattggcctgatgcttatgattcgcataatacaccaccaccaggtattaacgatgacctaactactagtttatctgcgttttggtgaatatcttggaattgggtaatttatttagcttcttcccttttgaacttttctagtctcccacatatgtgagaatgcattgaagtatggttagatatttatcaacttggcattggaaagagttctcttaatatcttgcaaactaacgatgtagatataccttcaactggtccacataggcgtattacaaccagtctatattttttctcaacagtatgataatctagtgtagcttatattacttattttcatgatccagccttttgcaagggtcatgatggtattatatgtccactaatagttaagcaatactttcccaccttttttacagcttatcatgtctcgccggagaattccatgcctggactcatatctggacaaggttaatatttctttgtggcctcgtttcaagatggtgtttgactcacaccttagcagtctgagagatgcaaacattaagacattatgggaagatgatgttcatcctcactatgtcatgaggcgttatgctgaattcacggcttcgtttattcacataaacgttgaatatggagatgggcagcttgatataaatctggagcggttaagaatggctgtagatgggttgattctcaagcttgcaaagttgttcccaaggccaaagcagcaaattgtgtttctcataaataactacgatatgacaatcgctgtactgaaggaagctggaccagaaggtgggaaaattcaaatgcattttgaggaaatgctaaagagtaacacttcattatttgtggaagaactgctggtggagcatttcagtgatttgatcaaattcgtgaaaaatcgagcttctgaggattcgagcttaaatccagagaggtccattacaattgctgaagtagagccactggtgaaggactttggaagcagatggaagacagcgattgagttgatggacaaagacatcataacttccttcagtaacttcttgtgtggtatggatattttgagagctgcattgacacaactattgctctattacacaagactcacagactgcatcaagaagatagatggtggatctgctctgaatagggatcttgtctccatccaatctatcatgtacgagatcaggaaatactccaagactttctgaaagatagcatatgtggctccttaatgaagagtatgtaagataagtcaaaattttcaaagtgaatctaaagccagtattatgggtcagtaatgtatctatctttcaaaccag

SEQ ID NO: 11827 - protein, 265 aa, Arabidopsis thaliana
MSRRRIPCLDSYLDKVNISLWPRFKMVFDSHLSSLRDANIKTLWEDDVHPHYVMRRYAEFTASFIHINVEYGDGQLDINLERLRMAVDGLILKLAKLFPRPKQQIVFLINNYDMTIAVLKEAGPEGGKIQMHFEEMLKSNTSLFVEELLVEHFSDLIKFVKNRASEDSSLNPERSITIAEVEPLVKDFGSRWKTAIELMDKDIITSFSNFLCGMDILRAALTQLLLYYTRLTDCIKKIDGGSALNRDLVSIQSIMYEIRKYSKTF

SEQ ID NO: 11828 - protein, 240 aa, Arabidopsis thaliana
MVFDSHLSSLRDANIKTLWEDDVHPHYVMRRYAEFTASFIHINVEYGDGQLDINLERLRMAVDGLILKLAKLFPRPKQQIVFLINNYDMTIAVLKEAGPEGGKIQMHFEEMLKSNTSLFVEELLVEHFSDLIKFVKNRASEDSSLNPERSITIAEVEPLVKDFGSRWKTAIELMDKDIITSFSNFLCGMDILRAALTQLLLYYTRLTDCIKKIDGGSALNRDLVSIQSIMYEIRKYSKTF

SEQ ID NO: 11829 - protein, 212 aa, Arabidopsis thaliana
MRRYAEFTASFIHINVEYGDGQLDINLERLRMAVDGLILKLAKLFPRPKQQIVFLINNYDMTIAVLKEAGPEGGKIQMHFEEMLKSNTSLFVEELLVEHFSDLIKFVKNRASEDSSLNPERSITIAEVEPLVKDFGSRWKTAIELMDKDIITSFSNFLCGMDILRAALTQLLLYYTRLTDCIKKIDGGSALNRDLVSIQSIMYEIRKYSKTF

SEQ ID NO: 11830 - DNA, 1611 bp, Glycine max
cccccccccccaaggcagtgcctgagcctgaggaaccaaagctgaacaccgatggtcctgatcagtgtaaatcagaaaacgcagactctgcaggtgaagcagaggatgacgatgattttattaccaatgaggttaagaggaggctaaaagaattgagaagaaacagttttatggtgttgattcctgaagaagattcctgccctgaggaaggggaggatgaagaggaagaggaagccggagagacatgctcaaatgaatggagggatgtggaggcagaaggtcagcaatggtggcgtggttttgatgctgtatttgaaaagtactgtgaaagaatgccgttctttgatcggatgagcactcaacagcttagtgaagttggcaaaggttcacagtatacttcaactccatctccaagatctgcttcaaagaagctggcttctccccttcgttgtctttccttgaaaaaatttgaagaacctgatgatgagactgaacatcttcaacagcctgagcatgacccctaccaggatattgaaacagcatatgtaggtcaaatttgcttgacttgggaggcgcttcattgtcagtactctcatatgagtcagaagatatcttggcaacatgataatcctacctgttacaaccatagtgcacaagagtttcaacagttccaggttctattacaaaggtttattgaaaatgaaccttttgagcagggccgtcgagctgaaatttatgctcgcactaggaacaatttgcctaaactgcttcaggttcctaatatacgaggttcagatcatgaattgactgatgattcagagatgagagctcttgctcctgatcttatcgggataattgaaagttctatccttacattccaccttttcatgaaaagggacaagaaaaagtcaagtggtgctaacaatcagaaccagcttgatactcctctacaacagattcagtcgactcttgaaaagaaagtggtgaagctgaaggaactgcgcagaaagaaaaaaaattggaagaagaattcttggccccaaaagcacgaggacattcaggttttgcttggccttattgacgtgaagatcctgtcaagggttctgaggatgacgaggatgactagagaacaactgttttggtgtgaagaaaagatgaaaaaactggatttatcaaatagtaggttagaaagggatccatgtcccatcctcttcccttgctaggatcagttgtatatctgataaatagcagctaattatatagtagcatcagctttagttctttctcctttggatcgataactgttgctggttttgaagacgtcatcaaatcggccctacagctgtttaggatttcttgggaagaattcgggatactgtatgacaatgagggcaagaatgttttctgttacctaatatgtattcttgttctgtcaaaattgtgagtttccaagttgctttgtgaaacctccaatataacattgttgtcacgaattattcttgttggctcccagagtcgtcgatttaatgtttacaacaatgcatcttttttgtctgaaaatgctttgcaactaaggtaaataactaagaatattataagatttgctgtggc

SEQ ID NO: 11831 - protein, 406 aa, Glycine max
PPPKAVPEPEEPKLNTDGPDQCKSENADSAGEAEDDDDFITNEVKRRLKELRRNSFMVLIPEEDSCPEEGEDEEEEEAGETCSNEWRDVEAEGQQWWRGFDAVFEKYCERMPFFDRMSTQQLSEVGKGSQYTSTPSPRSASKKLASPLRCLSLKKFEEPDDETEHLQQPEHDPYQDIETAYVGQICLTWEALHCQYSHMSQKISWQHDNPTCYNHSAQEFQQFQVLLQRFIENEPFEQGRRAEIYARTRNNLPKLLQVPNIRGSDHELTDDSEMRALAPDLIGIIESSILTFHLFMKRDKKKSSGANNQNQLDTPLQQIQSTLEKKVVKLKELRRKKKNWKKNSWPQKHEDIQVLLGLIDVKILSRVLRMTRMTREQLFWCEEKMKKLDLSNSRLERDPCPILFPC

SEQ ID NO: 11832 - protein, 350 aa, Glycine max
MVLIPEEDSCPEEGEDEEEEEAGETCSNEWRDVEAEGQQWWRGFDAVFEKYCERMPFFDRMSTQQLSEVGKGSQYTSTPSPRSASKKLASPLRCLSLKKFEEPDDETEHLQQPEHDPYQDIETAYVGQICLTWEALHCQYSHMSQKISWQHDNPTCYNHSAQEFQQFQVLLQRFIENEPFEQGRRAEIYARTRNNLPKLLQVPNIRGSDHELTDDSEMRALAPDLIGIIESSILTFHLFMKRDKKKSSGANNQNQLDTPLQQIQSTLEKKVVKLKELRRKKKNWKKNSWPQKHEDIQVLLGLIDVKILSRVLRMTRMTREQLFWCEEKMKKLDLSNSRLERDPCPILFPC

SEQ ID NO: 11833 - protein, 296 aa, Glycine max
MPFFDRMSTQQLSEVGKGSQYTSTPSPRSASKKLASPLRCLSLKKFEEPDDETEHLQQPEHDPYQDIETAYVGQICLTWEALHCQYSHMSQKISWQHDNPTCYNHSAQEFQQFQVLLQRFIENEPFEQGRRAEIYARTRNNLPKLLQVPNIRGSDHELTDDSEMRALAPDLIGIIESSILTFHLFMKRDKKKSSGANNQNQLDTPLQQIQSTLEKKVVKLKELRRKKKNWKKNSWPQKHEDIQVLLGLIDVKILSRVLRMTRMTREQLFWCEEKMKKLDLSNSRLERDPCPILFPC

SEQ ID NO: 11834 - DNA, 777 bp, Glycine max
aattttcttttattgttgttgacatcttaatatctttgtctttcgttctcccttctattacctaatcaaggagcaatgatgaattcctcacctcctccagcaaaaagactttcgaagtatgctcctctgattcatgttatgaaggtacgaccagatagaataaatcttataattggttctggtgggaaaaaagtgaagagcattattgaggaatctggagtagacactattgatacagaagatgatggcactgtgaaaatatttgcaaaagacttgcctagtttagagaagtctaaagctattattaatagtttgacgatggttccaactattggtgatatatataggagctgtgaaatcaaatcaatagcctcatatggagtttttgtagagatagcacctggacgagagggactgtgtcatatcagtgaactgagttcaggttggctacccaaggcagaagatgttttcaaagtgggagatcgcattgatgtaaagcttatagagataaatgaaaagggacagctgcgccttagtcaccgagcactgcttcctgatacagaagcttcaccgaaggatggtttagtggaagaaaagactgaacagtctaaggataagtctagcactcccaatgtcacagcctcttctaaaaggagttcagaggatgattctgtgcttccttctaaaaagtttgtcaggagattggtcagctcttccctggataagcctttcactaacaaagacaagacaaagaagagtagcaacaaagcagttggt

SEQ ID NO: 11835 - protein, 234 aa, Glycine max
MMNSSPPPAKRLSKYAPLIHVMKVRPDRINLIIGSGGKKVKSIIEESGVDTIDTEDDGTVKIFAKDLPSLEKSKAIINSLTMVPTIGDIYRSCEIKSIASYGVFVEIAPGREGLCHISELSSGWLPKAEDVFKVGDRIDVKLIEINEKGQLRLSHRALLPDTEASPKDGLVEEKTEQSKDKSSTPNVTASSKRSSEDDSVLPSKKFVRRLVSSSLDKPFTNKDKTKKSSNKAVG

SEQ ID NO: 11836 - protein, 233 aa, Glycine max
MNSSPPPAKRLSKYAPLIHVMKVRPDRINLIIGSGGKKVKSIIEESGVDTIDTEDDGTVKIFAKDLPSLEKSKAIINSLTMVPTIGDIYRSCEIKSIASYGVFVEIAPGREGLCHISELSSGWLPKAEDVFKVGDRIDVKLIEINEKGQLRLSHRALLPDTEASPKDGLVEEKTEQSKDKSSTPNVTASSKRSSEDDSVLPSKKFVRRLVSSSLDKPFTNKDKTKKSSNKAVG

SEQ ID NO: 11837 - protein, 213 aa, Glycine max
MKVRPDRINLIIGSGGKKVKSIIEESGVDTIDTEDDGTVKIFAKDLPSLEKSKAIINSLTMVPTIGDIYRSCEIKSIASYGVFVEIAPGREGLCHISELSSGWLPKAEDVFKVGDRIDVKLIEINEKGQLRLSHRALLPDTEASPKDGLVEEKTEQSKDKSSTPNVTASSKRSSEDDSVLPSKKFVRRLVSSSLDKPFTNKDKTKKSSNKAVG

SEQ ID NO: 11838 - DNA, 1584 bp, Glycine max
  misc_feature (1536)..(1536): n is a, c, g, or t
  misc_feature (1540)..(1540): n is a, c, g, or t
gtgtcagaaagcaaatattgcctattcggcaatatggcggaaaatggttcaattgagctgaacaagtttgtgttgttttgtttgttgttgctaatacaagtggcagtttctgaaatcatttttgaagagcgatttgatgatggatggcgaagtaggtgggtgaaatcagactggaaaagcagtgagggcaaagcaggttcattcaagcacacagctggaaaatgggctggtgatccagatgacaaaggtattcaaacatccagtgatgccaaacactttgccatctctgcaaaaataccagaattcacaaacaagaacagaacattggtccttcagtattctgtaaaatttgagcaagagattgaatgtggtggagggtacatcaagcttctctctggatttgttaatcaaaagaagtttggtggggatacaccatatattttaatgtttggaccagatttatgtggcacggatacaaagaagctccatgtgatactctcctaccacggtcaaaattaccccataaagaaggacctgcaatgtgaaactgacaggttaactcatttctacacattcattctcaggccagatgccacatacagtgtcctggttgataatagagagagagattctggaagcatgtatacagattgggatattcttcctccacgaaaaatcaaatatgtcaaggccaaaaagcctgcagactgggaggaaagagaatacattgaagaccctgatgatgtcaaacctgagggatatgattcaatcccaagagaaattcctgacccaaatgctaaagagcctgaaaactgggatgaagaggaagatgggaaatggaaaccaccaaagataccaaatccagcatacaaaggaccatggaaaagaaagaaaatcaagaaccctaactacaaagggaaatggaaaactccatggatagataatccagagtttgaagacgaccctgatctttatgtgcttaagcctatcaagtatgtaggtattgaagtttggcaggttaaaggcggttcagtttttgacaacgttttgatttgtgacgaccctgattatgcaaaacaagttgttgaggaggtgtttgccaacagggagattgaaaaggaaggttttgaggaagcagagaaagtgagaaaagccaaagaggaggaggaggctcaaagagcaagagaagaaggtgaaaggcgtagacgagagagaggtcatgatcgacgatatcgggacagatatagagacaaatatagaaggcatcgctatgattacgatggtcatgacgagctttgatgggataaaacgtccttctcaattatctggttgacaaatttcaagattgttatgaattatagttacattgatagtccatctcatgttactttccaagggaaactttttaattttaaataaaagtggtttatttgtcgcatatctatataggagtattatttttgtcttgtcttcagttgtcatgcatttactatagactggggaatataaacccaaacccaatttgccatcgataanaagnttgcaacaagggctatagaaatgtgcacgagttttttttttttt

SEQ ID NO: 11839 - protein, 432 aa, Glycine max
VSESKYCLFGNMAENGSIELNKFVLFCLLLLIQVAVSEIIFEERFDDGWRSRWVKSDWKSSEGKAGSFKHTAGKWAGDPDDKGIQTSSDAKHFAISAKIPEFTNKNRTLVLQYSVKFEQEIECGGGYIKLLSGFVNQKKFGGDTPYILMFGPDLCGTDTKKLHVILSYHGQNYPIKKDLQCETDRLTHFYTFILRPDATYSVLVDNRERDSGSMYTDWDILPPRKIKYVKAKKPADWEEREYIEDPDDVKPEGYDSIPREIPDPNAKEPENWDEEEDGKWKPPKIPNPAYKGPWKRKKIKNPNYKGKWKTPWIDNPEFEDDPDLYVLKPIKYVGIEVWQVKGGSVFDNVLICDDPDYAKQVVEEVFANREIEKEGFEEAEKVRKAKEEEEAQRAREEGERRRRERGHDRRYRDRYRDKYRRHRYDYDGHDEL

SEQ ID NO: 11840 - protein, 421 aa, Glycine max
MAENGSIELNKFVLFCLLLLIQVAVSEIIFEERFDDGWRSRWVKSDWKSSEGKAGSFKHTAGKWAGDPDDKGIQTSSDAKHFAISAKIPEFTNKNRTLVLQYSVKFEQEIECGGGYIKLLSGFVNQKKFGGDTPYILMFGPDLCGTDTKKLHVILSYHGQNYPIKKDLQCETDRLTHFYTFILRPDATYSVLVDNRERDSGSMYTDWDILPPRKIKYVKAKKPADWEEREYIEDPDDVKPEGYDSIPREIPDPNAKEPENWDEEEDGKWKPPKIPNPAYKGPWKRKKIKNPNYKGKWKTPWIDNPEFEDDPDLYVLKPIKYVGIEVWQVKGGSVFDNVLICDDPDYAKQVVEEVFANREIEKEGFEEAEKVRKAKEEEEAQRAREEGERRRRERGHDRRYRDRYRDKYRRHRYDYDGHDEL

SEQ ID NO: 11841 - protein, 284 aa, Glycine max
MFGPDLCGTDTKKLHVILSYHGQNYPIKKDLQCETDRLTHFYTFILRPDATYSVLVDNRERDSGSMYTDWDILPPRKIKYVKAKKPADWEEREYIEDPDDVKPEGYDSIPREIPDPNAKEPENWDEEEDGKWKPPKIPNPAYKGPWKRKKIKNPNYKGKWKTPWIDNPEFEDDPDLYVLKPIKYVGIEVWQVKGGSVFDNVLICDDPDYAKQVVEEVFANREIEKEGFEEAEKVRKAKEEEEAQRAREEGERRRRERGHDRRYRDRYRDKYRRHRYDYDGHDEL

SEQ ID NO: 11842 - DNA, 1005 bp, Glycine max
agtcagagcaataactgctgctattgaaaaggacttatgggctactggatctgtgaacgatgagtatcttaaagccttaaattctctatttagcaacttcccaagactgagagcaactgaaccagcaacacttagcattccccatttggttacgtccttaaagacaggctctgaggctactcaggaagctgccttggatgcacttttcctgcttaggcaagcttggtcagcatgtccagcagaagtttcaagagctcagtcaatagcagctgcagatgctattcctttgctgcagtacttaatccagtctggcccacctcgctttcaggagaaggcagaatttttattgcagtgtttgccaggaacgttggtggtgatcatcaagtgtggtaacaatatgaagcaatctgttggaaacccaagtgttttttgcaagcttacactaggaaacactcctccaaggcaaaccaaggtggtctcaactggccctaatccggagtgggatgagagctttacatggtcgtttgagagtcctccaaaaggtcagaagcttcacatttcttgcaaaaacaagagcaaaatgggaaagagttcatttgggaaagtgacgatccagattgatcgggtagtaatgcttggagcagtatctggtgagtacactctgttgccggaaagtaaaagtggaccctcgaggaatttagaaattgaatttcagtggtctaacaagtgatatacctgtttccgtctttactgtgacggctttgaaattggaacacggttgaaaagaaatttttgtctaaattttgtattatttatcttgctagtgtacatagccacagttatttgttttttggtctatagtcccaaacaaattcctttaaaataatattcttttgtaacttgatccttcgttccctaggttaaatgctaggggcacacgaagtaatctgcttcgaatacctgtatgattttgcacgttgtcaatttaagatgggttgtttatat

SEQ ID NO: 11843 - protein, 242 aa, Glycine max
VRAITAAIEKDLWATGSVNDEYLKALNSLFSNFPRLRATEPATLSIPHLVTSLKTGSEATQEAALDALFLLRQAWSACPAEVSRAQSIAAADAIPLLQYLIQSGPPRFQEKAEFLLQCLPGTLVVIIKCGNNMKQSVGNPSVFCKLTLGNTPPRQTKVVSTGPNPEWDESFTWSFESPPKGQKLHISCKNKSKMGKSSFGKVTIQIDRVVMLGAVSGEYTLLPESKSGPSRNLEIEFQWSNK

SEQ ID NO: 11844 - DNA, 1156 bp, Glycine max
tttgctttcttcaacaatccaaggtatattaagagagtccacccaattataacacacagaatatcaaagtattaaattccaactcttacaagcttttaccaatctttcacaactcttgttcaaggcgaaacagcttataggatgaagagcaaaatcttgaaggcactaccaaaagcagttgcagcagtcaccgtgacatttcaaaaccatccattcagcccaggcagggatcacaaatcaaagcctatcgtatctatgattccccatgaagctagaagaaaaacccacgatagaggcaataacggcattgatgaaatttattcccaagaacccacttcaccaaaaatctcctgcatgggacagatcaagcacaagaagaaacaaatcaaaaaatcaaagtcaaagagcaagtccatgacaaaagaagcgaggaacgttgctagcaaaaaaacatcctcagcttccagagacatagaggtaaaaaagcacgtttccacgtttcacaagatgttattattccatggggcaaagccaaaatctgagggaaggaaatccaacgcttctgcgcctggagatattaacaaggatcttgctcttgcggacgcagcacgcgcaccgcgcgtgagtcagatgagaaggttttctagtggacgtgacgctcttgctgaatttgattggaaggtgtcgccagatgaagaggaaattgattactattcggatgaatacagagtggatagtgatggcgaagaagaggaagagattattatccctttctctgcaccccttttggttggtggtggagttggtcatactcgtgggggtgtgcttaatttgaagccacgaaaagaaattaacctgtggaagagaagaaccatggctccacccaggcctcttcaattggacagagcaaactgattatttgttcattacaaaaatgaagattaatttgatttttcgattttttttaatggctatgttttggttctgaaacattttctgtgcagaactgctgatagatttaattaggtacagcaaaaaaatggtgttggcaacatgttgtgataggcaagtatcatattgtgaatgaatatatagcatcaaaattacgatctgtatcctagtctaatcaaaagttaagatacaaatgccattcgtc

SEQ ID NO: 11845 - protein, 257 aa, Glycine max
MKSKILKALPKAVAAVTVTFQNHPFSPGRDHKSKPIVSMIPHEARRKTHDRGNNGIDEIYSQEPTSPKISCMGQIKHKKKQIKKSKSKSKSMTKEARNVASKKTSSASRDIEVKKHVSTFHKMLLFHGAKPKSEGRKSNASAPGDINKDLALADAARAPRVSQMRRFSSGRDALAEFDWKVSPDEEEIDYYSDEYRVDSDGEEEEEIIIPFSAPLLVGGGVGHTRGGVLNLKPRKEINLWKRRTMAPPRPLQLDRAN

SEQ ID NO: 11846 - protein, 219 aa, Glycine max
MIPHEARRKTHDRGNNGIDEIYSQEPTSPKISCMGQIKHKKKQIKKSKSKSKSMTKEARNVASKKTSSASRDIEVKKHVSTFHKMLLFHGAKPKSEGRKSNASAPGDINKDLALADAARAPRVSQMRRFSSGRDALAEFDWKVSPDEEEIDYYSDEYRVDSDGEEEEEIIIPFSAPLLVGGGVGHTRGGVLNLKPRKEINLWKRRTMAPPRPLQLDRAN

SEQ ID NO: 11847 - protein, 186 aa, Glycine max
MGQIKHKKKQIKKSKSKSKSMTKEARNVASKKTSSASRDIEVKKHVSTFHKMLLFHGAKPKSEGRKSNASAPGDINKDLALADAARAPRVSQMRRFSSGRDALAEFDWKVSPDEEEIDYYSDEYRVDSDGEEEEEIIIPFSAPLLVGGGVGHTRGGVLNLKPRKEINLWKRRTMAPPRPLQLDRAN

SEQ ID NO: 11848 - DNA, 595 bp, Glycine max
  misc_feature (96)..(96): n is a, c, g, or t
gcaaaactagtggaaggtcatcgtaggtattctggttttaaaaggaccatcttattggatcgaaaaaaggtggtagaattggttgatatgcatcanaatggaaccctttcatggattgagtttgcagatgctgtaagacgggttcacgagacgagaattgctcagccaactcggcgaagagttatattagataagccaaaggaggaggactatttctatgccaaccctcatgagtgcctgtgtgaggaaaataactgtgatgacttgctaggtcctcacaactctagtcaggtatcatcatgagttaggaaatggaatccaaaatatgcactgattccactaacttgctttgttaagaatcaagattactgcccaaagatcagagattacaagaattttgaaggaaaccagggaaaggaaagcaaaagagtaaaaaaaaaaaacaagaaaaatgagaggaaatattagcttatgttgaggctagcaaaagatgccccttcatttgttatatcttcattagattttttttttcatccgcctcttgaaagtttcattcaattgaatatttgacaattcaaatttagtatacatagtg

SEQ ID NO: 11849 - protein, 100 aa, Glycine max
  misc_feature (32)..(32): Xaa can be any naturally occurring amino acid
AKLVEGHRRYSGFKRTILLDRKKVVELVDMHXNGTLSWIEFADAVRRVHETRIAQPTRRRVILDKPKEEDYFYANPHECLCEENNCDDLLGPHNSSQVSS

SEQ ID NO: 11850 - protein, 71 aa, Glycine max
  misc_feature (3)..(3): Xaa can be any naturally occurring amino acid
MHXNGTLSWIEFADAVRRVHETRIAQPTRRRVILDKPKEEDYFYANPHECLCEENNCDDLLGPHNSSQVSS

SEQ ID NO: 11851 - DNA, 952 bp, Glycine max
acttttggatatagtgactgctgcaaccatacagttcaaggaaatgggtggaggcaggaggcctgctgaagctgtgaaaacaaatgaacagtcttcagaaagaaagaaaggttttggtgattggatgaatcttatcaaacctgccaatgaagagaaggatcattgggtaccggatgaagccgtctcaaaatgtacagcatgtggcactgattttggggcttttgttcgcaggcatcactgtaggaactgtggtgatattttctgtgacaaatgtacccatggtagaattgctctgactgctgatgagaatgctcagcctgtacgagtttgtgaccgttgcatggctgaagtgactcagcggctgactagtgcgaaagagtcatcaagtaaacctgcattgcagagtcatgaggatcttgcaaagaaacttcaggaggaactagagagaaatcaaaaggcatcaggttccaagtctgatggatctgcaagacggatgaaggaagttgcatgtcctatttgcactgtccatctgcaggttcaggtgcctagctcgggttcagagactattgagtgtggagtttgccagcacccatttcttgtgagtgctcattgagttccgataaacattaatatggatgagaaggtgtcttcgtgtttcacaagtttaaaattcatttgttttactgagctatctcttgcacattaattatcaatgattgggattgccttccttttactattatttttgggcttgtttcatgtcctagttttaccttgcatgcatcttttttttatttttttattttgtgcttaaagcttggtgtgcttcgttagttgttcaattctcacttaaattcgtttatccgcttgtataaaatagacgctgaacacatatatatatacatgtatagctatggtgaattcattatggtttcagacgatttgttggttc

SEQ ID NO: 11852 - protein, 203 aa, Glycine max
LLDIVTAATIQFKEMGGGRRPAEAVKTNEQSSERKKGFGDWMNLIKPANEEKDHWVPDEAVSKCTACGTDFGAFVRRHHCRNCGDIFCDKCTHGRIALTADENAQPVRVCDRCMAEVTQRLTSAKESSSKPALQSHEDLAKKLQEELERNQKASGSKSDGSARRMKEVACPICTVHLQVQVPSSGSETIECGVCQHPFLVSAH

SEQ ID NO: 11853 - protein, 189 aa, Glycine max
MGGGRRPAEAVKTNEQSSERKKGFGDWMNLIKPANEEKDHWVPDEAVSKCTACGTDFGAFVRRHHCRNCGDIFCDKCTHGRIALTADENAQPVRVCDRCMAEVTQRLTSAKESSSKPALQSHEDLAKKLQEELERNQKASGSKSDGSARRMKEVACPICTVHLQVQVPSSGSETIECGVCQHPFLVSAH

SEQ ID NO: 11854 - protein, 162 aa, Glycine max
MNLIKPANEEKDHWVPDEAVSKCTACGTDFGAFVRRHHCRNCGDIFCDKCTHGRIALTADENAQPVRVCDRCMAEVTQRLTSAKESSSKPALQSHEDLAKKLQEELERNQKASGSKSDGSARRMKEVACPICTVHLQVQVPSSGSETIECGVCQHPFLVSAH

SEQ ID NO: 11855 - DNA, 322 bp, Glycine max
  misc_feature (58)..(58): n is a, c, g, or t
atagttcttgtgggtggtgctgagtactacagaattattaatggcctggacttggaanacaagcttcatccgggtggtccatttgacccattgggcctagcaaaggatccagaccaagctgcacttctaaaggtgaaggaaattaagaatggtaggcttgcaatgtttgcaatgcttggtttctacttccaagcttatgtcactggagaaggtccagttgagaacttagcaaaacatctcagtgacccttttggtaataacctgctcactgtgattgctggctccgttgagagggctccaactctgtaaatcaatcatcttt

SEQ ID NO: 11856 - protein, 102 aa, Glycine max
  misc_feature (20)..(20): Xaa can be any naturally occurring amino acid
IVLVGGAEYYRIINGLDLEXKLHPGGPFDPLGLAKDPDQAALLKVKEIKNGRLAMFAMLGFYFQAYVTGEGPVENLAKHLSDPFGNNLLTVIAGSVERAPTL

SEQ ID NO: 11857 - DNA, 1157 bp, Glycine max
aattcggcacgaggtggagtgagagatagtgactgcaaaaccgctccagccttgtttcttctcagatcttcttccatggaacagtacgagaaggtggagaagataggcgagggaacatacggcgtcgtttacaaggctcgcgaccgcgtcaccaatgagaccatcgctctcaagaagattcgcctcgagcaggaggacgaaggcgttcccagcaccgccattcgcgagatttctctcctcaaagagatgcagcataggaacattgttaggttgcaggatgtagtacacagtgagaagcgattgtatctggtttttgagtatctggacttggatctaaagaaacatatggattcatctccagagtttgtgaaagatccacggcaagtaaagatgttcctttatcaaattctctgtggcattgcttactgtcattcacatagagttcttcatcgagacttgaaaccacagaatttgttgatagatcgccgtactaattcactaaagcttgcagattttggattggctagggcatttggcattcctgtcaggacatttacacatgaggtggtgacattatggtacagagctccagaaatattgcttggatctcgtcattattctacgccagttgatgtttggtcagtgggatgtatatttgcagagatggtaaaccgacgacctctattccctggggactctgagattgatgaattatttaaaatattcagaatcttgggtaccccaaatgaagacacatggcctggtgtaacttcattgcctgattttaaatcaacatttcccaaatggccatccaaggacttggcaaatgtggttccaaatcttgatgcagctggtcttaatcttctttctagtatgctttgcttggatcccagcaaaagaatcaccgccaggagcgctgtggagcatgaatacttcaaagacattaaatttgttccctgattccatatcttgatggcaaacgtgtttatagtaatattgtgcagaatttatgggttttgactctgcgagaaatgcgtgctgtctttttctattttcttagtgacttgggagtgtgagccatatttccattttttggtccttacagaatgtttcagattcaacttgagtgtgattatattgcatattactttttcatt

SEQ ID NO: 11858 - protein, 319 aa, Glycine max
NSARGGVRDSDCKTAPALFLLRSSSMEQYEKVEKIGEGTYGVVYKARDRVTNETIALKKIRLEQEDEGVPSTAIREISLLKEMQHRNIVRLQDVVHSEKRLYLVFEYLDLDLKKHMDSSPEFVKDPRQVKMFLYQILCGIAYCHSHRVLHRDLKPQNLLIDRRTNSLKLADFGLARAFGIPVRTFTHEVVTLWYRAPEILLGSRHYSTPVDVWSVGCIFAEMVNRRPLFPGDSEIDELFKIFRILGTPNEDTWPGVTSLPDFKSTFPKWPSKDLANVVPNLDAAGLNLLSSMLCLDPSKRITARSAVEHEYFKDIKFVP

SEQ ID NO: 11859 - protein, 294 aa, Glycine max
MEQYEKVEKIGEGTYGVVYKARDRVTNETIALKKIRLEQEDEGVPSTAIREISLLKEMQHRNIVRLQDVVHSEKRLYLVFEYLDLDLKKHMDSSPEFVKDPRQVKMFLYQILCGIAYCHSHRVLHRDLKPQNLLIDRRTNSLKLADFGLARAFGIPVRTFTHEVVTLWYRAPEILLGSRHYSTPVDVWSVGCIFAEMVNRRPLFPGDSEIDELFKIFRILGTPNEDTWPGVTSLPDFKSTFPKWPSKDLANVVPNLDAAGLNLLSSMLCLDPSKRITARSAVEHEYFKDIKFVP

SEQ ID NO: 11860 - protein, 237 aa, Glycine max
MQHRNIVRLQDVVHSEKRLYLVFEYLDLDLKKHMDSSPEFVKDPRQVKMFLYQILCGIAYCHSHRVLHRDLKPQNLLIDRRTNSLKLADFGLARAFGIPVRTFTHEVVTLWYRAPEILLGSRHYSTPVDVWSVGCIFAEMVNRRPLFPGDSEIDELFKIFRILGTPNEDTWPGVTSLPDFKSTFPKWPSKDLANVVPNLDAAGLNLLSSMLCLDPSKRITARSAVEHEYFKDIKFVP

SEQ ID NO: 11861 - DNA, 1219 bp, Glycine max
  misc_feature (172)..(172): n is a, c, g, or t
  misc_feature (994)..(994): n is a, c, g, or t
  misc_feature (1082)..(1082): n is a, c, g, or t
gtgagttcaaggctaacaagatctccgaggaagagtatgttaagtcaattaaggaggaaattcgcaaagttgttgaacttcaagaagagcttgatattgatgttcttgttcatggagaaccagagagaaatgatatggttgagtacttcggtgagcaattgtcaggctttgncttcactgttaatgggtgggtgcaatcctatggttcccgttgtgtgaagccaccaatcatctatggtgatgtgagccgcccaaagccaatgactgtcttctggtcatctctggctcagagctttaccaagcgcccaatgaagggaatgcttaccggtcctgttaccattctcaactggtcctttgttagaaatgaccaacctagatctgagaccacctaccagattgcttgggctatcaaggacgaagtggaggaccttgaaaaggctggcatcactgttatccaaattgatgaagctgctttgagagagggtctgccactgaggaaatcagaacaagctcactacttggactgggctgtccatgccttcagaatcaccaatgttggtgtgcaggataccactcagatccacacccacatgtgctactccaacttcaacgacatcatccactccatcatcgacatggacgctgatgttatcaccattgagaactctcgctccgatgagaagctcctgtcagtcttccgtgaaggtgtgaagtatggtgctggaattggccctggtgtctatgacatccactccccaagaataccaccaactgaagaaatcgctgacagaatcaataagatgcttgcagtgctcgagaagaacatcttgtgggtcaaccctgactgtggtctcaagacccgcaagtacactgaagtgaagccagccctcacaaacatggttgccgcagcaaaactcatccgtaacgaacttgccaagtgaatggtataggaaagtagaatctacaagttcattggttctgcttttataatacnccaaagaaaaattttctatattgggttgtttcaataaccgtgtgtggaatatttagatgttttagcatgctctgtgagcaattgattnttcctcaacccctctccccttatttttccccactcctgttttccctaatgaatgttgtatctttgcggcttcgccgcaatccttattgatatgaaattttaccagttttgtgcaaataactatgagcatctatatcg

SEQ ID NO: 11862 - protein, 312 aa, Glycine max
  misc_feature (57)..(57): Xaa can be any naturally occurring amino acid
EFKANKISEEEYVKSIKEEIRKVVELQEELDIDVLVHGEPERNDMVEYFGEQLSGFXFTVNGWVQSYGSRCVKPPIIYGDVSRPKPMTVFWSSLAQSFTKRPMKGMLTGPVTILNWSFVRNDQPRSETTYQIAWAIKDEVEDLEKAGITVIQIDEAALREGLPLRKSEQAHYLDWAVHAFRITNVGVQDTTQIHTHMCYSNFNDIIHSIIDMDADVITIENSRSDEKLLSVFREGVKYGAGIGPGVYDIHSPRIPPTEEIADRINKMLAVLEKNILWVNPDCGLKTRKYTEVKPALTNMVAAAKLIRNELAK

SEQ ID NO: 11863 - protein, 268 aa, Glycine max
  misc_feature (13)..(13): Xaa can be any naturally occurring amino acid
MVEYFGEQLSGFXFTVNGWVQSYGSRCVKPPIIYGDVSRPKPMTVFWSSLAQSFTKRPMKGMLTGPVTILNWSFVRNDQPRSETTYQIAWAIKDEVEDLEKAGITVIQIDEAALREGLPLRKSEQAHYLDWAVHAFRITNVGVQDTTQIHTHMCYSNFNDIIHSIIDMDADVITIENSRSDEKLLSVFREGVKYGAGIGPGVYDIHSPRIPPTEEIADRINKMLAVLEKNILWVNPDCGLKTRKYTEVKPALTNMVAAAKLIRNELAK

SEQ ID NO: 11864 - protein, 226 aa, Glycine max
MTVFWSSLAQSFTKRPMKGMLTGPVTILNWSFVRNDQPRSETTYQIAWAIKDEVEDLEKAGITVIQIDEAALREGLPLRKSEQAHYLDWAVHAFRITNVGVQDTTQIHTHMCYSNFNDIIHSIIDMDADVITIENSRSDEKLLSVFREGVKYGAGIGPGVYDIHSPRIPPTEEIADRINKMLAVLEKNILWVNPDCGLKTRKYTEVKPALTNMVAAAKLIRNELAK

SEQ ID NO: 11865 - DNA, 857 bp, Glycine max
  misc_feature (678)..(678): n is a, c, g, or t
  misc_feature (688)..(688): n is a, c, g, or t
  misc_feature (698)..(698): n is a, c, g, or t
  misc_feature (702)..(702): n is a, c, g, or t
acctgaaaagaagataaccaaaaacacagaaatctccaaaacccaaaagaagaaaaccaaaaacgctgaaacccccaaaaccgaaaagaagaaaaccaaaaacgctgaaacccccaaaaccgaaaagaagaaaaccaaaaacgctgaaacccccaaaaccgaaaagaagaaaaacgctgaaatccccaaaatcgaaaagaagaaaaccaaaagcgctgaaatccctctaaccgatggcaaaacgaagagggatagagaaatcgccaaagaggagaacaagaagaagactaagaaacccaagctcagcaatggcacttcaaaacagcgagacgagggatccaaaaagggagtagcagaaggaaaaggagaagaggggaaaatgaacgtgtttccgatgaatcgcatcagaacgatgattaagggcgaagatcccgatatgcgtgtttctcaggaagcattgttggccatcaacaacgctgtggagaagttccttgagcaattctcgcaggaagcttatgctttttgtgttcgggaccgcaagaaatgcctcagctacgatcacctagcacatgttgtaagtaagcaaaggagatatgactttctctctgattttgttcctgagagagtgaaagctgaggatgcattaagagagagaagtgcagcaggaacaggaggacnctaaaaaatntaaagtaagntagnggagaatataaacttatacttttatttaatcatgtaacatttttgtaatggaaacatgcatcatgatgagtaatgctgtactttatgtttccatattgtatttattttagtaatcctattgccgtaagtgtatatgatttttcagtttttatgcg

SEQ ID NO: 11866 - protein, 226 aa, Glycine max
  misc_feature (226)..(226): Xaa can be any naturally occurring amino acid
PEKKITKNTEISKTQKKKTKNAETPKTEKKKTKNAETPKTEKKKTKNAETPKTEKKKNAEIPKIEKKKTKSAEIPLTDGKTKRDREIAKEENKKKTKKPKLSNGTSKQRDEGSKKGVAEGKGEEGKMNVFPMNRIRTMIKGEDPDMRVSQEALLAINNAVEKFLEQFSQEAYAFCVRDRKKCLSYDHLAHVVSKQRRYDFLSDFVPERVKAEDALRERSAAGTGGX

SEQ ID NO: 11867 - DNA, 1270 bp, Glycine max
gcagcctcaagaatccacaaaaactcagggtagggcagagagagagagagagagagagagagagagagaatgggagggtgggctatcgcggtgcatggtggcgctggtgtcgaccctaatctcccactcgagcaccaagaagaagcgaaacaacttctcacgcgctgtctcaatcttggaatctctgctctaaattctaatcttcccgccatagatgtcgtcgaacttgtggtgagggaattggaaacggatccgctgttcaattcgggccgtggatctgccctgacagaaaaaggaacggtggagatggaggctagcatcatggatggtccaaaacgacgatgcggcgccgtttcgggtcttaccaccgttaagaacccgatctcgcttgctcgtttggttatggacaaatccccgcattcctacctcgccttttccggcgccgaagaatttgctaggcaacagggtgtggaggttgtggacaacgagtactttatcacacctgacaacgttggcatgctcaagctggcaaaggaagcaaacacaatcctgtttgattaccgaatcccaacatcggggtacgaaacgtgcggatccggtgtggagagtccactgcaaatgaatggactcccaataagcgtgtacgcgcccgaacccgttgggggcgtggtggttgaccggaagggccggtgcgcggcagcaacatccacgggagggctgatgaacaaaatgaccgggcgcatcggtgattcgccgctgataggcgccgggacctacgcgtgcgacgtgtgcggcgtatcgtgcacgggtgaaggcgaggccatcatacgtggcacgctggcgcgtgaggtggcagcggtgatggaatacaaaggcttgaagcttcaagaagccgtggattttgtgatcaagcaccgtctcgatgaagggatggctggtctcattgctgtgtccaacgctggggaagtggcttatggtttcaattgcaatggcatgtttaggggctgtgccactgaaaatggcttcatggaggtcggaatctgggaatagcttcattattttccttcatggttgtttcgatgcaacttttggatttctgtaccatgttccactgtagtgtagggtctttctgctggtgcccgatttagataaaaaatggtaaccttgtttctaagaattagaaaaaaatgtgaaataataatatggtaactttgttgtctttctcttaaataaagacttgtggtagaccctcaacaaacccgtgtacttt

SEQ ID NO: 11868 - protein, 326 aa, Glycine max
MGGWAIAVHGGAGVDPNLPLEHQEEAKQLLTRCLNLGISALNSNLPAIDVVELVVRELETDPLFNSGRGSALTEKGTVEMEASIMDGPKRRCGAVSGLTTVKNPISLARLVMDKSPHSYLAFSGAEEFARQQGVEVVDNEYFITPDNVGMLKLAKEANTILFDYRIPTSGYETCGSGVESPLQMNGLPISVYAPEPVGGVVVDRKGRCAAATSTGGLMNKMTGRIGDSPLIGAGTYACDVCGVSCTGEGEAIIRGTLAREVAAVMEYKGLKLQEAVDFVIKHRLDEGMAGLIAVSNAGEVAYGFNCNGMFRGCATENGFMEVGIWE

SEQ ID NO: 11869 - protein, 247 aa, Glycine max
MEASIMDGPKRRCGAVSGLTTVKNPISLARLVMDKSPHSYLAFSGAEEFARQQGVEVVDNEYFITPDNVGMLKLAKEANTILFDYRIPTSGYETCGSGVESPLQMNGLPISVYAPEPVGGVVVDRKGRCAAATSTGGLMNKMTGRIGDSPLIGAGTYACDVCGVSCTGEGEAIIRGTLAREVAAVMEYKGLKLQEAVDFVIKHRLDEGMAGLIAVSNAGEVAYGFNCNGMFRGCATENGFMEVGIWE

SEQ ID NO: 11870 - protein, 242 aa, Glycine max
MDGPKRRCGAVSGLTTVKNPISLARLVMDKSPHSYLAFSGAEEFARQQGVEVVDNEYFITPDNVGMLKLAKEANTILFDYRIPTSGYETCGSGVESPLQMNGLPISVYAPEPVGGVVVDRKGRCAAATSTGGLMNKMTGRIGDSPLIGAGTYACDVCGVSCTGEGEAIIRGTLAREVAAVMEYKGLKLQEAVDFVIKHRLDEGMAGLIAVSNAGEVAYGFNCNGMFRGCATENGFMEVGIWE

SEQ ID NO: 11871 - DNA, 868 bp, Glycine max
gcacgagaaaagcagcaccatcaccacccccacctcttaccccttctttcataaatatgcgtctctgcaacaacatgttcaccaccacctccttgttcttcacatcatcctcatcatcttcttcaatcagttgactcttcgttcctccctctattctttcggatggagcccatggacatcgttgggaaggccaaggaagacgcttctcttcctaaagcgacaatgacgaaaattattaaagagatgttgcccccggacgtgcgtgtcgccagagatgcacaggatttattgatcgagtgttgtgtcgagtttataaaccttgtctcgtcagagtccaatgaagtctgtaacaaagaagaaagaaggacgattgcaccggagcacgtgttaaaggctttaggggttcttggatttggcgagtacattgaggaagtttatgcagcatatgaacaacacaagttggaaacaatgcaagattctttaaaaggtgcaaagtggagcaacagagctgagatgactgaggaagaagcattggctgaacagcaaaggatgtttgcagaggcacgtgcaagaatgaatggaggagccattcaatccaaggagccagaggctgaccaaagtttagagagctaactttataggacacttttattttcttttgaagcataggcaagcagcatctcttactcttccctatgcgttgttaatttagctcgattttgcacatacccccattcactagtttgctggcctacgtgaatgtactcgccatttgtgttcttttagtaatccatatttgtaagttaatgtaattattggagttcatctaaaccctcgtctatttagaattttacatgtagattatttc

SEQ ID NO: 11872 - protein, 156 aa, Glycine max
MEPMDIVGKAKEDASLPKATMTKIIKEMLPPDVRVARDAQDLLIECCVEFINLVSSESNEVCNKEERRTIAPEHVLKALGVLGFGEYIEEVYAAYEQHKLETMQDSLKGAKWSNRAEMTEEEALAEQQRMFAEARARMNGGAIQSKEPEADQSLES

SEQ ID NO: 11873 - protein, 153 aa, Glycine max
MDIVGKAKEDASLPKATMTKIIKEMLPPDVRVARDAQDLLIECCVEFINLVSSESNEVCNKEERRTIAPEHVLKALGVLGFGEYIEEVYAAYEQHKLETMQDSLKGAKWSNRAEMTEEEALAEQQRMFAEARARMNGGAIQSKEPEADQSLES

SEQ ID NO: 11874 - protein, 136 aa, Glycine max
MTKIIKEMLPPDVRVARDAQDLLIECCVEFINLVSSESNEVCNKEERRTIAPEHVLKALGVLGFGEYIEEVYAAYEQHKLETMQDSLKGAKWSNRAEMTEEEALAEQQRMFAEARARMNGGAIQSKEPEADQSLES

SEQ ID NO: 11875 - DNA, 927 bp, Glycine max
  misc_feature (427)..(427): n is a, c, g, or t
  misc_feature (702)..(702): n is a, c, g, or t
aagtgaagagaaagagccttccaaaatgttcaagctatctcgcatgctccctctcacttccacttccaggcataggctgttggaagtgctgtcctctaggaaagttgaagtcggagaccgtcttagccattcagctggcatttctactgctacaaataactatgctgccaaaggatatgcttccgatcgaatatttgctccttatactgtttacaagggcaaagctgcattctcgttgatcccttgtcttccaactttcactaagttgaattctgggactgttgtagttgatcgacgtggttcaatcatgatgactttcatgcattctattggagagcgcaaatatgactgggagaaaagacaaagatttgctctctcagcaactgaagttggttctttgataacaatgggcgctcaagattcctgngatttctttcatgacccttcaatgttatcaagtaatgctggtcaagtaaggaagagcttatcaattaagcctcatgcaaatggctactttgtgtctttgactgttgtcaacaacctgttaaacaccaatgactacttcagtgttcctgtcacaactgctgagtttgctgtaatgaagacagcttgcagttttgcactgccacacattatgggttgggaccagataactaatcaacaatccagaggcatagatgatcttcaagtaaagggtgactntaaagtttcagacttggaatgggaaaaatgaattgctaggaatatccgaatatgaaatggatccttttttgtttcgcaattccatttggtatattgccaatttgaagacaaggatttgctgggggaaaatgtaaattacaatctttaagaaagggatctgaagttgtataacttgttaaaccagttagttgtttgaaaaattatcaaatgacaaatgttttattt

SEQ ID NO: 11876 - protein, 243 aa, Glycine max
  misc_feature (142)..(142): Xaa can be any naturally occurring amino acid
  misc_feature (234)..(234): Xaa can be any naturally occurring amino acid
SEEKEPSKMFKLSRMLPLTSTSRHRLLEVLSSRKVEVGDRLSHSAGISTATNNYAAKGYASDRIFAPYTVYKGKAAFSLIPCLPTFTKLNSGTVVVDRRGSIMMTFMHSIGERKYDWEKRQRFALSATEVGSLITMGAQDSXDFFHDPSMLSSNAGQVRKSLSIKPHANGYFVSLTVVNNLLNTNDYFSVPVTTAEFAVMKTACSFALPHIMGWDQITNQQSRGIDDLQVKGDXKVSDLEWEK

SEQ ID NO: 11877 - protein, 235 aa, Glycine max
  misc_feature (134)..(134): Xaa can be any naturally occurring amino acid
  misc_feature (226)..(226): Xaa can be any naturally occurring amino acid
MFKLSRMLPLTSTSRHRLLEVLSSRKVEVGDRLSHSAGISTATNNYAAKGYASDRIFAPYTVYKGKAAFSLIPCLPTFTKLNSGTVVVDRRGSIMMTFMHSIGERKYDWEKRQRFALSATEVGSLITMGAQDSXDFFHDPSMLSSNAGQVRKSLSIKPHANGYFVSLTVVNNLLNTNDYFSVPVTTAEFAVMKTACSFALPHIMGWDQITNQQSRGIDDLQVKGDXKVSDLEWEK

SEQ ID NO: 11878 - protein, 229 aa, Glycine max
  misc_feature (128)..(128): Xaa can be any naturally occurring amino acid
  misc_feature (220)..(220): Xaa can be any naturally occurring amino acid
MLPLTSTSRHRLLEVLSSRKVEVGDRLSHSAGISTATNNYAAKGYASDRIFAPYTVYKGKAAFSLIPCLPTFTKLNSGTVVVDRRGSIMMTFMHSIGERKYDWEKRQRFALSATEVGSLITMGAQDSXDFFHDPSMLSSNAGQVRKSLSIKPHANGYFVSLTVVNNLLNTNDYFSVPVTTAEFAVMKTACSFALPHIMGWDQITNQQSRGIDDLQVKGDXKVSDLEWEK

SEQ ID NO: 11879 - DNA, 2250 bp, Glycine max
aacttcattttctccttccgttcctttcttcgttccttccccaacccaatcttcgccttcgcccacaacaactcctccttcaggatcgctgccaacgttactttccatttttacccttcatcctcgagaaaaaaatggcgaacgcagcatctggtatggccgtccatgatgagtgcaagctaaagtttctggagctcaaggcgaagaggacgtaccggtatatcgtttttaagattgaggagaaatcgaagcaagttattgtggagaagctgggtgaccctgcaaatggctatgatgaattcgctgccagtcttcctgctgatgagtgtcgatatgctgtttatgattttgattttgtcactgaagagaattgccaaaagagcagaattttcttcattgcttggtcccctgatacatctagggttaggagcaagatgatttatgccagctccaaagatagattcaagagggagcttgatggaattcagattgagctgcaagcaactgatcctactgagatgggtcttgatgtgttcaaaagccgtgccaattaaatgattccgattattcataaataggagttgtgatggggatggtcaacttggctaatttggactcaattttccaagttttgacatgaggtctattgcagcttcaacaaagcttctcttgttccagtgtatcttgtggtttgcgacatataacccgtgtttgggtgtaatcttagtcctattcctagtagttaattttgtaactgttctttgtgtgattgaacgaaaatttgggaccaggtattgatgtaatgttgccagttgccatcttactaatgtcttatgacttaaattaactaaaatactttcttgaaaacaatttaatacatattatgaactatgttatcataacaaagtcgaggggtaagttttgtggatgcaaaaaaaaaaaaaaaatcgaaacgaggtcgttttgtgttccgccgaaggcaccggaggttgtagcaggctagcagctatggatttggcatccaatctcggtggcaagattgacaaagccgaagttctctctgccgttcagaagtatgagaagtatcatgtttgctatggaggtcaagaggaagagaggaaagctaattataccgatatggttaataaatactacgatcttgttaccagcttttatgagtttggctggggggaatctttccattttgcacccagatggaaaggggaatctcttcgagagagcatcaagcgacatgaacacttccttcctttacaacttggactgaagccagggcagaaggttttggatgttggatgtggaattgggggaccattaagagaaatttctcgatttagctcaacttcaattaccgggttgaataacaatgagtaccagataacaagaggaaaggaactcaatcgcattgctggagtggacaagacttgcaattttgtcaaggctgacttcatgaaaatgccattcccagacaacagttttgatgcagtgtatgcgattgaagccacttgccatgcaccggatgcttatggatgctataaagagatttttagagtgttaaagcctggtcaatattttgctgcttatgaatggtgcatgaccgattcttttgatccccaaaacccagagcaccaaaaaatcaaggcagaaattgagattggtgatgggctacctgacattcgattgactgctaagtgtcttgaagctctgaagcaagcaggttttgaggtaatatgggagaaagatctagcagtggactctcctcttccttggtatttgcctttagacaaaagtcacttctcactgagtagcttccgtctaactgctgtcgggcgacttttcaccaaaaacatggtcaaggttctggagtatgttggactggctccaaagggtagtctaagggttcaagacttcctggagaaggctgcagagggactagttgaaggagggaagagagagattttcacaccaatgtacttcttcctggcacggaagcctgatttagacaggaactaagctggctgtacaaataggttgctgttttcatcagttacggtgattctggtagggtgaaccgtaagctaggattgtttttggccttgttgccttagtgattcttgctgtttctttgttttgtttaggttaccaacacttcattttgctgcttgtttcgatgaagcagtgctcctccatattatgtttaccctacatattatatgctcttttactttgttt

SEQ ID NO: 11880 - protein, 367 aa, Glycine max
MQKKKKNRNEVVLCSAEGTGGCSRLAAMDLASNLGGKIDKAEVLSAVQKYEKYHVCYGGQEEERKANYTDMVNKYYDLVTSFYEFGWGESFHFAPRWKGESLRESIKRHEHFLPLQLGLKPGQKVLDVGCGIGGPLREISRFSSTSITGLNNNEYQITRGKELNRIAGVDKTCNFVKADFMKMPFPDNSFDAVYAIEATCHAPDAYGCYKEIFRVLKPGQYFAAYEWCMTDSFDPQNPEHQKIKAEIEIGDGLPDIRLTAKCLEALKQAGFEVIWEKDLAVDSPLPWYLPLDKSHFSLSSFRLTAVGRLFTKNMVKVLEYVGLAPKGSLRVQDFLEKAAEGLVEGGKREIFTPMYFFLARKPDLDRN

SEQ ID NO: 11881 - protein, 340 aa, Glycine max
MDLASNLGGKIDKAEVLSAVQKYEKYHVCYGGQEEERKANYTDMVNKYYDLVTSFYEFGWGESFHFAPRWKGESLRESIKRHEHFLPLQLGLKPGQKVLDVGCGIGGPLREISRFSSTSITGLNNNEYQITRGKELNRIAGVDKTCNFVKADFMKMPFPDNSFDAVYAIEATCHAPDAYGCYKEIFRVLKPGQYFAAYEWCMTDSFDPQNPEHQKIKAEIEIGDGLPDIRLTAKCLEALKQAGFEVIWEKDLAVDSPLPWYLPLDKSHFSLSSFRLTAVGRLFTKNMVKVLEYVGLAPKGSLRVQDFLEKAAEGLVEGGKREIFTPMYFFLARKPDLDRN

SEQ ID NO: 11882 - protein, 297 aa, Glycine max
MVNKYYDLVTSFYEFGWGESFHFAPRWKGESLRESIKRHEHFLPLQLGLKPGQKVLDVGCGIGGPLREISRFSSTSITGLNNNEYQITRGKELNRIAGVDKTCNFVKADFMKMPFPDNSFDAVYAIEATCHAPDAYGCYKEIFRVLKPGQYFAAYEWCMTDSFDPQNPEHQKIKAEIEIGDGLPDIRLTAKCLEALKQAGFEVIWEKDLAVDSPLPWYLPLDKSHFSLSSFRLTAVGRLFTKNMVKVLEYVGLAPKGSLRVQDFLEKAAEGLVEGGKREIFTPMYFFLARKPDLDRN

SEQ ID NO: 11883 - DNA, 1733 bp, Glycine max
gaattccactactagctcgcaggtttgtgttctgttctgctttgcattctccgccatcatcgtcatcatcatgcaagcgcttcattcccccaccctccgcacttctcccttggaccctcttcggggccccaacaatgccgccgccaagcgacgcgcctcctctgccaagcgcgtgttcttcgtgtccgccacggtggcgccgaaggtgtccgccccgcagcggcagaaggactcgaagaagcgcgtggttatcacgggaatggggctcgcgtcggtgttcgggaacgacgtggaggggtactacgagaagcttctcgccggcgagagcggcatcacccccatcgaccgcttcgacgcctccaagtttcccacgcgcttcggcggccagatccgcggcttctccgccgagggctacatcgacggcaagaacgaccgccgcctcgacgactgcctccgctactgcattgtcgccggcaaaaaggccctcgaaaacgccgaccttgccccagacaaccactccaagattgataaggagcgtgctggtgttcttgtaggctccggaatgggaggtttaacggtgttttctgacggtgttcaggctctgattgagaaggggcacaggaagataacgccgttttttattccgtatgccattactaacatgggttcggctttgcttgggatagaccttgggttcatgggtcccaactattctatatccacggcttgtgctacctccaactattgcttttatgctgcggcgaaccatattcggagaggggaggctgatttgatgattgcgggtgggactgaggctgccattattccaattgggttagggggtttcgttgcttgcagggcgctttcgcagaggaatgatgaccccaaaactgcttccaggccgtgggataaggaccgtgatggctttgttatgggcgaaggtgctggagttttggtaatggagagcttggaacatgccatgaagcgaggcgcacctattattgctgaatacttgggaggtgctgttaactgtgatgcttatcacatgactgatccaaggtctgatggacttggtgtgtctacatgcattcagagcagccttgaagatgcgggtgtgtcaccagaggaggtcaactacataaatgcacatgcaacttccactcttgctggagacttggcagagatcaatgctattaaaaaggttttcaaggacacttctggaatcaaaattaatgcaaccaagtctatgatagggcactgccttggtgcagctgggggtttggaagccattgccacagtgaaagccataacaacaggatggctgcatccaacaatcaatcaatttaacccagaacctgcagttgattttgatacagtggcaaatgtcaagcagcagcatgaaatcaacgttgccatttcaaattcatttggattcggtggacacaactctgtggtagcattttctgctttcaggccttgattgcccagcttagcttgtctgaactttatgtagaacacgggtttaagttaattgaaattttgttctctctacatcattgaggctatttattctatctgagttcgtcatatataaaagctgtaggcctgtagttgttcattttgtgcctaattgtgacttgacaattagctataagactgttttgttgtagaacattttgaatatagctcgaagatttcattatttggaggtatgcagcagcggatagaatgcc

SEQ ID NO: 11884 - protein, 492 aa, Glycine max
NSTTSSQVCVLFCFAFSAIIVIIMQALHSPTLRTSPLDPLRGPNNAAAKRRASSAKRVFFVSATVAPKVSAPQRQKDSKKRVVITGMGLASVFGNDVEGYYEKLLAGESGITPIDRFDASKFPTRFGGQIRGFSAEGYIDGKNDRRLDDCLRYCIVAGKKALENADLAPDNHSKIDKERAGVLVGSGMGGLTVFSDGVQALIEKGHRKITPFFIPYAITNMGSALLGIDLGFMGPNYSISTACATSNYCFYAAANHIRRGEADLMIAGGTEAAIIPIGLGGFVACRALSQRNDDPKTASRPWDKDRDGFVMGEGAGVLVMESLEHAMKRGAPIIAEYLGGAVNCDAYHMTDPRSDGLGVSTCIQSSLEDAGVSPEEVNYINAHATSTLAGDLAEINAIKKVFKDTSGIKINATKSMIGHCLGAAGGLEAIATVKAITTGWLHPTINQFNPEPAVDFDTVANVKQQHEINVAISNSFGFGGHNSVVAFSAFRP

SEQ ID NO: 11885 - protein, 469 aa, Glycine max
MQALHSPTLRTSPLDPLRGPNNAAAKRRASSAKRVFFVSATVAPKVSAPQRQKDSKKRVVITGMGLASVFGNDVEGYYEKLLAGESGITPIDRFDASKFPTRFGGQIRGFSAEGYIDGKNDRRLDDCLRYCIVAGKKALENADLAPDNHSKIDKERAGVLVGSGMGGLTVFSDGVQALIEKGHRKITPFFIPYAITNMGSALLGIDLGFMGPNYSISTACATSNYCFYAAANHIRRGEADLMIAGGTEAAIIPIGLGGFVACRALSQRNDDPKTASRPWDKDRDGFVMGEGAGVLVMESLEHAMKRGAPIIAEYLGGAVNCDAYHMTDPRSDGLGVSTCIQSSLEDAGVSPEEVNYINAHATSTLAGDLAEINAIKKVFKDTSGIKINATKSMIGHCLGAAGGLEAIATVKAITTGWLHPTINQFNPEPAVDFDTVANVKQQHEINVAISNSFGFGGHNSVVAFSAFRP

SEQ ID NO: 11886 - protein, 406 aa, Glycine max
MGLASVFGNDVEGYYEKLLAGESGITPIDRFDASKFPTRFGGQIRGFSAEGYIDGKNDRRLDDCLRYCIVAGKKALENADLAPDNHSKIDKERAGVLVGSGMGGLTVFSDGVQALIEKGHRKITPFFIPYAITNMGSALLGIDLGFMGPNYSISTACATSNYCFYAAANHIRRGEADLMIAGGTEAAIIPIGLGGFVACRALSQRNDDPKTASRPWDKDRDGFVMGEGAGVLVMESLEHAMKRGAPIIAEYLGGAVNCDAYHMTDPRSDGLGVSTCIQSSLEDAGVSPEEVNYINAHATSTLAGDLAEINAIKKVFKDTSGIKINATKSMIGHCLGAAGGLEAIATVKAITTGWLHPTINQFNPEPAVDFDTVANVKQQHEINVAISNSFGFGGHNSVVAFSAFRP

SEQ ID NO: 11887 - DNA, 1434 bp, Glycine max
  misc_feature (93)..(93): n is a, c, g, or t
  misc_feature (195)..(195): n is a, c, g, or t
  misc_feature (227)..(227): n is a, c, g, or t
  misc_feature (1302)..(1302): n is a, c, g, or t
  misc_feature (1314)..(1314): n is a, c, g, or t
  misc_feature (1320)..(1320): n is a, c, g, or t
  misc_feature (1327)..(1327): n is a, c, g, or t
  misc_feature (1347)..(1347): n is a, c, g, or t
  misc_feature (1369)..(1369): n is a, c, g, or t
  misc_feature (1392)..(1392): n is a, c, g, or t
  misc_feature (1407)..(1407): n is a, c, g, or t
agccaaggggcatctatatgaatgcccgggttgttttttgtatccacaacattgcttaccaaggaagatttgcattcgccgacttctcacttntaaatctcccagaccaatttaagagctcctttgactttattgatgggcatgttaaaccagtggttggaaggaaaatcaattggttgaaagctggacttatanaatcatggtttgtgataactgttagcccaaantatgctaaagaactggtgtcaggtccagacaagggagtggaattggacaacatccttcgcaaaattgatgatgatggtcgtttggttggaattgtgaatggcatggatgttcaggagtggaatccaaccactgacaaatatatagctgtcaaatacgatgtttcaacagtattggaagcaaaggctcttttgaaagaagccctccaagcagaagttggattgccggtcgacagaaatattcctcttattggtttcattggtaggcttgaagagcaaaaaggttctgatattcttgcagaagctattccccaatttatcaaggagaatgttcagttggtagccctaggaacaggaaaaaaacaaatggaaaaacaactacaggaacttgaaatatcataccctgacaaggccagaggagtggcaaaattcaatgttcccctagcccacatgataattgctggagctgattttatattggttcctagcagatttgagccttgtggtctcattcagttacaagctatgcgctatggatctgtaccaattgttgcctcaacaggtggattagttgacactgccaaagaaggtttcactggatttcagatgggtgccttcagtgttgaatgtgatgctgtggatccagctgatgtggatgctatagcaaagactgtcaaaagggcccttgcagtctatggaactccagcttttacagaaataataaagaactgcatggctcaagatctttcctggaaggggcctgctaagaagtgggaggaagtgctgctaagcctgggagttcctggcagtgaacctggaagtgatggagaagaaattgctccacaggcaaaggaaaatgtggcaacaccataataatgagaacaaagatgtgagggaatcttagtctcatgaagttcccccagctccttgcttcttattaatattatgttttatccttcttccaatttttgttttcttctaaatatattatagaaatgtacatggacacggaaattacactattcaaatcagtgtagtgagtgcatgtcttcaagattagcataaattaaagcgtttnttaatagcctanatatgncacaggntatgttgggcaaacaagganttgtgctgtatatccaacttgnactgctttgtgcttattgtatcngcatgtttggctccnaaaggtgcgtttataaaacgtaatttt

SEQ ID NO: 11888 - protein, 364 aa, Glycine max
  misc_feature (31)..(31): Xaa can be any naturally occurring amino acid
  misc_feature (65)..(65): Xaa can be any naturally occurring amino acid
  misc_feature (75)..(75): Xaa can be any naturally occurring amino acid
PRGIYMNARVVFCIHNIAYQGRFAFADFSLXNLPDQFKSSFDFIDGHVKPVVGRKINWLKAGLIXSWFVITVSPXYAKELVSGPDKGVELDNILRKIDDDGRLVGIVNGMDVQEWNPTTDKYIAVKYDVSTVLEAKALLKEALQAEVGLPVDRNIPLIGFIGRLEEQKGSDILAEAIPQFIKENVQLVALGTGKKQMEKQLQELEISYPDKARGVAKFNVPLAHMIIAGADFILVPSRFEPCGLIQLQAMRYGSVPIVASTGGLVDTAKEGFTGFQMGAFSVECDAVDPADVDAIAKTVKRALAVYGTPAFTEIIKNCMAQDLSWKGPAKKWEEVLLSLGVPGSEPGSDGEEIAPQAKENVATP

SEQ ID NO: 11889 - protein, 359 aa, Glycine max
  misc_feature (26)..(26): Xaa can be any naturally occurring amino acid
  misc_feature (60)..(60): Xaa can be any naturally occurring amino acid
  misc_feature (70)..(70): Xaa can be any naturally occurring amino acid
MNARVVFCIHNIAYQGRFAFADFSLXNLPDQFKSSFDFIDGHVKPVVGRKINWLKAGLIXSWFVITVSPXYAKELVSGPDKGVELDNILRKIDDDGRLVGIVNGMDVQEWNPTTDKYIAVKYDVSTVLEAKALLKEALQAEVGLPVDRNIPLIGFIGRLEEQKGSDILAEAIPQFIKENVQLVALGTGKKQMEKQLQELEISYPDKARGVAKFNVPLAHMIIAGADFILVPSRFEPCGLIQLQAMRYGSVPIVASTGGLVDTAKEGFTGFQMGAFSVECDAVDPADVDAIAKTVKRALAVYGTPAFTEIIKNCMAQDLSWKGPAKKWEEVLLSLGVPGSEPGSDGEEIAPQAKENVATP

SEQ ID NO: 11890 - protein, 255 aa, Glycine max
MDVQEWNPTTDKYIAVKYDVSTVLEAKALLKEALQAEVGLPVDRNIPLIGFIGRLEEQKGSDILAEAIPQFIKENVQLVALGTGKKQMEKQLQELEISYPDKARGVAKFNVPLAHMIIAGADFILVPSRFEPCGLIQLQAMRYGSVPIVASTGGLVDTAKEGFTGFQMGAFSVECDAVDPADVDAIAKTVKRALAVYGTPAFTEIIKNCMAQDLSWKGPAKKWEEVLLSLGVPGSEPGSDGEEIAPQAKENVATP

SEQ ID NO: 11891 - DNA, 484 bp, Glycine max
  misc_feature (41)..(41): n is a, c, g, or t
  misc_feature (57)..(57): n is a, c, g, or t
  misc_feature (120)..(120): n is a, c, g, or t
  misc_feature (309)..(309): n is a, c, g, or t
atcctcagtgaacgaacaaggacttcaaagtttagcttcanattttcttctttgtanggaggaaaatcgtttttttgatattgttgatgcaagagtcatgcaggaagtggagaaagaacncataattgtagttgccaatcttgcaagaagatgcttacagttgaatgggagaaagcgaccaactatgaaagaagtcacattagaattggaaagtatccaaaaactggaaaaccagtgtaatgcacaagagcaacaagaagaacttgagcttgctggaaatgaagatagccaattttgggctgcgtattntacaacttcgactgcagggcaaacttcagacagcaaaacatcaaccttggagattatgcctattcttatcaaataattgttgaattctcttaacttgttttgttgtgtgtaaaattaaaaataaaaataaaaacatatggacgaatttaacgttcaaaagcataattatggtatg

SEQ ID NO: 11892 - protein, 127 aa, Glycine max
  misc_feature (14)..(14): Xaa can be any naturally occurring amino acid
  misc_feature (19)..(19): Xaa can be any naturally occurring amino acid
  misc_feature (40)..(40): Xaa can be any naturally occurring amino acid
  misc_feature (103)..(103): Xaa can be any naturally occurring amino acid
SSVNEQGLQSLASXFLLCXEENRFFDIVDARVMQEVEKEXIIVVANLARRCLQLNGRKRPTMKEVTLELESIQKLENQCNAQEQQEELELAGNEDSQFWAAYXTTSTAGQTSDSKTSTLEIMPILIK

SEQ ID NO: 11893 - protein, 95 aa, Glycine max
  misc_feature (8)..(8): Xaa can be any naturally occurring amino acid
  misc_feature (71)..(71): Xaa can be any naturally occurring amino acid
MQEVEKEXIIVVANLARRCLQLNGRKRPTMKEVTLELESIQKLENQCNAQEQQEELELAGNEDSQFWAAYXTTSTAGQTSDSKTSTLEIMPILIK

SEQ ID NO: 11894 - protein, 66 aa, Glycine max
  misc_feature (42)..(42): Xaa can be any naturally occurring amino acid
MKEVTLELESIQKLENQCNAQEQQEELELAGNEDSQFWAAYXTTSTAGQTSDSKTSTLEIMPILIK

SEQ ID NO: 11895 - DNA, 1163 bp, Glycine max
gggatgataattgggctagtggagtgacagagagaaaccggagcagagcagagaagagaaacaaaaggtggggtcagtggaaattatcatcatacaatttcacttaacccttcaagctcaagacagcacagcaatcacatcgcatgtcccttatatatatacttattcattgcctctgaaccttatcaaaacacttctcaatctctctctctccaatggccaaagacctcgaaacggagattcaaagtgggttgcctcacaaggactaccacgacccaccccccgccccattctacgaccccgccgagctccgaaagtggtccttcttccgagccctcatcgccgagttcgtcgccaccctcctcttcctctacgtcaccatcctcaccgtcatcggctacaaccaccagacagccaccgccgccgagccctgcagcggcgtcggcgtcctcggcatcgcttgggcctttggaggcatgatttttgtcctcgtctattgcaccgccggcatatcaggtatatcaacaaacttttcatacgtacaaattttctgattaatataaaactattttgcattaacagacttaccacatatttcttttcataaaaaaatattagtagttaataaaaattcaaatgcaccatggcttctatctcctttcaagttaattttacaattttcgacaaatttgtggtatataataatttgtgattagatgatactataaaataaaataaaagggcatgagtattgagtataaactattttcagggggacacataaacccggcggtgacgttcgggttgtttttggcgaggaaggtgtcgctgacaagagctgttgggtacatggtggctcaggtgttgggggccataagtggggtggggcttgtgaaggctttgcagaagagctactacaacaggtacaaaggtggcgtgaacatgctcgctgatggttacagcaaaggaaccggtttgggcgctgagattattggcacctttattcttgtctacaccgtcttctctgctaccgatcccaagagagtagcaagagactcccatgttcccgtatgcatatattatatgttcccttatcctctgcaaattcattcttttctactttaaatttcttcttacactcccaaatttaattaattgcatct

SEQ ID NO: 11896 - protein, 126 aa, Glycine max
MSIEYKLFSGGHINPAVTFGLFLARKVSLTRAVGYMVAQVLGAISGVGLVKALQKSYYNRYKGGVNMLADGYSKGTGLGAEIIGTFILVYTVFSATDPKRVARDSHVPVCIYYMFPYPLQIHSFLL

SEQ ID NO: 11897 - protein, 112 aa, Glycine max
MAKDLETEIQSGLPHKDYHDPPPAPFYDPAELRKWSFFRALIAEFVATLLFLYVTILTVIGYNHQTATAAEPCSGVGVLGIAWAFGGMIFVLVYCTAGISGISTNFSYVQIF

SEQ ID NO: 11898 - protein, 91 aa, Glycine max
MVAQVLGAISGVGLVKALQKSYYNRYKGGVNMLADGYSKGTGLGAEIIGTFILVYTVFSATDPKRVARDSHVPVCIYYMFPYPLQIHSFLL

SEQ ID NO: 11899 - DNA, 2319 bp, Glycine max
agaaccatgcttcatcgccgaagttagtttcttcttgttcacggtcacaaatcgagacgcgccttgccggaagttgcagaaacaaccttcaccagcaacctacgattaacccatgacgaccagttcctccggttgcggaagaactaactcggcgaaaaaaaaaacccaaataaaaaggagacagacatgagcgattatctcaaagagaaaggaggtcccaggttggttatcatgggagagaccaaacaacttgttacccttttgacacgatttcaagcggcaatgaaaatgatcaaggacatagtggaaaaaagtagatcgagtaaaaagagcaaacgattactgaggaaaaccctcaagaatatgactcctctgctgcaggaaatcaatcaatacaatgaacacttggaaccaccccgagaagaaatcaacactcttatgaaagaaaaagatgcagtggaagagcttgtgtgctattcctgctccaggagtatttggtggaccaaatttctctcttggcttccgctctacggggacggactttggcataacaagaataatccccttgctgcagatgacaaccaagttaagtatatcaaaaacacactgtatgaggtgaaagaggttcttgagcttctagacatagagaattttcagcagaaacttaaaggtgttggatcaccaatcaagtgtccttttggtgttcctgaaaaccctggattcactgttgggttgaatccactgttgagcaagttgaagatggaggttctcagggacggtatgtccacccatttgttgactggtttgggtggatctggtaaaacaactttggctacaaagctctgtagggatgaagaagtcaagggtaaattcaaggaaaatattttatttttcaccttctcacaaacgcctaagttgaagaatatcatagaaagactatttgaacattgtggataccacgttcctgagtttataagtgatgaagatgcaattaaacggttggaaattttgctgcggaaaattgagggaagtccacttttgttggtcttggatgatgtttggcctggatcagaagccctcattgagaaatttcaattccagatgtctgattataaaattgtggtgacttctagggttgcatttcctaaatatggcaccccatatgttttaaaaccacttgctcatgaagatgcaatgaccctattccgacatcatgctctcttggaaaaaagcagttcacatattcctgacaaagaaattgtccaaaaggtgcttattttgctttctgacattgggagtaatctgtaccagtcctttgtgtctgaagccattgttgatttagagagtacaaagttgtgttttgactcctcaaaccaatattatggttgtgagatattgcaagggtttaccgcttgccgttaaagtgattggtagatcactcagtcatcggcctattgagatgtggcaaaagatggtggaggaattgtcacaaggtcattctatacttgattctaatattgaattacttacatgcttccaaaagctcttgcatgttttggaagataatcccaacaacaaggagtgcttcatggacttggggttatttcctgaagaccaaagaattcctcttcctgttcttattgatatatgggcagtgttatatggatttgatgatgacggcatagaagcaatggacatcataaataaattagactccatgaatctggttaatgtcttagtagcaaggaaaaattcaagtgactcagacaattactactacaataaccactacgtcatcctccatgatcttctaagagagcttgcaatctatcaaaacaacctggaaccaattgaaaagagaaaaagactgattaatgacattaatgaaaccggggtgaagcaacaaggcatgatagcccggttattgtcaaaatttctcagatgcagtgttaaacagacactccaacaggtccccgcccgcacattgtctatatcagctgatgaaacgaacacttcagaccagtcccacatacaaccatcccaagctgaagttctggttttaaatcttcaaactaagaagtactcctttccagagtacatggagaaaatgagcgaactaaaagttcttatcatgacaaattatggttttcatccctgtgaacttgaaaattgcaaactacccagctctgtatcaaacctgaaaagaatcagactagagcggatttctgttccccacgtaggggcattgaaaaatcttgaaaagttatccctctacatgtgtagtaacataagtcagatttttgaaaatggtaccatccc

SEQ ID NO: 11900 - protein, 411 aa, Glycine max
MSDYLKEKGGPRLVIMGETKQLVTLLTRFQAAMKMIKDIVEKSRSSKKSKRLLRKTLKNMTPLLQEINQYNEHLEPPREEINTLMKEKDAVEELVCYSCSRSIWWTKFLSWLPLYGDGLWHNKNNPLAADDNQVKYIKNTLYEVKEVLELLDIENFQQKLKGVGSPIKCPFGVPENPGFTVGLNPLLSKLKMEVLRDGMSTHLLTGLGGSGKTTLATKLCRDEEVKGKFKENILFFTFSQTPKLKNIIERLFEHCGYHVPEFISDEDAIKRLEILLRKIEGSPLLLVLDDVWPGSEALIEKFQFQMSDYKIVVTSRVAFPKYGTPYVLKPLAHEDAMTLFRHHALLEKSSSHIPDKEIVQKVLILLSDIGSNLYQSFVSEAIVDLESTKLCFDSSNQYYGCEILQGFTACR

SEQ ID NO: 11901 - protein, 396 aa, Glycine max
MGETKQLVTLLTRFQAAMKMIKDIVEKSRSSKKSKRLLRKTLKNMTPLLQEINQYNEHLEPPREEINTLMKEKDAVEELVCYSCSRSIWWTKFLSWLPLYGDGLWHNKNNPLAADDNQVKYIKNTLYEVKEVLELLDIENFQQKLKGVGSPIKCPFGVPENPGFTVGLNPLLSKLKMEVLRDGMSTHLLTGLGGSGKTTLATKLCRDEEVKGKFKENILFFTFSQTPKLKNIIERLFEHCGYHVPEFISDEDAIKRLEILLRKIEGSPLLLVLDDVWPGSEALIEKFQFQMSDYKIVVTSRVAFPKYGTPYVLKPLAHEDAMTLFRHHALLEKSSSHIPDKEIVQKVLILLSDIGSNLYQSFVSEAIVDLESTKLCFDSSNQYYGCEILQGFTACR

SEQ ID NO: 11902 - protein, 379 aa, Glycine max
MKMIKDIVEKSRSSKKSKRLLRKTLKNMTPLLQEINQYNEHLEPPREEINTLMKEKDAVEELVCYSCSRSIWWTKFLSWLPLYGDGLWHNKNNPLAADDNQVKYIKNTLYEVKEVLELLDIENFQQKLKGVGSPIKCPFGVPENPGFTVGLNPLLSKLKMEVLRDGMSTHLLTGLGGSGKTTLATKLCRDEEVKGKFKENILFFTFSQTPKLKNIIERLFEHCGYHVPEFISDEDAIKRLEILLRKIEGSPLLLVLDDVWPGSEALIEKFQFQMSDYKIVVTSRVAFPKYGTPYVLKPLAHEDAMTLFRHHALLEKSSSHIPDKEIVQKVLILLSDIGSNLYQSFVSEAIVDLESTKLCFDSSNQYYGCEILQGFTACR

SEQ ID NO: 11903 - DNA, 688 bp, Glycine max
  misc_feature (550)..(550): n is a, c, g, or t
  misc_feature (554)..(554): n is a, c, g, or t
  misc_feature (563)..(563): n is a, c, g, or t
  misc_feature (569)..(569): n is a, c, g, or t
  misc_feature (581)..(581): n is a, c, g, or t
  misc_feature (638)..(638): n is a, c, g, or t
  misc_feature (651)..(651): n is a, c, g, or t
actgcatttccaagtgctccttatacttaagtttctatctagccatatcttgtagtagtttacttcaaacttctaagcaacatggtggtcctcactttcactgatgagtttactagcaatgtcaagccaagaaggttgttcaaggctttgatccttgatgctccaaacctcatccccaagctgatgcctgaggccattaagaatattcaactggttgaagggaatggaggccctggaagcattcaggagataaccattgttgaaggtaataagatcaaacacttgaagcatagaattgatgcaatagaccaagagaaattgacttacagctacgcagtgattgagggggatgcagcactggaaaaagtggattcaatttcacatgagatcaagtttgaggccactgaagagggaggctgcaagaccaagaatgtcagcaagtaccatcccaaagaaggggttgatgttaaaggggaggatttcaaggctgcaagagaggaaggtttggctctgctcaaggtagtggatgcctatcttgtggccaaccctnaggngtatgcttnaagcantgaagtgatctnatagggcacctttgcattacattatattttgatgttctctaaactcagcctatagtntactttgaaaccnaatatgatatggcttataataaaaatgagttactttc

SEQ ID NO: 11904 - protein, 167 aa, Glycine max
  misc_feature (157)..(158): Xaa can be any naturally occurring amino acid
  misc_feature (161)..(161): Xaa can be any naturally occurring amino acid
  misc_feature (163)..(163): Xaa can be any naturally occurring amino acid
  misc_feature (167)..(167): Xaa can be any naturally occurring amino acid
MVVLTFTDEFTSNVKPRRLFKALILDAPNLIPKLMPEAIKNIQLVEGNGGPGSIQEITIVEGNKIKHLKHRIDAIDQEKLTYSYAVIEGDAALEKVDSISHEIKFEATEEGGCKTKNVSKYHPKEGVDVKGEDFKAAREEGLALLKVVDAYLVANPXXYAXSXEVIX

SEQ ID NO: 11905 - protein, 133 aa, Glycine max
  misc_feature (123)..(124): Xaa can be any naturally occurring amino acid
  misc_feature (127)..(127): Xaa can be any naturally occurring amino acid
  misc_feature (129)..(129): Xaa can be any naturally occurring amino acid
  misc_feature (133)..(133): Xaa can be any naturally occurring amino acid
MPEAIKNIQLVEGNGGPGSIQEITIVEGNKIKHLKHRIDAIDQEKLTYSYAVIEGDAALEKVDSISHEIKFEATEEGGCKTKNVSKYHPKEGVDVKGEDFKAAREEGLALLKVVDAYLVANPXXYAXSXEVIX

SEQ ID NO: 11906 - DNA, 1135 bp, Glycine max
cgaacaagaagaagaagaagaaatcgtttgcttagacgcgtcgttcttcgtcgatgacaactgacgaaattcacgttcggttcgcaagacattcagctcttctgtctgcattctgcttccactgattttgatttgacagggcagctggtttggcctggagccatgttgctgaatgagtatctttcaaaaaatgttaacctgcttcagggttgcactgccattgaattaggttctggtgttggtattaccggaatactttgcagcagattctgccataaagttgtgatgacagatcataatgaagaagtgatcaagatcttaaagaaaaacatagagctgcattcatgtcctgagaatattacttctatttctcatggattagtagcagagaaactagaatgggggaacactgatcagataaatgaaatattacaaaaacatcctggaggtttcgacttcatacttggagctgatatatgctttcagcagtcaagcatacctatgctttttgatagtgttaaacagctcctgcaggctagggaggacagaaagtgcaaattcattctagcctatatatcaagagctaagaccatggattcaatgattcttattgaagcttctaagctacagatgcagatgaaagaagtgcctggaactcggtgcacagttaagaatcttgaaggagtcatctttgtagttactcttgagtagaaacactaaatatagttgagtttccagaaacagacattgcatgtgaaaaggaaaactgatgggggttagcaatagttggaatttctatttccattcaaagctactcccttgctgacaacatggtgttgatgactcaggaaacccatgggggaagataaagaacatgcaagaatgagaacctatcttgtggagtttatcttccaaaacataattctctatttaaagcatacatgaccaaccacagaagattttctagatagatttggttggactgagtggagtctatcatcccaaaggtagtctttgggaactttgagggtcaagaagagaaatcaggaattcattttgttaatcataaagtattaatcacacattttccaccttatgattttctcaatgaaataattaatggtcttacggtgtg

SEQ ID NO: 11907 - protein, 182 aa, Glycine max
MLLNEYLSKNVNLLQGCTAIELGSGVGITGILCSRFCHKVVMTDHNEEVIKILKKNIELHSCPENITSISHGLVAEKLEWGNTDQINEILQKHPGGFDFILGADICFQQSSIPMLFDSVKQLLQAREDRKCKFILAYISRAKTMDSMILIEASKLQMQMKEVPGTRCTVKNLEGVIFVVTLE

SEQ ID NO: 11908 - protein, 141 aa, Glycine max
MTDHNEEVIKILKKNIELHSCPENITSISHGLVAEKLEWGNTDQINEILQKHPGGFDFILGADICFQQSSIPMLFDSVKQLLQAREDRKCKFILAYISRAKTMDSMILIEASKLQMQMKEVPGTRCTVKNLEGVIFVVTLE

SEQ ID NO: 11909 - DNA, 1596 bp, Glycine max
acattcacatgcaaatgcaatgtatgtatgtatatttattgttggccacctattttgccggccccggtccggttctctcatacggcgtcgttttcgggtgtgcgactattgtctcttctcttcccttcgtcggttaccataattctctctctctttcttcttctccctcttcttcacactgagttgactgagtcttcgtaactcgctctctactctctctgctactcatcgcattctctgcatttctcctccgatcacattttctctctcttcgtttgactatagctgacaaggatgtcggagaaagctcttagggatctcaatacaattcttggtactgaaaggaagaatgaggactccagtaaggcatgtttatccaagccttctgttgataatgctgatgaaaatattgaagaatggcaaaagaaaaagaacagttcctccttggtttctccagctgttaatggaaatcaggctgtgactgctaattccagtgcagaggttgtaaatgcagaagtagaatatattgaatctgagaacttgaatgatgtagacgatgctgatacttgtctcaagactctcttggctggacttgactcaaaggattgggtcctggtttgtgacacactgaataacgtacgtcgattgtctatatttcataaggaagcaatgcttgatgtgctgggggatgtgatcacatctattgcaaagtccctgaaaagtcctagaagtgctgtttgcaaaactgccattatgacatctgcagacattttcagtgcatataatgatcgtatactagattcattggaccctctcctagtacaacttcttctcaaggcttcacaagacaaacgctttgtatgtgaggcagctgaaaaagccttgatagcaatgactacttggatttcccctatttctttattgccaaaattgcaaccatgccttaagaataagaatcctcgtatccgtgcaaaggcatcaatgtgcttttctcgaagtgtttcacgactgggggaagaaggcataaagacatatgggattgacaaattgatccaagtagctgcatctcagttgagtgaccagctccctgagtccagggaagcagcccgaactctacttcttgagcttcaaaatgtgtatgagaaatcttctcatgatctcatgccagctactcctgtcaatagtgatcataataatgtcaatggtgattctgtgaatgaggattcagaggtgagatcttgggaaagcttctgtcagtcaaagctttctccactaagtgctcaagctgtacttcgtgtgaccagtatcgctcgggagggtcttgtttcataacacgcacatttttacttcacttagcggacttcatcgtttcctggtttgcttatcattttcttctgtaaatacagttcgacaattgagcccaagatttataatgtgtattctattattttccccctatttgtggttacctacattacttttgattaatactactactagataaatggaccgtgcatcgcactggaaaaattatgagtataatctttggtcttgtaactgtatttggatgattatggttacactaagtccattttt

SEQ ID NO: 11910 - protein, 345 aa, Glycine max
MSEKALRDLNTILGTERKNEDSSKACLSKPSVDNADENIEEWQKKKNSSSLVSPAVNGNQAVTANSSAEVVNAEVEYIESENLNDVDDADTCLKTLLAGLDSKDWVLVCDTLNNVRRLSIFHKEAMLDVLGDVITSIAKSLKSPRSAVCKTAIMTSADIFSAYNDRILDSLDPLLVQLLLKASQDKRFVCEAAEKALIAMTTWISPISLLPKLQPCLKNKNPRIRAKASMCFSRSVSRLGEEGIKTYGIDKLIQVAASQLSDQLPESREAARTLLLELQNVYEKSSHDLMPATPVNSDHNNVNGDSVNEDSEVRSWESFCQSKLSPLSAQAVLRVTSIAREGLVS

SEQ ID NO: 11911 - protein, 220 aa, Glycine max
MLDVLGDVITSIAKSLKSPRSAVCKTAIMTSADIFSAYNDRILDSLDPLLVQLLLKASQDKRFVCEAAEKALIAMTTWISPISLLPKLQPCLKNKNPRIRAKASMCFSRSVSRLGEEGIKTYGIDKLIQVAASQLSDQLPESREAARTLLLELQNVYEKSSHDLMPATPVNSDHNNVNGDSVNEDSEVRSWESFCQSKLSPLSAQAVLRVTSIAREGLVS

SEQ ID NO: 11912 - protein, 192 aa, Glycine max
MTSADIFSAYNDRILDSLDPLLVQLLLKASQDKRFVCEAAEKALIAMTTWISPISLLPKLQPCLKNKNPRIRAKASMCFSRSVSRLGEEGIKTYGIDKLIQVAASQLSDQLPESREAARTLLLELQNVYEKSSHDLMPATPVNSDHNNVNGDSVNEDSEVRSWESFCQSKLSPLSAQAVLRVTSIAREGLVS

SEQ ID NO: 11913 - DNA, 1761 bp, Glycine max
  misc_feature (399)..(399): n is a, c, g, or t
  misc_feature (422)..(422): n is a, c, g, or t
  misc_feature (432)..(432): n is a, c, g, or t
gagcccaagcagtcgtcttggtgctgccgattggtcaaaatatataaatccatttgttgaaatttgttactgtattgcattgcgtttgctgcacccatcaatggcaggcgtttctctcaagtgcggtgactgcggtgctctgctgagaaccgtagaagaagcgcaagagcacgctgaactcacctcccactccaacttctccgaatccaccgaaccggttctcaacctcatctgcaccgcttgctccaaaccctgccgatccaaaaccgagagtgatttgcacacgaaaagaaccggccataccgagttcgttgacaagacttccgaggccgttaaaccgattagtttggaggctccgaaggtggatgcaactgcttcatcggaaaacccttccgctgntgcatccactgaccaaaatgaanaaatggttgntcctgaagtggacaaaaagctgctcaaggaacttgaatccatggggttttcaacggcacgggcaacgcgggcgcttcattactctgagcatctatttttgcttttttgaagggaactttatgatattgttggaagctagggtgggttaacagagagaagtgagaagaatatagccaggaaagggacttgtttattaaaagtttataatatttatatatgatggaaaatttgatttaaaacttattagatttaaatcttagtttccgtagttacgcgtgacagtctttggatctaggatacatgaccagtcagtttaaagggtaatgctggccttgagtctgctgtaaattggatagtagagcacgagaatgatcctgacatagatcagatgcccttggtacccgccaacaccaaaattgaggctcctaaacctttgcttaccccagaagaaatgaaggccaaacagcaggaactaagggagagagctcgtaagaagaaagaagaggaagagaagagaatggagagagaaagagaaaaggagagaattcgcattggcaaggagttgctggaagcaaagcggattgaagaagagaatgagaggaaacgtttgttggccttgaaaaaagtagagaaagaggaagagaaaagggctagggagaaaatcaagaaaaagttggaagaagacaaggcagaaagaaggcggagacttggattgcctccagaggaaccctcagcagccaaaccttcacctgcgcctattgtggaggagaaaaagagttttgtgcctgttaggcctgccacaaaagctgagcaaatgagggagtgcctccgttctctcaagcagaaccacaaggaggatgacgctagagtgaagagagcattccaaactcttctaacttatgtagggaatgttgccagaaatcccgatgaagaaaagttcaggaagatacgtcttagtaaccaatcttttcaggacagagttggttccttgaaagggggcattgaatttctagaaatttgtgggtttgagaagatcgatggtggtgagtttttgtttttgcctagggacaaagttgaaatggcggtcctgaattcagctggatctgaactagactctgcaataaagaatccattttttggagttctttagatgaggcaactgttataataagaggctcgataattgtagtttcttggttcgaagtctgagtgcttccctttgtttattaaaaaaatactcttatttatttaccttaatttatgctcgaaggtatctgtagagagatttgttacttggctatcataagtttatgagttttatacaaattt

SEQ ID NO: 11914 - protein, 253 aa, Glycine max
MPLVPANTKIEAPKPLLTPEEMKAKQQELRERARKKKEEEEKRMEREREKERIRIGKELLEAKRIEEENERKRLLALKKVEKEEEKRAREKIKKKLEEDKAERRRRLGLPPEEPSAAKPSPAPIVEEKKSFVPVRPATKAEQMRECLRSLKQNHKEDDARVKRAFQTLLTYVGNVARNPDEEKFRKIRLSNQSFQDRVGSLKGGIEFLEICGFEKIDGGEFLFLPRDKVEMAVLNSAGSELDSAIKNPFFGVL

SEQ ID NO: 11915 - protein, 232 aa, Glycine max
MKAKQQELRERARKKKEEEEKRMEREREKERIRIGKELLEAKRIEEENERKRLLALKKVEKEEEKRAREKIKKKLEEDKAERRRRLGLPPEEPSAAKPSPAPIVEEKKSFVPVRPATKAEQMRECLRSLKQNHKEDDARVKRAFQTLLTYVGNVARNPDEEKFRKIRLSNQSFQDRVGSLKGGIEFLEICGFEKIDGGEFLFLPRDKVEMAVLNSAGSELDSAIKNPFFGVL

SEQ ID NO: 11916 - protein, 210 aa, Glycine max
MEREREKERIRIGKELLEAKRIEEENERKRLLALKKVEKEEEKRAREKIKKKLEEDKAERRRRLGLPPEEPSAAKPSPAPIVEEKKSFVPVRPATKAEQMRECLRSLKQNHKEDDARVKRAFQTLLTYVGNVARNPDEEKFRKIRLSNQSFQDRVGSLKGGIEFLEICGFEKIDGGEFLFLPRDKVEMAVLNSAGSELDSAIKNPFFGVL

SEQ ID NO: 11917 - DNA, 554 bp, Glycine max
actactcatagtcacacgcagagcccataaaagaagctccctctcttgctctctttttaacaactatgcctcccactgatggagacttggatcttaggccaccttctcaatcttccttcacagccggcgactacacgttcgccgatgttgagaatttggagcattgcgctaggtatctcaaccaatcgctcgtcacgtttggtttcccggcttctctcgatctcttcgcaaatgaccccgtttcaattgcgaggacttgcaattgcatttacttcttgctccagcagagacagcgcgacgttgaatttagagagtctgctaatgatcaaagacaacgactgttgtctgacatatcgagattggaggccaaagtggagaggctggaaggtctactacaagtcaaggacagggagatagcgactattactagaacggaggctaaaaacactgcagctctgaaggctcaaattgagaagctgcaacaggagagggatgaatttcagagaatggttattggtaatcagcaagtaaagactcaacaaatgcatgagatg

SEQ ID NO: 11918 - protein, 163 aa, Glycine max
MPPTDGDLDLRPPSQSSFTAGDYTFADVENLEHCARYLNQSLVTFGFPASLDLFANDPVSIARTCNCIYFLLQQRQRDVEFRESANDQRQRLLSDISRLEAKVERLEGLLQVKDREIATITRTEAKNTAALKAQIEKLQQERDEFQRMVIGNQQVKTQQMHEM

SEQ ID NO: 11919 - protein, 112 aa, Glycine max
METWILGHLLNLPSQPATTRSPMLRIWSIALGISTNRSSRLVSRLLSISSQMTPFQLRGLAIAFTSCSSRDSATLNLESLLMIKDNDCCLTYRDWRPKWRGWKVYYKSRTGR

SEQ ID NO: 11920 - protein, 90 aa, Glycine max
MLRIWSIALGISTNRSSRLVSRLLSISSQMTPFQLRGLAIAFTSCSSRDSATLNLESLLMIKDNDCCLTYRDWRPKWRGWKVYYKSRTGR

SEQ ID NO: 11921 - DNA, 1204 bp, Glycine max
gttttttctctctgcagaatttcccaaatttctccactaccctatctcctttgctcctgaaactcgcacattcttcatcagcaatgcacgatcttcaatacgaatgcaatttcgatatttgacatcggagtatcagtgtttgagcgggtgaattggaaaatgctagaggcaatggaaagttcggtcaatggtggcttctcccatttgcagagctgtggagatagcagcgaagaagagttatcggtgcttcctcgtcacaccaaagttgtcgtaaccggaaataaccgcaccaaatcggtgctcgttggtcttcaaggtgtcgttaagaaagccgttggactaggcggatggcattggctggttcttacaaatggtattgaagttaagctacaaaggaatgctcttagcgtgattgaagcacccaccggtaatgaggaagacgatgaccttgagtttgaaaatatgccgtggaatggatcagatatggcatcggacgacacacacaagtcccacaagtcgaggcatagaatgcatagaacattgggatcatctcacaaaaccacgagtaggtccttctctgccgattcacagtcaaaggggtccgtttctatgccgcttcatggctccacgaaggtggacttgagcaaacttgaaatggctgcactgtggagatattggcgacattttaatctagtggatgcgttcccaaacccatcaaaagagcagctagtagacgttgttcagaggcatttcatgtcgcagcaaatggacgaattgcaggtgattgtgggatttgtccaagctgcaaagaggcttaagacagtgtggaaatgagaagaaatgatattttgaaaagttaaattgtctatgctaacaatgatagtgtatgtaatatccacttcccttcgtattatgttaatatttatcgctgattcgtaactttctgatatagtagtaggttagtagtttgagccttgaggttacagagactcttactcttttgtagcgacccagttatgtagataaatatgtgtcattgcaactggatcatcagggaagtcaccgcgactttctttgcaacttgattcaatgtattgctgacctgggaagtgagtttttagagacctcaatgtatatatattttagtttctcctaactttgattcgtcttaaatgaattctcgtgttgtgccacctgattcgct

SEQ ID NO: 11922 - protein, 224 aa, Glycine max
MLEAMESSVNGGFSHLQSCGDSSEEELSVLPRHTKVVVTGNNRTKSVLVGLQGVVKKAVGLGGWHWLVLTNGIEVKLQRNALSVIEAPTGNEEDDDLEFENMPWNGSDMASDDTHKSHKSRHRMHRTLGSSHKTTSRSFSADSQSKGSVSMPLHGSTKVDLSKLEMAALWRYWRHFNLVDAFPNPSKEQLVDVVQRHFMSQQMDELQVIVGFVQAAKRLKTVWK

SEQ ID NO: 11923 - protein, 220 aa, Glycine max
MESSVNGGFSHLQSCGDSSEEELSVLPRHTKVVVTGNNRTKSVLVGLQGVVKKAVGLGGWHWLVLTNGIEVKLQRNALSVIEAPTGNEEDDDLEFENMPWNGSDMASDDTHKSHKSRHRMHRTLGSSHKTTSRSFSADSQSKGSVSMPLHGSTKVDLSKLEMAALWRYWRHFNLVDAFPNPSKEQLVDVVQRHFMSQQMDELQVIVGFVQAAKRLKTVWK

SEQ ID NO: 11924 - protein, 123 aa, Glycine max
MPWNGSDMASDDTHKSHKSRHRMHRTLGSSHKTTSRSFSADSQSKGSVSMPLHGSTKVDLSKLEMAALWRYWRHFNLVDAFPNPSKEQLVDVVQRHFMSQQMDELQVIVGFVQAAKRLKTVWK

SEQ ID NO: 11925 - DNA, 673 bp, Glycine max
actcactctctctctctctcccgagagatcgatcaaaaaacagaaaatcaaagcctatcaccgatgccgccaccaacgcccctgagcagcgcctccgccgcgctccggcggcggctgcagcagtccctgcggacccgcggcggcgcggagtccgggccgagccggtggacgagccccggccacgaggagaggccgaaggggtacctcttcaatcggacccctccgcccccgggccagtcccgcaagtgggaggactgggagctcccctgctacgtcaccagcttcctcactatcgtcatcctcggcgtcggcctcaacgccaagcccgatctcaccatcgaaacctgggcccacgaaaaagccctcgagcgcctcaagatcgaaaactccctcgccgccgccgcaaccaataacaacagcgagtcgtcgtcctacgacgaatcggactgagtcgactcggatccgtccatgttaggttttgttaaaggaaaaacaaaaaaggtttcttcgctgtaataagggtatacaactcttggaatttgaactccttggttactcttatttttcttctgtgttttgaattttgaattgtgatgatgatgatgagattgttgactcgcttgatattgttgttattgactctttcttgaatgtggataaggcgttctgcgtt

SEQ ID NO: 11926 - protein, 149 aa, Glycine max
THSLSLSREIDQKTENQSLSPMPPPTPLSSASAALRRRLQQSLRTRGGAESGPSRWTSPGHEERPKGYLFNRTPPPPGQSRKWEDWELPCYVTSFLTIVILGVGLNAKPDLTIETWAHEKALERLKIENSLAAAATNNNSESSSYDESD

SEQ ID NO: 11927 - protein, 136 aa, Glycine max
SLSLSLPRDRSKNRKSKPITDAATNAPEQRLRRAPAAAAAVPADPRRRGVRAEPVDEPRPRGEAEGVPLQSDPSAPGPVPQVGGLGAPLLRHQLPHYRHPRRRPQRQARSHHRNLGPRKSPRAPQDRKLPRRRRNQ

SEQ ID NO: 11928 - protein, 128 aa, Glycine max
MPPPTPLSSASAALRRRLQQSLRTRGGAESGPSRWTSPGHEERPKGYLFNRTPPPPGQSRKWEDWELPCYVTSFLTIVILGVGLNAKPDLTIETWAHEKALERLKIENSLAAAATNNNSESSSYDESD

SEQ ID NO: 11929 - DNA, 1387 bp, Glycine max
attgcagggactaatatggggataacaaaaattttaatcagttataatttttctgttcttgaaaggtaaagtaggacagtggtgtgaaattggtggaaagaaaaaacatcagtgatcttgagtaactaacaatccatccgtgtaaaacgtgattggatttgggtcagtaatttaatgtacgaattacgaggtggcagcgactttaagtgttgaatggtgtggaacatagaagcacgttggcgtgaacacgatgatgaggtcaaagatagtgttgtttggagactccataacggagcaatcgatccgagagaatggatggggtgttcctcttgccaatgcctattctcgcagggctgatatacttgttcgtggttatggtggatacaacactaagtgggctatgttcttactggaccatctcttccctctggactcaactaaaccacctattgctaccacaattttcttcggcgctaatgatgcagctttgttaggaagaaccagtgaaaggcaacatgtacctattgaagaattcaaagagaacctcagaaaatttgttcgacacttaaaggaatgctcaccaactatggtaattgtgcttattactccacctccacttagcgaggaaggacgcctggcttacgcaagatccgtaaatggtgagaatgctaccaaaatacctgaaagaacaaatgaagtaactggtcaatatgcaaacgcctgtgttgaggtagcaaaaggaaatgggcgtgtggtatatcaatctatggtccaaaatgcaagaaacggatggctggcaaacaaaatttttgagggatgggttgcacctgacaacagaaggaaatgcagtagtctacgaagaattgataaaggtgttcgatgaagcaggactttctgctgttaacatgccaatggatttccctcaccactcaaaaattgattccaaacatccagagagagctttccagcagcatgtgtgatatcccattgtaactgatacaggggatcaatcactgcaaaccaatataaggacagcaacacaaactcaagcaacaacacagactcaagctaccacaatggcagcaactcagactcaagagcaggatgaatatacagagtctacaacagagcagagggtgcaattagtagctaggcccaagagagcagtcatcaaaccatcttacctgaaagactacgtctgagggtgagatgggaatttagctttgtaattttagctttgtaattttccttgcttgatgcttgtctggtagtgggagacaagccgaactttgattcccttatttcccttgcaagcaaaatatcccaattctgttagagacacttagtacaaatagctatgtggaataaatcaagcaaggcatgaatg

SEQ ID NO: 11930 - protein, 210 aa, Glycine max
MMRSKIVLFGDSITEQSIRENGWGVPLANAYSRRADILVRGYGGYNTKWAMFLLDHLFPLDSTKPPIATTIFFGANDAALLGRTSERQHVPIEEFKENLRKFVRHLKECSPTMVIVLITPPPLSEEGRLAYARSVNGENATKIPERTNEVTGQYANACVEVAKGNGRVVYQSMVQNARNGWLANKIFEGWVAPDNRRKCSSLRRIDKGVR

SEQ ID NO: 11931 - protein, 209 aa, Glycine max
MRSKIVLFGDSITEQSIRENGWGVPLANAYSRRADILVRGYGGYNTKWAMFLLDHLFPLDSTKPPIATTIFFGANDAALLGRTSERQHVPIEEFKENLRKFVRHLKECSPTMVIVLITPPPLSEEGRLAYARSVNGENATKIPERTNEVTGQYANACVEVAKGNGRVVYQSMVQNARNGWLANKIFEGWVAPDNRRKCSSLRRIDKGVR

SEQ ID NO: 11932 - protein, 160 aa, Glycine max
MFLLDHLFPLDSTKPPIATTIFFGANDAALLGRTSERQHVPIEEFKENLRKFVRHLKECSPTMVIVLITPPPLSEEGRLAYARSVNGENATKIPERTNEVTGQYANACVEVAKGNGRVVYQSMVQNARNGWLANKIFEGWVAPDNRRKCSSLRRIDKGVR

SEQ ID NO: 11933 - DNA, 1404 bp, Glycine max
aattccccattgagcgcacagaaagcaaagtgtctctctaacctctgcaaaagtccaaggttgcacggttttaactgcttaggcttttgtcttcaaaattaaaactgtgcaactttggttgcagagtcataagtgttaagttgtgtatgcatgaaagtgggcttgagttaattgtgcctcttgtatgatggaatccctttggaaactgttgtacttgctagagcctgcgcctgtcacacttatcattacagctgtggctgtgacatttggcgcagcatttcgagctctaaactatgggaaagaaatggagcataatcgtgacttatgtgaagcatcgattacattggataggtcacaggcattgatgatcccggtgatgagctcttttagcttgcttttgatgttctacttgttctcatctgtctcgcagcttctcactgcattcactgctgttgcttccgcatcctctcttttcttctgcttgtctccttatgttgcctatttgaaggcacagtttggtttagcggatccatttgtttcacgctgttgctcgaaatcttttacacgactccaagcaatactattgttagtgtgctctttcactgtggctgcttggcttgtttctggtcattggatactgaacaatttgttaggcatatctatatgcatcgcgtttgtaagccatgtgcgtcttccaaacatcaaaatttgcgctatgctccttgtttgtctattcgtgtatgacattttttgggttttcttctctgaaagattttttggtgcaaatgtcatggtatcagtggcaacacagcaagcatcaaatcctgtgcacaccgttgccaatagtatcggtcttcctgggttgcaactgataactaagaaattagagctgcctgtaaagattgtttttccaagaaatttgttgggtggtgttgttcctggagagaatgcggcagacttcatgatgcttggtttaggagacatggctatcccaggcatgctactggctttagtcctctgctttgattatcgcaagagcagggatacagtaaatctcttagaattacattcctcaaaggggcacaaatacatatggtatgcgctacccgggtatgccattggcctggtaactgctttggcagctggtgtcttgacccactcacctcaacctgcacttctttatctggtgccttctactttgggacctgtagttgtgatatcttggatgaaaagggagctatttgagttgtgggaaggaaacaccccaaatctcaatgataaagatcgcgaaatagaagtttagtctagggactggtggtttatagccaaatagaaagttgtaaatttactgagagtctttaatcgtcagactcaccaagaaaatttacattaattgttcatttt

SEQ ID NO: 11934 - protein, 372 aa, Glycine max
MMESLWKLLYLLEPAPVTLIITAVAVTFGAAFRALNYGKEMEHNRDLCEASITLDRSQALMIPVMSSFSLLLMFYLFSSVSQLLTAFTAVASASSLFFCLSPYVAYLKAQFGLADPFVSRCCSKSFTRLQAILLLVCSFTVAAWLVSGHWILNNLLGISICIAFVSHVRLPNIKICAMLLVCLFVYDIFWVFFSERFFGANVMVSVATQQASNPVHTVANSIGLPGLQLITKKLELPVKIVFPRNLLGGVVPGENAADFMMLGLGDMAIPGMLLALVLCFDYRKSRDTVNLLELHSSKGHKYIWYALPGYAIGLVTALAAGVLTHSPQPALLYLVPSTLGPVVVISWMKRELFELWEGNTPNLNDKDREIEV

SEQ ID NO: 11935 - protein, 371 aa, Glycine max
MESLWKLLYLLEPAPVTLIITAVAVTFGAAFRALNYGKEMEHNRDLCEASITLDRSQALMIPVMSSFSLLLMFYLFSSVSQLLTAFTAVASASSLFFCLSPYVAYLKAQFGLADPFVSRCCSKSFTRLQAILLLVCSFTVAAWLVSGHWILNNLLGISICIAFVSHVRLPNIKICAMLLVCLFVYDIFWVFFSERFFGANVMVSVATQQASNPVHTVANSIGLPGLQLITKKLELPVKIVFPRNLLGGVVPGENAADFMMLGLGDMAIPGMLLALVLCFDYRKSRDTVNLLELHSSKGHKYIWYALPGYAIGLVTALAAGVLTHSPQPALLYLVPSTLGPVVVISWMKRELFELWEGNTPNLNDKDREIEV

SEQ ID NO: 11936 - protein, 332 aa, Glycine max
MEHNRDLCEASITLDRSQALMIPVMSSFSLLLMFYLFSSVSQLLTAFTAVASASSLFFCLSPYVAYLKAQFGLADPFVSRCCSKSFTRLQAILLLVCSFTVAAWLVSGHWILNNLLGISICIAFVSHVRLPNIKICAMLLVCLFVYDIFWVFFSERFFGANVMVSVATQQASNPVHTVANSIGLPGLQLITKKLELPVKIVFPRNLLGGVVPGENAADFMMLGLGDMAIPGMLLALVLCFDYRKSRDTVNLLELHSSKGHKYIWYALPGYAIGLVTALAAGVLTHSPQPALLYLVPSTLGPVVVISWMKRELFELWEGNTPNLNDKDREIEV

SEQ ID NO: 11937 - DNA, 623 bp, Glycine max
ttcatcagattcagctggtactcacaatgagcagttagaagctcatttagagaggtcaactcaacagcttgatcaactaaaaaaggaggtttctcagatgaagaggggattggaagagaaaagactccatgttaaggaattacaaaagcaatctaagaaactggaggatgcagtgatcaatgcaaagaaaaactcttcatatcgtcagatgcagttgatgaagctgcataaaggttttctgcaagtgaaagattgcacagaaaaactaaaaactagtgaaaaagaacttcaggctctaattgatacagcaatgtcagagattgactgtgatggattaaaggatggacaactaacaaatggaagtcttgatggtagattgtaatatatctttcggaggttcagattgtgtcattgatgcttaaaatgtgtttagcacagaataccctaatgttatatggagaagaaaaaaaggctggataattattctcttttattattccgctccagtctctactaaataacattaatagagttttgtttatacttttaagttgttggtaaacttggtcattgtaacttcctttgttataaattttcactagagaaaaccagctgacttcttg

SEQ ID NO: 11938 - protein, 126 aa, Glycine max
SSDSAGTHNEQLEAHLERSTQQLDQLKKEVSQMKRGLEEKRLHVKELQKQSKKLEDAVINAKKNSSYRQMQLMKLHKGFLQVKDCTEKLKTSEKELQALIDTAMSEIDCDGLKDGQLTNGSLDGRL

SEQ ID NO: 11939 - protein, 94 aa, Glycine max
MKRGLEEKRLHVKELQKQSKKLEDAVINAKKNSSYRQMQLMKLHKGFLQVKDCTEKLKTSEKELQALIDTAMSEIDCDGLKDGQLTNGSLDGRL

SEQ ID NO: 11940 - DNA, 311 bp, Glycine max
aaagaagccctacaaatatccatcacctccaccaccagttcacacctaccctccccatgttcccaccccagtttaccactctcctccaccaccaccatacgagaagccttacaagtacaagtctcctcctcccccagtccactctccacctccaccacactactactacaaatcaccccctccaccttaccactactaggtagcactttctcttcacacccccacatggatgcatacagaaagtgtgaaaatgaaagtcatggagtgggaagatgcatctgcagcttgcagatccacaaagaagtataaat

SEQ ID NO: 11941 - protein, 102 aa, Glycine max
KEALQISITSTTSSHLPSPCSHPSLPLSSTTTIREALQVQVSSSPSPLSTSTTLLLQITPSTLPLLGSTFSSHPHMDAYRKCENESHGVGRCICSLQIHKEV

SEQ ID NO: 11942 - protein, 66 aa, Glycine max
RSPTNIHHLHHQFTPTLPMFPPQFTTLLHHHHTRSLTSTSLLLPQSTLHLHHTTTTNHPLHLTTTR

SEQ ID NO: 11943 - protein, 65 aa, Glycine max
KKPYKYPSPPPPVHTYPPHVPTPVYHSPPPPPYEKPYKYKSPPPPVHSPPPPHYYYKSPPPPYHY

SEQ ID NO: 11944 - DNA, 410 bp, Glycine max
gtttaaagctgaaaatgagggaaaattccactcattccacccagttgcgaccatccttagttacctgaccaaggcccctctggttccaccgggtacaccagtggtgaatgcgttgtcaaagcagcgagctatgctggaaaacatcctgagggcttgtgttggattagctcctgagaacaacatgatcctagagtacaagtgaagttcaaagtcttaagagtaacggtttgggatagtgtagttgaatgtgatcaaaacttaactcatatcccatacccctcttttctgttatatagttctggcaaatgtgaaatttgaagatcgttgaatctctctatctttgttcctgccgacttatttgagagcaggctatctatgcatgtatgtaataaaataatatcaagttatcc

SEQ ID NO: 11945 - protein, 66 aa, Glycine max
FKAENEGKFHSFHPVATILSYLTKAPLVPPGTPVVNALSKQRAMLENILRACVGLAPENNMILEYK

SEQ ID NO: 11946 - DNA, 513 bp, Glycine max
  misc_feature (107)..(107): n is a, c, g, or t
tggaagaaatcaattcaagaaaccactacaggcaatcatgggaagctggtgatcaaagtatgccatacggtggtggtccacagaattctcactctcatcagggcttnttccagccattggaatgcaaccctacattgcagattggtcctgattacaggtacaatgatgtagcttcagatcagataactgccacaactcaacctcaacaagtgagtggctttattccagggtggatgctgtgaaattaggctcagtattcagttggagacataaaagcaaacaccttacaaaagggcaaagccaaaaatgcatcttggtgttggcaaggtgtaaatgtaaccctgcttctattattattttggtataagaaacagatgtgttgtgacttgttcaaacttgtgagaacctttttagccatagacatatggcaatttataacattcggaatcttttgaaggatccttttttattattaaaatatccgagcgaccggtttcaattttcttcgattgc

SEQ ID NO: 11947 - protein, 79 aa, Glycine max
  misc_feature (35)..(35): Xaa can be any naturally occurring amino acid
EEINSRNHYRQSWEAGDQSMPYGGGPQNSHSHQGXFQPLECNPTLQIGPDYRYNDVASDQITATTQPQQVSGFIPGWML

SEQ ID NO: 11948 - protein, 60 aa, Glycine max
  misc_feature (16)..(16): Xaa can be any naturally occurring amino acid
MPYGGGPQNSHSHQGXFQPLECNPTLQIGPDYRYNDVASDQITATTQPQQVSGFIPGWML

SEQ ID NO: 11949 - protein, 56 aa, Glycine max
  misc_feature (36)..(36): Xaa can be any naturally occurring amino acid
WKKSIQETTTGNHGKLVIKVCHTVVVHRILTLIRAXSSHWNATLHCRLVLITGTMM

SEQ ID NO: 11950 - DNA, 1642 bp, Glycine max
  misc_feature (1591)..(1591): n is a, c, g, or t
aaagaagtagatcaaaagtttccatttatatcataattatatacataatttcctccatctttctcgatcgcgaaaaagtgcagaccaagtaaattaatttgctagttatgatgtatgtatatttgtttgatacacacacctgcatgatttgattaattaatttgtttatatgcatatataattattgaaggagatggtggtgaaaccaatagaagatatagtggtgacaaatacatgtccaaaggctgtggaaagtaagccaaggccacagaaggaacaagcaattaactgtccaaggtgtcattcaattaacaccaagttctgctactacaacaactacagcctcacacagcctaggtatttctgcaagacttgtagaaggtattggactgaaggtggaactctcagaaacatccctgtaggaggtggctctaggaagaacaagagatcttcagcttcttgttccacacctaataatagtcacaataacaataattcaaccaataagaagcttctttctgatctggtcatcacacctccaactctgtcacacactcaaaaccctaatagcaataatactattcatcaaggccaagatctcaatttggcttttccatcctccaccccagatttcagaaaaatctctgaattggtccaacaaaacaacaacaacaacaatagtagcaacaacagcatgtcagcttcagcttcttcttcttcaaccacaactacaacttccacttctcacctttctgcattggagcttcttactgggatcacttcaagttccagtgctggtttgacttctttcatgcctgtgccggttccatctgatccaaattctatctacacatgtgggtttcctctgcaagatttcaagccaaccttgaatttctctttggatgggatcggaaacgggtacacaagccttcagaatgttcaaagtgggaggctcttgtttccatctgatgacttaagacaggtttctagctccaccatcaccacaatggatcagaaacaacaaggagattcaactgggtattggactggaatgttaggcggaggatcatggtaattaatcatcaagagagtcataaagatatatatttatttacttaatttcttctcttgctttctactaagttaattttccttttgaacttttttcttttgggttttaatgagtttccgtcagatcatgtggggacttcacttgtttggatttcttcataactggctaacagctgataggatcgattcatacatgagtttcttttcctcttctgtcaattccttatatgtatatctggctccgcttatatctcttcatgaccaagtttattttgggatcttgaaatgaagcttattttaggcaggcttcagtagtacttggaaaattaaaacaagggttacattacatttgattatatgtaatgatagaagagatcaagattaactccatttttttagggttaacaagtagctagaaaggggggccgggtaaattaagtgttattgctgttatagtatttcatgtaatttcttctatcactgaagaagggcaacatcatcaattgatttgattgtctancttaccggattcgaaaatgtataatgtacaagaatatattattattattat

SEQ ID NO: 11951 - protein, 293 aa, Glycine max
MVVKPIEDIVVTNTCPKAVESKPRPQKEQAINCPRCHSINTKFCYYNNYSLTQPRYFCKTCRRYWTEGGTLRNIPVGGGSRKNKRSSASCSTPNNSHNNNNSTNKKLLSDLVITPPTLSHTQNPNSNNTIHQGQDLNLAFPSSTPDFRKISELVQQNNNNNNSSNNSMSASASSSSTTTTTSTSHLSALELLTGITSSSSAGLTSFMPVPVPSDPNSIYTCGFPLQDFKPTLNFSLDGIGNGYTSLQNVQSGRLLFPSDDLRQVSSSTITTMDQKQQGDSTGYWTGMLGGGSW

SEQ ID NO: 11952 - DNA, 1212 bp, Glycine max
ggagtgcaataattccttcgttctaccgtcatcaactagaagaagaagcttcaatttctgcaaaatggatccgtctgcggcattgctgtttaaccacctcaaaggtgcagacccgttcttcctgctagcgggtcctaatgtgattgaatcagaggagcacattctgcggatggctaagaacatcaagactattgcatctgaagttggaataccgttggttttcaagtcaagctttgacaaagctaaccgaacatcatcaaaatcatttcgtggcccggggatggttgagggattgaagatactcgagaaggttaaaatagcttatgacattcctatagtgacagatgtgcatgagtctatccagtgtgaagcagttggcagagtagcagatatcattcagattccagcattcttgtgtcgccaaacagatcttctagttgcagcagccaaaactgggaaaattatcaacattaagaagggccagttctgcgctccttctgtgatgacaaattcagctgaaaaggtccggttagctggaaatcctaatgtgatggtttgtgagagaggaacaatgtttggatacaatgatttgattgttgatccacgtaacttggagtggatgagagaagccaattgtcccattgtagctgatataactcactcactacaacagcctgctggaaagaagttggatggaggaggtgtggcaagtggaggtcttcgagaactgataccttgcattgcaaggacagcagttgccgttggagtggatgggatcttcatggaggtgcatgatgatccactgaaagcacctgttgatggcccaacacagtggccgttgcgccactttaaggagctacttgaagagcttgtagccattgctaggataagcaaagggaagcaacggttcaacattgatctcacaccatttcgtgaataaagaaagggtgatggttttcagatattctgaatataattccgtgaccattggtttttaaagattgttcaagggtgatgaatgcaaaactgtctcctatcgcaagttccttataaggagagtttatattaaaaaatgttatttgatgatccatgcttgttactctgaagtggtaacactataccaactaatgtttgtcacatatcccttaatcatgtcagttactgaagttgaggcaattaattgaatatcaaaatataggtagattatttatt

SEQ ID NO: 11953 - protein, 312 aa, Glycine max
ECNNSFVLPSSTRRRSFNFCKMDPSAALLFNHLKGADPFFLLAGPNVIESEEHILRMAKNIKTIASEVGIPLVFKSSFDKANRTSSKSFRGPGMVEGLKILEKVKIAYDIPIVTDVHESIQCEAVGRVADIIQIPAFLCRQTDLLVAAAKTGKIINIKKGQFCAPSVMTNSAEKVRLAGNPNVMVCERGTMFGYNDLIVDPRNLEWMREANCPIVADITHSLQQPAGKKLDGGGVASGGLRELIPCIARTAVAVGVDGIFMEVHDDPLKAPVDGPTQWPLRHFKELLEELVAIARISKGKQRFNIDLTPFRE

SEQ ID NO: 11954 - protein, 291 aa, Glycine max
MDPSAALLFNHLKGADPFFLLAGPNVIESEEHILRMAKNIKTIASEVGIPLVFKSSFDKANRTSSKSFRGPGMVEGLKILEKVKIAYDIPIVTDVHESIQCEAVGRVADIIQIPAFLCRQTDLLVAAAKTGKIINIKKGQFCAPSVMTNSAEKVRLAGNPNVMVCERGTMFGYNDLIVDPRNLEWMREANCPIVADITHSLQQPAGKKLDGGGVASGGLRELIPCIARTAVAVGVDGIFMEVHDDPLKAPVDGPTQWPLRHFKELLEELVAIARISKGKQRFNIDLTPFRE

SEQ ID NO: 11955 - protein, 256 aa, Glycine max
MAKNIKTIASEVGIPLVFKSSFDKANRTSSKSFRGPGMVEGLKILEKVKIAYDIPIVTDVHESIQCEAVGRVADIIQIPAFLCRQTDLLVAAAKTGKIINIKKGQFCAPSVMTNSAEKVRLAGNPNVMVCERGTMFGYNDLIVDPRNLEWMREANCPIVADITHSLQQPAGKKLDGGGVASGGLRELIPCIARTAVAVGVDGIFMEVHDDPLKAPVDGPTQWPLRHFKELLEELVAIARISKGKQRFNIDLTPFRE

SEQ ID NO: 11956 - DNA, 329 bp, Glycine max
ttggtctacttgtcacaaatgcctgcctagtgtcaaagaattcactctcaagaatctcgtctttgtccttcgtatcggcaggatcaagtaagtggaatactagactgggaattgtctacccttggtaaccaaatgtgtgatgttgcatatagctgtatggcagatacgacatattccagctaatggtaaatttgtacgctgagaggtttattcagatgctacgattgcttagcgacagggcgaatgaattaacaaacattgagatattaaaggatcaagtaattggaatactagactgggaattgtctacccttggtaaccaaatgtgt

SEQ ID NO: 11957 - protein, 49 aa, Glycine max
MVNLYAERFIQMLRLLSDRANELTNIEILKDQVIGILDWELSTLGNQMC

SEQ ID NO: 11958 - protein, 41 aa, Glycine max
GLLVTNACLVSKNSLSRISSLSFVSAGSSKWNTRLGIVYPW

SEQ ID NO: 11959 - protein, 38 aa, Glycine max
MLRLLSDRANELTNIEILKDQVIGILDWELSTLGNQMC

SEQ ID NO: 11960 - DNA, 643 bp, Glycine max
ttttgtctgaaacagagagtgagagagagggcaaaaccctagctttggagtcttccctcccatctcccacttcttgcaatctctgcagccatggcgagtaccaaagttcagagggttatgacccaacctattaacttgattttcaggtttcttcagagcaaagcgcgcattcagatttggctttttgagcagaaggatttgaggattgaaggccgaatcatcggttttgatgaatacatgaatttggttcttgatgatgctgaagaagtgaacgtcaagaagaaaagcagaaagacattagggaggatccttcttaaaggagacaacataaccttgatgatgaacacggggaaatgattaacactctggcacagttgtaaactccgttcctatccaacaagaaagaaaaattatctttccctttccagtttaattactgtttctcttgttaacatcttgaatatgttgtgggagaaatattatcatgtatgaatctgtgaatttttaatactctagataaattcttagttgagcagtttaacatgttatattgccatcagtttgcctctattatatttgtgcctggaagcttgtgattttatgactgaggaagtatagcatcaatcttaacctcatttagtgg

SEQ ID NO: 11961 - protein, 88 aa, Glycine max
MASTKVQRVMTQPINLIFRFLQSKARIQIWLFEQKDLRIEGRIIGFDEYMNLVLDDAEEVNVKKKSRKTLGRILLKGDNITLMMNTGK

SEQ ID NO: 11962 - protein, 79 aa, Glycine max
MTQPINLIFRFLQSKARIQIWLFEQKDLRIEGRIIGFDEYMNLVLDDAEEVNVKKKSRKTLGRILLKGDNITLMMNTGK

SEQ ID NO: 11963 - DNA, 1821 bp, Glycine max
  misc_feature (791)..(791): n is a, c, g, or t
  misc_feature (896)..(896): n is a, c, g, or t
  misc_feature (946)..(946): n is a, c, g, or t
  misc_feature (996)..(996): n is a, c, g, or t
  misc_feature (1004)..(1004): n is a, c, g, or t
  misc_feature (1046)..(1046): n is a, c, g, or t
tttttctgcactgactacacccttgggtgttgggattggaatgggtatctcttcggggtataacccttacagcacccaaggtaaaacatctaccgacggcactcatcctcgttctcgtcctgaatacattcccaatcacattcccgacccgtcatatgtccgcatcctggacaccacccttcgcgatggcgagcaatctcccggagctgccatgacgtccgatcagaagctcgggattgctcgccaactcgtgaagttgggcgtggacatcatcgatgccggtttcccttcggcgtcacaggaagacttcaacgctgtcaagatgatagcgcaagaagttggcaatgactgtgacgctgatgggtatgttccagtcattgctgcactatgtaggtgcaatgagaaggacattaccacagcgtgggaggctgtgtgatacgctaagaagccaaggctaatacctttcattgcaaccagttcgattcacatggagtataagctcaataagactaaagaagaggtgcttcaaattgctatcgacatggtcaagtttacacgcagtttaggttgtgatgacatcgagttcggtgttgaagatgcagccagatccgatacagagtttctttataaaattttggaagaagttatcaaagctggggcaacaactctgtgcatagctgatactgtgggcataacaatgccattagagtttggagaaatgattgctggtataaaagccaacgtccctggagttgaaaatgctattatttctgttcattgtcataatgatntaggacatgctactgcaaatacaatacaggctgcctgtgttggtgcaagacaattagaagtaacaattaatgggattggtgaaagggccggtaatgctgcattcnaagaggttgtgatggccctaaaatgcaggggagatcatgccttaggtggnctttatactggaatcaatacaagacacatattaaagacaagcaggatggncgaagagngctctggtatgtatttacaaccacacaaagctcttgtcggtnataattcttttctccatgaaagtggcattcatcaggctggattgttgaagcacagaggaacatatgaaataatatctccggaagatattggtcatgaaaggtccaatggagctaatatggtactagggaagctaagtggacgccacgcgttgaaaaatcgactccaagagcttggttatgaacttagggatgatgaattagagagtgtgtttcggaacttcaaagcaatggctggaaaaaagaagagagttactgatgttgaccttaaggcattggtatcagatcaagtttgtcatgtagaacctatttggaagcttgatgatttgcaggtgacttgtggaactatgggttcttcaacagcatctgtcaaacttgttactgttcatggtagcacacatgttgcttgttctgttggtgtgggaccagtggatgcagcttacaaggctattgatctcattgtgaaggaaactgtaaaagtacttgagtatacactgaatccagttacagagggaactgatgcaattgcaactacacgtattgtaattcgtagagaaaacaacaaaacacttactcatgctttgaatggaaactttgtttatccaacatttagtgggactggagaaggagtggatgttgttgtttctagtgtggaggcttatcttacagcactaaacaaaatgctcgatttcaaggactgatttatatttgttgaaaaatttatagcatttgggtgtatgagttgagacttcatgttataaattcaaacgagctattt

SEQ ID NO: 11964 - protein, 418 aa, Glycine max
  misc_feature (102)..(102): Xaa can be any naturally occurring amino acid
  misc_feature (137)..(137): Xaa can be any naturally occurring amino acid
  misc_feature (153)..(153): Xaa can be any naturally occurring amino acid
  misc_feature (170)..(170): Xaa can be any naturally occurring amino acid
  misc_feature (173)..(173): Xaa can be any naturally occurring amino acid
  misc_feature (187)..(187): Xaa can be any naturally occurring amino acid
MEYKLNKTKEEVLQIAIDMVKFTRSLGCDDIEFGVEDAARSDTEFLYKILEEVIKAGATTLCIADTVGITMPLEFGEMIAGIKANVPGVENAIISVHCHNDXGHATANTIQAACVGARQLEVTINGIGERAGNAAFXEVVMALKCRGDHALGXLYTGINTRHILKTSRMXEEXSGMYLQPHKALVGXNSFLHESGIHQAGLLKHRGTYEIISPEDIGHERSNGANMVLGKLSGRHALKNRLQELGYELRDDELESVFRNFKAMAGKKKRVTDVDLKALVSDQVCHVEPIWKLDDLQVTCGTMGSSTASVKLVTVHGSTHVACSVGVGPVDAAYKAIDLIVKETVKVLEYTLNPVTEGTDAIATTRIVIRRENNKTLTHALNGNFVYPTFSGTGEGVDVVVSSVEAYLTALNKMLDFKD

SEQ ID NO: 11965 - protein, 400 aa, Glycine max
  misc_feature (84)..(84): Xaa can be any naturally occurring amino acid
  misc_feature (119)..(119): Xaa can be any naturally occurring amino acid
  misc_feature (135)..(135): Xaa can be any naturally occurring amino acid
  misc_feature (152)..(152): Xaa can be any naturally occurring amino acid
  misc_feature (155)..(155): Xaa can be any naturally occurring amino acid
  misc_feature (169)..(169): Xaa can be any naturally occurring amino acid
MVKFTRSLGCDDIEFGVEDAARSDTEFLYKILEEVIKAGATTLCIADTVGITMPLEFGEMIAGIKANVPGVENAIISVHCHNDXGHATANTIQAACVGARQLEVTINGIGERAGNAAFXEVVMALKCRGDHALGXLYTGINTRHILKTSRMXEEXSGMYLQPHKALVGXNSFLHESGIHQAGLLKHRGTYEIISPEDIGHERSNGANMVLGKLSGRHALKNRLQELGYELRDDELESVFRNFKAMAGKKKRVTDVDLKALVSDQVCHVEPIWKLDDLQVTCGTMGSSTASVKLVTVHGSTHVACSVGVGPVDAAYKAIDLIVKETVKVLEYTLNPVTEGTDAIATTRIVIRRENNKTLTHALNGNFVYPTFSGTGEGVDVVVSSVEAYLTALNKMLDFKD

SEQ ID NO: 11966 - protein, 348 aa, Glycine max
  misc_feature (32)..(32): Xaa can be any naturally occurring amino acid
  misc_feature (67)..(67): Xaa can be any naturally occurring amino acid
  misc_feature (83)..(83): Xaa can be any naturally occurring amino acid
  misc_feature (100)..(100): Xaa can be any naturally occurring amino acid
  misc_feature (103)..(103): Xaa can be any naturally occurring amino acid
  misc_feature (117)..(117): Xaa can be any naturally occurring amino acid
MPLEFGEMIAGIKANVPGVENAIISVHCHNDXGHATANTIQAACVGARQLEVTINGIGERAGNAAFXEVVMALKCRGDHALGXLYTGINTRHILKTSRMXEEXSGMYLQPHKALVGXNSFLHESGIHQAGLLKHRGTYEIISPEDIGHERSNGANMVLGKLSGRHALKNRLQELGYELRDDELESVFRNFKAMAGKKKRVTDVDLKALVSDQVCHVEPIWKLDDLQVTCGTMGSSTASVKLVTVHGSTHVACSVGVGPVDAAYKAIDLIVKETVKVLEYTLNPVTEGTDAIATTRIVIRRENNKTLTHALNGNFVYPTFSGTGEGVDVVVSSVEAYLTALNKMLDFKD

SEQ ID NO: 11967 - DNA, 1729 bp, Glycine max
  misc_feature (694)..(694): n is a, c, g, or t
  misc_feature (736)..(736): n is a, c, g, or t
agcaaccataattattttttttgacaagcagctcaagaaaaatctgcaaagaataaaacaagaggaggaaatgcaacttacttgttgatataaacttcagacagagcgagttgttgtaaagctagccttgttgcagccatggccacccacgcggctctagcttctacaaggatccccactaacaccaagttcccatccaaggcttcacactctttcccaacccaatgcgcctcaaagagacttgaggtgacagaattctctgggctaagatccacttcatgtgtgacatatgctaacgatgctagagaatcttccttttttgatcttgtagcttcccaactcactcccaagaccaatggatcatcaactcctgtgaggggagagacagtggccaagttgaaggtggcaatcaatggtttcggacgcattggtagaaacttccttcgctgctggcacggccgaaaagactcaccccttgaggtcgttgttgtcaacgacagtggtggtgtcaagaatgcttcgcacctgcttaaatatgattccatgctgggaacttttaaagcagatgtgaaaatactggacaatgaaaccatcactgttgatggtaagcccatcaaggttgtttcaagcagggaccctcttaagcttccttgggctgaacttggaattgacattgttattgagggaaccggantgtttgtggatggccctggggctggtaaacacatccaagcangtgccaagaaagttattatcactgctcctgcaaagggtgctgatattccaacttatgttgttggtgtaaatgaaggggactacactcatcagatctctaacattataagcaacgcttcctgcaccacaaactgtcttgctccctttgtgaagatcctggatgaagagtttggaattgtgaagggaaccatgacaaccacacattcctacacaggagaccagaggcttttggatgcttcacaccgtgacttgagaagagccagggctgcagcactgaacattgtcccaaccagcactggagctgccaaggctgtgtctctagtgttgccacagctgaagggcaagcttaatggaatagcgctccgtgtgcctacacccaatgtttcagttgttgaccttgttgtgaatgttgagaagaagggtcttactgctgaagatgtgaatgcagcattcagaaaggcagctgagggtccactgaaaggtgtgttggacgtgtgtgatgttccacttgtgtctatcgacttccgctgctctgatgtttcctctactattgactcctccttgactatggtcatgggagatgacatggttaaggtggttgcttggtatgacaatgaatggggttacagccaaagggtggtggatttggcacacctagtagcaagcaagtggccaggggcagctaaagcagggagtggagacccattggaggaattctgcgagacaaaccctgctgatgaggaatgcaaagtatatgaatagaggagagcgcctttttctgatttgatgattaccattaccagcagcaaaccatttttactctttgccttgtgttaacgtatcatgtgaaaaagaaggaaattgttcgttcagacggtgtctgaggagagattttcaaagtttaacattatctgcagccaataatattttggcgtgactgaaattcatgaatatcgcccatatattgattgatatggtatttcttaattcttgt

SEQ ID NO: 11968 - protein, 452 aa, Glycine max
  misc_feature (186)..(186): Xaa can be any naturally occurring amino acid
  misc_feature (200)..(200): Xaa can be any naturally occurring amino acid
MATHAALASTRIPTNTKFPSKASHSFPTQCASKRLEVTEFSGLRSTSCVTYANDARESSFFDLVASQLTPKTNGSSTPVRGETVAKLKVAINGFGRIGRNFLRCWHGRKDSPLEVVVVNDSGGVKNASHLLKYDSMLGTFKADVKILDNETITVDGKPIKVVSSRDPLKLPWAELGIDIVIEGTGXFVDGPGAGKHIQAXAKKVIITAPAKGADIPTYVVGVNEGDYTHQISNIISNASCTTNCLAPFVKILDEEFGIVKGTMTTTHSYTGDQRLLDASHRDLRRARAAALNIVPTSTGAAKAVSLVLPQLKGKLNGIALRVPTPNVSVVDLVVNVEKKGLTAEDVNAAFRKAAEGPLKGVLDVCDVPLVSIDFRCSDVSSTIDSSLTMVMGDDMVKVVAWYDNEWGYSQRVVDLAHLVASKWPGAAKAGSGDPLEEFCETNPADEECKVYE

SEQ ID NO: 11969 - protein, 317 aa, Glycine max
  misc_feature (51)..(51): Xaa can be any naturally occurring amino acid
  misc_feature (65)..(65): Xaa can be any naturally occurring amino acid
MLGTFKADVKILDNETITVDGKPIKVVSSRDPLKLPWAELGIDIVIEGTGXFVDGPGAGKHIQAXAKKVIITAPAKGADIPTYVVGVNEGDYTHQISNIISNASCTTNCLAPFVKILDEEFGIVKGTMTTTHSYTGDQRLLDASHRDLRRARAAALNIVPTSTGAAKAVSLVLPQLKGKLNGIALRVPTPNVSVVDLVVNVEKKGLTAEDVNAAFRKAAEGPLKGVLDVCDVPLVSIDFRCSDVSSTIDSSLTMVMGDDMVKVVAWYDNEWGYSQRVVDLAHLVASKWPGAAKAGSGDPLEEFCETNPADEECKVYE

SEQ ID NO: 11970 - DNA, 1723 bp, Glycine max
atcatttttaacttaaatactggtactaatagtatatcctattgtactatgtcttgattatatattatatagacacacagagatagaaagagagagaaagagtctaactagaattttttttctctctttcataacctagtgagactctgtgtcagagtttgtgaagtgaatcccataatcatgaagaaaggaaacttgggacttggtctcaaactctcagttcctgtgtctgatcaatctaattttgccaggttcctgactgaaagtgggacttttaaggatggggatctgcttgtcaacagggatggagttcgaattgtctctcagaatgatgtcgaagctccacctccaatcaagcctacagacaaccagttaactttggcagacatagatgtaatcaaagttgttggaaagggaaatggaggggtagttcaattggtgcaacacaaatggactagtcagttttttgcgttgaaggtaattcagatgaatattgaggagtctatgcgcaagcagattgcacaagagctgaaaattaatcaacaagcacaatgtccttatgttgttgtctgctaccaatcattctatgaaaacggtgtcatatcaatcatcttagagtacatggatggaggttccttagctgatctgctgaagaaagttaaaacaattccagaggattatcttgctgccatctgtaagcaggtgctgaagggtttagtttatctccaccacgaaaagcatattatccacagagacttaaaaccttctaatttgttaataaatcatattggtgaagtaaagattactgactttggtgtgagtgcaattatggaaagtacatctggtcaagcaaatactttcattggaacctacaactatatgtctccagagagaatcaatggaagccagcgaggctacaactacaaaagtgatatatggagtttgggactaatattacttgagtgtgctttgggtcggtttccatatgcaccgcctgatcaaagtgaaacatgggaaagcatttttgagcttattgaaaccattgtcgataaacctcctcctatccctccttctgaacaattttctacagaattttgctcatttatctcagcatgtctacagaaagacccaaaggatcgactgtcagctcaggaattaatggcacatccttttgtcaacatgtatgatgacttggaggtggatctttcagcttacttctcaaatgcaggatctcctcttgcaaccttataaaagtttccctgcttgcaaatgaggagcgtttgcagatgagttgaagaaccagctcctagagtcacttcaaggattctgtatttagttgttgagtgattgagttcaatttgttgagaaactcagatgcaagggtcaagaaattgcaataattgacatttgaagaactttaatgctgaagttaagtatcaggggctacttgcaacaaaatgtttgaaatttatgattgcaacaaaacgtatcactaggatttgcctgagttgctgataatatgatctgatgtacaaattttcatgagatgaaagttttgtcaagctgtcccaaatgaacgttttgagtcacactaggtgaacagttcctcaagttatatttgagactttttatttggttaaagcttgtcaaatttcctgattgatgatgggttttcattgcttgcaaattacatatcaaatttaagacttggaaccattttgtt

SEQ ID NO: 11971 - protein, 356 aa, Glycine max
MKKGNLGLGLKLSVPVSDQSNFARFLTESGTFKDGDLLVNRDGVRIVSQNDVEAPPPIKPTDNQLTLADIDVIKVVGKGNGGVVQLVQHKWTSQFFALKVIQMNIEESMRKQIAQELKINQQAQCPYVVVCYQSFYENGVISIILEYMDGGSLADLLKKVKTIPEDYLAAICKQVLKGLVYLHHEKHIIHRDLKPSNLLINHIGEVKITDFGVSAIMESTSGQANTFIGTYNYMSPERINGSQRGYNYKSDIWSLGLILLECALGRFPYAPPDQSETWESIFELIETIVDKPPPIPPSEQFSTEFCSFISACLQKDPKDRLSAQELMAHPFVNMYDDLEVDLSAYFSNAGSPLATL

SEQ ID NO: 11972 - protein, 254 aa, Glycine max
MNIEESMRKQIAQELKINQQAQCPYVVVCYQSFYENGVISIILEYMDGGSLADLLKKVKTIPEDYLAAICKQVLKGLVYLHHEKHIIHRDLKPSNLLINHIGEVKITDFGVSAIMESTSGQANTFIGTYNYMSPERINGSQRGYNYKSDIWSLGLILLECALGRFPYAPPDQSETWESIFELIETIVDKPPPIPPSEQFSTEFCSFISACLQKDPKDRLSAQELMAHPFVNMYDDLEVDLSAYFSNAGSPLATL

SEQ ID NO: 11973 - protein, 248 aa, Glycine max
MRKQIAQELKINQQAQCPYVVVCYQSFYENGVISIILEYMDGGSLADLLKKVKTIPEDYLAAICKQVLKGLVYLHHEKHIIHRDLKPSNLLINHIGEVKITDFGVSAIMESTSGQANTFIGTYNYMSPERINGSQRGYNYKSDIWSLGLILLECALGRFPYAPPDQSETWESIFELIETIVDKPPPIPPSEQFSTEFCSFISACLQKDPKDRLSAQELMAHPFVNMYDDLEVDLSAYFSNAGSPLATL

SEQ ID NO: 11974 - DNA, 1255 bp, Glycine max
  misc_feature (1002)..(1002): n is a, c, g, or t
tacttgttttgtttgatattgttttaaaacttggttcctttgtgggaatgtttcatcagttttgcatggcttgagttgattagtcacaggagcttcatgccaaaaatgttgactggtaatggtcaaaaaggttggccttatatccaaaggttgcttgtagatctgttccaatttatggagccttttctgaggcatgctgaacttggagaaccggttcgtgtcctctataaaggcacacttagggtgctcttagtgctacttcatgacttcccggagtttctctgtgattatcactttaccttttgtgatgttattcctccaagttgcatacagatgaggaatatcattctaagtgcatttccacgtagtatgaggctgccagatccatctactcctaatctgaagattgatttgcttcaagaaataacccaatcgcctcgcattctttcggaggttgatgcagcactcaaagcaaagcagatgaaggttgatgtagatgaataccttaagacaaggcaacagagttcgccgtttttatctgaactgaaggataagctgcttctctcacccaatgaagcagcttctgctgggactcgatataatgtgccgttaattaactcacttgtgctatatgttggaatgcaggcaatccatcagcttcagggacgaactccccatactcaaacatcagcaaatgctttccccttagccgtattttctgttggtgctgcattggatattttccagaccctaattgtggacttggatactgaagggcgctaccttttcctaaatgctattgccaaccaactgcgttatcctaatactaatacacactacttttccttcatccttctgtacttgtttgctgaatcaaaccaggaagttatccaagaacaaattactagagtcttgttagaacgcctaattgttaaccgtcctcatccctggggtctcctcattacttttattgagctgatcaagaatcctaggtacaatttntggaaccggagtttcataagatgtgcaccggagattgaaaaactttttgaatcagtgtcaagatcttgtggaggtccaaaaccagtggatgatagcatggtttcgggttgggtctgatttcccgtagtcttttgtggttgttagtcctgtgtaggttagccaaccatgttagttaggactatttatactgttgttaatctagcagtgttgtttttacattgtaaattatgttttagtgaaactctcttctttc

SEQ ID NO: 11975 - protein, 340 aa, Glycine max
  misc_feature (302)..(302): Xaa can be any naturally occurring amino acid
MPKMLTGNGQKGWPYIQRLLVDLFQFMEPFLRHAELGEPVRVLYKGTLRVLLVLLHDFPEFLCDYHFTFCDVIPPSCIQMRNIILSAFPRSMRLPDPSTPNLKIDLLQEITQSPRILSEVDAALKAKQMKVDVDEYLKTRQQSSPFLSELKDKLLLSPNEAASAGTRYNVPLINSLVLYVGMQAIHQLQGRTPHTQTSANAFPLAVFSVGAALDIFQTLIVDLDTEGRYLFLNAIANQLRYPNTNTHYFSFILLYLFAESNQEVIQEQITRVLLERLIVNRPHPWGLLITFIELIKNPRYNXWNRSFIRCAPEIEKLFESVSRSCGGPKPVDDSMVSGWV

SEQ ID NO: 11976 - protein, 337 aa, Glycine max
  misc_feature (299)..(299): Xaa can be any naturally occurring amino acid
MLTGNGQKGWPYIQRLLVDLFQFMEPFLRHAELGEPVRVLYKGTLRVLLVLLHDFPEFLCDYHFTFCDVIPPSCIQMRNIILSAFPRSMRLPDPSTPNLKIDLLQEITQSPRILSEVDAALKAKQMKVDVDEYLKTRQQSSPFLSELKDKLLLSPNEAASAGTRYNVPLINSLVLYVGMQAIHQLQGRTPHTQTSANAFPLAVFSVGAALDIFQTLIVDLDTEGRYLFLNAIANQLRYPNTNTHYFSFILLYLFAESNQEVIQEQITRVLLERLIVNRPHPWGLLITFIELIKNPRYNXWNRSFIRCAPEIEKLFESVSRSCGGPKPVDDSMVSGWV

SEQ ID NO: 11977 - protein, 314 aa, Glycine max
  misc_feature (276)..(276): Xaa can be any naturally occurring amino acid
MEPFLRHAELGEPVRVLYKGTLRVLLVLLHDFPEFLCDYHFTFCDVIPPSCIQMRNIILSAFPRSMRLPDPSTPNLKIDLLQEITQSPRILSEVDAALKAKQMKVDVDEYLKTRQQSSPFLSELKDKLLLSPNEAASAGTRYNVPLINSLVLYVGMQAIHQLQGRTPHTQTSANAFPLAVFSVGAALDIFQTLIVDLDTEGRYLFLNAIANQLRYPNTNTHYFSFILLYLFAESNQEVIQEQITRVLLERLIVNRPHPWGLLITFIELIKNPRYNXWNRSFIRCAPEIEKLFESVSRSCGGPKPVDDSMVSGWV

SEQ ID NO: 11978 - DNA, 393 bp, Glycine max
ctgggtggagcggtatgacaagcttcttgttggttctgttctgtgtttagtaggagtcttgaccctactttttcatgatcatgatcatgaagtagtttcgattggacatcactcacattcacataggaagattatttccttgtgagatatataaatgtttttggaattacatgcttatgagcattgtcacggtattgtttttattttgtatcagaagggaaaaagaaaaaagaaaaacagatgttgctgcttaggagaactgatcatcttggtctagtaaaagtcgttgtatactgagttttcaatgtgaaattaatgtgtttttagtataaaaaaatactttgattaaaaatgaatcaccaataaataattctatttcttgaccttttcttt

SEQ ID NO: 11979 - protein, 47 aa, Glycine max
WVERYDKLLVGSVLCLVGVLTLLFHDHDHEVVSIGHHSHSHRKIISL

SEQ ID NO: 11980 - protein, 40 aa, Glycine max
MFLELHAYEHCHGIVFILYQKGKRKKKNRCCCLGELIILV

SEQ ID NO: 11981 - DNA, 820 bp, Glycine max
atgtgattcattgcacattggaaagtgtgtttttctttttttcatttgcattgcaaagcaaaaaccttgcaaattgcaatggcttccaacaaggttattgccaccatcttggttctttctctccttgcctactcaacatcattcaccaatgcatgtggcacatgccacccaaaacctactccttctccccctcctccatcagggaagtgccccaaggacacattgaagctaggggtgtgtgctgatgttctaggacttgttaatgttgttgttggttcccctgtctctagcaagtgttgtgcattgcttgaaggtttggctgattcggaggctgcactttgcctttgcactgctattaaggccaatgttcttggaatcaacttgaatgtgcctatcacactcagtgtgctactcagtgcttgccaaaaaactgttcctgctggcttccaatgtgcatagaactccatcacatgctaggttcattccatcacctgtgtcctcaaattgttgttttgttttagttcttctttgtgctatgacacgtttcattttaataataagctaggtaaacacgtgtttgccttagttagtaaccttttctcttttctagtaaatttggggaactttgattattgtaatttttacttttggggtatattggaggtggaaaatgttaagtagagaaagagagtgacttccttaggggatgattaaacctctgatggcattgttaaaccgtaaagaccaatgttagtcgacaaaattgtatgcaaattgtaatgtacgttacaatcaagtgtgtgtattatcaatttatgtt

SEQ ID NO: 11982 - protein, 126 aa, Glycine max
MASNKVIATILVLSLLAYSTSFTNACGTCHPKPTPSPPPPSGKCPKDTLKLGVCADVLGLVNVVVGSPVSSKCCALLEGLADSEAALCLCTAIKANVLGINLNVPITLSVLLSACQKTVPAGFQCA

SEQ ID NO: 11983 - protein, 80 aa, Glycine max
VIHCTLESVFFFFSFALQSKNLANCNGFQQGYCHHLGSFSPCLLNIIHQCMWHMPPKTYSFSPSSIREVPQGHIEARGVC

SEQ ID NO: 11984 - protein, 74 aa, Glycine max
CDSLHIGKCVFLFFICIAKQKPCKLQWLPTRLLPPSWFFLSLPTQHHSPMHVAHATQNLLLLPLLHQGSAPRTH

SEQ ID NO: 11985 - DNA, 549 bp, Glycine max
  misc_feature (96)..(96): n is a, c, g, or t
ccatatgttttttatgttttcttgtcagatgcattatgatgtgttttaatgcatttgataaaaatgcggaccttgatgtcttggatcatcctattntaaacttcatatattacctggtggtggaaatattgccttcttctttggtccttttcattttgaggaagcttccacctaagcgtggtatcacacaatatcacccaattcgctgaaaaggggatttctcaatcgttctctattttcttgaatgattatcattctccatgggtaattttctagagtagacacaagtcagtcttctatgttcggtggcaaagcttgtatgctttgtctcttggacagtatggtaagttttgtgacccagcatttctgacacgatgataattggtaaaaggggatatagtgatatcttgtataaatagtgttttgaactgctacgagtgcaaaaaatgtattgtccctaatttctcactcgtattaacttactacattaatttctgctctatatccctaatttcaatcgtttagtggagctttagtttttgtttttgc

SEQ ID NO: 11986 - protein, 68 aa, Glycine max
  misc_feature (32)..(32): Xaa can be any naturally occurring amino acid
ICFLCFLVRCIMMCFNAFDKNADLDVLDHPIXNFIYYLVVEILPSSLVLFILRKLPPKRGITQYHPIR

SEQ ID NO: 11987 - protein, 57 aa, Glycine max
  misc_feature (21)..(21): Xaa can be any naturally occurring amino acid
MMCFNAFDKNADLDVLDHPIXNFIYYLVVEILPSSLVLFILRKLPPKRGITQYHPIR

SEQ ID NO: 11988 - protein, 56 aa, Glycine max
  misc_feature (20)..(20): Xaa can be any naturally occurring amino acid
MCFNAFDKNADLDVLDHPIXNFIYYLVVEILPSSLVLFILRKLPPKRGITQYHPIR

SEQ ID NO: 11989 - DNA, 816 bp, Glycine max
  misc_feature (606)..(606): n is a, c, g, or t
actccacatcatccatagcgccaagccaaagaaaaaataatactaatactaacaataacaacccacgaagcttaggccttgcaaagtaagttcatttgactctcacaaaccttgcatccatccacacatggctggcatgaactctagcgtattggcctgtagctatgccatatctggtgcagcatgctccgagctcaatgggaaggttacttccgtggcctctgttgcatcctctggctacaagttgccattgatcaaatgtgaggccagagttcccaaagccaaagaatctgaaggaaggagaggtgcccttgttctcttggcagctacccttttcatctctgcagcctccaattcttctgccaatgctgggatcattgatgattaccttgagaggagcaaggctaacaaggaattgaatgacaagaagaggttagctactactggagcaaactttgcaagagcatacaccgtggaattcggtagttgcaagttccctgagaacttcactggttgccaagatcttgccaaacaaaagaaagtgccattccttagtgacgatttggagcttgaatgcgaaggaaaggacaaatacaagtgcggttntaatgttttctggaaatggtgaaaggaggcaaccttttatgcccaactgcgaattattcgctttgcgatgtacctaactgcttgaatatataccatatttttctgcattgctttcagttattatattgttggtgttggattttagttgttgaagaaaatgtgtgaattaggcggctatttactcttgattcgttgaaattacattttgcg

SEQ ID NO: 11990 - protein, 166 aa, Glycine max
  misc_feature (160)..(160): Xaa can be any naturally occurring amino acid
MAGMNSSVLACSYAISGAACSELNGKVTSVASVASSGYKLPLIKCEARVPKAKESEGRRGALVLLAATLFISAASNSSANAGIIDDYLERSKANKELNDKKRLATTGANFARAYTVEFGSCKFPENFTGCQDLAKQKKVPFLSDDLELECEGKDKYKCGXNVFWKW

SEQ ID NO: 11991 - protein, 163 aa, Glycine max
  misc_feature (157)..(157): Xaa can be any naturally occurring amino acid
MNSSVLACSYAISGAACSELNGKVTSVASVASSGYKLPLIKCEARVPKAKESEGRRGALVLLAATLFISAASNSSANAGIIDDYLERSKANKELNDKKRLATTGANFARAYTVEFGSCKFPENFTGCQDLAKQKKVPFLSDDLELECEGKDKYKCGXNVFWKW

SEQ ID NO: 11992 - DNA, 841 bp, Glycine max
  misc_feature (583)..(583): n is a, c, g, or t
  misc_feature (588)..(588): n is a, c, g, or t
  misc_feature (642)..(642): n is a, c, g, or t
gttaaaagtttctttatttcaagtgaagttagttagttatatttatatacacaatcatgtcaatgagatcaattggtacaagccttagccttatggtatggcttgtaattgcaacatcagcattagcaaaatctgataaccccccagtcctagacacacaaggcaaccctcttgagcctggcaaagattactacatcaaacctgccataaccgacgttggaggccgcgtcactttgttaagcagaaacaatccatgccctctatatgtaggtcaagagaattctgatgcagcagagggcttaccccttttcttcaccccttttgcagaagaagatgatgttgtgaaggtgaatagggacttcaaggtgacattctcagctgcctcaatatgtgtgcagggcacaaattggaatttggctgagaaggatagtgagagtggaaggaggctcattgctgcatcaggcagggatgattactttagaattactgagacaccaatcaaaggttcatattatataggttggtgtcctacagatgtatgcccccttttgtaggtttgactgtggcattgttggtggtttgngtganaatgggaagattttgttggccttggatggtaatgtgctcccagttgtgtttganaaagcatactaatatgtgtagcttcaattttgtgtttgaaatttctgttcttgtaatattgtaacagttgtgaaatgattggagctacttggtaggaccaaagaaagatagcatgtctattttctttttcttaatttatagaataaagctcgaaattgttgtgtgtaatttataggataaagttatatatgttgtcttt

SEQ ID NO: 11993 - protein, 165 aa, Glycine max
MSMRSIGTSLSLMVWLVIATSALAKSDNPPVLDTQGNPLEPGKDYYIKPAITDVGGRVTLLSRNNPCPLYVGQENSDAAEGLPLFFTPFAEEDDVVKVNRDFKVTFSAASICVQGTNWNLAEKDSESGRRLIAASGRDDYFRITETPIKGSYYIGWCPTDVCPLL

SEQ ID NO: 11994 - protein, 163 aa, Glycine max
MRSIGTSLSLMVWLVIATSALAKSDNPPVLDTQGNPLEPGKDYYIKPAITDVGGRVTLLSRNNPCPLYVGQENSDAAEGLPLFFTPFAEEDDVVKVNRDFKVTFSAASICVQGTNWNLAEKDSESGRRLIAASGRDDYFRITETPIKGSYYIGWCPTDVCPLL

SEQ ID NO: 11995 - protein, 153 aa, Glycine max
MVWLVIATSALAKSDNPPVLDTQGNPLEPGKDYYIKPAITDVGGRVTLLSRNNPCPLYVGQENSDAAEGLPLFFTPFAEEDDVVKVNRDFKVTFSAASICVQGTNWNLAEKDSESGRRLIAASGRDDYFRITETPIKGSYYIGWCPTDVCPLL

SEQ ID NO: 11996 - DNA, 1622 bp, Glycine max
attctaattaaattagtagtattgatttcaagtatcagataaataattagattaaatactttaaaatagacctttaattatcttttataaataatcatattcaatttaaataagattattttgattaaaatatactataacttagaccaaaagaatccttaaatttgggataatgtttttttctctatatttcattttcttcttcccctaccaaccttaacaaaggataaagaaaagaaatcactgttagacaacagatacttttttctctctcttagaatggatttttcgcaaaccaatttaaaggcgagtgagttaatagttttgaacaaatccgctgcccgtgttttaccccacaaaaaacacgtgcttcaaacaaaaaatagtatattatcatgactattattagacatctgaattttaaaattaaataataataataataataataataataattagggagataaaaaccacatggtctcacacctcctttctcagactacagcagattcaaggaacatgcttagaaaactgccaagcccacccatattctctcaaaactttcaaccatgaactgaacaacaacaacaacaacaacagggccacccgtacagacccacctccaaagagatcatttttattaccaattttccgatttcacagagaaaattctttgtgggcatctcttcaaaaatgtcaagcttccccaacacggtggcggaaggccgcaggtccggcaaggcaccggaaaaatccaccttttctcagacttgcagcctcttgagccagttcttgaaggagaaacgtgcttctgctgattccacccttggaattggtggaaaaatggaacctaaagcgaataccaaggctttgttaggaagcttgcaaaactctgatggggccttaaagctaagcgcttctgccatggaatttcttccccagcttgtggaaaacccctgcattaagaagtctaggtcaccgggacctgaatctccccaattgacaatattctatgccggaaaaatgttggtatttgatgcctttccgccggagaaggcgacagaggtcatggagatggccaccaagttggcctcgaacaactccggcactgaagaaagtccccctagccttccggttaccactgaaaaattggctgtgtccaagatgcctcaaacaaacacatcctcagaaacccctaagcccggaaaccaaggggttggttcagatatgaggtacccaaggagagcttcacttctaaaatttcttgagaaaagaaaagaaagggtcaatgctagagggccataccaaatgaacaatctcaagccagaaggaagcagttcaggtggtgaacctgaagatcagtgttccaaacagtttgaccttaacttttagtggtttagttcattgtgaatttaggatatacatgctctggtcaaccaaaaagcacctaacttatatgattgttggcctttcgaagattactgtggccttcatacgtatttcataagatatatatatatttgtatgtattattatttcatcaattaggtcctcctcttcggaccaaaccagagataaatttagctttattaccgagatcgattaaattcagagaattt

SEQ ID NO: 11997 - protein, 232 aa, Glycine max
MSSFPNTVAEGRRSGKAPEKSTFSQTCSLLSQFLKEKRASADSTLGIGGKMEPKANTKALLGSLQNSDGALKLSASAMEFLPQLVENPCIKKSRSPGPESPQLTIFYAGKMLVFDAFPPEKATEVMEMATKLASNNSGTEESPPSLPVTTEKLAVSKMPQTNTSSETPKPGNQGVGSDMRYPRRASLLKFLEKRKERVNARGPYQMNNLKPEGSSSGGEPEDQCSKQFDLNF

SEQ ID NO: 11998 - protein, 182 aa, Glycine max
MEPKANTKALLGSLQNSDGALKLSASAMEFLPQLVENPCIKKSRSPGPESPQLTIFYAGKMLVFDAFPPEKATEVMEMATKLASNNSGTEESPPSLPVTTEKLAVSKMPQTNTSSETPKPGNQGVGSDMRYPRRASLLKFLEKRKERVNARGPYQMNNLKPEGSSSGGEPEDQCSKQFDLNF

SEQ ID NO: 11999 - protein, 155 aa, Glycine max
MEFLPQLVENPCIKKSRSPGPESPQLTIFYAGKMLVFDAFPPEKATEVMEMATKLASNNSGTEESPPSLPVTTEKLAVSKMPQTNTSSETPKPGNQGVGSDMRYPRRASLLKFLEKRKERVNARGPYQMNNLKPEGSSSGGEPEDQCSKQFDLNF

SEQ ID NO: 12000 - DNA, 1276 bp, Glycine max
gaataaaaaagaccgggaaaggagggaagaaaagcaaactcgtcactttaagacaaaaaataacttccttaataactaagaaggacaatctcatttcatttgttagttttcacatcctccaacataagtttctgagtttgaaacacagcataaacaaagcaaaatatgaatgccactctccctttttaaatggaaacaaagctgaagacaccacacgagcaatcgatagataacaaactaaagatagagtgagagtgagagacatgtataggttcagcaacacagtaatcgggttcttgaacttgttcacacttttagcatccataccaataattggagcaggtctatggatggcaaggagcagcacaacctgtgagaattttctccaaacccctcttttggttataggattcgttgtgctagtggtgtcactagcaggcttcattggtgcatgttttcatgtggcatgtgcactatggttgtacttggtggtcatgttgttcctcatagcagcactcatgggcttcacaatatttggttttggtgtgactagcaagggcggtggtgtggaagtgcctggaagggtttacaaggagtatcgtcttcaagattactcaccatggttgaggaagagaattcaggatcctcgctattggaacactattagaggctgtattttggggtctaaaacttgtgaaaagcttgcctcttggacccctcttgattatatgcaaagggatatgtctccaatacagtctggatgttgtaagccaccaactgcttgcacttacaacgtggcaacaacaatgatgactcaagaccctgattgctacaggtggaacaatgcccctaatttgctatgctatgagtgtgattcttgcaaagctggtgtgcttgaagacataagagggaattggcacaagctctcggttctcacagtcaccatgcttgtgcttctcatagggatttattccattgggtgctgtgctttcagaaacacaagaagagctgaaacggattatccctatggtgaaaaccgcatgaccaaagtccgacctagatgggattaccattggtggaggtggttacatgacaggagagaacagctttattagctgagaagctctaactacaatccatggtatagactagagaaggcatcaaggcctttccattccctgaatggctgcttttttgtataaagcataatttcgctttatctcaaatatcgtaacacgccgttactttttctcattactagttgattttgaatttt

SEQ ID NO: 12001 - protein, 283 aa, Glycine max
MYRFSNTVIGFLNLFTLLASIPIIGAGLWMARSSTTCENFLQTPLLVIGFVVLVVSLAGFIGACFHVACALWLYLVVMLFLIAALMGFTIFGFGVTSKGGGVEVPGRVYKEYRLQDYSPWLRKRIQDPRYWNTIRGCILGSKTCEKLASWTPLDYMQRDMSPIQSGCCKPPTACTYNVATTMMTQDPDCYRWNNAPNLLCYECDSCKAGVLEDIRGNWHKLSVLTVTMLVLLIGIYSIGCCAFRNTRRAETDYPYGENRMTKVRPRWDYHWWRWLHDRREQLY

SEQ ID NO: 12002 - protein, 254 aa, Glycine max
MARSSTTCENFLQTPLLVIGFVVLVVSLAGFIGACFHVACALWLYLVVMLFLIAALMGFTIFGFGVTSKGGGVEVPGRVYKEYRLQDYSPWLRKRIQDPRYWNTIRGCILGSKTCEKLASWTPLDYMQRDMSPIQSGCCKPPTACTYNVATTMMTQDPDCYRWNNAPNLLCYECDSCKAGVLEDIRGNWHKLSVLTVTMLVLLIGIYSIGCCAFRNTRRAETDYPYGENRMTKVRPRWDYHWWRWLHDRREQLY

SEQ ID NO: 12003 - protein, 206 aa, Glycine max
MLFLIAALMGFTIFGFGVTSKGGGVEVPGRVYKEYRLQDYSPWLRKRIQDPRYWNTIRGCILGSKTCEKLASWTPLDYMQRDMSPIQSGCCKPPTACTYNVATTMMTQDPDCYRWNNAPNLLCYECDSCKAGVLEDIRGNWHKLSVLTVTMLVLLIGIYSIGCCAFRNTRRAETDYPYGENRMTKVRPRWDYHWWRWLHDRREQLY

SEQ ID NO: 12004 - DNA, 575 bp, Glycine max
agaagcaagctttagccaggcagttaaatctccggcctcgacaagttgaagtgtggttccagaatcggagagccagaacaaagctgaagcaaacggaggtggactgtgagttcttaaagaaatgctgtgaaacattgacggacgaaaacaggaggctaaagaaggagctgcaagagctgaaggcactgaaactagctcaacccttgtacatgcctatgcctgctgccacactcaccatgtgcccttcttgcgagaggctcggtggcgttagcgataacggttcgaataaaagccccttctccatggctcccaagcctcacttctataaccccttcgccaatccttctgcagcatgttgattattgtggttaggttttcactcttctataaaaaagacaagagttatttcccacaaccattgtatttttttggttgagggcgatgcgtctagccagggaaaattaagctgtaattagctaatactgttgagagtagtaactgctgattgaaattacctttttctttttcttcatctattgtatgtttatataaaccgttatagaaggtgttcatct

SEQ ID NO: 12005 - protein, 118 aa, Glycine max
KQALARQLNLRPRQVEVWFQNRRARTKLKQTEVDCEFLKKCCETLTDENRRLKKELQELKALKLAQPLYMPMPAATLTMCPSCERLGGVSDNGSNKSPFSMAPKPHFYNPFANPSAAC

SEQ ID NO: 12006 - DNA, 1021 bp, Glycine max
  misc_feature (682)..(682): n is a, c, g, or t
  misc_feature (691)..(691): n is a, c, g, or t
  misc_feature (729)..(729): n is a, c, g, or t
  misc_feature (761)..(761): n is a, c, g, or t
  misc_feature (804)..(804): n is a, c, g, or t
tctctctctcattgctcctctgattcattcacccaatttttttctgtcctcttttcctctcagaggagcctctgagtctgctcaggtgttccttgtgaagagatccttttgttttttaggtgtgaagggaaagagaaaaaaaaagatgaatcagtgtggttatcagcagaagaatgctttgacaagctgtgaggagatgaggatggaatcagtggtgtgccctaaaccacgaagattgggcctgttgaaccactcaacctttgatgaccacatcagacccttgaggccaccctttatcaactaccaatcagaaattgaagattcaggagttggggctgagcttctggacatcattctccccaagagatctggagggcaagtggcttcatcacccccatttttctgtggatctccacctagcagggcttcaaaccctgtgatccaagatgagcaatttggtagtaatggtaatgagaattttggtgcattttccttggcacccccttcaccatcttcctcagcaagaggctgtgttaggatgaagtttggtcacaccccagctgcagtgaggattgaaggttttaattgccttagcagggataggcgcaactgcagcatttctgctgttgcttaattcaattttaaaccatgaaaaagaaaagaaaaggggattaaagaatcnccaaagttntaagagcagaggagatttttgggactgaggagctaatnttaatttcaatcttattgtattatatgtatanaccgttgttcacgagttaatttaaggtgtcatgtataattganagaaggtgggaattttctttcttcttagttttatcctttttgaagaagaataaaaaaaagggacacaccaaggagaaagaaaaaggcaagcaaaaagtcttgttcttctctcttgttaggtttatatgatggggtattttagattgaaactttcatgtgagtttcatcgagagtctgtaactttcatgtaatttggaactcggctcctccttttgtg

SEQ ID NO: 12007 - protein, 210 aa, Glycine max
LSLIAPLIHSPNFFLSSFPLRGASESAQVFLVKRSFCFLGVKGKRKKKMNQCGYQQKNALTSCEEMRMESVVCPKPRRLGLLNHSTFDDHIRPLRPPFINYQSEIEDSGVGAELLDIILPKRSGGQVASSPPFFCGSPPSRASNPVIQDEQFGSNGNENFGAFSLAPPSPSSSARGCVRMKFGHTPAAVRIEGFNCLSRDRRNCSISAVA

SEQ ID NO: 12008 - protein, 162 aa, Glycine max
MNQCGYQQKNALTSCEEMRMESVVCPKPRRLGLLNHSTFDDHIRPLRPPFINYQSEIEDSGVGAELLDIILPKRSGGQVASSPPFFCGSPPSRASNPVIQDEQFGSNGNENFGAFSLAPPSPSSSARGCVRMKFGHTPAAVRIEGFNCLSRDRRNCSISAVA

SEQ ID NO: 12009 - protein, 145 aa, Glycine max
MRMESVVCPKPRRLGLLNHSTFDDHIRPLRPPFINYQSEIEDSGVGAELLDIILPKRSGGQVASSPPFFCGSPPSRASNPVIQDEQFGSNGNENFGAFSLAPPSPSSSARGCVRMKFGHTPAAVRIEGFNCLSRDRRNCSISAVA

SEQ ID NO: 12010 - DNA, 1130 bp, Glycine max
  misc_feature (827)..(827): n is a, c, g, or t
  misc_feature (889)..(889): n is a, c, g, or t
gaatcgattactatactagtaataaattgtacaaaaaataaaaatataaataatataaatataaaaagaacaaacacaaattttatgtgattagtcgcggtatttaaaataaaaaatgaaagtagacaaataaaaaaggaaaggagatgtttgaataaaaataattccccttcaagttcttattttttgagaggacaggacaatatgaatgttttattatgctctatcaacacattaaaaagattatatgatatatctgctgtggaagtaggtcaacatttctattggcaaatagggagtttccaagtacatgcccaagtacttattacttcttgggttgtaattgctctcttattggtttcagccattctaattattcgaaatctgcaaaccattcccgctttcggtcagaatttctttgaatatgttcttgaattcattcgagacgtgagcaaaactcaaattggagaagaatatggtccgtgggttccttttattggaactttgtttctatttatttttgtttctaattggtcgggggctcttttaccttggaaaatcatacaattacctcacggggagttagctgcacccacaaatgatataaatactaccgttgctttagctttacttacatcaattgcatatttctatgcgggtctttcaaaaaaaggattagcttattttaataaatacatccaaccaaccccaatccttttaccgattaacatcttagaagatttcacaaaacccttatctcttagttttcgacttttcggaaatatattagctgatgaattagtagttgttgttcttgtttctttagnacctttagtagttcctatacctgtcatgttccttggattattcacaagcggtattcaagctntcatttttgctactttagctgcggcttatataggtgaatccatggaaggccatcattgaccagtttttatacaaaatagtccttttcgtttagcttgccgcacatatattgcggctcaatataatctacttagtaaacatctatatctatctacctatatctatatagatataggtagatagatatagatagatattcgattagcatatattagcatatattagtatatattggatattcg

SEQ ID NO: 12011 - protein, 247 aa, Glycine max
  misc_feature (208)..(208): Xaa can be any naturally occurring amino acid
  misc_feature (229)..(229): Xaa can be any naturally occurring amino acid
MNVLLCSINTLKRLYDISAVEVGQHFYWQIGSFQVHAQVLITSWVVIALLLVSAILIIRNLQTIPAFGQNFFEYVLEFIRDVSKTQIGEEYGPWVPFIGTLFLFIFVSNWSGALLPWKIIQLPHGELAAPTNDINTTVALALLTSIAYFYAGLSKKGLAYFNKYIQPTPILLPINILEDFTKPLSLSFRLFGNILADELVVVVLVSLXPLVVPIPVMFLGLFTSGIQAXIFATLAAAYIGESMEGHH

SEQ ID NO: 12012 - DNA, 1627 bp, Glycine max
  misc_feature (1144)..(1144): n is a, c, g, or t
  misc_feature (1235)..(1235): n is a, c, g, or t
  misc_feature (1259)..(1259): n is a, c, g, or t
  misc_feature (1262)..(1262): n is a, c, g, or t
  misc_feature (1416)..(1416): n is a, c, g, or t
  misc_feature (1418)..(1418): n is a, c, g, or t
  misc_feature (1422)..(1422): n is a, c, g, or t
  misc_feature (1551)..(1551): n is a, c, g, or t
aaagctattgcaggaagatagcaagttgcagaggcttcataaggaacttgtggctagtggtaagcttacagaatcagaattttgggctacaaagaagaaaatgctggatcaagatgaaagcagaaagttaaaacaacagattggttttaaaaattctttgatctttgacacaaagcctatgagtgatggacggataaaccaggttaaatttcagttgacgccagagataaaatatcagatttttgccctcaaacctgccgtccaccaggcattcctgaattttgtacctaggaaaatgaatgaggtagatttctggaataaatacttcaaagctgagtatctccatagcaccaaaaatgctgttgcagcagctgctgaggctgctgaagatgaggatcttgctgtttttctgaaagatgatgagatattggaaattgaagctcgaaagaaggttcgacgggttgatccaactttagacatggaagcagaccaaggagatgattacacacatcttcctgtatggatcatgggattttccgagacggtagcaaggatatatctgaagcccaaaattctttgtataagagaacattgttgcaagatcttaatagacaaggggcagttgttcttgaaggaaaaactttagatatggagatggaacacccaagaacagtagcagaaattcttgcccggagaaaacaggaatgtgatggggttgtagatgaggagcgacgaaacagaatttctaaaatgaccccgattgaggatcttcaggcacaagataatcatccatatgcaccactctgtatcaaggatcctcgtgactattttgattcccaacaagctaatgctgtaaaaacattggatgattcccaagctggaatggagcaaatgaaatgcagtttgggttctgaggaagcctatgactctttgagggcatcaatatctaaaatcaaaactactggattaagggatcctctctttagtccagatgttgctcttaaggtccttaacggattgactaaaaatatcacaagcaccaaatatcatcttgggaaaagttctcaagagagtgtccttgatattttacccaattcaactaaggagaaactactagatcattgggtgtgcagtcaggaattgntgaggcacttttggtcttcatatccagtttcaacacaaaaccttgtcagtaagacaagaagactgaaagattccatatcacaaatatattntaaacttgaggacataaaggtatntgntgagtcagacctgcggcaccatgtttcccttgttgtccatcctatgcagcaggctttgaatgctgccttgttacactatgaggctgacatcaggaaaagaaatgcaagaggacagaagcctaacggttatgtttagttggagaatgtttcgctntntgcnctgcgagcatcatactataacaatttaggaatgtatattccatcaattttgccgtgaacacaaacccgaatggccatttatatcgtgatgaaaaaaatgaatttccatgagaattagtcagcaacagtnttaattgatagttaacatgtaacgtagaattacttgttaacactgtcccaaggcaaaggacacaagtttccagctc

SEQ ID NO: 12013 - protein, 292 aa, Glycine max
  misc_feature (209)..(209): Xaa can be any naturally occurring amino acid
  misc_feature (239)..(239): Xaa can be any naturally occurring amino acid
  misc_feature (247)..(248): Xaa can be any naturally occurring amino acid
MDHGIFRDGSKDISEAQNSLYKRTLLQDLNRQGAVVLEGKTLDMEMEHPRTVAEILARRKQECDGVVDEERRNRISKMTPIEDLQAQDNHPYAPLCIKDPRDYFDSQQANAVKTLDDSQAGMEQMKCSLGSEEAYDSLRASISKIKTTGLRDPLFSPDVALKVLNGLTKNITSTKYHLGKSSQESVLDILPNSTKEKLLDHWVCSQELXRHFWSSYPVSTQNLVSKTRRLKDSISQIYXKLEDIKVXXESDLRHHVSLVVHPMQQALNAALLHYEADIRKRNARGQKPNGYV

SEQ ID NO: 12014 - protein, 249 aa, Glycine max
  misc_feature (166)..(166): Xaa can be any naturally occurring amino acid
  misc_feature (196)..(196): Xaa can be any naturally occurring amino acid
  misc_feature (204)..(205): Xaa can be any naturally occurring amino acid
MEMEHPRTVAEILARRKQECDGVVDEERRNRISKMTPIEDLQAQDNHPYAPLCIKDPRDYFDSQQANAVKTLDDSQAGMEQMKCSLGSEEAYDSLRASISKIKTTGLRDPLFSPDVALKVLNGLTKNITSTKYHLGKSSQESVLDILPNSTKEKLLDHWVCSQELXRHFWSSYPVSTQNLVSKTRRLKDSISQIYXKLEDIKVXXESDLRHHVSLVVHPMQQALNAALLHYEADIRKRNARGQKPNGYV

SEQ ID NO: 12015 - protein, 247 aa, Glycine max
  misc_feature (164)..(164): Xaa can be any naturally occurring amino acid
  misc_feature (194)..(194): Xaa can be any naturally occurring amino acid
  misc_feature (202)..(203): Xaa can be any naturally occurring amino acid
MEHPRTVAEILARRKQECDGVVDEERRNRISKMTPIEDLQAQDNHPYAPLCIKDPRDYFDSQQANAVKTLDDSQAGMEQMKCSLGSEEAYDSLRASISKIKTTGLRDPLFSPDVALKVLNGLTKNITSTKYHLGKSSQESVLDILPNSTKEKLLDHWVCSQELXRHFWSSYPVSTQNLVSKTRRLKDSISQIYXKLEDIKVXXESDLRHHVSLVVHPMQQALNAALLHYEADIRKRNARGQKPNGYV

SEQ ID NO: 12016 - DNA, 585 bp, Glycine max
accttcaaaagcagtcaaccaacgtgatgcagatctcatccatttctgggataagttccgcaaagctcctgtgggttcttctaggaaagctgcagctgagaaagaaattctggaagcaatgtctcacagaatgcatatagatgacaacatgaaacttattggaaagctcttatttggcattgaaaagggtccagaactgcttagcagtgttagacctgctgggcaaccacttgttgatgactgggactgccttaaaacactggttaggacttttgagacacatttagtcgttgtaacattattctttacgagcgttatgtactgtacctggacatgatttcttataccaaccctgttaataagcatgggacgctggggaaacctatttacattgtaatttcgtgcaaaatagatgctgtaacaaaggcattttacttttacttggggagaggcagtggaaccataaggaccttggaaattctgattaatatgacagggcacaatatcgtgtttgtaagccaacgctttatttttattttatggtaacccctttctgtggataattcttaataaaatgtatttggt

SEQ ID NO: 12017 - protein, 111 aa, Glycine max
PSKAVNQRDADLIHFWDKFRKAPVGSSRKAAAEKEILEAMSHRMHIDDNMKLIGKLLFGIEKGPELLSSVRPAGQPLVDDWDCLKTLVRTFETHLVVVTLFFTSVMYCTWT

SEQ ID NO: 12018 - protein, 72 aa, Glycine max
MSHRMHIDDNMKLIGKLLFGIEKGPELLSSVRPAGQPLVDDWDCLKTLVRTFETHLVVVTLFFTSVMYCTWT

SEQ ID NO: 12019 - protein, 70 aa, Glycine max
MISYTNPVNKHGTLGKPIYIVISCKIDAVTKAFYFYLGRGSGTIRTLEILINMTGHNIVFVSQRFIFILW

SEQ ID NO: 12020 - DNA, 1254 bp, Glycine max
  misc_feature (726)..(726): n is a, c, g, or t
  misc_feature (728)..(728): n is a, c, g, or t
  misc_feature (738)..(738): n is a, c, g, or t
  misc_feature (810)..(810): n is a, c, g, or t
  misc_feature (997)..(997): n is a, c, g, or t
  misc_feature (1029)..(1029): n is a, c, g, or t
gaaaaaacactcatcacactcacacacaataaccataaccataccataccacagccatggccactctaagcttcaaccctgttagaataaaatccccaacgttcaaacattccaaactcaccactccatcaaaacgcatcacaattccatgcaccactccctccaacagccaccccaaactgctccacttccgaccccgttcggtgtccgaaagcacccagaaagaagcacccgaagcggttctcggagaagaagaagaagaagaagaagatgatgatgatgacccatctgcggaactgagctacgtggacccagtaactgaccctgagagcatcacggagtgggagctggacttctgctccaggcccattctcgacgccagagggaagaaggtttgggagttagttgtgtgcgacaagacgctatcgttgcagtacaccaagtatttcccgaacaacgtcattaacagcattacgctgaaggatgctattgttgccgttagtgaccagttgggtgtcccgttgcccagaaacattcgcttctttaggtcgcagatgcagacaattattacaaatgcgtgtaatgagcttcgcataaggcctgttcctagtaaacggtgcgtgtcaataattctatggctagaggagcgctatgagaccgtatataaaaaacatcctggatttcaagaaggatccaaacctcttttggcacttgataatccttttncnacggaacttnctgacattctttatggggaaagatgggcatttgtccaattaccttactcagctgttcgagaggagatatcgncctttgagagaggagtttgtggttctgggctagatcttgatttattgggtcttgacattgatgacaagacattgatcccaggactgtctgttgcgtcttctaattctacagcattggcagctttgataaatggattggaggtttgcgcggtggaagcggatactgctcgtgctcgcctgattctttntagtggaatttctacccggtatatatattccncctataagaaaactcctgagacaactagtgaagctgaagcttgggaagctgctaagaaagcttgtggaggtttgcatttccttgcagttcaaccagacttggattctgaagattgtgttggcttctttcttttactagacttgccatttccacctgtatgatcgtacaaattatcatggttgagttgaatcttcactgaacaataatattataatagagaatatt

SEQ ID NO: 12021 - protein, 377 aa, Glycine max
  misc_feature (224)..(224): Xaa can be any naturally occurring amino acid
  misc_feature (228)..(228): Xaa can be any naturally occurring amino acid
  misc_feature (252)..(252): Xaa can be any naturally occurring amino acid
  misc_feature (314)..(314): Xaa can be any naturally occurring amino acid
  misc_feature (325)..(325): Xaa can be any naturally occurring amino acid
MATLSFNPVRIKSPTFKHSKLTTPSKRITIPCTTPSNSHPKLLHFRPRSVSESTQKEAPEAVLGEEEEEEEDDDDDPSAELSYVDPVTDPESITEWELDFCSRPILDARGKKVWELVVCDKTLSLQYTKYFPNNVINSITLKDAIVAVSDQLGVPLPRNIRFFRSQMQTIITNACNELRIRPVPSKRCVSIILWLEERYETVYKKHPGFQEGSKPLLALDNPFXTELXDILYGERWAFVQLPYSAVREEISXFERGVCGSGLDLDLLGLDIDDKTLIPGLSVASSNSTALAALINGLEVCAVEADTARARLILXSGISTRYIYSXYKKTPETTSEAEAWEAAKKACGGLHFLAVQPDLDSEDCVGFFLLLDLPFPPV

SEQ ID NO: 12022 - protein, 211 aa, Glycine max
  misc_feature (58)..(58): Xaa can be any naturally occurring amino acid
  misc_feature (62)..(62): Xaa can be any naturally occurring amino acid
  misc_feature (86)..(86): Xaa can be any naturally occurring amino acid
  misc_feature (148)..(148): Xaa can be any naturally occurring amino acid
  misc_feature (159)..(159): Xaa can be any naturally occurring amino acid
MQTIITNACNELRIRPVPSKRCVSIILWLEERYETVYKKHPGFQEGSKPLLALDNPFXTELXDILYGERWAFVQLPYSAVREEISXFERGVCGSGLDLDLLGLDIDDKTLIPGLSVASSNSTALAALINGLEVCAVEADTARARLILXSGISTRYIYSXYKKTPETTSEAEAWEAAKKACGGLHFLAVQPDLDSEDCVGFFLLLDLPFPPV

SEQ ID NO: 12023 - DNA, 231 bp, Glycine max
  misc_feature (63)..(63): n is a, c, g, or t
  misc_feature (110)..(110): n is a, c, g, or t
gaaagtgaagccaatgttcgagaaatttttgacaaggccagacaatcagctccatgtgtcctntttgatgagcttgattccattgctactcaggtctatttttgtacttngcatccatgcaggccaggttgaattaaattatgaggctgggttgaaaggaattgtatgattttgttgccaaatctgtagatgatttaaggagataatgttacacggtgtttttcctatgcc

SEQ ID NO: 12024 - protein, 55 aa, Glycine max
  misc_feature (21)..(21): Xaa can be any naturally occurring amino acid
  misc_feature (37)..(37): Xaa can be any naturally occurring amino acid
KVKPMFEKFLTRPDNQLHVSXLMSLIPLLLRSIFVLXIHAGQVELNYEAGLKGIV

SEQ ID NO: 12025 - protein, 51 aa, Glycine max
  misc_feature (17)..(17): Xaa can be any naturally occurring amino acid
  misc_feature (33)..(33): Xaa can be any naturally occurring amino acid
MFEKFLTRPDNQLHVSXLMSLIPLLLRSIFVLXIHAGQVELNYEAGLKGIV

SEQ ID NO: 12026 - protein, 43 aa, Glycine max
  misc_feature (21)..(21): Xaa can be any naturally occurring amino acid
  misc_feature (37)..(37): Xaa can be any naturally occurring amino acid
ESEANVREIFDKARQSAPCVXFDELDSIATQVYFCTXHPCRPG

SEQ ID NO: 12027 - DNA, 2142 bp, Glycine max
  misc_feature (273)..(273): n is a, c, g, or t
gaagatgacgcgtcgataagtaaaaaaccctagaaaccacactgatatactcttagtgtcttacacacactgtggctttggcagcgcgactcgtcttcgttccttaccctcgggttgatctgtgagaggggcttgatagccctctctctctgctgctgcaattcagattgttggcaactattttttatacagacgatttgtcttcacatggaagcattgcttgcttgagggacgcctttgtctcaaaggagttggaattttcgggttttttgngggattggagatttagagagtgcccttgcactccctgttttatttcatcaccatgattgccactgaaactatagtgccgagtacaaaattgaagatcaagttttcaaccaaaagaatggaggttgagtctgggccaaaatatgaatttggacagaaagtgtctcacactgacgaaaacaggagctttaatttgaatggaaaatcctctgcactgaattccaacaagaggggaccacccacaagtattgagggccaaaaggagaaaaggcagaggattgatcggaaagggtcgatgcagtgtgctacaatacttaagagtctaatgtctcacacatatagttgggtgtttagtaagccagtggaccctatagcgttgagtattccagattattttacaatcatatctcatccaatggatttgggcacaattaaatctaagctggagaaaaatatttattctggcactgaggagtttgcagctgatgtcagactgaccttctcaaatgctatgaaatataatcctcccagtaatgatgttcatttgatggcaaaggaactcagcaaaatatttgacagaaaatggaaagacttaggtaggaaatggaagtgtgaagatgagcatgataaaagcgaatctgaaacaattaaggaaactgggagaaaaagtcttgacatgctgtcccggcatagagattccttgcccaaaaagacacaagtatctgaacacaaaggaatgcccaagattagatcattggcaacaaaagatgctagagtggagccatctaaattatcacagattccttgcaagttgattgagaaagacatgcacaaaggcagcaaaggtaatcatgatgtggaacagcctgctggctctctaaaggcatgttcttcagtatgctttgtcacatccaagtgtagaatttgtggggataccacatgccattgtgtaattcctagcaattcaatacaggtgtcatcagatatatcatctgaaggatctgaaggaggggatgtaattacacgtggtgctgattctttgagacagaattgcccgactaaatgtacttcacctattgagaagaaatctgatcctgattctgatggggctgtaagttctttggacagtgaacatgtttgtcctagttctcagcatgtaactcctactactgatgcctcttctggggaagtatggagcacacctgttttgcctgtccagctttctcctaaaaaggctcttcgtgctgctatgcttaaaagccgctttgcagataccattttgaaagcacagcaaaagacccttcttgatcatggtgataaaggtaatcctcaaaaaatgcagcaggaaaaggagaggttggaaaggattcagcgtgaagaaagagctaggatcgaagcccaaattaaaattgctgaagctgctgctagaatgagggccgaggaagagtcaaggcagcggagagaaaaggaaagagaagctgctcgagcagctatagaaaagatgaaaagaaccgttgatatagaacataatgtggagattattaaagaacttgaaagtttgagtggatgcacgctatcttataaagccgtgggctgtagaaatggctacaaagttgcattggagacattggataaacctcagtttgagaacccattggagcggcttggtttatttatcaaggaagactttaccgcagatgaagatgaggaggttttgaacggaggctttgaagaaggggaaatttttaactgaatacaccttcatgcagttctgccagcgctaactgtttatatccttttagacagggaaacagacaattattgtaaatgcacatattgtttggaatctagtcttttgactatatctgcctt

SEQ ID NO: 12028 - protein, 565 aa, Glycine max
MIATETIVPSTKLKIKFSTKRMEVESGPKYEFGQKVSHTDENRSFNLNGKSSALNSNKRGPPTSIEGQKEKRQRIDRKGSMQCATILKSLMSHTYSWVFSKPVDPIALSIPDYFTIISHPMDLGTIKSKLEKNIYSGTEEFAADVRLTFSNAMKYNPPSNDVHLMAKELSKIFDRKWKDLGRKWKCEDEHDKSESETIKETGRKSLDMLSRHRDSLPKKTQVSEHKGMPKIRSLATKDARVEPSKLSQIPCKLIEKDMHKGSKGNHDVEQPAGSLKACSSVCFVTSKCRICGDTTCHCVIPSNSIQVSSDISSEGSEGGDVITRGADSLRQNCPTKCTSPIEKKSDPDSDGAVSSLDSEHVCPSSQHVTPTTDASSGEVWSTPVLPVQLSPKKALRAAMLKSRFADTILKAQQKTLLDHGDKGNPQKMQQEKERLERIQREERARIEAQIKIAEAAARMRAEEESRQRREKEREAARAAIEKMKRTVDIEHNVEIIKELESLSGCTLSYKAVGCRNGYKVALETLDKPQFENPLERLGLFIKEDFTADEDEEVLNGGFEEGEIFN

SEQ ID NO: 12029 - protein, 544 aa, Glycine max
MEVESGPKYEFGQKVSHTDENRSFNLNGKSSALNSNKRGPPTSIEGQKEKRQRIDRKGSMQCATILKSLMSHTYSWVFSKPVDPIALSIPDYFTIISHPMDLGTIKSKLEKNIYSGTEEFAADVRLTFSNAMKYNPPSNDVHLMAKELSKIFDRKWKDLGRKWKCEDEHDKSESETIKETGRKSLDMLSRHRDSLPKKTQVSEHKGMPKIRSLATKDARVEPSKLSQIPCKLIEKDMHKGSKGNHDVEQPAGSLKACSSVCFVTSKCRICGDTTCHCVIPSNSIQVSSDISSEGSEGGDVITRGADSLRQNCPTKCTSPIEKKSDPDSDGAVSSLDSEHVCPSSQHVTPTTDASSGEVWSTPVLPVQLSPKKALRAAMLKSRFADTILKAQQKTLLDHGDKGNPQKMQQEKERLERIQREERARIEAQIKIAEAAARMRAEEESRQRREKEREAARAAIEKMKRTVDIEHNVEIIKELESLSGCTLSYKAVGCRNGYKVALETLDKPQFENPLERLGLFIKEDFTADEDEEVLNGGFEEGEIFN

SEQ ID NO: 12030 - protein, 485 aa, Glycine max
MQCATILKSLMSHTYSWVFSKPVDPIALSIPDYFTIISHPMDLGTIKSKLEKNIYSGTEEFAADVRLTFSNAMKYNPPSNDVHLMAKELSKIFDRKWKDLGRKWKCEDEHDKSESETIKETGRKSLDMLSRHRDSLPKKTQVSEHKGMPKIRSLATKDARVEPSKLSQIPCKLIEKDMHKGSKGNHDVEQPAGSLKACSSVCFVTSKCRICGDTTCHCVIPSNSIQVSSDISSEGSEGGDVITRGADSLRQNCPTKCTSPIEKKSDPDSDGAVSSLDSEHVCPSSQHVTPTTDASSGEVWSTPVLPVQLSPKKALRAAMLKSRFADTILKAQQKTLLDHGDKGNPQKMQQEKERLERIQREERARIEAQIKIAEAAARMRAEEESRQRREKEREAARAAIEKMKRTVDIEHNVEIIKELESLSGCTLSYKAVGCRNGYKVALETLDKPQFENPLERLGLFIKEDFTADEDEEVLNGGFEEGEIFN

SEQ ID NO: 12031 - DNA, 1000 bp, Glycine max
  misc_feature (484)..(484): n is a, c, g, or t
  misc_feature (497)..(497): n is a, c, g, or t
atgctgctcttcaagcaaaactaatggctgatgaagcattgctttcatctggttataataattccagccaaagtaatcaaatttgtctttctgagggtaccaataacttaggaaaagcaacccctgcttccatcttgaaaggtgctaatggaaccaatagtcctggttctatcattgttgctgccaaggaagctgttaaaaggagagtggaagctgcttcagctgccaccaaaagagctgaaaatatggatgccattgtgaaggctgctgagctggcagcagaagctgtatctcaagcaggaaaaattgtaactatgggtgatcctttgccaataagtcagttggtagaagctggcccagagggatgtttgaaagcaacccgagagtcttctcagcaagttggattattcaaagacattaccagagatatggtgaacattaatgtgagagatattcctgaaacttcttatacacataacagagncattttatctggnggcatttctgctcctattaagatcaatgaaaagaattcaagaggagcaaagggacacaaggttgtttctgatttagtcaagcctattgacgtggttcctggatctgagcctgaaattcaggctcctccttttactgttagtaatggatctgaaaatctggtggaaagtagcatcaaggagggcttactcgtagaggttttcaaagatgaggaagggttcaaagctgcctggctctcagccaatattttgactttgaaggataataaagcttatgtaggctacacttcacttgtagctgctgaaggtgcagggccattaaaagaatgggtttcacttgaatgtgatggagacaaaccccctagaatacgtgctgctcgtcctcttaatactttacaatatgaaggaacaagaaagagacgtagagctgctatgggagattatgcatggtctgttggggatagagttgatgcatggatacaagaaagctggcaggaaggagtcat

SEQ ID NO: 12032 - protein, 332 aa, Glycine max
  misc_feature (161)..(161): Xaa can be any naturally occurring amino acid
  misc_feature (165)..(165): Xaa can be any naturally occurring amino acid
AALQAKLMADEALLSSGYNNSSQSNQICLSEGTNNLGKATPASILKGANGTNSPGSIIVAAKEAVKRRVEAASAATKRAENMDAIVKAAELAAEAVSQAGKIVTMGDPLPISQLVEAGPEGCLKATRESSQQVGLFKDITRDMVNINVRDIPETSYTHNRXILSXGISAPIKINEKNSRGAKGHKVVSDLVKPIDVVPGSEPEIQAPPFTVSNGSENLVESSIKEGLLVEVFKDEEGFKAAWLSANILTLKDNKAYVGYTSLVAAEGAGPLKEWVSLECDGDKPPRIRAARPLNTLQYEGTRKRRRAAMGDYAWSVGDRVDAWIQESWQEGV

SEQ ID NO: 12033 - protein, 325 aa, Glycine max
  misc_feature (154)..(154): Xaa can be any naturally occurring amino acid
  misc_feature (158)..(158): Xaa can be any naturally occurring amino acid
MADEALLSSGYNNSSQSNQICLSEGTNNLGKATPASILKGANGTNSPGSIIVAAKEAVKRRVEAASAATKRAENMDAIVKAAELAAEAVSQAGKIVTMGDPLPISQLVEAGPEGCLKATRESSQQVGLFKDITRDMVNINVRDIPETSYTHNRXILSXGISAPIKINEKNSRGAKGHKVVSDLVKPIDVVPGSEPEIQAPPFTVSNGSENLVESSIKEGLLVEVFKDEEGFKAAWLSANILTLKDNKAYVGYTSLVAAEGAGPLKEWVSLECDGDKPPRIRAARPLNTLQYEGTRKRRRAAMGDYAWSVGDRVDAWIQESWQEGV

SEQ ID NO: 12034 - protein, 251 aa, Glycine max
  misc_feature (80)..(80): Xaa can be any naturally occurring amino acid
  misc_feature (84)..(84): Xaa can be any naturally occurring amino acid
MDAIVKAAELAAEAVSQAGKIVTMGDPLPISQLVEAGPEGCLKATRESSQQVGLFKDITRDMVNINVRDIPETSYTHNRXILSXGISAPIKINEKNSRGAKGHKVVSDLVKPIDVVPGSEPEIQAPPFTVSNGSENLVESSIKEGLLVEVFKDEEGFKAAWLSANILTLKDNKAYVGYTSLVAAEGAGPLKEWVSLECDGDKPPRIRAARPLNTLQYEGTRKRRRAAMGDYAWSVGDRVDAWIQESWQEGV

SEQ ID NO: 12035 - DNA, 1470 bp, Glycine max
  misc_feature (96)..(96): n is a, c, g, or t
  misc_feature (1092)..(1092): n is a, c, g, or t
  misc_feature (1359)..(1359): n is a, c, g, or t
  misc_feature (1385)..(1385): n is a, c, g, or t
atgaagttgatcaagaaagagaaatgtggttaaactctttttataaagctcctcttaggttacccatgccagctgagctagagcactggtggtcancaagaggagaatcataagattcctgaatttgtccttattaacaaggaaccggagcctgatcccgaagatccttcaaagcttatatatactgaggatcctctcatcctccatacaccaactggaaatattatcaattatgtcgaggatgagaaatatggaatacgtttattctggcagccacctttgggaaaggatgaggacgtggatcctgaaaaggctgtattcctgccccttggttatgatgatttttatggaatagagaaggaggaaaaaaaggagagcatatggatgcgtactatacttgcaattgaaaatgcatgcaagccgtggtttgataagctagataaatggactgaagagcagaaaaaaattaatgaagaggaaaaaaaagcaattgaggaagatcttgaactgatagaagctgaaattggtctagaagaggccattgaggatatggaagagttattgcgcataagagagaaagaagaggaaaagaaggcaaagatgggtttgctggatgaagatgatgatgatgatgacaatgaaggtgatggtgattatatgacttctgtaaccaaacaagatgaaaaggctcctgcaaaggttgaagaagttctggcagaggtggaagaggaagaggaagatgatgatgatggggatgatgaagacgatgataatagtgcacaatcaagttttgggtctgttgagcagggacagacaacagatcagcagaagggaaaacctgggaaatctccattttctgcatcttcacttgcatttgcttctagcaggccttatctctgctgttccagccaagctgcaactatcattttcattctggaacaaggggagatcaaaaccggagtcagttcctccgccatgcactgatcgtttgagtaatatgaaaacagttgattcagtcaatttccgtcctgtgaccagccagaacggtagcttgaaggctgtgggcaaaacacatgggaaagtcaagacganaagctctttaggtgggaaatttcttggggtgcactctcagactcgatcacatttattggcttctgcaaattccagtagcaacttgaaggagccaagagtgagtagtgacatgtggttgcatgcagcaccagagagggatttagacagcatactgtctttgcattcatcattgtattattttgaacagcatagagagattatttggtgatcatgtactgtccattttttcccaaataagagaggttcccttgaaatacaagttttganagccgttttgttgttgttgccctttntgtagcaaaaaggagcacacgtaggattttggtgagggcagagacataacaaaatttgttattttattttattatgtatgtcatt

SEQ ID NO: 12036 - protein, 206 aa, Glycine max
  misc_feature (138)..(138): Xaa can be any naturally occurring amino acid
MKRLLQRLKKFWQRWKRKRKMMMMGMMKTMIIVHNQVLGLLSRDRQQISRRENLGNLHFLHLHLHLLLAGLISAVPAKLQLSFSFWNKGRSKPESVPPPCTDRLSNMKTVDSVNFRPVTSQNGSLKAVGKTHGKVKTXSSLGGKFLGVHSQTRSHLLASANSSSNLKEPRVSSDMWLHAAPERDLDSILSLHSSLYYFEQHREIIW

SEQ ID NO: 12037 - protein, 199 aa, Glycine max
MRTILAIENACKPWFDKLDKWTEEQKKINEEEKKAIEEDLELIEAEIGLEEAIEDMEELLRIREKEEEKKAKMGLLDEDDDDDDNEGDGDYMTSVTKQDEKAPAKVEEVLAEVEEEEEDDDDGDDEDDDNSAQSSFGSVEQGQTTDQQKGKPGKSPFSASSLAFASSRPYLCCSSQAATIIFILEQGEIKTGVSSSAMH

SEQ ID NO: 12038 - protein, 186 aa, Glycine max
  misc_feature (118)..(118): Xaa can be any naturally occurring amino acid
MMMMGMMKTMIIVHNQVLGLLSRDRQQISRRENLGNLHFLHLHLHLLLAGLISAVPAKLQLSFSFWNKGRSKPESVPPPCTDRLSNMKTVDSVNFRPVTSQNGSLKAVGKTHGKVKTXSSLGGKFLGVHSQTRSHLLASANSSSNLKEPRVSSDMWLHAAPERDLDSILSLHSSLYYFEQHREIIW

SEQ ID NO: 12039 - DNA, 589 bp, Glycine max
tcagatagcaatgcagcaactgcaagagcgagatcaattgctttctgcacaaaatgaaatgttgaagatggacaagaccaatctcatcaggaaggttgcagaattagatgacatggtgaaaacactagttgggacacgaaatacccaacctgctccacagtcatcaaagactaaggacaagggtgcattaaatttgggtaacggtggatacaataaaaggttgtctttgtctcaacccgaacgacgcctttctcgttttaatgacgagccttctcgttaccgcaaatttgctggtaataattcgcaaggctaaactgtacagatactcttcacacgcacaaaagagaggagcataaatatcatcaaagaaaaaaatgtacgcatatgtccatttgtgctaaccctcacctcggggagccaattatgcattacagtatttgaagatatccacttccctattgtatttgttcaaattctcagttgacacgttcgtggttgtcatcttgaattttgaacaactatgcttgaaaaggcttgtaatggtgtgcacctaatttttctctcgtgtgcaatttttttcatatgattg

SEQ ID NO: 12040 - protein, 103 aa, Glycine max
QIAMQQLQERDQLLSAQNEMLKMDKTNLIRKVAELDDMVKTLVGTRNTQPAPQSSKTKDKGALNLGNGGYNKRLSLSQPERRLSRFNDEPSRYRKFAGNNSQG

SEQ ID NO: 12041 - protein, 100 aa, Glycine max
MQQLQERDQLLSAQNEMLKMDKTNLIRKVAELDDMVKTLVGTRNTQPAPQSSKTKDKGALNLGNGGYNKRLSLSQPERRLSRFNDEPSRYRKFAGNNSQG

SEQ ID NO: 12042 - protein, 84 aa, Glycine max
MLKMDKTNLIRKVAELDDMVKTLVGTRNTQPAPQSSKTKDKGALNLGNGGYNKRLSLSQPERRLSRFNDEPSRYRKFAGNNSQG

SEQ ID NO: 12043 - DNA, 1065 bp, Glycine max
aagaagctgctcaaagtggtgcctgtgcatgcttgtgggtggtgcagtgaaatccatttaggatctgttggacattcattcaagtcatgtaaaggcacacaggccaacatccgctagggcctccacgaatggacgaatgcacatgttgaagacatattaattccaattgaagcctatcacctctttgatcgtcttggaaaacggattactcatgaagagagattctctatccctcgaattccagcagtggttgagctccgcattcaagccagtgttgaaattccagagtttcccaccaaaaggagaagaaagcctatcatccgtatttggaggaaggaattcattgatgctgatgaaagtaatctaccagataaaatctcagagggccctttaaaaccattactagctgaaatacctgattaattaagtatagtccctcttgccgaggaaactctccaagcatggaacgggtgaggaaaggtgcgaagagactaatgaggatgtacaatgtgagggtgtgtggatattgccctgaaattcatgttggtgcccagggtctcaaagctaaaaactgtgaagcccataaacaccaacaacgcaatgggcagcatggttggcagtctgcagttctggatgatttgatccctccaagatttgtatggcatgttcctgatgtaaatgcactgctagaacgagagcttaggaattcttatggccaggcgcatgtagaagtggaaatgtgcattcaggctggtgctgccttaccagaacagtataaatcgaccatgcggctggatgtggggatcccatcaactttgaaagaagctgacatggtagtttgagattaatttcccttatagacaaaccccaacttttgaatatagtgtaaattgtgtcaaactggatgcaatgataatttactgatttatttagggactagaataagcatcactttggttagttctatttgggggtatatatgccatctagacaaacgctgtcattttctatcctctgcatgcaggcaaaagatatataaaattgtcagtgtaagattgatgttgc

SEQ ID NO: 12044 - protein, 126 aa, Glycine max
MERVRKGAKRLMRMYNVRVCGYCPEIHVGAQGLKAKNCEAHKHQQRNGQHGWQSAVLDDLIPPRFVWHVPDVNALLERELRNSYGQAHVEVEMCIQAGAALPEQYKSTMRLDVGIPSTLKEADMVV

SEQ ID NO: 12045 - protein, 115 aa, Glycine max
MRMYNVRVCGYCPEIHVGAQGLKAKNCEAHKHQQRNGQHGWQSAVLDDLIPPRFVWHVPDVNALLERELRNSYGQAHVEVEMCIQAGAALPEQYKSTMRLDVGIPSTLKEADMVV

SEQ ID NO: 12046 - protein, 113 aa, Glycine max
MYNVRVCGYCPEIHVGAQGLKAKNCEAHKHQQRNGQHGWQSAVLDDLIPPRFVWHVPDVNALLERELRNSYGQAHVEVEMCIQAGAALPEQYKSTMRLDVGIPSTLKEADMVV

SEQ ID NO: 12047 - DNA, 1562 bp, Glycine max
atcagaaattaagaaccgaggacaatatacgaaggtgaagagggttgagttgagagttcagacttgagagagtgtcgtcgttgattccaatttacgacggaggagtgaggaatcacaatctccaccggcgaaacctgtaactgttggcgacgctcaacactcgcactacgccgatagtgatggagagtgcttttgcaagcgcctctgcgattactgaccagaggcagaagatagagcagtataagcaaatacttgctgctgtcatttcatctaatgacattgttcaggctaggaaattcatagatcacatgttatcagatgatgttccattagtagtgtctcggcagcttttgcagacttttgctcaagagttgggaagattggagcctgagatacagaaagagattgctcattacgcccttgcccaaattcagcctcgtgttgtgtcattcgaagagcaggttttagttattagagagaaacttgctgagctttatgaatctgagaagcaatggtctaaagcagctcaaatgctcagtggtattgacctggattcaggaatgagggtgatagatgatgcattcaggttgtcaaagtgtgtccaaattgcttgtttatatcttgaggatgatgatgctgtcaatgctgaagcttttattaataaagcatcattcttggtcagcaatagtcagcatgaagtactgaatttaaagtacaaggtttgctatgcaaggatcttagatttgaagaggaagtttttggaagcagcattacggtattatgatatatctcaaattgagaaaaggcaaataggagacgaggagattaatgaggaagctcttgaacaagctttatctgctgctgttacatgcacgatattggcagctgcaggacctcaacgttctcgtgttcttgccactttgtacaaggatgagcggtgttcaaagttgaagatctatccaatattgcagaaggtgtatttggagagaattctcagaaaaccagaaattgatgcttttgcagaagaattgaaaccacatcagcaagctcttcttccagacaatttcactgtgctggaccgtgctatgattgagcataatcttttgagtgctagcaaactctatactaatatcagctttaatgagctaggcacactgttggggatcccacctcacaaggctgagaagatagcatcaagaatgatttatgaggataggatgaggggctctatcgatcaggttgaggctgtcatacattttgatgatgacactgaagagttgcagcgatgggaccagcagattgtgggcctatgtcaagccctcaacgatgttttggatagcatggctaagaagggttttccggttcctgtttaacgtggatggttgacaatttctttgtttatacattcttagtaaatcatcttttctttttcttttgttgattttttgtgaacttcactatacaaacgatcccattaatttcctcatatattagattccaaatttggtttatcccaagggcttgtttaattactgcttctgcttaacgagattctgaaacac

SEQ ID NO: 12048 - protein, 397 aa, Glycine max
MESAFASASAITDQRQKIEQYKQILAAVISSNDIVQARKFIDHMLSDDVPLVVSRQLLQTFAQELGRLEPEIQKEIAHYALAQIQPRVVSFEEQVLVIREKLAELYESEKQWSKAAQMLSGIDLDSGMRVIDDAFRLSKCVQIACLYLEDDDAVNAEAFINKASFLVSNSQHEVLNLKYKVCYARILDLKRKFLEAALRYYDISQIEKRQIGDEEINEEALEQALSAAVTCTILAAAGPQRSRVLATLYKDERCSKLKIYPILQKVYLERILRKPEIDAFAEELKPHQQALLPDNFTVLDRAMIEHNLLSASKLYTNISFNELGTLLGIPPHKAEKIASRMIYEDRMRGSIDQVEAVIHFDDDTEELQRWDQQIVGLCQALNDVLDSMAKKGFPVPV

SEQ ID NO: 12049 - protein, 354 aa, Glycine max
MLSDDVPLVVSRQLLQTFAQELGRLEPEIQKEIAHYALAQIQPRVVSFEEQVLVIREKLAELYESEKQWSKAAQMLSGIDLDSGMRVIDDAFRLSKCVQIACLYLEDDDAVNAEAFINKASFLVSNSQHEVLNLKYKVCYARILDLKRKFLEAALRYYDISQIEKRQIGDEEINEEALEQALSAAVTCTILAAAGPQRSRVLATLYKDERCSKLKIYPILQKVYLERILRKPEIDAFAEELKPHQQALLPDNFTVLDRAMIEHNLLSASKLYTNISFNELGTLLGIPPHKAEKIASRMIYEDRMRGSIDQVEAVIHFDDDTEELQRWDQQIVGLCQALNDVLDSMAKKGFPVPV

SEQ ID NO: 12050 - protein, 280 aa, Glycine max
MLSGIDLDSGMRVIDDAFRLSKCVQIACLYLEDDDAVNAEAFINKASFLVSNSQHEVLNLKYKVCYARILDLKRKFLEAALRYYDISQIEKRQIGDEEINEEALEQALSAAVTCTILAAAGPQRSRVLATLYKDERCSKLKIYPILQKVYLERILRKPEIDAFAEELKPHQQALLPDNFTVLDRAMIEHNLLSASKLYTNISFNELGTLLGIPPHKAEKIASRMIYEDRMRGSIDQVEAVIHFDDDTEELQRWDQQIVGLCQALNDVLDSMAKKGFPVPV

SEQ ID NO: 12051 - DNA, 1633 bp, Glycine max
  misc_feature (1198)..(1198): n is a, c, g, or t
  misc_feature (1215)..(1215): n is a, c, g, or t
  misc_feature (1261)..(1261): n is a, c, g, or t
  misc_feature (1294)..(1294): n is a, c, g, or t
  misc_feature (1309)..(1309): n is a, c, g, or t
  misc_feature (1362)..(1362): n is a, c, g, or t
  misc_feature (1437)..(1437): n is a, c, g, or t
  misc_feature (1598)..(1598): n is a, c, g, or t
gggcacagaatgaaaatagtttcgtcgaattctagcttgaatatacacaagtgcgttaggtaatcagaagtgtgaattggagtgtatggattcagaagaatcaatctggagaggtcgataaacataaactccaattggttttgttttgtcggcaatgagggttctgcaacttggattgtttcttgctctggcatctggattcgcagccatttccatttacatcaccggcctctcagatccttttgtatgtatatcccagttatcacctcacagatgaagacacccaagcattgctttcgctgcacgacactttccagaagtgtgtgactgcaaatggacttggcctaaaagcaaccaggggcacagattattgccaaaccacaataagtttccccagtgacaccatccccaaatggagagatcccaaaaccggtgaacttgaagccctgtcttttgattttaatctatgtgaagctgtggctacatgggaacaggtgcggaacagtaccactatactcaccaaggaattcattgattctttaccaaatggatgggaggaatatgcatggcgtaggatcaataaaggaatacagctcaaccgctgtgagaacaagaccttgtgcatggagaaactttcactggttctccctgaaacaccaccatacttcccaagacagtttggacgctgtgctgttattggtaactcgggagatctcttgaaaacaaaatttggaaatgagatagatggttatgaagttgtcattagagaaaatggtgctccaacacagaactacactgattacgtgggtaggaaaagcacatttcgccttctaaaccgaggatccgccaaagcactggataaagttgtagagttagatgaacaaagaaaagaagtcttgataataaaaacaacaattcatgacatcatgaacaaaatgattcgggaggttcctataaaaaatcctgtgtacctcatgctaggtgcatcctttggctcagcagcaaaaggaactggacttaaagctcttgaatttgctctctctatgtgtgattcagtggatatgtatggtttcactgtagatcctggttataaagaatggacaagatatttctctgaatcccgtcaaggccataccccgttgcatggtagagcttattaccaaatgatggagtgcttggggcttatcaaaattcattntcccatgcgagctgatntaaatcgtgttgtaaaatgggttccaagccgccatattataagatntgctagaattgcatcagagaaattactgagganagttggagcaggatntgaagatccactggctgcatgttccataattaagaagcaagtaaaaagaaatntaaatgcagtttcaaagctcagaaaggcagcacttgatcatttacggtatgtgaaaagaacaaccatgtatcctntagagcatagtcctggacatgggtcgctttgcactgtgccaactgattaaactgttgggaagcatccaaccccatcatttacaaaattatccgtttttttaccttttccaaaatatgtcattaacttgacaaaatggcaatgaagcttcctactcaccagngtagtggtaaatcaaggaaatttatttaatctctc

SEQ ID NO: 12052 - protein, 287 aa, Glycine max
  misc_feature (192)..(192): Xaa can be any naturally occurring amino acid
  misc_feature (198)..(198): Xaa can be any naturally occurring amino acid
  misc_feature (213)..(213): Xaa can be any naturally occurring amino acid
  misc_feature (224)..(224): Xaa can be any naturally occurring amino acid
  misc_feature (229)..(229): Xaa can be any naturally occurring amino acid
  misc_feature (247)..(247): Xaa can be any naturally occurring amino acid
  misc_feature (272)..(272): Xaa can be any naturally occurring amino acid
MEKLSLVLPETPPYFPRQFGRCAVIGNSGDLLKTKFGNEIDGYEVVIRENGAPTQNYTDYVGRKSTFRLLNRGSAKALDKVVELDEQRKEVLIIKTTIHDIMNKMIREVPIKNPVYLMLGASFGSAAKGTGLKALEFALSMCDSVDMYGFTVDPGYKEWTRYFSESRQGHTPLHGRAYYQMMECLGLIKIHXPMRADXNRVVKWVPSRHIIRXARIASEKLLRXVGAGXEDPLAACSIIKKQVKRNXNAVSKLRKAALDHLRYVKRTTMYPXEHSPGHGSLCTVPTD

SEQ ID NO: 12053 - protein, 186 aa, Glycine max
  misc_feature (91)..(91): Xaa can be any naturally occurring amino acid
  misc_feature (97)..(97): Xaa can be any naturally occurring amino acid
  misc_feature (112)..(112): Xaa can be any naturally occurring amino acid
  misc_feature (123)..(123): Xaa can be any naturally occurring amino acid
  misc_feature (128)..(128): Xaa can be any naturally occurring amino acid
  misc_feature (146)..(146): Xaa can be any naturally occurring amino acid
  misc_feature (171)..(171): Xaa can be any naturally occurring amino acid
MNKMIREVPIKNPVYLMLGASFGSAAKGTGLKALEFALSMCDSVDMYGFTVDPGYKEWTRYFSESRQGHTPLHGRAYYQMMECLGLIKIHXPMRADXNRVVKWVPSRHIIRXARIASEKLLRXVGAGXEDPLAACSIIKKQVKRNXNAVSKLRKAALDHLRYVKRTTMYPXEHSPGHGSLCTVPTD

SEQ ID NO: 12054 - protein, 183 aa, Glycine max
  misc_feature (88)..(88): Xaa can be any naturally occurring amino acid
  misc_feature (94)..(94): Xaa can be any naturally occurring amino acid
  misc_feature (109)..(109): Xaa can be any naturally occurring amino acid
  misc_feature (120)..(120): Xaa can be any naturally occurring amino acid
  misc_feature (125)..(125): Xaa can be any naturally occurring amino acid
  misc_feature (143)..(143): Xaa can be any naturally occurring amino acid
  misc_feature (168)..(168): Xaa can be any naturally occurring amino acid
MIREVPIKNPVYLMLGASFGSAAKGTGLKALEFALSMCDSVDMYGFTVDPGYKEWTRYFSESRQGHTPLHGRAYYQMMECLGLIKIHXPMRADXNRVVKWVPSRHIIRXARIASEKLLRXVGAGXEDPLAACSIIKKQVKRNXNAVSKLRKAALDHLRYVKRTTMYPXEHSPGHGSLCTVPTD

SEQ ID NO: 12055 - DNA, 1297 bp, Glycine max
gagcttaatttgtgtcacaactcataaaggaaagctttgagatttgttggacattttagagtggtgagaggatggtgggtgttatttcgttggtaacaggaatggctggtccaagtgggtttggatcagcttcaactgcagaacaggttactgaaggagttgatgccagcaacctcactgcaattatcacaggaggagcaagtggtataggattggagacagcacgagtgttggctcttcgaaaggtccatgtcatcattgcagtacgaaacatggtgtctgcaaaagaggctaaacaacaaatactagaggagaatgagtctgcacgagtggacataatgaagctcgacctttgctcagtgaattctattagatcatttgtggacaacttcatagctcttgatcttcctctcaacattttaataaacaatgctggagtgatgttctgcccattcaagctctcagaggatggcattgagatgcaatttgcaacaaaccatattggtcatttccacttatcaaacctacttcttgacaaaatgaaacaaactgcaaaagccactggaatagagggcaggatcataaatctgtcatcaattgcccataactacacttacagaaaggggattagatttaataagatcaatgaacggaaaggttacggtaacaagagggcgtatggacagtccaagttagcaaacatattacatacaaatgagctttctcgtcgcctgcaggaagagggtgtgaacattacagcaaactcagtccacccaggagtgataatgactcctcttatgagacactcttcttaccttatgcacttcctcaaggtctttaccttttacatatggaagaacgtcccccagggagcagccacgacatgttatgttgctctccacccaagcgtgaaaggtgtaactgggaagtactttgtggattgcaatcaatgcaaaccaagttcacatgccaaaaacaaacagcttgcaaagaaactctgggatttcagtaacgatttgatcaaatcaatctcaaaagcttgagtgcaacttgcagcaaggtgcttttctccttatggaaattaaaagcatcgttgtggtcaccagtttataaaaactaactcgttatgcaataagaagcacgttacagttgtagttataattatttttcgttgtctgaggatgtttccaaacatttcattcccccactgaacccaccaggtgtttgttgcatttcttttcatccaaacatttatgtatcaaacatttcatttcatccataagttgtggctataatc

SEQ ID NO: 12056 - protein, 323 aa, Glycine max
MVGVISLVTGMAGPSGFGSASTAEQVTEGVDASNLTAIITGGASGIGLETARVLALRKVHVIIAVRNMVSAKEAKQQILEENESARVDIMKLDLCSVNSIRSFVDNFIALDLPLNILINNAGVMFCPFKLSEDGIEMQFATNHIGHFHLSNLLLDKMKQTAKATGIEGRIINLSSIAHNYTYRKGIRFNKINERKGYGNKRAYGQSKLANILHTNELSRRLQEEGVNITANSVHPGVIMTPLMRHSSYLMHFLKVFTFYIWKNVPQGAATTCYVALHPSVKGVTGKYFVDCNQCKPSSHAKNKQLAKKLWDFSNDLIKSISKA

SEQ ID NO: 12057 - protein, 313 aa, Glycine max
MAGPSGFGSASTAEQVTEGVDASNLTAIITGGASGIGLETARVLALRKVHVIIAVRNMVSAKEAKQQILEENESARVDIMKLDLCSVNSIRSFVDNFIALDLPLNILINNAGVMFCPFKLSEDGIEMQFATNHIGHFHLSNLLLDKMKQTAKATGIEGRIINLSSIAHNYTYRKGIRFNKINERKGYGNKRAYGQSKLANILHTNELSRRLQEEGVNITANSVHPGVIMTPLMRHSSYLMHFLKVFTFYIWKNVPQGAATTCYVALHPSVKGVTGKYFVDCNQCKPSSHAKNKQLAKKLWDFSNDLIKSISKA

SEQ ID NO: 12058 - protein, 256 aa, Glycine max
MVSAKEAKQQILEENESARVDIMKLDLCSVNSIRSFVDNFIALDLPLNILINNAGVMFCPFKLSEDGIEMQFATNHIGHFHLSNLLLDKMKQTAKATGIEGRIINLSSIAHNYTYRKGIRFNKINERKGYGNKRAYGQSKLANILHTNELSRRLQEEGVNITANSVHPGVIMTPLMRHSSYLMHFLKVFTFYIWKNVPQGAATTCYVALHPSVKGVTGKYFVDCNQCKPSSHAKNKQLAKKLWDFSNDLIKSISKA

SEQ ID NO: 12059 - DNA, 2160 bp, Glycine max
  misc_feature (2111)..(2111): n is a, c, g, or t
gcaattggataaatatttttgatgttgtagaattaaaattagagtttcatctcctaatttatactgcaatgcaaagtcaaattttggagtaaacactaggttgtagttttttgttttcttaacaaatctttattgtgtgaaataccaaaactccaattcaaacaacaaaatgataccaaaaacatttcaggaattgcatgtacttttttcgttttcaatttaaaaaattaaaaaatgctttaattattaatatctctttgatttcttagagggatttggttgcatggtcagtggattactaatatgatttaacgaaggatagttctttgtacattcttgatccctgccccgtgtgttagtttatcttctgatgtagaagaagactatgattagcagaacaacattgaagattttgacctaaagaaagtggaggaacaagcagcagagttggagaaggatttgattgtcaaggaacttgaaacgcttgacgtgctcgaagaactgggagctaccaagaggattgtggaggacttgaagcagcaattacagaaggaggctatgaaatgtttagcaactcaagatgtaaattcatatgaacaagttggaactactgttattaaggagatggataaggaaaattgtggaagtaatgtcaatgatcaagaacaggtgatgcaaattccaagcccatgctctatgtcatcatcacctgatatgatcttaatagagttgaaacaagccaaattgaatctaggcaaaactataaatgaacttggggtgatacagtcctctgttgaatctttgaataagaagatgaagaaggagaaactttttctggagaggacacgcgaaaagctagcaacaaagtttgcagcagtatctgctcaagagagggtccaagagcaaacaagattaaatccaccagcacctcatgtagagttcaattttggtaacactgcaaataatttcaattctgattctaggcagtgcaatagaatggccgagacaagaagacctgaaccttcaaagcccttgaatgtgtatgaagaatatggatttagtgttaagactgctgagatgaggtggcttgcggctaaaaagatggaagaagctgcaagggctgcagaagctattgctcttgctgaaatcaaggctctatctaataatgctgagagatcttcaggattagttctgccagaaccggagaaagtcacttttgcttttggagagtgctctcccctaaacctcaaggctcagatacccgaggaatcaaccttgaagaaggtaatagattccaactttcaagttgatgaaacaaaaatttccaaactgactattctgaagaagttggaggaagcagctgaagaagttctacacagcaaacaagtcttgacagatgctttaaacagagttgaaaccgcaaacagaaagcagcatgctgctaaggaggctctaaggagatggattcctgaggatgatatgaaggagtataataacactattaactgcaacaagtttcatcaagctggaatttatcaagattctctgcaggatgtaaccaggtcaacaacatcaaacaatgatccaaagcctgctttaaggaccacaatttcaatgagagatgtacttagcagaaagcaggttcctgaaggatatgctacaagaaaggagatggaagagcacactgaacgacaaaaggtagcattgagtcaaatgcttcaggcattgagggaagatctaactcttccaccgaagaccgagaaagatgggagcaatcagaagccgttcgtagcacagaggaagaaatttggattcattcaaatatcactccccttggcaaagccaaataagaaaaggggatgagatttcaatccttaatccctatgcatggatgaatagccactactcatgcatcttcatgtcttcccatgccattctttattggttcatgtgttcactttcatttatatatgtagatgtttgtgagtgtctgattctgtaaaatatgttgtgtttgaatgattggcttataattatgtagctggctttaatggagctagtagattatgttgctctggttggatgcattagagtgatgaggaatttatccncagggtatgaaggtttttattttatcattggattgataattttattgtt

SEQ ID NO: 12060 - protein, 434 aa, Glycine max
MKCLATQDVNSYEQVGTTVIKEMDKENCGSNVNDQEQVMQIPSPCSMSSSPDMILIELKQAKLNLGKTINELGVIQSSVESLNKKMKKEKLFLERTREKLATKFAAVSAQERVQEQTRLNPPAPHVEFNFGNTANNFNSDSRQCNRMAETRRPEPSKPLNVYEEYGFSVKTAEMRWLAAKKMEEAARAAEAIALAEIKALSNNAERSSGLVLPEPEKVTFAFGECSPLNLKAQIPEESTLKKVIDSNFQVDETKISKLTILKKLEEAAEEVLHSKQVLTDALNRVETANRKQHAAKEALRRWIPEDDMKEYNNTINCNKFHQAGIYQDSLQDVTRSTTSNNDPKPALRTTISMRDVLSRKQVPEGYATRKEMEEHTERQKVALSQMLQALREDLTLPPKTEKDGSNQKPFVAQRKKFGFIQISLPLAKPNKKRG

SEQ ID NO: 12061 - protein, 412 aa, Glycine max
MDKENCGSNVNDQEQVMQIPSPCSMSSSPDMILIELKQAKLNLGKTINELGVIQSSVESLNKKMKKEKLFLERTREKLATKFAAVSAQERVQEQTRLNPPAPHVEFNFGNTANNFNSDSRQCNRMAETRRPEPSKPLNVYEEYGFSVKTAEMRWLAAKKMEEAARAAEAIALAEIKALSNNAERSSGLVLPEPEKVTFAFGECSPLNLKAQIPEESTLKKVIDSNFQVDETKISKLTILKKLEEAAEEVLHSKQVLTDALNRVETANRKQHAAKEALRRWIPEDDMKEYNNTINCNKFHQAGIYQDSLQDVTRSTTSNNDPKPALRTTISMRDVLSRKQVPEGYATRKEMEEHTERQKVALSQMLQALREDLTLPPKTEKDGSNQKPFVAQRKKFGFIQISLPLAKPNKKRG

SEQ ID NO: 12062 - protein, 396 aa, Glycine max
MQIPSPCSMSSSPDMILIELKQAKLNLGKTINELGVIQSSVESLNKKMKKEKLFLERTREKLATKFAAVSAQERVQEQTRLNPPAPHVEFNFGNTANNFNSDSRQCNRMAETRRPEPSKPLNVYEEYGFSVKTAEMRWLAAKKMEEAARAAEAIALAEIKALSNNAERSSGLVLPEPEKVTFAFGECSPLNLKAQIPEESTLKKVIDSNFQVDETKISKLTILKKLEEAAEEVLHSKQVLTDALNRVETANRKQHAAKEALRRWIPEDDMKEYNNTINCNKFHQAGIYQDSLQDVTRSTTSNNDPKPALRTTISMRDVLSRKQVPEGYATRKEMEEHTERQKVALSQMLQALREDLTLPPKTEKDGSNQKPFVAQRKKFGFIQISLPLAKPNKKRG

SEQ ID NO: 12063 - DNA, 653 bp, Glycine max
atttgatgtaatatacactcgggacaccatgctgcacgtcaaagataaaccaacattattcagatcattttacaagtggttgaagcctggaggaaaaattctaatcacagattactgcaaaagtgctggaagtccatctttagaatttgctgagtacataaaaaaaggaggatattatctccatgacattaaagcgtataggcagatgcttgaggatgcgggatttgatgatgtcattgccgaggatcgaactgatcagtttgtgaacacgctacagcaggagttaaatgcccttgagaacaagaaggacgattttattggtgacttcagcgaggaagactacaatgagattgtcgaaagatggaaggcaaagcagaccaggggtgcatctagagagcagatgtggggcttgttcattgccaagaaaaattgacatgctttattgctatcatatgccttgttctagctatatttaattcctgtgtggccggaatagttatctgtgtcttttatgttggtttaagattcatagctgctttcgaattagaatgacgatctgctgagaggagaatgctcttcgatttgaataacaatggtcacttgccattggcttccttgctaaaaaataatttcaacgtcttggtttttggttt

SEQ ID NO: 12064 - protein, 143 aa, Glycine max
FDVIYTRDTMLHVKDKPTLFRSFYKWLKPGGKILITDYCKSAGSPSLEFAEYIKKGGYYLHDIKAYRQMLEDAGFDDVIAEDRTDQFVNTLQQELNALENKKDDFIGDFSEEDYNEIVERWKAKQTRGASREQMWGLFIAKKN

SEQ ID NO: 12065 - protein, 134 aa, Glycine max
MLHVKDKPTLFRSFYKWLKPGGKILITDYCKSAGSPSLEFAEYIKKGGYYLHDIKAYRQMLEDAGFDDVIAEDRTDQFVNTLQQELNALENKKDDFIGDFSEEDYNEIVERWKAKQTRGASREQMWGLFIAKKN

SEQ ID NO: 12066 - protein, 75 aa, Glycine max
MLEDAGFDDVIAEDRTDQFVNTLQQELNALENKKDDFIGDFSEEDYNEIVERWKAKQTRGASREQMWGLFIAKKN

SEQ ID NO: 12067 - DNA, 808 bp, Glycine max
agtttttcgatctcagcattgttcatttctgtctcactgagagaaactctctctctctctctctctctctctctagaaaccctattgcacgttttgcaatcgaactcgacaatggccaacagcaacctccctcgaagaatcatcaaggaaacgcagcgtttgctcagtgagccagcacctggtattagtgcctccccctctgaagagaatatgcgatatttcaatgtgatgatccttgggcctacccagtcgccttatgaaggaggcgttttcaagttagaactatttttgccagaagaatatccaatggctgctccaaaggttaggtttctaacaaaaatatatcatccgaacattgataagcttggcaggatatgtcttgatattctgaaagataagtggagtcctgcacttcagatacgcactgttctattaagcattcaagctctattgagtgcaccaaacccagatgatccactttctgagaacattgccaagcattggaaatctaatgaggccgaggctgtcgaaacagcgaaggaatggacccaattatatgctagtggcgcctgatgataggcttcaaacttatggctccaaaataacaattgtaaccattttatattggaaatctacaggaatttatgtatgaactattcgaattaatattcctagcagcttccagttacctgttaatttcttctcttggaagctgccttatgttggaacttgtatgaatatatgtgttgatcatttacctatctaacaatttagaacgtgcttcagtcgttgactgaagtaatttggt

SEQ ID NO: 12068 - protein, 190 aa, Glycine max
SFSISALFISVSLRETLSLSLSLSLETLLHVLQSNSTMANSNLPRRIIKETQRLLSEPAPGISASPSEENMRYFNVMILGPTQSPYEGGVFKLELFLPEEYPMAAPKVRFLTKIYHPNIDKLGRICLDILKDKWSPALQIRTVLLSIQALLSAPNPDDPLSENIAKHWKSNEAEAVETAKEWTQLYASGA

SEQ ID NO: 12069 - protein, 153 aa, Glycine max
MANSNLPRRIIKETQRLLSEPAPGISASPSEENMRYFNVMILGPTQSPYEGGVFKLELFLPEEYPMAAPKVRFLTKIYHPNIDKLGRICLDILKDKWSPALQIRTVLLSIQALLSAPNPDDPLSENIAKHWKSNEAEAVETAKEWTQLYASGA

SEQ ID NO: 12070 - protein, 120 aa, Glycine max
MRYFNVMILGPTQSPYEGGVFKLELFLPEEYPMAAPKVRFLTKIYHPNIDKLGRICLDILKDKWSPALQIRTVLLSIQALLSAPNPDDPLSENIAKHWKSNEAEAVETAKEWTQLYASGA

SEQ ID NO: 12071 - DNA, 3344 bp, Glycine max
taaaaataaggacgcaggcaaatgtatgcatttggcataagtatataagagagagggagtagtactactgcaaagcaaaatcagagagacatgagaagctgtgtgtgctacacgctattattgtttattttcttcatatggctgcgcgtggcaacgtgctcttcgttcactgacatggaatcgcttctgaagctgaaggactccatgaaaggagataaagccaaagacgacgctctccatgactggaagtttttcccctcgctttctgcacactgtttcttttcaggcgtaaaatgcgaccgagaacttcgagtcgttgctatcaacgtctcgtttgttcctctcttcggtcaccttccgccggagatcggacaattggacaaactcgagaacctcaccgtctcgcagaacaacctcaccggcgtacttcccaaggagctcgccgccctcacttccctcaagcacctcaacatctctcacaacgtcttctccggccatttccccggccaaattatccttccgatgacgaaactggaggtcctcgacgtctacgacaacaacttcaccggaccgcttcccgtagagttggtgaaactggagaaattaaaatacctgaagctcgacggaaactatttctccggcagcataccggagagttactcggagtttaagagcttggagtttttaagcttaagcaccaatagcttatcggggaagattcccaagagtttgtcgaagttgaagacgctgaggtacctaaaactcggatacaacaacgcttacgaaggtggaattccaccggagtttggcagcatgaaatctctgagataccttgacctctctagctgcaacctcagcggcgagattccaccgagccttgcaaatctgacaaaccttgacacgttgttcctgcaaattaacaacctcaccggaaccattccgtcggagctctccgctatggtgagcctcatgtcacttgatctctccatcaacgacctcaccggtgagataccgatgagcttctcacagcttagaaacctcactctcatgaacttcttccaaaacaatcttcgcggctcagttccgtccttcgtcggcgagcttccgaatctggaaacgctgcagctctgggataacaacttctccttcgtgctacctccgaaccttgggcaaaacggcaagttaaagttcttcgacgtcatcaagaatcacttcaccgggttgatccctcgagatttgtgtaagagtgggaggttacaaacgatcatgatcacagataacttcttccgcggtccaatccctaacgagattggtaactgcaagtctctcaccaagatccgagcctccaataactaccttaacggcgtggttccgtcagggattttcaaactaccttctgtcacgataatcgagctggccaataaccgttttaacggcgaactgcctcctgagatttccggcgaatccctggggattctcactctttccaacaacttattcagtgggaaaattcccccagcgttgaagaacttgagggcactgcagactctctcacttgacgcaaacgagttcgttggagaaataccgggagaggtttttgacctaccgatgctgactgtggtcaacataagcggcaacaatctaaccggaccaatcccaacgacgttgactcgctgcgtttcactcaccgccgtggacctcagccggaacatgcttgaagggaagattccgaagggaatcaaaaacctcacggacttgagcattttcaatgtgtcgataaaccaaatttcagggccagtccctgaggagattcgcttcatgttgagtctcaccacattggatctatccaacaacaatttcatcggcaaggtcccaaccgggggtcagttcgcggtcttcagcgagaaatcctttgcagggaaccccaacctctgtacctcccactcttgcccgaattcctcgttgtaccctgacgacgccttgaagaagaggcgcggcccttggagtttgaaatccacgagggtgatagtcatcgtgattgcactgggcacagccgcgctgctggtggcggtgacggtgtacatgatgaggaggaggaagatgaaccttgcgaagacgtggaagctgacggcgttccagcggctgaacttcaaagccgaggacgtggtggagtgtctgaaggaggagaacataataggaaaaggaggggcagggatcgtgtaccgcgggtccatgccaaacggaacagacgtggcgataaagcggttggttggggcggggagtggaaggaacgattacggattcaaagcggagatagaaacgctggggaagataaggcacaggaacataatgaggcttttaggttacgtgtcgaacaaggagacgaacttgctgctgtatgagtacatgccaaatgggagcttaggggaatggctgcatggtgccaaaggagggcacttgaagtgggaaatgaggtacaagattgcggtggaagctgctaagggactgtgctatttgcaccatgattgttcccctcttatcattcacagggatgtcaagtctaataatatattgctggatggggacttggaggcccatgttgctgattttggccttgccaagttcttgtacgaccctggcgcctctcagtccatgtcctccattgctggctcctacggctacattgctccagagtatgcatacactttgaaagtggacgagaaaagtgatgtgtacagctttggcgttgtgctgctggagctgataatagggaggaagccagtgggagagtttggagacggggtggacatcgttggatgggtcaacaaaacgagattggagctcgctcagccgtcggatgcagcgttggtgttggcagtggtggacccaaggttgagtgggtatccattgacaagtgtcatttacatgttcaacatagctatgatgtgtgttaaagaaatggggcccgctaggcctaccatgagggaagtcgttcatatgctctcagagcctcctcactctgctactcacactcacaacctaattaatctctagttaattaagttatttgctcatcgatccagaatcacttcttttcaaaataaattaacacagacgaaaactgtaggaataactttcatctgttgtttgtcggaagtgaaacaacgaatcaaatgtgaactatgtatcaaatgtaagataggttttaattaattttgtaatattggtgtcaactgtcaactgtcaagtaattcgaaggattttccccattgtgcatttatcaagaatttttgtagaaaagacttgttgtttataaaatatttgtgactgctactgtttcttct

SEQ ID NO: 12072 - protein, 987 aa, Glycine max
MRSCVCYTLLLFIFFIWLRVATCSSFTDMESLLKLKDSMKGDKAKDDALHDWKFFPSLSAHCFFSGVKCDRELRVVAINVSFVPLFGHLPPEIGQLDKLENLTVSQNNLTGVLPKELAALTSLKHLNISHNVFSGHFPGQIILPMTKLEVLDVYDNNFTGPLPVELVKLEKLKYLKLDGNYFSGSIPESYSEFKSLEFLSLSTNSLSGKIPKSLSKLKTLRYLKLGYNNAYEGGIPPEFGSMKSLRYLDLSSCNLSGEIPPSLANLTNLDTLFLQINNLTGTIPSELSAMVSLMSLDLSINDLTGEIPMSFSQLRNLTLMNFFQNNLRGSVPSFVGELPNLETLQLWDNNFSFVLPPNLGQNGKLKFFDVIKNHFTGLIPRDLCKSGRLQTIMITDNFFRGPIPNEIGNCKSLTKIRASNNYLNGVVPSGIFKLPSVTIIELANNRFNGELPPEISGESLGILTLSNNLFSGKIPPALKNLRALQTLSLDANEFVGEIPGEVFDLPMLTVVNISGNNLTGPIPTTLTRCVSLTAVDLSRNMLEGKIPKGIKNLTDLSIFNVSINQISGPVPEEIRFMLSLTTLDLSNNNFIGKVPTGGQFAVFSEKSFAGNPNLCTSHSCPNSSLYPDDALKKRRGPWSLKSTRVIVIVIALGTAALLVAVTVYMMRRRKMNLAKTWKLTAFQRLNFKAEDVVECLKEENIIGKGGAGIVYRGSMPNGTDVAIKRLVGAGSGRNDYGFKAEIETLGKIRHRNIMRLLGYVSNKETNLLLYEYMPNGSLGEWLHGAKGGHLKWEMRYKIAVEAAKGLCYLHHDCSPLIIHRDVKSNNILLDGDLEAHVADFGLAKFLYDPGASQSMSSIAGSYGYIAPEYAYTLKVDEKSDVYSFGVVLLELIIGRKPVGEFGDGVDIVGWVNKTRLELAQPSDAALVLAVVDPRLSGYPLTSVIYMFNIAMMCVKEMGPARPTMREVVHMLSEPPHSATHTHNLINL

SEQ ID NO: 12073 - protein, 959 aa, Glycine max
MESLLKLKDSMKGDKAKDDALHDWKFFPSLSAHCFFSGVKCDRELRVVAINVSFVPLFGHLPPEIGQLDKLENLTVSQNNLTGVLPKELAALTSLKHLNISHNVFSGHFPGQIILPMTKLEVLDVYDNNFTGPLPVELVKLEKLKYLKLDGNYFSGSIPESYSEFKSLEFLSLSTNSLSGKIPKSLSKLKTLRYLKLGYNNAYEGGIPPEFGSMKSLRYLDLSSCNLSGEIPPSLANLTNLDTLFLQINNLTGTIPSELSAMVSLMSLDLSINDLTGEIPMSFSQLRNLTLMNFFQNNLRGSVPSFVGELPNLETLQLWDNNFSFVLPPNLGQNGKLKFFDVIKNHFTGLIPRDLCKSGRLQTIMITDNFFRGPIPNEIGNCKSLTKIRASNNYLNGVVPSGIFKLPSVTIIELANNRFNGELPPEISGESLGILTLSNNLFSGKIPPALKNLRALQTLSLDANEFVGEIPGEVFDLPMLTVVNISGNNLTGPIPTTLTRCVSLTAVDLSRNMLEGKIPKGIKNLTDLSIFNVSINQISGPVPEEIRFMLSLTTLDLSNNNFIGKVPTGGQFAVFSEKSFAGNPNLCTSHSCPNSSLYPDDALKKRRGPWSLKSTRVIVIVIALGTAALLVAVTVYMMRRRKMNLAKTWKLTAFQRLNFKAEDVVECLKEENIIGKGGAGIVYRGSMPNGTDVAIKRLVGAGSGRNDYGFKAEIETLGKIRHRNIMRLLGYVSNKETNLLLYEYMPNGSLGEWLHGAKGGHLKWEMRYKIAVEAAKGLCYLHHDCSPLIIHRDVKSNNILLDGDLEAHVADFGLAKFLYDPGASQSMSSIAGSYGYIAPEYAYTLKVDEKSDVYSFGVVLLELIIGRKPVGEFGDGVDIVGWVNKTRLELAQPSDAALVLAVVDPRLSGYPLTSVIYMFNIAMMCVKEMGPARPTMREVVHMLSEPPHSATHTHNLINL

SEQ ID NO: 12074 - protein, 949 aa, Glycine max
MKGDKAKDDALHDWKFFPSLSAHCFFSGVKCDRELRVVAINVSFVPLFGHLPPEIGQLDKLENLTVSQNNLTGVLPKELAALTSLKHLNISHNVFSGHFPGQIILPMTKLEVLDVYDNNFTGPLPVELVKLEKLKYLKLDGNYFSGSIPESYSEFKSLEFLSLSTNSLSGKIPKSLSKLKTLRYLKLGYNNAYEGGIPPEFGSMKSLRYLDLSSCNLSGEIPPSLANLTNLDTLFLQINNLTGTIPSELSAMVSLMSLDLSINDLTGEIPMSFSQLRNLTLMNFFQNNLRGSVPSFVGELPNLETLQLWDNNFSFVLPPNLGQNGKLKFFDVIKNHFTGLIPRDLCKSGRLQTIMITDNFFRGPIPNEIGNCKSLTKIRASNNYLNGVVPSGIFKLPSVTIIELANNRFNGELPPEISGESLGILTLSNNLFSGKIPPALKNLRALQTLSLDANEFVGEIPGEVFDLPMLTVVNISGNNLTGPIPTTLTRCVSLTAVDLSRNMLEGKIPKGIKNLTDLSIFNVSINQISGPVPEEIRFMLSLTTLDLSNNNFIGKVPTGGQFAVFSEKSFAGNPNLCTSHSCPNSSLYPDDALKKRRGPWSLKSTRVIVIVIALGTAALLVAVTVYMMRRRKMNLAKTWKLTAFQRLNFKAEDVVECLKEENIIGKGGAGIVYRGSMPNGTDVAIKRLVGAGSGRNDYGFKAEIETLGKIRHRNIMRLLGYVSNKETNLLLYEYMPNGSLGEWLHGAKGGHLKWEMRYKIAVEAAKGLCYLHHDCSPLIIHRDVKSNNILLDGDLEAHVADFGLAKFLYDPGASQSMSSIAGSYGYIAPEYAYTLKVDEKSDVYSFGVVLLELIIGRKPVGEFGDGVDIVGWVNKTRLELAQPSDAALVLAVVDPRLSGYPLTSVIYMFNIAMMCVKEMGPARPTMREVVHMLSEPPHSATHTHNLINL

SEQ ID NO: 12075 - DNA, 529 bp, Glycine max
caagctgcaagcacacaagggatacattctcaaatgtcttttatcacccgagttctgtgaaccccacaggtacttggcaactgcatcttctgatcatactgtcaaaatatggaatgttgatggttttaccctagaaaaaactctcataggtcaccaacgctgggtgtgggactgtgtcttctctgtggatggtgcctaccttattacagcttcctctgatacaactgcaaggctctggtctatgtcaactggtgaagatattaaagtttaccaagggcatcataaagctacaatttgctgtgccctacacgatggggctgaacccgcagcttcctgagatagtggtcataaagttttttgttttttccatcagatacatcttgttttgaaaataataatctgcctctctcggtctttgaagttttctatagttctttgactgtctgcacgtttagtcaataagtctttaatagaactggaaatcctagtcggggatgaaagatggcttttgtcctgttatcaggacctc

SEQ ID NO: 12076 - protein, 111 aa, Glycine max
KLQAHKGYILKCLLSPEFCEPHRYLATASSDHTVKIWNVDGFTLEKTLIGHQRWVWDCVFSVDGAYLITASSDTTARLWSMSTGEDIKVYQGHHKATICCALHDGAEPAAS

SEQ ID NO: 12077 - protein, 66 aa, Glycine max
MVPTLLQLPLIQLQGSGLCQLVKILKFTKGIIKLQFAVPYTMGLNPQLPEIVVIKFFVFSIRYILF

SEQ ID NO: 12078 - DNA, 1950 bp, Glycine max
  misc_feature (604)..(604): n is a, c, g, or t
  misc_feature (614)..(615): n is a, c, g, or t
  misc_feature (636)..(638): n is a, c, g, or t
  misc_feature (1896)..(1896): n is a, c, g, or t
gaacgcaaagaaaagaagcactcttgtgttttgtctctctacctctctcactactctatagtattctctcaatttctgttcacattctaccaaaatgagtggcttgagtttcaggggcttcacatacatgctcctcattgcatttctcatttggtccttcaattttgaagcctgcattgcaagaagaggcaagcactggagacaaagcagggatgtctcagcttctgtgtacaagaaaaaaggcaaaaattatggcaatgctcacaacaagtaccatggtggaggatcaaaatcaaagcctccatcatcacacaaaggcacaccaacattaccaaaggctccgccacaacataaaaacactccctcaccaccatatccaacaccaccaagtgatgatacccccacaactccaccaccaaaggcttacaatggtggtggccattcttccgccaccaccttcaatgtgctagattttggagccaagggagatggaaaatctgatgacaccaaggcatttcaagaggcttgggctgaagcttgtaaaattgaatcatcaaccatgctcgtcccagcagactacgcattctttgtagggcccatttcnttctcgggcnnatactgtaaacccagcatcgnnntccagcttgatggcaccattgttgcaccaacaagccccaaagcttggggcaaaggacttctacagtggttggaattttccaagttggtaggaattaccatccaaggaaatggcatcattgatggaagaggctcagtgtggtggcaagataatcaatatgatgatcctatagatgatgaagaaaagctcattgtccctttaaaccacacagtagggagcccaagtcccccactgccgattcaaagtgagatgggaggaaaaatgccatccgtcaagccaactgcattgcggttctatgggagttttaatccaacagttacaggcattacaattcaaaatagtccacaatgccacctcaagtttgacaactgtaatggggtcatggtccatgatgtgaccatatcatctcctggggacagtcctaacacagatggaattcaccttcagaactccaaagatgtgttgatatacagcagctctatggcctgcggagatgactgtatttcgatacaaactggatgctcgaacatatatgtacacaatgtcaactgtggaccagggcatggaatcagcattggaagtctaggaaaggataacaccagagcctgtgtctccaacattactgtcagggatgtcaacatgcacaacacaatgaatggtgtcagaatcaaaacatggcagggtggatcaggttctgtacaaggagtgctattctcaaacatacaagtttctgaagttgaactcccaattgtgattgatcaattctactgcgacaaaagaacctgcaaaaaccaaacgtcagctgtgtctcttgccggaatcaactatgaaaggataagggggacatacaccgttaagccagttcactttgcctgcagtgataacctaccttgtgtagatgtttctctaacctctgttgagttaaaaccaattcaagaacaataccatctatacaatcctttctgctggcagacttatggtgaattgaaaactccaactgtcccaccaattgattgcctacaaattgggaagccaactaacaatcggattcagacagatcatgatttatgttgatcagatatgaattcaagtgcttagcctgctagataaatatgtatattgtaaaaatcctactatataggaaattttcttcattagggtgatactgatttatcattgtgagaatataccggccctgctattagcaagaggtcgagaatagtataataggcagtcttctagctgtggcatattgcaangagtggtgagatattatacaagttttagcatctatgaataaaatatctttattt

SEQ ID NO: 12079 - protein, 538 aa, Glycine max
  misc_feature (170)..(170): Xaa can be any naturally occurring amino acid
  misc_feature (174)..(174): Xaa can be any naturally occurring amino acid
  misc_feature (181)..(182): Xaa can be any naturally occurring amino acid
MSGLSFRGFTYMLLIAFLIWSFNFEACIARRGKHWRQSRDVSASVYKKKGKNYGNAHNKYHGGGSKSKPPSSHKGTPTLPKAPPQHKNTPSPPYPTPPSDDTPTTPPPKAYNGGGHSSATTFNVLDFGAKGDGKSDDTKAFQEAWAEACKIESSTMLVPADYAFFVGPIXFSGXYCKPSIXXQLDGTIVAPTSPKAWGKGLLQWLEFSKLVGITIQGNGIIDGRGSVWWQDNQYDDPIDDEEKLIVPLNHTVGSPSPPLPIQSEMGGKMPSVKPTALRFYGSFNPTVTGITIQNSPQCHLKFDNCNGVMVHDVTISSPGDSPNTDGIHLQNSKDVLIYSSSMACGDDCISIQTGCSNIYVHNVNCGPGHGISIGSLGKDNTRACVSNITVRDVNMHNTMNGVRIKTWQGGSGSVQGVLFSNIQVSEVELPIVIDQFYCDKRTCKNQTSAVSLAGINYERIRGTYTVKPVHFACSDNLPCVDVSLTSVELKPIQEQYHLYNPFCWQTYGELKTPTVPPIDCLQIGKPTNNRIQTDHDLC

SEQ ID NO: 12080 - protein, 527 aa, Glycine max
  misc_feature (159)..(159): Xaa can be any naturally occurring amino acid
  misc_feature (163)..(163): Xaa can be any naturally occurring amino acid
  misc_feature (170)..(171): Xaa can be any naturally occurring amino acid
MLLIAFLIWSFNFEACIARRGKHWRQSRDVSASVYKKKGKNYGNAHNKYHGGGSKSKPPSSHKGTPTLPKAPPQHKNTPSPPYPTPPSDDTPTTPPPKAYNGGGHSSATTFNVLDFGAKGDGKSDDTKAFQEAWAEACKIESSTMLVPADYAFFVGPIXFSGXYCKPSIXXQLDGTIVAPTSPKAWGKGLLQWLEFSKLVGITIQGNGIIDGRGSVWWQDNQYDDPIDDEEKLIVPLNHTVGSPSPPLPIQSEMGGKMPSVKPTALRFYGSFNPTVTGITIQNSPQCHLKFDNCNGVMVHDVTISSPGDSPNTDGIHLQNSKDVLIYSSSMACGDDCISIQTGCSNIYVHNVNCGPGHGISIGSLGKDNTRACVSNITVRDVNMHNTMNGVRIKTWQGGSGSVQGVLFSNIQVSEVELPIVIDQFYCDKRTCKNQTSAVSLAGINYERIRGTYTVKPVHFACSDNLPCVDVSLTSVELKPIQEQYHLYNPFCWQTYGELKTPTVPPIDCLQIGKPTNNRIQTDHDLC

SEQ ID NO: 12081 - protein, 383 aa, Glycine max
  misc_feature (15)..(15): Xaa can be any naturally occurring amino acid
  misc_feature (19)..(19): Xaa can be any naturally occurring amino acid
  misc_feature (26)..(27): Xaa can be any naturally occurring amino acid
MLVPADYAFFVGPIXFSGXYCKPSIXXQLDGTIVAPTSPKAWGKGLLQWLEFSKLVGITIQGNGIIDGRGSVWWQDNQYDDPIDDEEKLIVPLNHTVGSPSPPLPIQSEMGGKMPSVKPTALRFYGSFNPTVTGITIQNSPQCHLKFDNCNGVMVHDVTISSPGDSPNTDGIHLQNSKDVLIYSSSMACGDDCISIQTGCSNIYVHNVNCGPGHGISIGSLGKDNTRACVSNITVRDVNMHNTMNGVRIKTWQGGSGSVQGVLFSNIQVSEVELPIVIDQFYCDKRTCKNQTSAVSLAGINYERIRGTYTVKPVHFACSDNLPCVDVSLTSVELKPIQEQYHLYNPFCWQTYGELKTPTVPPIDCLQIGKPTNNRIQTDHDLC

SEQ ID NO: 12082 - DNA, 1694 bp, Glycine max
agcagaatagtgagagtgagagatggatcagtttttgtggagggtgttgcctttgcttacaatccttgtttcctttggagtgttcttctacttgcaggattcttacacagcacagttatttcctctcataaagttaccgcgggataagtgcagccttcttccccatcgccacttctggatatccagcaaacgtattgtgaccccacaagggatcatttctggttcagtggagataaatgatgggaaaataatatctgtcgttgagggacatgctattcaggggaagcctaagcaagaagaagtaattgattatggagatgctgttatcatgcctggcttgattgatgtgcacgtacatcttaatgagcctggaagaactgagtgggaaggatttgatactggtaccagagctgctgctgctggtggtgtaaccacagtggttgacatgcctctaaactgttaccctacaactgtgtctaaggaaaaactgaaacttaagcttgatgctgcagaggataaaatctatgttgatgttggtatgaccaacaatctctgccttagcatacaattaactgagttactgaggtattttttataatcttatacaggattttggggaggcctaatccctgaaaatgcacttaatacaagtattcttgatggtctcttaagtgctggtgttcttggtgtgaagtcttttatgtgtccttcaggaatagatgacttccccatggctactattgaccatatcaaggcaggattgtctgtgttggcaaaatatagaaggcctatagttgtgcatgctgagattcaacaagattttgaaaatcatttggagcttaatgaggataaccttgatccacgtgcttacttgacctatctcaataccaggccaccttcatgggaggaggcagccattaaacaacttgtaagtgttacgaaggacacaagaaaaggtggccctttagaaggagcacatgttcacatcgtccacttgtctgattcaagtgcttccttagatctgattaaggaagcaaaaagtcatggtgacagcataagtgttgagacttgtcctcattacttagctttcacgtctgaagagataccaaatggggatactcgttttaagtgttccccacccattcgtgatgcatacaacaaagacaaattatgggaggctgtattagagggacacattgacctattaagtactgatcattcaccaactgtgcctgaactcaagcttatggaggagggtgacttcttaaaagcttgggggggcatatcatctttgcagtttaatcttccagtgacgtggtcatatgggaagaaatatggacttactctggaacaattgtctttattgtggagcaagaaacctgcaacactggcggggttagaatcaaaggggaccattgcagttggaaaccatgcagatattgtagtttggcaaccagagctggagtttgacctggatgatgattatcctgttttcatcaaacattctgtatgtttaccctgttattaaactcattctgtctatgactttctttgttcttaattgtaagttaaacttaaaaccatttcaaactgtttatatggtggcttcttgctaatgttttcttgtttgtcaaattgcagttgatcagaaaaatagatgctagaggaaccaaattgttcctcccactacttct

SEQ ID NO: 12083 - protein, 275 aa, Glycine max
MCPSGIDDFPMATIDHIKAGLSVLAKYRRPIVVHAEIQQDFENHLELNEDNLDPRAYLTYLNTRPPSWEEAAIKQLVSVTKDTRKGGPLEGAHVHIVHLSDSSASLDLIKEAKSHGDSISVETCPHYLAFTSEEIPNGDTRFKCSPPIRDAYNKDKLWEAVLEGHIDLLSTDHSPTVPELKLMEEGDFLKAWGGISSLQFNLPVTWSYGKKYGLTLEQLSLLWSKKPATLAGLESKGTIAVGNHADIVVWQPELEFDLDDDYPVFIKHSVCLPCY

SEQ ID NO: 12084 - protein, 265 aa, Glycine max
MATIDHIKAGLSVLAKYRRPIVVHAEIQQDFENHLELNEDNLDPRAYLTYLNTRPPSWEEAAIKQLVSVTKDTRKGGPLEGAHVHIVHLSDSSASLDLIKEAKSHGDSISVETCPHYLAFTSEEIPNGDTRFKCSPPIRDAYNKDKLWEAVLEGHIDLLSTDHSPTVPELKLMEEGDFLKAWGGISSLQFNLPVTWSYGKKYGLTLEQLSLLWSKKPATLAGLESKGTIAVGNHADIVVWQPELEFDLDDDYPVFIKHSVCLPCY

SEQ ID NO: 12085 - protein, 191 aa, Glycine max
MDQFLWRVLPLLTILVSFGVFFYLQDSYTAQLFPLIKLPRDKCSLLPHRHFWISSKRIVTPQGIISGSVEINDGKIISVVEGHAIQGKPKQEEVIDYGDAVIMPGLIDVHVHLNEPGRTEWEGFDTGTRAAAAGGVTTVVDMPLNCYPTTVSKEKLKLKLDAAEDKIYVDVGMTNNLCLSIQLTELLRYFL

SEQ ID NO: 12086 - DNA, 1669 bp, Glycine max
tggagtaactcggttatatctcgaaccagtacggtatgtaggcctttatactcctttctgatgctgtatggaatatgtcaatgtaacatatacgcttcatcttgtgttatttatatgttaaatgaagcatatattcttcatcttgtgtaatttatatgttaaatgtagcatatattctttcatcttgtgtaatttatatgttgacttttagtgatgtatgttttacttgtctatttgtttgtgtatctgttgcctgtatgtactgtcatcttgggtgagttcacttttttttatttgtggttacaatttttctttttgcagaatcgtcagagaaatccatctatgtctggtggttattctcagcaaggttaccaagctaggccaccgactagctggggtccccctgctgctccaatgcaacaatctggttatggctatgtgcagccaggagcatactctggtccaccccagtataacgtgcctcagcaaccatatgcaggctatcctccccagtcatctggtggatattccgccgccaactgggatcagtccactgccccacagcagcagtctgcccatgccgggtatgattactatagtcaacagcagcagcagcaaaatcctgcacctccatccgatgggactgcttacaattacagccaaccaccttcctctggttatagccaaccggggcagggctatgctcaggatggctatggtggatatcatgcgccacctcaatcagggtatggtcagccaccatcatatgatcagcagcaaggttatagctcagctgctagctatggtagcaacccagccccagagggccacactgccaattacggatcccaaggggattcaacccaagctccacctgcccagcctccaagtcaaggttatgggactggccaacaacctagcccaaatgctgccaactatgcaccacaagctcaaccaggttatggggtgcccccaacctcccagccggctacttatggcagtcaacctccagcacagtctggttatggatctggctatggaccccctcagacccaaaagcctagtggcacacctcctgtgtatggacaatcccaatcacctaacacagcagggggatatggtcaatctggtcatttgcaatctggatatcctcctttcccagcctccaccttcgggaggatatgcccaaccagaatcaggttctcaaaaagctccaccatctggttatggtggtgcagtgcagccagggtatggtcccccgtcatatggtggtgccccagcaggtggtcaacctggttatggccaggctcctccatcgtacagcaacagttcttatggtgctgctggttacgctcagcctccagtatattccagcgatggtaatgtaggtgggactactcgtggagcctatgatggagcacctgcacagcctgttcaacaggctgctaaaacgtctcctcagttgatatagtataggttgtcaaatttggatctttctgaattgtctgttttaattttattgtagtagtgacgcatttacatagctttgcagtgttgagatggatgcattatatacactttattctgttgtcttaaattacgaattcctttgtatgcgtgttactattccgagaaaattaaagcatgagttggaataccaactaaagtc

SEQ ID NO: 12087 - protein, 417 aa, Glycine max
MFYLSICLCICCLYVLSSWVSSLFFICGYNFSFCRIVREIHLCLVVILSKVTKLGHRLAGVPLLLQCNNLVMAMCSQEHTLVHPSITCLSNHMQAILPSHLVDIPPPTGISPLPHSSSLPMPGMITIVNSSSSKILHLHPMGLLTITANHLPLVIANRGRAMLRMAMVDIMRHLNQGMVSHHHMISSKVIAQLLAMVATQPQRATLPITDPKGIQPKLHLPSLQVKVMGLANNLAQMLPTMHHKLNQVMGCPQPPSRLLMAVNLQHSLVMDLAMDPLRPKSLVAHLLCMDNPNHLTQQGDMVNLVICNLDILLSQPPPSGGYAQPESGSQKAPPSGYGGAVQPGYGPPSYGGAPAGGQPGYGQAPPSYSNSSYGAAGYAQPPVYSSDGNVGGTTRGAYDGAPAQPVQQAAKTSPQLI

SEQ ID NO: 12088 - protein, 389 aa, Glycine max
MYVLLVYLFVYLLPVCTVILGEFTFFYLWLQFFFLQNRQRNPSMSGGYSQQGYQARPPTSWGPPAAPMQQSGYGYVQPGAYSGPPQYNVPQQPYAGYPPQSSGGYSAANWDQSTAPQQQSAHAGYDYYSQQQQQQNPAPPSDGTAYNYSQPPSSGYSQPGQGYAQDGYGGYHAPPQSGYGQPPSYDQQQGYSSAASYGSNPAPEGHTANYGSQGDSTQAPPAQPPSQGYGTGQQPSPNAANYAPQAQPGYGVPPTSQPATYGSQPPAQSGYGSGYGPPQTQKPSGTPPVYGQSQSPNTAGGYGQSGHLQSGYPPFPASTFGRICPTRIRFSKSSTIWLWWCSAARVWSPVIWWCPSRWSTWLWPGSSIVQQQFLWCCWLRSASSIFQRW

SEQ ID NO: 12089 - protein, 346 aa, Glycine max
MSGGYSQQGYQARPPTSWGPPAAPMQQSGYGYVQPGAYSGPPQYNVPQQPYAGYPPQSSGGYSAANWDQSTAPQQQSAHAGYDYYSQQQQQQNPAPPSDGTAYNYSQPPSSGYSQPGQGYAQDGYGGYHAPPQSGYGQPPSYDQQQGYSSAASYGSNPAPEGHTANYGSQGDSTQAPPAQPPSQGYGTGQQPSPNAANYAPQAQPGYGVPPTSQPATYGSQPPAQSGYGSGYGPPQTQKPSGTPPVYGQSQSPNTAGGYGQSGHLQSGYPPFPASTFGRICPTRIRFSKSSTIWLWWCSAARVWSPVIWWCPSRWSTWLWPGSSIVQQQFLWCCWLRSASSIFQRW

SEQ ID NO: 12090 - DNA, 1995 bp, Glycine max
atcttataggatctatctaaataaaattgtctaatgttttaattcagccaaaaaaataaaagttgaatgtgaaaggagggctcgaagaggcagcaaggagagaagaatcttatccacacacatccacaacgaaggagaagatcttagtctcatcttagcgacacaacataacacaaacacaacacaatacacaaaagcagtaaccagagaaaatggctagtgtcttttctgcatgttcaggttctgctgttcttttctacagcagaaactcctttccctcaaaaggatctttcattcacctcaaaaggcctctctctgccaactgtgtagcttctttggggactgaggtatcagtgtctccagcagtagacactttctggcagtggcttaaagaagagggtgttgtctctgccaagaccccagtgaagcctagtgtggtgccagaaggcctaggattggttgcactcaaagacatttctaggaatgaggttgtcttgcaggttcctaagaggctgtggattaaccctgatgctgtggctgcttcagagattgggaaggtgtgcattggattgaagccttggttggctgttgcattgtttctgataagagagaggtcaaggagtaattctctttggaagcattacttcagcgttctgcctaaggaaactgactctactatatattggtcagaggaggagctctcagagctacaagggactcaacttctgaacacaactaggagtgtgaaacaatatgtggagaatgaatataggagattggaggaagaaattatactccctaacaagaagcttttcccttctcctcttacacttgatgacttcttctgggcatttggaattctaagatcaagggcattttcccgccttcgcaacgaaaatctagttgtgattccatttgctgacttcataaatcatagtgccagagtaacaacagaagatcatgcttatgaaattaaaggagcagcaggtcttttctcctgggactacctattttcccttaggagccctctttctctcaaggctggggatcaggtatatatccaatatgatttgaataaaagcaatgccgagttggctctggactacggtttcatcgaaccaaatgcagatcggaacgcatacaccttgacactgcagatatctgagtcagaccctttttttggtgacaaacttgatattgctgagtccaatggttttggtgagacagcatactttgacatcttctacagccgccctcttccaccagggttgcttccatatctgagactggtagctctagggggcactgatgcattcctgttggagtcaatatttagaaactccatctggggtcatcttgaattgcctgtgagccgcgacaatgaggagctaatatgcagagtggttagagagacctgcaaaactgcccttgctggttatcatacaaccattgaagaggatcaaaagttgaaagaagcaaagctagattcaaggcatgcaatagcagttggaattcgagaaggggagaagcagctcctgcagcaaattgatgagaccttcaaggagaaagaattggaattggaccagttagaatattatcaagaaaggaggctcaaggaccttggactttgtggggaaaatggtgatatccttggagaccttggaaaattcttctaggaagcaaaagcagaagcagtacacaggacacgctttttgtctacatttcaaaggacgagaaaacataaactcttggtaaataacaagaggaggcttccaagacaaatccatgccatgtattcaattgatctttgaagaggatcataatcaagtttctgactcaccccattttattacaacctattagtctgtaaagaggaagaagtagtgaacttttgaatgcctgatatgaatttatggctgtgacatgaactattgttatataattatacataacccaaacttggaaaattaaataaataaattaaggatgaaattg

SEQ ID NO: 12091 - protein, 487 aa, Glycine max
MASVFSACSGSAVLFYSRNSFPSKGSFIHLKRPLSANCVASLGTEVSVSPAVDTFWQWLKEEGVVSAKTPVKPSVVPEGLGLVALKDISRNEVVLQVPKRLWINPDAVAASEIGKVCIGLKPWLAVALFLIRERSRSNSLWKHYFSVLPKETDSTIYWSEEELSELQGTQLLNTTRSVKQYVENEYRRLEEEIILPNKKLFPSPLTLDDFFWAFGILRSRAFSRLRNENLVVIPFADFINHSARVTTEDHAYEIKGAAGLFSWDYLFSLRSPLSLKAGDQVYIQYDLNKSNAELALDYGFIEPNADRNAYTLTLQISESDPFFGDKLDIAESNGFGETAYFDIFYSRPLPPGLLPYLRLVALGGTDAFLLESIFRNSIWGHLELPVSRDNEELICRVVRETCKTALAGYHTTIEEDQKLKEAKLDSRHAIAVGIREGEKQLLQQIDETFKEKELELDQLEYYQERRLKDLGLCGENGDILGDLGKFF

SEQ ID NO: 12092 - DNA, 1146 bp, Glycine max
agtggagaatctgagaaggattgctctgcggaggataaactgaactcaacatggagggaagctttcatgaaggcatacaaggctatggacaaagagctcaggtctcatccgaatctggattgcttctgtagtgggagcactgctgtgactatagtgaagcagggttcaaatctgttcatgggctatatcggggattctcgagcaatcatgggatccaaggatagcaatgactccatggtggctattcagttgactgttgatttaaagcctgatttgccaagggaagcagagagaattaagaagtgcagaggtagggtatttgctttgcaagatgagcctgaagtgcctagggtgtggttgccttttgatgatgtgccgggattagccatggctagagcatttggtgatttctgcttgaaggagtatggtgtgatttctatacctgaattttctcaccggcagcttacagacagagatcagttcattgttcttgcctcagatggggtgtgggatgttttaagcaacgaggaggtggttgagatagtatcatcagcgccaacgcgatcatcagcggcaagaattctggtagattctgctgctagggagtggaaactcaaataccctacatcaaagatggatgactgtgctgtagtatgcttatttttggatgggaaaatggactcagaatctgattatgaggaacaaggcttttcttctgcaaccatccaaagcaaccattcaggtaaccccattgagtcagatgatggacaaaaatctgagccatcattgcaaaggaacttcactgtgagatcctcagaggaaaatgagacaaatggagcactatctgttgatgttgttgaagatgcaacatcatcagctgatgatcaaaactggtcaggtttggaaggggtcactcgtgtaaactcacttgtccaacttcctagattttctgaggaaaggccaaaatcttgaattcgtttgtttcatgaggactgtttattgtaatacatggcacaacactgaattcaagaaacaaaaattttctgcaaggggtattattttgatgcccttttgttggctaattacttgtagaaaactaagcatcttcaatggtgtaactggtggagtagctaacttatttttggt

SEQ ID NO: 12093 - protein, 323 aa, Glycine max
SGESEKDCSAEDKLNSTWREAFMKAYKAMDKELRSHPNLDCFCSGSTAVTIVKQGSNLFMGYIGDSRAIMGSKDSNDSMVAIQLTVDLKPDLPREAERIKKCRGRVFALQDEPEVPRVWLPFDDVPGLAMARAFGDFCLKEYGVISIPEFSHRQLTDRDQFIVLASDGVWDVLSNEEVVEIVSSAPTRSSAARILVDSAAREWKLKYPTSKMDDCAVVCLFLDGKMDSESDYEEQGFSSATIQSNHSGNPIESDDGQKSEPSLQRNFTVRSSEENETNGALSVDVVEDATSSADDQNWSGLEGVTRVNSLVQLPRFSEERPKS

SEQ ID NO: 12094 - protein, 301 aa, Glycine max
MKAYKAMDKELRSHPNLDCFCSGSTAVTIVKQGSNLFMGYIGDSRAIMGSKDSNDSMVAIQLTVDLKPDLPREAERIKKCRGRVFALQDEPEVPRVWLPFDDVPGLAMARAFGDFCLKEYGVISIPEFSHRQLTDRDQFIVLASDGVWDVLSNEEVVEIVSSAPTRSSAARILVDSAAREWKLKYPTSKMDDCAVVCLFLDGKMDSESDYEEQGFSSATIQSNHSGNPIESDDGQKSEPSLQRNFTVRSSEENETNGALSVDVVEDATSSADDQNWSGLEGVTRVNSLVQLPRFSEERPKS

SEQ ID NO: 12095 - protein, 295 aa, Glycine max
MDKELRSHPNLDCFCSGSTAVTIVKQGSNLFMGYIGDSRAIMGSKDSNDSMVAIQLTVDLKPDLPREAERIKKCRGRVFALQDEPEVPRVWLPFDDVPGLAMARAFGDFCLKEYGVISIPEFSHRQLTDRDQFIVLASDGVWDVLSNEEVVEIVSSAPTRSSAARILVDSAAREWKLKYPTSKMDDCAVVCLFLDGKMDSESDYEEQGFSSATIQSNHSGNPIESDDGQKSEPSLQRNFTVRSSEENETNGALSVDVVEDATSSADDQNWSGLEGVTRVNSLVQLPRFSEERPKS

SEQ ID NO: 12096 - DNA, 1116 bp, Glycine max
  misc_feature (650)..(650): n is a, c, g, or t
  misc_feature (735)..(735): n is a, c, g, or t
  misc_feature (738)..(738): n is a, c, g, or t
  misc_feature (758)..(758): n is a, c, g, or t
  misc_feature (775)..(775): n is a, c, g, or t
  misc_feature (783)..(783): n is a, c, g, or t
  misc_feature (815)..(815): n is a, c, g, or t
  misc_feature (857)..(857): n is a, c, g, or t
  misc_feature (912)..(912): n is a, c, g, or t
  misc_feature (914)..(914): n is a, c, g, or t
  misc_feature (955)..(955): n is a, c, g, or t
  misc_feature (982)..(982): n is a, c, g, or t
  misc_feature (990)..(990): n is a, c, g, or t
  misc_feature (1004)..(1004): n is a, c, g, or t
ctgcaaaacgaaaacctcacttcattgttcctttgtaatatcctcgtcactctcacacatcacacacaacaacaatggcttctgttcactcttctttccttctaccatataatctcctttccctcacaaccccatcaagctcttccactcaaattctctttaccgcgagaccctccgcgacccacctgcgaccccttcttctcaccacacgacgccgttccgggagacgaccctttgccgcggtggcggaacaggccgccaccgcgaccgaggcggccgcgaggaggctctacgttggcaacattccccgcactgtcaccaatgacgagcttgccaagattgttcaggagcatggcgctgttgagaaagctgaggtaatgtatgacaaatactctggaaggagccgtcgctttgcattcgttaccatgaaaactgttgaggacgcaactgctgtgattgagaaacttaacggcactgaacttggagggcgtgagatcaaagtaaatgtaactgaaaaacctttatcaacactagatttgcctttactccaagccgaggaatctgaatttattgacagtccccacaaggtgtatgtgggaaatctggccaagacagtaacaactgatactcttaaaaactttttttctganaagggaaaagtttttagtgccaaggtttcacgggtccctggtacctcaaaatccagtggatatggttttgttacttttccgtcanaanaggatgtagaagctgcaatntcatcattcaacaattntttgttanaaggccaaacaatccgtgtgaacaaggcatanagaattagcaattttgcagagcatgtttgaccacgtgtagtntagccggaacaatgtatactttgtgaggttgaaaccactaacaaatttccttgtntnttgtatagcataaacctaatcattttcagttgataaggttntaccaaaaaatagtggttcatgctttntgttgcanacgttgttgttgcncctttagtccaggatattgggaccttacttttttttcatgattatgttgttgcaccttttaactttgctccaatgttgcaaccattgttgatatatgcatgtattcaattcc

SEQ ID NO: 12097 - protein, 256 aa, Glycine max
  misc_feature (192)..(192): Xaa can be any naturally occurring amino acid
  misc_feature (221)..(222): Xaa can be any naturally occurring amino acid
  misc_feature (228)..(228): Xaa can be any naturally occurring amino acid
  misc_feature (234)..(234): Xaa can be any naturally occurring amino acid
  misc_feature (237)..(237): Xaa can be any naturally occurring amino acid
  misc_feature (247)..(247): Xaa can be any naturally occurring amino acid
MASVHSSFLLPYNLLSLTTPSSSSTQILFTARPSATHLRPLLLTTRRRSGRRPFAAVAEQAATATEAAARRLYVGNIPRTVTNDELAKIVQEHGAVEKAEVMYDKYSGRSRRFAFVTMKTVEDATAVIEKLNGTELGGREIKVNVTEKPLSTLDLPLLQAEESEFIDSPHKVYVGNLAKTVTTDTLKNFFSXKGKVFSAKVSRVPGTSKSSGYGFVTFPSXXDVEAAXSSFNNXLLXGQTIRVNKAXRISNFAEHV

SEQ ID NO: 12098 - protein, 155 aa, Glycine max
  misc_feature (91)..(91): Xaa can be any naturally occurring amino acid
  misc_feature (120)..(121): Xaa can be any naturally occurring amino acid
  misc_feature (127)..(127): Xaa can be any naturally occurring amino acid
  misc_feature (133)..(133): Xaa can be any naturally occurring amino acid
  misc_feature (136)..(136): Xaa can be any naturally occurring amino acid
  misc_feature (146)..(146): Xaa can be any naturally occurring amino acid
MYDKYSGRSRRFAFVTMKTVEDATAVIEKLNGTELGGREIKVNVTEKPLSTLDLPLLQAEESEFIDSPHKVYVGNLAKTVTTDTLKNFFSXKGKVFSAKVSRVPGTSKSSGYGFVTFPSXXDVEAAXSSFNNXLLXGQTIRVNKAXRISNFAEHV

SEQ ID NO: 12099 - protein, 139 aa, Glycine max
  misc_feature (75)..(75): Xaa can be any naturally occurring amino acid
  misc_feature (104)..(105): Xaa can be any naturally occurring amino acid
  misc_feature (111)..(111): Xaa can be any naturally occurring amino acid
  misc_feature (117)..(117): Xaa can be any naturally occurring amino acid
  misc_feature (120)..(120): Xaa can be any naturally occurring amino acid
  misc_feature (130)..(130): Xaa can be any naturally occurring amino acid
MKTVEDATAVIEKLNGTELGGREIKVNVTEKPLSTLDLPLLQAEESEFIDSPHKVYVGNLAKTVTTDTLKNFFSXKGKVFSAKVSRVPGTSKSSGYGFVTFPSXXDVEAAXSSFNNXLLXGQTIRVNKAXRISNFAEHV

SEQ ID NO: 12100 - DNA, 671 bp, Glycine max
tttttccacaagctgttattgttatctatcacaagaacaagcagcattagcaaccaagcaagagaatggcgacgacagcagccttgtgcggcactatgatgagcagctccttcctgaggagaaaagcagtggtcacaagcctgaaggcattccccaatgctaacgcagtgtttggtgtaaagggtggacgtggaggtggtgtgactgccatggctagcttcaaggtgaagctgataaccccagagggagagaaagaatttgaatgcccagatgatgtatacattcttgaccaggcagaggaggaagggcttgagcttccctactcatgcagggctggttcttgctctgtgtgtgctggcaaagttgtatctggcaaagttgacaattcagatgccaccttccttgaggatgaacaattagaagcaggatttactctcacctgtgttgcttaccccacctcagacgttgtcattgaaacccacaaggaggaagacctctctgctgcttaactttcttcctttctcaccaacatattatgcattcatgagcattcattacttccacctgtagtagcaactgaacttcattgttgtattgtaactctataataatctttccttactggttttgcacacaatggttcaataacaactctcattttccttgatact

SEQ ID NO: 12101 - protein, 147 aa, Glycine max
MATTAALCGTMMSSSFLRRKAVVTSLKAFPNANAVFGVKGGRGGGVTAMASFKVKLITPEGEKEFECPDDVYILDQAEEEGLELPYSCRAGSCSVCAGKVVSGKVDNSDATFLEDEQLEAGFTLTCVAYPTSDVVIETHKEEDLSAA

SEQ ID NO: 12102 - protein, 137 aa, Glycine max
MMSSSFLRRKAVVTSLKAFPNANAVFGVKGGRGGGVTAMASFKVKLITPEGEKEFECPDDVYILDQAEEEGLELPYSCRAGSCSVCAGKVVSGKVDNSDATFLEDEQLEAGFTLTCVAYPTSDVVIETHKEEDLSAA

SEQ ID NO: 12103 - protein, 136 aa, Glycine max
MSSSFLRRKAVVTSLKAFPNANAVFGVKGGRGGGVTAMASFKVKLITPEGEKEFECPDDVYILDQAEEEGLELPYSCRAGSCSVCAGKVVSGKVDNSDATFLEDEQLEAGFTLTCVAYPTSDVVIETHKEEDLSAA

SEQ ID NO: 12104 - DNA, 528 bp, Glycine max
cagtgtctgctgccttccattcgttcacctcctcaacctctgcagcgccttcgatccagaaaacatgactaagagaacaaagaaggctggcattgttggaaaatacggtacccgttatggcgccagtctgcgtaagcagattaagaagatggaagttagtcaacacagcaagtttttctgtgaattttgtggaaagtatgctgtgaagaggaaagctgtgggaatatggggatgcaaggactgtggtaaagtgaaagctggcggtgcttacactttgaataccgcaagtgccgtgactgtacggagcaccatcaggaggttgagggagcaaactgagagttaagcttttttgtttatgctatcaattactattagactttgcatgaagtgcctagtttgtattcactgaactgcactggttgtattcaaagtaaactccttaagtttaattttgagatgactcttttaattttaattgtttggaactttgtcggggtgattttgcttcatagtttcattttattgttt

SEQ ID NO: 12105 - protein, 113 aa, Glycine max
SVCCLPFVHLLNLCSAFDPENMTKRTKKAGIVGKYGTRYGASLRKQIKKMEVSQHSKFFCEFCGKYAVKRKAVGIWGCKDCGKVKAGGAYTLNTASAVTVRSTIRRLREQTES

SEQ ID NO: 12106 - protein, 92 aa, Glycine max
MTKRTKKAGIVGKYGTRYGASLRKQIKKMEVSQHSKFFCEFCGKYAVKRKAVGIWGCKDCGKVKAGGAYTLNTASAVTVRSTIRRLREQTES

SEQ ID NO: 12107 - protein, 64 aa, Glycine max
MEVSQHSKFFCEFCGKYAVKRKAVGIWGCKDCGKVKAGGAYTLNTASAVTVRSTIRRLREQTES

SEQ ID NO: 12108 - DNA, 1193 bp, Glycine max
  misc_feature (79)..(79): n is a, c, g, or t
  misc_feature (749)..(749): n is a, c, g, or t
  misc_feature (854)..(854): n is a, c, g, or t
  misc_feature (983)..(983): n is a, c, g, or t
  misc_feature (1023)..(1023): n is a, c, g, or t
  misc_feature (1088)..(1088): n is a, c, g, or t
  misc_feature (1133)..(1133): n is a, c, g, or t
  misc_feature (1145)..(1145): n is a, c, g, or t
  misc_feature (1190)..(1190): n is a, c, g, or t
agaaaattccagactcaagtgcagtaaagccagatgactgggatgagaatgcacccttggaaattgttgatgaagaagntgagaaacctgaaggatgggacaatgaacctgaggagatagatgatccagaggcaacaaaaccagaagattgggacgatgaggaggatggtgaatgggaagccccaaagattgagaacccaaaatgtgaagcagcccccggttgtggtgagtggaagaggccaatgaagaggaatccagcttataaaggaaaatggcatgccccacttattgaaaatcctgcttataagggtatttggaagcctcgggatattccaaaccctgattactttgaacttaagaaacctgattttgagcctatcgctgctatcggtattgagatttggacgatgcaagatggcatattgtttgacaacatcttgatatctaaagatgataaaattgccgagtcttatcgggagactagatggaagcccaagtttaccgttgagaaagaaaaacagaaggaagaagattcagaagctggatcaagtggccttgctggcttccagaagaaggtatttgacctgttatacaagatcgcagatattcccttcctgagtgcctacaagcttaaaatatacgatgtcattgagaagggtcaagagcaaccaaatctcaccgttggaattgttgtcgccgttgtggttgtcatcttgtcaattttcttgaggctcatatttggagggaangaagaagccaacaagggtggagaagacaaacccagaacccgcagaaactgcgagtagccaaggcagtggtgagaatgaagaaaacaaagagaaggaggaatcatntgcccctgcacgtcggaagccaacaaggagagacaattgaaatgattgaaacttgacacagacaggggcggccattaaagaacactaccgcacataaattttgagcttagtttgggcattaggccaaanaccgtagtaggtagcacgttcttgtcatttgtctcctgcncctttcgaaagatgatattgcataagggagtgtagatcagatattttgtgtcgtgctgatgatcnctttggagacttgagcattttaagctaattgaggctgtacaatcncaattatttttntagtaatgtagcacagaaatcaactcactgtgttacatttccatnttt

SEQ ID NO: 12109 - protein, 267 aa, Glycine max
  misc_feature (26)..(26): Xaa can be any naturally occurring amino acid
  misc_feature (249)..(249): Xaa can be any naturally occurring amino acid
KIPDSSAVKPDDWDENAPLEIVDEEXEKPEGWDNEPEEIDDPEATKPEDWDDEEDGEWEAPKIENPKCEAAPGCGEWKRPMKRNPAYKGKWHAPLIENPAYKGIWKPRDIPNPDYFELKKPDFEPIAAIGIEIWTMQDGILFDNILISKDDKIAESYRETRWKPKFTVEKEKQKEEDSEAGSSGLAGFQKKVFDLLYKIADIPFLSAYKLKIYDVIEKGQEQPNLTVGIVVAVVVVILSIFLRLIFGGXEEANKGGEDKPRTRRNCE

SEQ ID NO: 12110 - protein, 187 aa, Glycine max
  misc_feature (169)..(169): Xaa can be any naturally occurring amino acid
MKRNPAYKGKWHAPLIENPAYKGIWKPRDIPNPDYFELKKPDFEPIAAIGIEIWTMQDGILFDNILISKDDKIAESYRETRWKPKFTVEKEKQKEEDSEAGSSGLAGFQKKVFDLLYKIADIPFLSAYKLKIYDVIEKGQEQPNLTVGIVVAVVVVILSIFLRLIFGGXEEANKGGEDKPRTRRNCE

SEQ ID NO: 12111 - DNA, 1414 bp, Glycine max
  misc_feature (1332)..(1332): n is a, c, g, or t
  misc_feature (1399)..(1399): n is a, c, g, or t
ggttaatacatgcacatgcattaatttaattttcgtagagtactagtaactagtaagtattaacttaaaattaaatgaaaataaacagagttgaattgaaaatcaagaaacggaagaatgatgaaatggatctgtggtttggttgcgatgtggtgtgaatcactgtccaatcccgttcgcgtgacccggccagccctataaactatatatcgtgaatcggattcagagagactgagagaaacgatgagggcagtgagtgcgttaatggtggctcggatgttgacgcgggaccactctctccctgtcctttgcagcgaaagcatacccttccgatcggtctggtggttcgtctatgccggcatctcatgtttcctcgtcctcttcgccggcatcatgtccggtctcaccctcggactcatgtctctgggtctcgtcgacctcgagattctcgagcggagtggttctcctgttgagaaaatgcaagctgcggtcatacttcctgtggttaaaaaacaacaccagcttcttgtcactctgcttctatgtaatgctgttgccatggaggctttgccgttatacctagataaactattcaatcagtttgttgctatcattctctctgtaactttcgttctatttttcggggaggttattccacaagcaatttgtagtagatatggtcttgctgtaggtgccaactttgcatggctagtgcggattttaatgattatctgttacccagtttcttatccagttggaaaggttctggatcacctattggggcataatgaggctttatttaggcgagctcagttaaaagcccttgtctccattcacagccaggaggctgggaaaggtggtgagcttacacatgatgaaacaacaattatcagtggagcactcgatttaactgagaagactgcagaggaggctatgactcctattgaatcaacattttctttggatgttaattcaaagttggattgggaagcaatgggaaaagttcttgctcgcgggcacagccgagttcctgtctattctggaaatccaaggaatattattgggcttctactggtcaaaagtcttcttactgtacgaccagaaacagagacacctgtcagtgctgtatccatccggagaattccacgggttccatcagatatgcctctctatgatatactaaatgagttccaaaagggaagtagtcatatggctgttgttgttaaggctaggggaaaaggcaaagaaactccacaaatcattgatgaagagaaaaatgaagaaaacaaaagcattggtggggattcacagttgaccactccgttgctacanaagcaggatgcaaaatcaggaagtgttgttgttgacatagtcaagccttcaaagccttccagcattnaataagctgtctgtt

SEQ ID NO: 12112 - protein, 386 aa, Glycine max
  misc_feature (363)..(363): Xaa can be any naturally occurring amino acid
  misc_feature (386)..(386): Xaa can be any naturally occurring amino acid
MRAVSALMVARMLTRDHSLPVLCSESIPFRSVWWFVYAGISCFLVLFAGIMSGLTLGLMSLGLVDLEILERSGSPVEKMQAAVILPVVKKQHQLLVTLLLCNAVAMEALPLYLDKLFNQFVAIILSVTFVLFFGEVIPQAICSRYGLAVGANFAWLVRILMIICYPVSYPVGKVLDHLLGHNEALFRRAQLKALVSIHSQEAGKGGELTHDETTIISGALDLTEKTAEEAMTPIESTFSLDVNSKLDWEAMGKVLARGHSRVPVYSGNPRNIIGLLLVKSLLTVRPETETPVSAVSIRRIPRVPSDMPLYDILNEFQKGSSHMAVVVKARGKGKETPQIIDEEKNEENKSIGGDSQLTTPLLXKQDAKSGSVVVDIVKPSKPSSIX

SEQ ID NO: 12113 - protein, 379 aa, Glycine max
  misc_feature (356)..(356): Xaa can be any naturally occurring amino acid
  misc_feature (379)..(379): Xaa can be any naturally occurring amino acid
MVARMLTRDHSLPVLCSESIPFRSVWWFVYAGISCFLVLFAGIMSGLTLGLMSLGLVDLEILERSGSPVEKMQAAVILPVVKKQHQLLVTLLLCNAVAMEALPLYLDKLFNQFVAIILSVTFVLFFGEVIPQAICSRYGLAVGANFAWLVRILMIICYPVSYPVGKVLDHLLGHNEALFRRAQLKALVSIHSQEAGKGGELTHDETTIISGALDLTEKTAEEAMTPIESTFSLDVNSKLDWEAMGKVLARGHSRVPVYSGNPRNIIGLLLVKSLLTVRPETETPVSAVSIRRIPRVPSDMPLYDILNEFQKGSSHMAVVVKARGKGKETPQIIDEEKNEENKSIGGDSQLTTPLLXKQDAKSGSVVVDIVKPSKPSSIX

SEQ ID NO: 12114 - protein, 375 aa, Glycine max
  misc_feature (352)..(352): Xaa can be any naturally occurring amino acid
  misc_feature (375)..(375): Xaa can be any naturally occurring amino acid
MLTRDHSLPVLCSESIPFRSVWWFVYAGISCFLVLFAGIMSGLTLGLMSLGLVDLEILERSGSPVEKMQAAVILPVVKKQHQLLVTLLLCNAVAMEALPLYLDKLFNQFVAIILSVTFVLFFGEVIPQAICSRYGLAVGANFAWLVRILMIICYPVSYPVGKVLDHLLGHNEALFRRAQLKALVSIHSQEAGKGGELTHDETTIISGALDLTEKTAEEAMTPIESTFSLDVNSKLDWEAMGKVLARGHSRVPVYSGNPRNIIGLLLVKSLLTVRPETETPVSAVSIRRIPRVPSDMPLYDILNEFQKGSSHMAVVVKARGKGKETPQIIDEEKNEENKSIGGDSQLTTPLLXKQDAKSGSVVVDIVKPSKPSSIX

SEQ ID NO: 12115 - DNA, 1614 bp, Glycine max
gaagtgaatggaaaattgaatttccatgatcagtggggtggttagaacttagaagagaagagaactagagaagtgattttttgcaaagacaaagcgagggtttctattgttttgttgagaattcaattcaaagcttttgatttgatgatcataacataacacaatgagagatatttgtaggaacttccagcgaggcagctgtcaatatggagaaaggtgtagatatttacatgttcagcaacagcgaaaacctaatgttaatgggtttggaggtcagagcagttcttatcaacagcaaaatacaaatccctttggatttggctctggctcacaacaacagcagcagcagaagggtaatccttttggttttggcaagcagaacagctcccagttaaatggtgggcctcattctgagcataaacccaaccaatacaagccttttgaaaacaaatggaatcgacagtcatccaaaccccagcagaacggtgtgaaatctgaaaacaactccaaacaaacagatcatatatgcacagatcctgagaactgtaagcgccagattgcagtagattttgagcaagagaaacctctttggatacttacatgctacagtcattgcaaaggtgctccttgtgacattgttggtgatattagctatgaagaattgcgggcatcagcttatgaggatgctaagcgtgggatgaacttgcaatcaatagttgagaaagagagaaatatactaaattccaagttggttgagtttcagaaactactttctgaaccttaccaaataccaataagttcttctcttggcagtccaacaccccaatctattgtagccaatgccaatgcaaatccgttttcaacatctcaaagtaatggtcctttgtcagtctcaagctttagccaactgagtactccattgaacatgggttttgaaaggccatctgcaccactaacaaacactctgacgaagcctggtttctttggaagtggaggaaactctttggcatccaacaacgcagcaaatctaaacagcagtgctgtctttggtgttcaaagcggcccatattctacaccagtggatttgaacatgtttccaggttcaactcagcaaacattgactgccttcaataactctgatcccactacaatgtttcaaacaacaccagatgtccagttgtcaaatatgtcccaagtggagaaagtgtcagtagatccaagtatttggttaaaagagaaatggaatccgggagagattccagaagaagctcctcctgatacatttgtacggtaggcatttgtgttggcatctgacaaagcactaaatactagcaagattttgggcctttcgtggttgaattataaagatcaatagcatattttagatcacttcagtagttatctggatagttttatatcaattaatgaaacgcatgagctaaggaggcaaaagtaattccatattgtagttctttcatttggacgaaatattgtaatgccttcttggagctattttgatttccaaaattatttgactgctcgctgcactatcaggaattcatttgattgatacggatttcactcgttatgtaaccacctttttttctttcttgc

SEQ ID NO: 12116 - protein, 376 aa, Glycine max
MRDICRNFQRGSCQYGERCRYLHVQQQRKPNVNGFGGQSSSYQQQNTNPFGFGSGSQQQQQQKGNPFGFGKQNSSQLNGGPHSEHKPNQYKPFENKWNRQSSKPQQNGVKSENNSKQTDHICTDPENCKRQIAVDFEQEKPLWILTCYSHCKGAPCDIVGDISYEELRASAYEDAKRGMNLQSIVEKERNILNSKLVEFQKLLSEPYQIPISSSLGSPTPQSIVANANANPFSTSQSNGPLSVSSFSQLSTPLNMGFERPSAPLTNTLTKPGFFGSGGNSLASNNAANLNSSAVFGVQSGPYSTPVDLNMFPGSTQQTLTAFNNSDPTTMFQTTPDVQLSNMSQVEKVSVDPSIWLKEKWNPGEIPEEAPPDTFVR

SEQ ID NO: 12117 - protein, 198 aa, Glycine max
MNLQSIVEKERNILNSKLVEFQKLLSEPYQIPISSSLGSPTPQSIVANANANPFSTSQSNGPLSVSSFSQLSTPLNMGFERPSAPLTNTLTKPGFFGSGGNSLASNNAANLNSSAVFGVQSGPYSTPVDLNMFPGSTQQTLTAFNNSDPTTMFQTTPDVQLSNMSQVEKVSVDPSIWLKEKWNPGEIPEEAPPDTFVR

SEQ ID NO: 12118 - DNA, 1322 bp, Glycine max
  misc_feature (667)..(667): n is a, c, g, or t
aacagaacaagagtggaagtattcttcactaaaaaaaaaaagagtcgaaaatgtcagacggaacattgcaggtactggacggaacgcacctgagaggcgtcgatctgtccttaggcgacgacggtccattcaccggagctaaaatactcgacattgcccattcccgcgcctcttcttccctcttcggtctctcattacccgattccctcaaagtctctgctctcacgcgcctccgcacacccgacaccgatgctttccgctccgcctattactccgccgacaaggcctccgagattcttcgagactacatctccgccatcgccgatgaactcaaagataatcctcttgttgtatcaatcttggatggaagtactctccggttgttatcagaggatgaggatgacttcgccatgttagcagaaaatctattcactgacttagatgccgaagacaaggggaaaatcagcaagagtgaaattcggaatgctcttgtccagatgggagttgagatgggcgttcctcctttctcagaatttcctcagctaaatgacttgttgaaaaaacatggggtggatggagaagaaaagttgggccaggcacagtttgcacagcttctgcagtctgtactgcaagatctagaagaggaactttctaaaaagaatgttgnttccatccagaatattcgaatcattaatggctctaagctaagacggctattggccaatgaacaggaattaaacaccgttgtgaagaaggcattgcaggaaaaacgggaagcaaaggatggactagggagcacagaaataataaggagcttccttgagagaaacgcaaaggaattgggtttaccgctagctcaagctgatgaagcagttgttcttctttataacgctgtttttgctgaaataacacaagaaaaagatggtcccgaattagataaagaagagctggcaaaacttgtgaagaatatcctcgagaaattcgcagatcagcttgaggttagtcctgtgtatcaggacttagcttgaggacgatgagtaaatcggacacatttcatgttatgtttgaaactttgcatcattacagagtatttggaattcgcaccccctctcacccaaacatcaacaatatgtatactgtataatgaattttacttatgtggattgtggaggtgccttaaatagcatgggacttgggtaattttgttttaaaattatgagatttttttttttttgccggggttagagttagaaatcatgtgtatttttcaactcacttgtcagatattaactctgcttatcttgtgtgattgttgttgactg

SEQ ID NO: 12119 - protein, 325 aa, Glycine max
  misc_feature (206)..(206): Xaa can be any naturally occurring amino acid
MSDGTLQVLDGTHLRGVDLSLGDDGPFTGAKILDIAHSRASSSLFGLSLPDSLKVSALTRLRTPDTDAFRSAYYSADKASEILRDYISAIADELKDNPLVVSILDGSTLRLLSEDEDDFAMLAENLFTDLDAEDKGKISKSEIRNALVQMGVEMGVPPFSEFPQLNDLLKKHGVDGEEKLGQAQFAQLLQSVLQDLEEELSKKNVXSIQNIRIINGSKLRRLLANEQELNTVVKKALQEKREAKDGLGSTEIIRSFLERNAKELGLPLAQADEAVVLLYNAVFAEITQEKDGPELDKEELAKLVKNILEKFADQLEVSPVYQDLA

SEQ ID NO: 12120 - protein, 205 aa, Glycine max
  misc_feature (86)..(86): Xaa can be any naturally occurring amino acid
MLAENLFTDLDAEDKGKISKSEIRNALVQMGVEMGVPPFSEFPQLNDLLKKHGVDGEEKLGQAQFAQLLQSVLQDLEEELSKKNVXSIQNIRIINGSKLRRLLANEQELNTVVKKALQEKREAKDGLGSTEIIRSFLERNAKELGLPLAQADEAVVLLYNAVFAEITQEKDGPELDKEELAKLVKNILEKFADQLEVSPVYQDLA

SEQ ID NO: 12121 - protein, 176 aa, Glycine max
  misc_feature (57)..(57): Xaa can be any naturally occurring amino acid
MGVEMGVPPFSEFPQLNDLLKKHGVDGEEKLGQAQFAQLLQSVLQDLEEELSKKNVXSIQNIRIINGSKLRRLLANEQELNTVVKKALQEKREAKDGLGSTEIIRSFLERNAKELGLPLAQADEAVVLLYNAVFAEITQEKDGPELDKEELAKLVKNILEKFADQLEVSPVYQDLA

SEQ ID NO: 12122 - DNA, 1328 bp, Glycine max
acttctcactctccctctctaatagtaatagtaatatacataagtaacataaccaatggaagcgcgtgcaggagccaatcagcgtattgcaagaatctctgctcatcttcagcctccaaatttccaggaagggagtgatgttcttcttaagagtgctgagtgcagagcaaagggtggggcacctggattcaaagttgcaattttgggggctgctgggggaattggtcaacccctttctttgctgatgaagatgaacccattggtttcagttcttcatctttatgatgttgtcaacacccctggtgtcactgctgatgttagccacatggacactggtgctgtggttcgtggctttctggggcagcaacaacttgagagtgcactcactggcatggacttggtaatcatacctgctggggtaccaaggaaacctgggatgacaagagatgatttatttaaaataaatgctggaattgtgaggaccctttgtgaaggaattgccaagagctgccccaatgcaattgtcaacttgattagtaatccagtgaattccacagttgctattgctgcagaggttttcaagaaagccggtacatatgatccaaagcgactactgggtgttacgacccttgatgttgtgagggcaaatacttttgtggcagaggtacttggagttgatccaagagaggttgatgttccagtggttggaggtcatgctggtgtcacaattttgcctcttttgtcacaggttaagcctcgcagtagcttcactgcagaagaaactgaatacctgacaaatcgcatccaaaatggtggaactgaagttgttgaggcaaaagctgggacaggttctgcaacactatcaatggcatatgcagctgccaagtttgctggtgcatgcctccgtggcttaaaaggagaagctggggtagtggagtgtgcttttgttgattctcaggttacggaacttcccttctttgcaaccaaggtacgtctaggtcgtgctggagcagaagaggtttatcaactgggtcccctgaatgagtatgaaaggattggattggaaaaggcaaagagagagttagcaggaagcatccagaagggtgtagagttcatcagaaaataaatgtgataaggaaaaactagtttttgtctcttatatataaggaccatgtgtaatgcttctctttgttcatagatttttttcttcttcttaagaatagtactctaaatttttggtgtcatccgtaattgctgatgataacggatttgacatcagtggaactgcttaataatctcagaaagatactaaaatatcagccttttgt

SEQ ID NO: 12123 - protein, 356 aa, Glycine max
MEARAGANQRIARISAHLQPPNFQEGSDVLLKSAECRAKGGAPGFKVAILGAAGGIGQPLSLLMKMNPLVSVLHLYDVVNTPGVTADVSHMDTGAVVRGFLGQQQLESALTGMDLVIIPAGVPRKPGMTRDDLFKINAGIVRTLCEGIAKSCPNAIVNLISNPVNSTVAIAAEVFKKAGTYDPKRLLGVTTLDVVRANTFVAEVLGVDPREVDVPVVGGHAGVTILPLLSQVKPRSSFTAEETEYLTNRIQNGGTEVVEAKAGTGSATLSMAYAAAKFAGACLRGLKGEAGVVECAFVDSQVTELPFFATKVRLGRAGAEEVYQLGPLNEYERIGLEKAKRELAGSIQKGVEFIRK

SEQ ID NO: 12124 - protein, 293 aa, Glycine max
MKMNPLVSVLHLYDVVNTPGVTADVSHMDTGAVVRGFLGQQQLESALTGMDLVIIPAGVPRKPGMTRDDLFKINAGIVRTLCEGIAKSCPNAIVNLISNPVNSTVAIAAEVFKKAGTYDPKRLLGVTTLDVVRANTFVAEVLGVDPREVDVPVVGGHAGVTILPLLSQVKPRSSFTAEETEYLTNRIQNGGTEVVEAKAGTGSATLSMAYAAAKFAGACLRGLKGEAGVVECAFVDSQVTELPFFATKVRLGRAGAEEVYQLGPLNEYERIGLEKAKRELAGSIQKGVEFIRK

SEQ ID NO: 12125 - protein, 291 aa, Glycine max
MNPLVSVLHLYDVVNTPGVTADVSHMDTGAVVRGFLGQQQLESALTGMDLVIIPAGVPRKPGMTRDDLFKINAGIVRTLCEGIAKSCPNAIVNLISNPVNSTVAIAAEVFKKAGTYDPKRLLGVTTLDVVRANTFVAEVLGVDPREVDVPVVGGHAGVTILPLLSQVKPRSSFTAEETEYLTNRIQNGGTEVVEAKAGTGSATLSMAYAAAKFAGACLRGLKGEAGVVECAFVDSQVTELPFFATKVRLGRAGAEEVYQLGPLNEYERIGLEKAKRELAGSIQKGVEFIRK

SEQ ID NO: 12126 - DNA, 1149 bp, Glycine max
gaggatacactatactccggtagccgctgtgttggtgagtgagttgtggtgcttttgaaagatgaggccgattctgatgaaaggtcatgagaggccattgacgttcctgaaatacaacagggacggcgatctcctcttctcctgcgccaaggaccacaaccctaccgtctggtttgccgacaacggcgaacgcttgggcacttatcgcggccacaacggcgccgtttggacctgcgacgtctcaagagattcggctcgactcatcacgggaagtgccgatcagaccgccaagctatgggacgtgcaaagcggcctgcaattatacaccttcaacttcgattccccggccaggtccgtcgatttctctgtcggcgataagctcgccgttatcaccactgaccccttcatggagttgccctccgcaatccatgtcaaacgcatcgctaacgatccatcccaacagatcggggaatctgtgcttctcattaagggtcctcagggaaggattaacagagctatctggggaccccttaacacaaccattatcagtgctggcgaagatgctgttattcgtatttgggattccgagaccggaaaactgcttcaagagtccgacaaggaatctggccataaaaagactgtaacttcacttgctaagtctgccgatgattcacatttccttactggttcccttgataagtctgctaggctttgggatactaggtcattgactcttatcaagacctatgtcacggaacgccctgtcaatgcagttacgatgtcacctcttcttgatcatgtggttattggaggtggtcaggatgcgtcagctgttacaactactgatcatcgtgctggcaaatttgaagccaaattctttgacaagattcttcaagaagaaattgggggtgtgaaaggccattttggaccaattaatgcattggcttttaaccctgatggaaaaagtttttcaagtggaggtgaagatggttatgtacggttgcaccacttcgacccagattatttcaacatcaaaatatagtgcctgatggtttgtggttaaaattaggtggttcctagaagttagcatttaattattctcaaccaacatttaattatatattggtaatatggaagagtttttttttt

SEQ ID NO: 12127 - protein, 326 aa, Glycine max
MRPILMKGHERPLTFLKYNRDGDLLFSCAKDHNPTVWFADNGERLGTYRGHNGAVWTCDVSRDSARLITGSADQTAKLWDVQSGLQLYTFNFDSPARSVDFSVGDKLAVITTDPFMELPSAIHVKRIANDPSQQIGESVLLIKGPQGRINRAIWGPLNTTIISAGEDAVIRIWDSETGKLLQESDKESGHKKTVTSLAKSADDSHFLTGSLDKSARLWDTRSLTLIKTYVTERPVNAVTMSPLLDHVVIGGGQDASAVTTTDHRAGKFEAKFFDKILQEEIGGVKGHFGPINALAFNPDGKSFSSGGEDGYVRLHHFDPDYFNIKI

SEQ ID NO: 12128 - protein, 321 aa, Glycine max
MKGHERPLTFLKYNRDGDLLFSCAKDHNPTVWFADNGERLGTYRGHNGAVWTCDVSRDSARLITGSADQTAKLWDVQSGLQLYTFNFDSPARSVDFSVGDKLAVITTDPFMELPSAIHVKRIANDPSQQIGESVLLIKGPQGRINRAIWGPLNTTIISAGEDAVIRIWDSETGKLLQESDKESGHKKTVTSLAKSADDSHFLTGSLDKSARLWDTRSLTLIKTYVTERPVNAVTMSPLLDHVVIGGGQDASAVTTTDHRAGKFEAKFFDKILQEEIGGVKGHFGPINALAFNPDGKSFSSGGEDGYVRLHHFDPDYFNIKI

SEQ ID NO: 12129 - protein, 211 aa, Glycine max
MELPSAIHVKRIANDPSQQIGESVLLIKGPQGRINRAIWGPLNTTIISAGEDAVIRIWDSETGKLLQESDKESGHKKTVTSLAKSADDSHFLTGSLDKSARLWDTRSLTLIKTYVTERPVNAVTMSPLLDHVVIGGGQDASAVTTTDHRAGKFEAKFFDKILQEEIGGVKGHFGPINALAFNPDGKSFSSGGEDGYVRLHHFDPDYFNIKI

SEQ ID NO: 12130 - DNA, 876 bp, Glycine max
ggttatcccgacattaatttttgtacacacacacagattcccctctttcgaatttcgatactttgatcagatccacaacacttcttcatccatgacgcttggttcttcaggatccagtgtcgtggttccaaggaacttcagattgctggaggagcttgagaagggagaaaaaggaataggagatggcacagttagttatggaatggatgatggtgatgacatttacatgcgctcttggactggaaccattattggtccctataatactgtacatgaaggaagaatttatcaattgaagctgttttgtgataaagactaccctgaaaagcccccgagcgtccggtttcattcacggatcaatatgacttgtgttaatcatgaaactggagtggttgaatcaaagaaatttggtcttcttgcaaattggcaacagaggtttaccatggaagatatactgacccagctgaagaaggaaatggcggcttcacataaccgcaagcttgtccaacctcctgaaggtactcactattagtgtccaagatcacactgatattggatcatattgcatttgcagtatgcaatatatagtatgtaatactctggatccttctaaattcaagaacatactggggaatgctcgaaagagcttcatctttacctccatagagttttgttgcaatacattgtcaactttgttgaagggatgctctctgattggtcctaaatattgaaagcaactcttaaagtagcgttcttttcttattataacagttcttcccgttttgatcttgcttctttcttgattcacttgctttctgacttttaatttagcgggaggctatataaaaaagtgacaaatgctgtttggatgttttc

SEQ ID NO: 12131 - protein, 176 aa, Glycine max
VIPTLIFVHTHRFPSFEFRYFDQIHNTSSSMTLGSSGSSVVVPRNFRLLEELEKGEKGIGDGTVSYGMDDGDDIYMRSWTGTIIGPYNTVHEGRIYQLKLFCDKDYPEKPPSVRFHSRINMTCVNHETGVVESKKFGLLANWQQRFTMEDILTQLKKEMAASHNRKLVQPPEGTHY

SEQ ID NO: 12132 - protein, 146 aa, Glycine max
MTLGSSGSSVVVPRNFRLLEELEKGEKGIGDGTVSYGMDDGDDIYMRSWTGTIIGPYNTVHEGRIYQLKLFCDKDYPEKPPSVRFHSRINMTCVNHETGVVESKKFGLLANWQQRFTMEDILTQLKKEMAASHNRKLVQPPEGTHY

SEQ ID NO: 12133 - protein, 109 aa, Glycine max
MDDGDDIYMRSWTGTIIGPYNTVHEGRIYQLKLFCDKDYPEKPPSVRFHSRINMTCVNHETGVVESKKFGLLANWQQRFTMEDILTQLKKEMAASHNRKLVQPPEGTHY

SEQ ID NO: 12134 - DNA, 2682 bp, Glycine max
ccccaaacacaatctcttcaatgaggaagtccgatttgaggatatcaatcaaaacatgaatgactggaacattcaagaaatccctcaagatcaactatacgttcctgaaacaattaaagataaacacaactttgattacataatcaaaacagtagagaataatattcctctaggacaggatataggggaagaatttcatttactttcaaaaaattcaatttatgaacatagccgtaagtttcaatatctatacattggttgtgtacaagtagccatcaagcccttaattgacatgggcatagatgcagcaattttaatgtgtctaagagatattacgcataataaatttgaagactccttaattggaacggtcgaaaccagtttaggacaaggtccagtatattttaattgttatccaaataagacagtgagtctcgatggacagaaacattcttgactctctgttcttaaacatccactttcatggccttgacatgaaagaaggatcaatttcagcagccttaatttataggatccagtacaaggtcatgaatacctgtgcgtctagagtcctattacaaccacaaaagggagaaacaaccttatttatcactgatatgacaaaagccaatgtttctttaaaaagaataataaaatgggatgaagtaactctccctgaaaaatggattatggagaaggccacaccgtctgatccccgacctgctccaattattgaaaaaattaaacaagataactccggaaaggtagagataaccttcaataggagaaattctttttcatcaaggatagaagcctctaggtctgaatatgggccagccagtaggtctttttcggttagaacccgttcaattccagtaggactaaccagatctgagtcacataaccagttccctactgtaaacctccaaggattagacactacttctagcatacctagaacaacctacaaccaagaacaagaggacgaccaaaagtcgatccaatccccaacatactcttctatggaaccttatgatgttatctgacaactttagcattgataaggaaacccttaggaaagatttttattcttcggagaatgagcctcaaaggagatggtttttccaacattacaagggtacaaacagaaaacaaatcaaagacaagttctacaaatttgtcgaaagagtcaaaattaatatccttttctttgattggtttcatgcttatgccatcagaaaggatatagattacccttggaaacaagacatcataggtgatccaacaacaaatgtcataacaaattggaaaatcaaggatggtgagttaatccaatcggaattacctcccgcaacacaatatcaactaccaaatgtcaaagacagtaacaataaacccgtcatggcaattccattcaagacaaaagatgtcaacgaggaagtaacctctaaagacattaagagtctaatggaacaggcaaattataccaataaatatttacaagctttaggagaaaccattaaaactaaggtagttcctaaacaaaaatcaattgaggaagcttcgccaagtattcccattgaaaaaccattattcaaacctttcaaagttagtgagaaggctaaacgaaaaattagggaacttagaaaaactaaatccttaattgaaggcgtaggtgacaatcatagtgaattaccaaacaaaattggtagtttacttaaggtcattccagaaactccccaaacctcggaaaatacttccaaaatggtaacaagaagtacctccaaattaattaatgttattaatgaagatagtgaccaaaactcagataggatcaatatcagaaaagaatataaatccaattaattccaaatactggaaaacaccctccaaattatattatcaacgtccgactgcccctgatcttctattagaagaaagaggtgaaaacaattttaagagttttagtgcaaacaacatctatgaatggaacatagatgcacaaacggagtataacatcatgaatacactccaacatatgaccatggtagctacagcttaccaaacctcccatgaatgttcagaagaaaccattatagatatcttagtggcaggattttctggacaactgaaaagatggtgggataattatctcactaatgaagaaaaataaaaaatttacagcgcagttaagacggatctcaatggaaaagtcattactaatgacgatgataaagagattcttgacgctgttaacacattaatttttacaatagcccaacatttcattggagacccatccttgtggaaagataggtctgcagaattattatcaaatcttaagtgtagaaccttagcggattttaggtggtacagagatactttcctaactagggtttacaccagagaagatagtcaacaacctttttagaaagaaaaatttctagccggtcttcccagatcattaggagacaaggttagagataaaatccgtagtcaatctgccaatggagatattccatatgaaagtttaagctatggtcaattaatttcttatgtccaaaaggtagccttaaaaatttgtcaggatgacaaaattcaaaggcaattagccaaagaaaaggctcaaacaaagaaggatttaggttctttctgtgaacaatttggtctaccggcctgtcc

SEQ ID NO: 12135 - protein, 277 aa, Glycine max
MMLSDNFSIDKETLRKDFYSSENEPQRRWFFQHYKGTNRKQIKDKFYKFVERVKINILFFDWFHAYAIRKDIDYPWKQDIIGDPTTNVITNWKIKDGELIQSELPPATQYQLPNVKDSNNKPVMAIPFKTKDVNEEVTSKDIKSLMEQANYTNKYLQALGETIKTKVVPKQKSIEEASPSIPIEKPLFKPFKVSEKAKRKIRELRKTKSLIEGVGDNHSELPNKIGSLLKVIPETPQTSENTSKMVTRSTSKLINVINEDSDQNSDRINIRKEYKSN

SEQ ID NO: 12136 - protein, 276 aa, Glycine max
MLSDNFSIDKETLRKDFYSSENEPQRRWFFQHYKGTNRKQIKDKFYKFVERVKINILFFDWFHAYAIRKDIDYPWKQDIIGDPTTNVITNWKIKDGELIQSELPPATQYQLPNVKDSNNKPVMAIPFKTKDVNEEVTSKDIKSLMEQANYTNKYLQALGETIKTKVVPKQKSIEEASPSIPIEKPLFKPFKVSEKAKRKIRELRKTKSLIEGVGDNHSELPNKIGSLLKVIPETPQTSENTSKMVTRSTSKLINVINEDSDQNSDRINIRKEYKSN

SEQ ID NO: 12137 - protein, 202 aa, Glycine max
MDRNILDSLFLNIHFHGLDMKEGSISAALIYRIQYKVMNTCASRVLLQPQKGETTLFITDMTKANVSLKRIIKWDEVTLPEKWIMEKATPSDPRPAPIIEKIKQDNSGKVEITFNRRNSFSSRIEASRSEYGPASRSFSVRTRSIPVGLTRSESHNQFPTVNLQGLDTTSSIPRTTYNQEQEDDQKSIQSPTYSSMEPYDVI

SEQ ID NO: 12138 - DNA, 1381 bp, Glycine max
  misc_feature (510)..(510): n is a, c, g, or t
aatagaggaagcagtgggcgagagggaggaggaggatgaatcggccatcaacaagtacctggccgaattatccatagacagcgatgggcttagcatggagaagcccctgtgggaaatccatcttcttaaggcccacaagtgcgttattttccgaatccatcacgccctcggggatgggatttccttgatgtccatgcttctcgccagctgcaggaaactcaacaacccaaacgccctccctaccatcgccgcctctgcctctacctctgcctctacctctgcctctaaaactaacctcatcaatttccggaatctcctcgctaccctctggttttgtttcatctttgccctcgagttcatcctcaggtgtttgtggattcgtgaccccaaatccgccttaaccggtggcgctggggttgagctctggcccaggaagatagctactgccactttctccttagaagacatgaagaccgtcaagactgctgctaatgcgaccataaatgatgntctatttgcagttatatcatctgggatatcaagatacctagactttcgagcacctaatgggctgcgagatggtgttcagctaacaggtttagctatggttaatttaagaaagcatccaggattacaggaattatccaatatgatgagaagtaattcaggagcaaggtggggtaacaaatttggtatgattctcttgcctatatattaccatagaaccaacacttcagatcctttagaatatctgaagagagctaaggcaatgattgacagaaagaaacgatctctagaagccagtttctcatacaaaattggggattttgtaatgtccacccttggtccaaagtttgctagccttctaaattatcggatactctgccacacttccttcactatctcaaatgtggttggcccgcaagaggagattatgattggaggcaatcctataacgttcttaagggcaaataattctgccttgcctcatgctctcattttgaatatggtgagctatgctggaagagcagacatgcaagtgcaggtggccaaagacatcattcctgatcctgagtttcttgccaagtgttttgaagatgcattgcttgaaatgaaggagcaggttacggccaaaatctgacatttggagaaatttgattttgttaaatgttacaacattgctatgaatattgagatacatataatcacaagcaacataatttacattgggataacatttactttcttaataaatgttatatagggacttatttgatacatctagttctctcatatgtaccattgatggttgtatgacctattaatacataagttgaaaggatttgaagcatattattaaaatgcatttcatgtttgcttg

SEQ ID NO: 12139 - protein, 379 aa, Glycine max
  misc_feature (170)..(170): Xaa can be any naturally occurring amino acid
IEEAVGEREEEDESAINKYLAELSIDSDGLSMEKPLWEIHLLKAHKCVIFRIHHALGDGISLMSMLLASCRKLNNPNALPTIAASASTSASTSASKTNLINFRNLLATLWFCFIFALEFILRCLWIRDPKSALTGGAGVELWPRKIATATFSLEDMKTVKTAANATINDXLFAVISSGISRYLDFRAPNGLRDGVQLTGLAMVNLRKHPGLQELSNMMRSNSGARWGNKFGMILLPIYYHRTNTSDPLEYLKRAKAMIDRKKRSLEASFSYKIGDFVMSTLGPKFASLLNYRILCHTSFTISNVVGPQEEIMIGGNPITFLRANNSALPHALILNMVSYAGRADMQVQVAKDIIPDPEFLAKCFEDALLEMKEQVTAKI

SEQ ID NO: 12140 - protein, 348 aa, Glycine max
  misc_feature (139)..(139): Xaa can be any naturally occurring amino acid
MEKPLWEIHLLKAHKCVIFRIHHALGDGISLMSMLLASCRKLNNPNALPTIAASASTSASTSASKTNLINFRNLLATLWFCFIFALEFILRCLWIRDPKSALTGGAGVELWPRKIATATFSLEDMKTVKTAANATINDXLFAVISSGISRYLDFRAPNGLRDGVQLTGLAMVNLRKHPGLQELSNMMRSNSGARWGNKFGMILLPIYYHRTNTSDPLEYLKRAKAMIDRKKRSLEASFSYKIGDFVMSTLGPKFASLLNYRILCHTSFTISNVVGPQEEIMIGGNPITFLRANNSALPHALILNMVSYAGRADMQVQVAKDIIPDPEFLAKCFEDALLEMKEQVTAKI

SEQ ID NO: 12141 - protein, 317 aa, Glycine max
  misc_feature (108)..(108): Xaa can be any naturally occurring amino acid
MSMLLASCRKLNNPNALPTIAASASTSASTSASKTNLINFRNLLATLWFCFIFALEFILRCLWIRDPKSALTGGAGVELWPRKIATATFSLEDMKTVKTAANATINDXLFAVISSGISRYLDFRAPNGLRDGVQLTGLAMVNLRKHPGLQELSNMMRSNSGARWGNKFGMILLPIYYHRTNTSDPLEYLKRAKAMIDRKKRSLEASFSYKIGDFVMSTLGPKFASLLNYRILCHTSFTISNVVGPQEEIMIGGNPITFLRANNSALPHALILNMVSYAGRADMQVQVAKDIIPDPEFLAKCFEDALLEMKEQVTAKI

SEQ ID NO: 12142 - DNA, 738 bp, Glycine max
gggcatgaagggaaagtctgttagtggaatgaattactacgcatgtttatctattttatctcgggctattctcacacccttcgcaattgctgtggaaggaccgcaaatgtgggctgctggatggcaaacagccatgtctcaaattggaccgcaattcatatggtggctagctgctcaaagtgtattctatcatctatacaatcaagtgtcatacatgtctctggatcagatctctcctttgacgtttagcattggaaacaccatgaaacgtatatctgtcattgtgtcttccattattatcttgcacacaccagttcaacccatcaatgctcttggtgccgccattgctatccttggaaccttcttgtattcacaggcgaaactatagagttggggaactaagattcctctagggacttgtttgttacagttcttcatgctcaaccagggacaaggaagttgattttgtaatgtgtcactgctggatttttgtaatactaggatgatctggctatcagtccatctgtagatataataataaaaataatgctgctgaggaaacattatcataatacagatgattaggtaggttttatttatttttttggaatttcagaaatgccaatgatttaaaataaatgcgttttgtttataatttagtctgagaagaatttctcaaaaacattgtttactataaggagcttgcaataatgtgatgctgtgataatttttatgctc

SEQ ID NO: 12143 - protein, 128 aa, Glycine max
GMKGKSVSGMNYYACLSILSRAILTPFAIAVEGPQMWAAGWQTAMSQIGPQFIWWLAAQSVFYHLYNQVSYMSLDQISPLTFSIGNTMKRISVIVSSIIILHTPVQPINALGAAIAILGTFLYSQAKL

SEQ ID NO: 12144 - protein, 127 aa, Glycine max
MKGKSVSGMNYYACLSILSRAILTPFAIAVEGPQMWAAGWQTAMSQIGPQFIWWLAAQSVFYHLYNQVSYMSLDQISPLTFSIGNTMKRISVIVSSIIILHTPVQPINALGAAIAILGTFLYSQAKL

SEQ ID NO: 12145 - protein, 119 aa, Glycine max
MNYYACLSILSRAILTPFAIAVEGPQMWAAGWQTAMSQIGPQFIWWLAAQSVFYHLYNQVSYMSLDQISPLTFSIGNTMKRISVIVSSIIILHTPVQPINALGAAIAILGTFLYSQAKL

SEQ ID NO: 12146 - DNA, 1168 bp, Glycine max
  misc_feature (460)..(460): n is a, c, g, or t
  misc_feature (696)..(696): n is a, c, g, or t
aaacggtatatcttacaaggtctatcccttccccaagaagataggcttcctgcagccttgcatcgaatccttctgaccgccctttcaaattcaacccgccaaagtggtcaagaagatgaaattgataagttggtaactaggatgggtgccatgcagatggcgaaatctctggatgatctcgctgatgtttgtgtaagagttgatagaaaaattttccgctgtcaccaagttattctggcatctaagtcataatatttcaaagcaagattatcacatatgaaggacttccatgaagacatagatgagttatctgttgacatccttccttgccttgaagaacatgacttgagcatggaagcttttgagaaaatgattgagtatatgtacactgatcgtttgcaggatataaatccagatcaggctgaggaaatgttggatgttgcttctagatacttattgnttcctctcaagcgggcggtggctgatgtcttgttgccacacttggaaatggtgtcacctgaagaactttgccattggttaatactagcagacatgtatggtgttttgcaagattcgggaatattgtctagacacaattgcttgtaatttcgaaacatttgctgatactaaagaatttcgggcaatgttgttgactttgcctccaccatctggagactcgtctcttcgtaccactgncccgaggattcctggatctgctcttaatgccgatcaaggaaatcttcttgatgatttacgtgagaaatggcttgaaattgaagctgctgagcttgacaagagagatgagagtgctttgcaatttgacaagcgtctagagatgcttatgcttgttgcagagcaagaaaaatcatcagacaatgctgatttagatggtattaatgacacgcttgccattcttcccaatcaccactctgatttaaggtgaacaaaaaaaaaaaaaaacttgcagatttctgaacgctttttctttaccattaaaaataaaatgtatagattttgtaggtcatcatggtggtggtaatccgtagataactaagtaggtcgcttggagtgcttaagttgggtttttgtaactaaagttgctcaagcattcattaattcttaaagtttgttgtatcattactagaaaatctctatattttgatagctt

SEQ ID NO: 12147 - protein, 128 aa, Glycine max
  misc_feature (47)..(47): Xaa can be any naturally occurring amino acid
MVFCKIREYCLDTIACNFETFADTKEFRAMLLTLPPPSGDSSLRTTXPRIPGSALNADQGNLLDDLREKWLEIEAAELDKRDESALQFDKRLEMLMLVAEQEKSSDNADLDGINDTLAILPNHHSDLR

SEQ ID NO: 12148 - protein, 109 aa, Glycine max
  misc_feature (62)..(62): Xaa can be any naturally occurring amino acid
MKDFHEDIDELSVDILPCLEEHDLSMEAFEKMIEYMYTDRLQDINPDQAEEMLDVASRYLLXPLKRAVADVLLPHLEMVSPEELCHWLILADMYGVLQDSGILSRHNCL

SEQ ID NO: 12149 - protein, 99 aa, Glycine max
  misc_feature (18)..(18): Xaa can be any naturally occurring amino acid
MLLTLPPPSGDSSLRTTXPRIPGSALNADQGNLLDDLREKWLEIEAAELDKRDESALQFDKRLEMLMLVAEQEKSSDNADLDGINDTLAILPNHHSDLR

SEQ ID NO: 12150 - DNA, 1781 bp, Glycine max
gctggtccattcccaactacgatgcgtgtgagcttcagattctgaagagagagagagtgaagactcaaccgacgactctctctctctaactcgcattgtgttccgttgtgttctgtttcagatcgtggttcgtcacttcgttgttcgtgaagttggttcagattctaactgttctattccctcatcaagagtcatgagcttgttctgaggtctgattagcttgctaattgggttggagaaatcattgagttaaaagagagaaatgggagctattgctggagaagagctgctgaaatgggagaagatgcaaggagtgagcagtcgcgaagagaagattctggtgtcaataagactgaggcctttgaatgagaaggaaattgctgctaatgaatcagcagactgggaatgcattaatgatactaccatcttgtaccggaacacgctgcgtgagggttccacatttccaagcgcctacacatttgagtatttcggggtgattgtgtcacaaggcaggtatatgaggaaggagccaaagaagttgctctttcagttgtcagtggaattaactcaagtatttttgcatatgggcaaacaagtagtggaaagacatacacgatggttggaataactgaatacgctgttgcagatatttttgactatataaagaggcatgaagaaagagcatttatattgaagttctcagcaattgaaatttacaatgaaattgttagagacctcctcagcacggacaacactccacttagactacgtgatgatcctgagaaagggcccattttagagaaactcacagaggagactctacgggactgggagcatttaaaagagcttctagcctacagtgaagctcagagacaggtgggagagacatacctaaatgaaaagagttctagatctcaccaaattataagattgacaatggagagttctgccagggaattcctgggcaaaggcaactcagcgaccctagtagctagtgtgaatttagttgatttggcagggagtgagcgcgcatctcaggcatcatcagctgggatgagattaaaagaaggttgtcatataaaccggagtttacttactcttggaacagttattcgtaagcttagtaagggaagacatggacacatcaattacagagactccaagttgacacgcatactgcagccttgtttgggtggaaatgctagaacagctatcatttgcactttgagccctgcacgtagccatgttgagcaaaccagaaacacacttctttttgcttgttgtgcaaaagaggtgaccactaaagcacaggttaatgtcgtgatgtctgataaggcattggtcaagcatttgcaaaaagaggtggctagattggagagtgagttgaaaactccgggtcctgctaccctccaattgtgattatgcagcattattgagaaagaaagatcttcagatagaaaagatggagaaggagattagggagctaactaagcaacgtgaccttgctcaatcaagggttgaggatttgcttcgcatggttggaaaggagcagatatctggaaaagtagtttctattttgtaattgctgaaattgttttatatatttgagatcatgcctctaaattgggattgtttttgttcaggctagcattaataatcatctgaatctgcaggaaggggaagatatctgggaagatgactgttcagtatcagagtcatcaagcatttgtggtcctcatcgtcctaatacacacattagagagttcaacaatcctcattat

SEQ ID NO: 12151 - protein, 267 aa, Glycine max
MVGITEYAVADIFDYIKRHEERAFILKFSAIEIYNEIVRDLLSTDNTPLRLRDDPEKGPILEKLTEETLRDWEHLKELLAYSEAQRQVGETYLNEKSSRSHQIIRLTMESSAREFLGKGNSATLVASVNLVDLAGSERASQASSAGMRLKEGCHINRSLLTLGTVIRKLSKGRHGHINYRDSKLTRILQPCLGGNARTAIICTLSPARSHVEQTRNTLLFACCAKEVTTKAQVNVVMSDKALVKHLQKEVARLESELKTPGPATLQL

SEQ ID NO: 12152 - protein, 160 aa, Glycine max
MESSAREFLGKGNSATLVASVNLVDLAGSERASQASSAGMRLKEGCHINRSLLTLGTVIRKLSKGRHGHINYRDSKLTRILQPCLGGNARTAIICTLSPARSHVEQTRNTLLFACCAKEVTTKAQVNVVMSDKALVKHLQKEVARLESELKTPGPATLQL

SEQ ID NO: 12153 - DNA, 1019 bp, Glycine max
gttactaatctcacgcacattctttctctctctaaattctgcaccacaatccgcaaaatgaccaaatacttcttgctgtgaatgtcgaaaatgcctgcaggcacaacatgtgaagtgatgcaaaacggcaacacttgtttcaccagatcctttcgtcattgatggggaagaaaggaggcagctggttctcatctgtgaagaaagttttcaagtcatcttctaaagattcgccccagcctgagaagaagaaggacaacacacagaaattacagcatgaagtggcagaggtggtgtcctttgagcattttcctgcagagagttctccagataatgtgagcaatgcagagatgagtacgacatcaacgccagtgaccaacgaagatagaagccatgcgattgccgttgcagcagcaactgccgcagctgcagaagctgctgtggtggctgctcaagcagctgcaagagttgtaagattggcaggaagttacgggcggcagtccaaggaagaaagagcagcaacactcattcaatcatactatagaggctacctggctcgacgtgcactacgagcattgaagggattagtgaggctgcaagcactggtgaggggacacaatgtgcggaagcaagcgcagatgacgatgcggtgcatgcaagcactggtgagggtgcaggcacgagtacgggctcgccgattccaattgagtcacgcggatcaggaaagagagaagaaagaagagcccaagcccatacccgtgcccgtgcccatgagccccctgagaagaatagacgacattaatgactgggacaataggcgtcaaagtagctacaaaattaaggaaaacgatttgcggaaacatgaagctgtaatgaagagagagagagctcttgcatacgctttcaactatcaacaggttagttaatttgtcatgattaaatgggaatatagtggataaaatagcttagtctaatattctttcaaaacggtacgtgcaatttaatttatctatatcttcttt

SEQ ID NO: 12154 - protein, 253 aa, Glycine max
MGKKGGSWFSSVKKVFKSSSKDSPQPEKKKDNTQKLQHEVAEVVSFEHFPAESSPDNVSNAEMSTTSTPVTNEDRSHAIAVAAATAAAAEAAVVAAQAAARVVRLAGSYGRQSKEERAATLIQSYYRGYLARRALRALKGLVRLQALVRGHNVRKQAQMTMRCMQALVRVQARVRARRFQLSHADQEREKKEEPKPIPVPVPMSPLRRIDDINDWDNRRQSSYKIKENDLRKHEAVMKRERALAYAFNYQQVS

SEQ ID NO: 12155 - protein, 191 aa, Glycine max
MSTTSTPVTNEDRSHAIAVAAATAAAAEAAVVAAQAAARVVRLAGSYGRQSKEERAATLIQSYYRGYLARRALRALKGLVRLQALVRGHNVRKQAQMTMRCMQALVRVQARVRARRFQLSHADQEREKKEEPKPIPVPVPMSPLRRIDDINDWDNRRQSSYKIKENDLRKHEAVMKRERALAYAFNYQQVS

SEQ ID NO: 12156 - DNA, 577 bp, Glycine max
aatatttgcagtgctgaaaatgtcgcagttgttggacaaagccaaaaactatgttgcggagaaagtcacgaacatgcccaagcccgaggcgagtgtcaccgacgtggatttcaagcgcgtgagccgcgacagcgtcgagtacttggctaaggtctctgtttccaacccttattccactcccattcccatttgtgagatcaagtactccctcaaaagtgctggcaaggagatagcatcagggacaatacctgacccagggtcactgaaggcaagtgacacaacaatgctggatgtgccagtgaaggtgcctcatagcatattactgagcttggcaaaggacattggtgcagattgggacattgattaccaattggatcttggtctagttattgaccttcctgtcattggcaacttcaccattcctctttctcagaagggagagataaagctcccaaccctctctgacatgtttgcctgattccaacaaaagacatagaagaaagaaaataaatcaataaatacaccctccatcatattttcctgttgtatcaatttggattttagtttttgggttcac

SEQ ID NO: 12157 - protein, 158 aa, Glycine max
IFAVLKMSQLLDKAKNYVAEKVTNMPKPEASVTDVDFKRVSRDSVEYLAKVSVSNPYSTPIPICEIKYSLKSAGKEIASGTIPDPGSLKASDTTMLDVPVKVPHSILLSLAKDIGADWDIDYQLDLGLVIDLPVIGNFTIPLSQKGEIKLPTLSDMFA

SEQ ID NO: 12158 - protein, 152 aa, Glycine max
MSQLLDKAKNYVAEKVTNMPKPEASVTDVDFKRVSRDSVEYLAKVSVSNPYSTPIPICEIKYSLKSAGKEIASGTIPDPGSLKASDTTMLDVPVKVPHSILLSLAKDIGADWDIDYQLDLGLVIDLPVIGNFTIPLSQKGEIKLPTLSDMFA

SEQ ID NO: 12159 - protein, 134 aa, Glycine max
MPKPEASVTDVDFKRVSRDSVEYLAKVSVSNPYSTPIPICEIKYSLKSAGKEIASGTIPDPGSLKASDTTMLDVPVKVPHSILLSLAKDIGADWDIDYQLDLGLVIDLPVIGNFTIPLSQKGEIKLPTLSDMFA

SEQ ID NO: 12160 - DNA, 1113 bp, Glycine max
tttttttctctctatctttaatttcctaaataaataacagatcatgtatatcatatactttattaaagaaaaggaattatatattcacagagtaaaatttttacatcgttatccaattataatttaataaaaattctttttcttcctttttatttattttatttttatttttctcttccgtgtcttctgtaaatctttgatgatcatgttcacttttctttcagccaagtgattctcttccccccgtgatctgcctataaatccaccaagcacacactcaaaggacacagtcacatttagataaaaaaaataaaaaagaaaaccaaaaaataatgtcaatggaaatgatggcaacggaacgtgtttgttatgttcactgcaacttctgcaacaccattctagcggttagtgttccatacagcagtttgctaaccatagtgacggttagatgtggacattgtgccaatttgttatcagttaacatgggagcttcacttcaagcatttccccctcaagaccctcagaaacagcacctaagctttcaagaaccaagcagcaaggaactgggatcatcttcaaaatgtagcaaaatagcgccatttgaggcagtagagcatgaactacctaggattcctcccattcgtcctacagagaagagacatcgtgttccttctgcttataatcgcttcattaaggaggaaattcaaaggattaaggctagtaatccagatatcagccacagggaggctttcagctcagcagccaaaaactatgcagtgggcacatttccctcacattcactttgggttaaagaacttaaagctggatggcaacaagcaagaaaagttggaccagggggaaggagctgaaaagtctaacggattctactgataatggaagcctgtgagtatgaacttgtttttttcatgcttgacctaaatcagtgaaaaaatgaggttgatcaaatttcccaatatatcgtacaactggatgggagactcctgcaaattaacctcagcctctcacaccaatgtttaatagtactacatatatgtattgcccttttctatatatcgttgttatgaaatgattgctattcttgtgattgcattc

SEQ ID NO: 12161 - protein, 178 aa, Glycine max
MSMEMMATERVCYVHCNFCNTILAVSVPYSSLLTIVTVRCGHCANLLSVNMGASLQAFPPQDPQKQHLSFQEPSSKELGSSSKCSKIAPFEAVEHELPRIPPIRPTEKRHRVPSAYNRFIKEEIQRIKASNPDISHREAFSSAAKNYAVGTFPSHSLWVKELKAGWQQARKVGPGGRS

SEQ ID NO: 12162 - protein, 176 aa, Glycine max
MEMMATERVCYVHCNFCNTILAVSVPYSSLLTIVTVRCGHCANLLSVNMGASLQAFPPQDPQKQHLSFQEPSSKELGSSSKCSKIAPFEAVEHELPRIPPIRPTEKRHRVPSAYNRFIKEEIQRIKASNPDISHREAFSSAAKNYAVGTFPSHSLWVKELKAGWQQARKVGPGGRS

SEQ ID NO: 12163 - protein, 174 aa, Glycine max
MMATERVCYVHCNFCNTILAVSVPYSSLLTIVTVRCGHCANLLSVNMGASLQAFPPQDPQKQHLSFQEPSSKELGSSSKCSKIAPFEAVEHELPRIPPIRPTEKRHRVPSAYNRFIKEEIQRIKASNPDISHREAFSSAAKNYAVGTFPSHSLWVKELKAGWQQARKVGPGGRS

SEQ ID NO: 12164 - DNA, 2135 bp, Glycine max
gaataagttgttcgagaaagaaaatgatcagagtggcatttttcttaaaaagccccgccatgagaagtatgctccattgaagttaatcatcatgtctgcaagtctggatgcacgcgctttctctgagtactttggtggtgccaaagctgttcacatccaagggagacagtttcctgtagatatattttatacccgtgatgcagagacagattatttagatgcttccttgataacaatattccagattcatttagaggagggccctggtgatatactagtatttctgactgggcaagaagagattgaatctgttgaaaggcttatcagtgagaaactcccacaattacctcaagaaagtcagaagcttctagttgtgcctatatttgcagctcttccatctgagcagcaaatgcgggtctttgcaccatctccatctgggtttcggaaggtgatattggcaactaatattgctgagacatcagtaacaattcccggaatcaagtatgtaattgatcctggatttgttaaagcacgttcttatgaccctggaaaaggcatggaatccttgattataatacctacatccaagtcccaagctctgcaaagaagtgggcgtgcagggcgtgaaggacctggaaaatgcttccgtctatatcctgaaagagaatttgagaaacttgaggactcaacaatgccagagattaagcgttgcaacctttctaatgtcattttgcagcttaaggctttgggtgttgatgacatactagggtttgatttcattgataaaccttcaagggcagctattataaaatcgttggagcagctatttttgttaggtgctctaacagatgaatgtcaactatctgatcctgttggtcatcaaatggctcgactgcccttggatcctctttattccaaagctcttattttagctagtcagtttaactgcctggaggagatgttgataactgtggcactgctgtctgtggaatccatattttatagtcctcgtgacaagttagaagaggcaagaactgcaacgaaatgcttctcaagtccagtgggagaccacatcactttgattaatgtgtatcgagcatctaatgatttcttggagaagagatcaatggaaatgaatatggcaaagactgaaaaggtttatagaaaatggtgcaaagaaaattttattaatagccggtctcttagacatgctcgtgacattcacaggcagattcagggacatgttgaacaaatgggtctgaatctttcttcttgtggagatgatatgcttcaattctgcagatgccttgctgcttcctttttcatcaatgcagctgtcaagcagcctgatgggacatacagggctttggcaagtggtcagatggtgcagatccacccttcttctgtattattccggcaaaaaccagagtgtgtgatatttaatgagttggtccaaactaaccataagtatgtccgaaatttaaccagagttgattacctatggttaaccgagctggctcctcaatattatgctatgcacaattaaattattgatgttgccactaaacaggttactagattatttatctgtgaaacagatcagtgcaagcctcagattatgccccgccactggtttatggatcttttcataatgaaaggttttgatttaaggggcttgcctttggcatttggtaactattggatgcctggtatgtggagatgccactgaatcctctaatgacaagcacttcatgctgagttgttgtcacgttattttctcttgggcatctatggccactaagattgaggaaaaaagtatgtggtagtagggtgcaccttacagttgtgacctcattggtgtggtgacttgaacaacggaattgagtagactatcaagttgtttataaatgttcaattctatcccattttaaaatgctcaattccttagtggtaatggtagatgatcatggtttaaacttctagaatatgaattgtattagtctgaaaagttattctttaaattcacatttatatgcactacatatcaatttttaggttagggcaattgttcatttctccctcattcagcaatatttgaggtccactaaatattatattattatatttgctttgtc

SEQ ID NO: 12165 - protein, 514 aa, Glycine max
NKLFEKENDQSGIFLKKPRHEKYAPLKLIIMSASLDARAFSEYFGGAKAVHIQGRQFPVDIFYTRDAETDYLDASLITIFQIHLEEGPGDILVFLTGQEEIESVERLISEKLPQLPQESQKLLVVPIFAALPSEQQMRVFAPSPSGFRKVILATNIAETSVTIPGIKYVIDPGFVKARSYDPGKGMESLIIIPTSKSQALQRSGRAGREGPGKCFRLYPEREFEKLEDSTMPEIKRCNLSNVILQLKALGVDDILGFDFIDKPSRAAIIKSLEQLFLLGALTDECQLSDPVGHQMARLPLDPLYSKALILASQFNCLEEMLITVALLSVESIFYSPRDKLEEARTATKCFSSPVGDHITLINVYRASNDFLEKRSMEMNMAKTEKVYRKWCKENFINSRSLRHARDIHRQIQGHVEQMGLNLSSCGDDMLQFCRCLAASFFINAAVKQPDGTYRALASGQMVQIHPSSVLFRQKPECVIFNELVQTNHKYVRNLTRVDYLWLTELAPQYYAMHN

SEQ ID NO: 12166 - protein, 484 aa, Glycine max
MSASLDARAFSEYFGGAKAVHIQGRQFPVDIFYTRDAETDYLDASLITIFQIHLEEGPGDILVFLTGQEEIESVERLISEKLPQLPQESQKLLVVPIFAALPSEQQMRVFAPSPSGFRKVILATNIAETSVTIPGIKYVIDPGFVKARSYDPGKGMESLIIIPTSKSQALQRSGRAGREGPGKCFRLYPEREFEKLEDSTMPEIKRCNLSNVILQLKALGVDDILGFDFIDKPSRAAIIKSLEQLFLLGALTDECQLSDPVGHQMARLPLDPLYSKALILASQFNCLEEMLITVALLSVESIFYSPRDKLEEARTATKCFSSPVGDHITLINVYRASNDFLEKRSMEMNMAKTEKVYRKWCKENFINSRSLRHARDIHRQIQGHVEQMGLNLSSCGDDMLQFCRCLAASFFINAAVKQPDGTYRALASGQMVQIHPSSVLFRQKPECVIFNELVQTNHKYVRNLTRVDYLWLTELAPQYYAMHN

SEQ ID NO: 12167 - protein, 378 aa, Glycine max
MRVFAPSPSGFRKVILATNIAETSVTIPGIKYVIDPGFVKARSYDPGKGMESLIIIPTSKSQALQRSGRAGREGPGKCFRLYPEREFEKLEDSTMPEIKRCNLSNVILQLKALGVDDILGFDFIDKPSRAAIIKSLEQLFLLGALTDECQLSDPVGHQMARLPLDPLYSKALILASQFNCLEEMLITVALLSVESIFYSPRDKLEEARTATKCFSSPVGDHITLINVYRASNDFLEKRSMEMNMAKTEKVYRKWCKENFINSRSLRHARDIHRQIQGHVEQMGLNLSSCGDDMLQFCRCLAASFFINAAVKQPDGTYRALASGQMVQIHPSSVLFRQKPECVIFNELVQTNHKYVRNLTRVDYLWLTELAPQYYAMHN

SEQ ID NO: 12168 - DNA, 1173 bp, Glycine max
aaaagtaaaaatgtggtttcttggttggaaaggggcatcagggttctcagcctcttccacagccgaacaagtcactcaagggattgatggaaccgccctcaccgccatcgtcacaggagcaacaagtggccttggtctggagaccacccgggttcttgcattgcgcggtgtccatgttgttatggcagtaaggagtctggacagtggtaagaatgtcaaagaaacaatacttaaggaaatcccctcggctaaaattgatgtcatggagttagatctaagctctatggcatcggtaaggaaatttgcagcagattttaattcttctggtcttccactcaatatcctaattaacaatgcaggggtgatggcgactccattcacactttcccaagacaatattgaattgcagttcgcaaccaatcatttaggccattttctcttgacaaaccttttattagaaactatgaaaaaaacagtaggggtatgcaaccaggaaggaagaatagttattctatcatcagaggcacacagatttgcttatcgtgaagggattcaatttgataagatcaatgatgaatcagggtatagcagttattttgcttatggacaatcaaagcttgctaatatcttacatgcaaatgagcttgcaaggcgcttgaaggaagaaggagtggaaatcactgtcaactcccttcatcctggatcaattattacaaatattctgcgataccatgattatattaatgcccttgctaacatggtgggcaagtacttccttaaaaatgtgcaacagggagctgcaactcaatgttatgtggcattgcatccacaagtcaagggaatatctggtgaatactttatggatagcaataaaggaaacccggcctctctggctaaagattcagagctggcaaaaaaactatgggaattcagcttaagcctgactaatccaaagtagcttaaaggtttgactagaggaagcttcataaatgccaacattattgtattggaaaacaagtttcagcgaattagaaatttatagtggtgtaagcttacaacttgaaggtttttattaattattacagctcagactactatccattacagtattgttttggtaccgttattgttgaaaatcaagcagtatacataattagtttcaaacttgactcc

SEQ ID NO: 12169 - protein, 318 aa, Glycine max
KVKMWFLGWKGASGFSASSTAEQVTQGIDGTALTAIVTGATSGLGLETTRVLALRGVHVVMAVRSLDSGKNVKETILKEIPSAKIDVMELDLSSMASVRKFAADFNSSGLPLNILINNAGVMATPFTLSQDNIELQFATNHLGHFLLTNLLLETMKKTVGVCNQEGRIVILSSEAHRFAYREGIQFDKINDESGYSSYFAYGQSKLANILHANELARRLKEEGVEITVNSLHPGSIITNILRYHDYINALANMVGKYFLKNVQQGAATQCYVALHPQVKGISGEYFMDSNKGNPASLAKDSELAKKLWEFSLSLTNPK

SEQ ID NO: 12170 - protein, 315 aa, Glycine max
MWFLGWKGASGFSASSTAEQVTQGIDGTALTAIVTGATSGLGLETTRVLALRGVHVVMAVRSLDSGKNVKETILKEIPSAKIDVMELDLSSMASVRKFAADFNSSGLPLNILINNAGVMATPFTLSQDNIELQFATNHLGHFLLTNLLLETMKKTVGVCNQEGRIVILSSEAHRFAYREGIQFDKINDESGYSSYFAYGQSKLANILHANELARRLKEEGVEITVNSLHPGSIITNILRYHDYINALANMVGKYFLKNVQQGAATQCYVALHPQVKGISGEYFMDSNKGNPASLAKDSELAKKLWEFSLSLTNPK

SEQ ID NO: 12171 - protein, 258 aa, Glycine max
MAVRSLDSGKNVKETILKEIPSAKIDVMELDLSSMASVRKFAADFNSSGLPLNILINNAGVMATPFTLSQDNIELQFATNHLGHFLLTNLLLETMKKTVGVCNQEGRIVILSSEAHRFAYREGIQFDKINDESGYSSYFAYGQSKLANILHANELARRLKEEGVEITVNSLHPGSIITNILRYHDYINALANMVGKYFLKNVQQGAATQCYVALHPQVKGISGEYFMDSNKGNPASLAKDSELAKKLWEFSLSLTNPK

SEQ ID NO: 12172 - DNA, 1591 bp, Glycine max
acctgcaacatgctggtcaggaagagatccttgttaatgtttctgaaacctttggggcctaaatatatgttgataaagccaagtattcgtaatgttttgagaatctagcacttactgtgcctgaaatcctctgaagatccaacttctcgtttccgcttgtttgatggatctcaaaatttatatgaaagagcaagagcaaagctggttgaggcctaagcaactctccaacctgagcctctcgttgtgcgcccttctgcccagtggtatgcttgtgaagaaaagttctcggatattgaaaacactagaaagaaaaggatggatgaagcagttaaggagcagttaaggataagtttggtgtctggcatgtttgttactcaatgcactcatccaaggagaattggaatgggcacttcaagcacgtaggtgggttgtttcaacaacctccagctgcaggactatggagctggattatgtaaagacacacttatttaactctaaaggagctctcaataactctatgtggaagcttctggatatgactccagaaacttctgatcatgttgatgcatcagaaaaatctgcgagctttaatctttttcttgaagaaacccctcagccttgtgcacaaactggtgtgcaaactaaatcacctgtcaaacagttcactgagactaaaacactgaaagcattgcttcttaataatggcaaagacttgcccatctcgttatttggaagagcaaggttcactctccaagatagtggcttttcaataggaggatgtaatacattgcctgttaatgtcctttgccaaacagtttcaaatgatgcacgacaagaattcttgcaagatgctgaagtgaaggagaggtcaccagaaaaaagaatgatttacattgagtggagaagaatcagcaatctgaggttcaggaggacacgagttcatgagagtgccttttatctaaatattggatcttcaggcttgagtggaagtgtgcgaaagttgtacaggtcaatgaatgttcctgtgcctcaacctcttccctccttaagggatcttataaattccagaaaacgtgccaagaggggaattaaatattaatcttgtttttcttcagttttcttccatttatcatgcttggagatgttcatgcacgtacgttaagattttacaagaattttttttgccttgctcttttccgaaccatcatccatgtcacgagtgcttgacaagaagcaggaaggtggaagggaagaatatgcaggattgtgtaagagttgtcaaatctgtttcaatactgttatagtcgttttctttgaataagagacacatcaaaggatgcttcactatcattatggcaattgaaacattatttttaaagttttacatataatcacaaggttgaggcctaacaaggagcagcagaagtcagcagcaagcttctttggctatagaacatagctactatccccagtatatagtgaagagattcattaactttcctgacctggatatacattgtattctattttatcggctggatattcattgtattgtcgcaaccaatactaaagcattctgtttcactgcttc

SEQ ID NO: 12173 - protein, 213 aa, Glycine max
MELDYVKTHLFNSKGALNNSMWKLLDMTPETSDHVDASEKSASFNLFLEETPQPCAQTGVQTKSPVKQFTETKTLKALLLNNGKDLPISLFGRARFTLQDSGFSIGGCNTLPVNVLCQTVSNDARQEFLQDAEVKERSPEKRMIYIEWRRISNLRFRRTRVHESAFYLNIGSSGLSGSVRKLYRSMNVPVPQPLPSLRDLINSRKRAKRGIKY

SEQ ID NO: 12174 - protein, 193 aa, Glycine max
MWKLLDMTPETSDHVDASEKSASFNLFLEETPQPCAQTGVQTKSPVKQFTETKTLKALLLNNGKDLPISLFGRARFTLQDSGFSIGGCNTLPVNVLCQTVSNDARQEFLQDAEVKERSPEKRMIYIEWRRISNLRFRRTRVHESAFYLNIGSSGLSGSVRKLYRSMNVPVPQPLPSLRDLINSRKRAKRGIKY

SEQ ID NO: 12175 - protein, 187 aa, Glycine max
MTPETSDHVDASEKSASFNLFLEETPQPCAQTGVQTKSPVKQFTETKTLKALLLNNGKDLPISLFGRARFTLQDSGFSIGGCNTLPVNVLCQTVSNDARQEFLQDAEVKERSPEKRMIYIEWRRISNLRFRRTRVHESAFYLNIGSSGLSGSVRKLYRSMNVPVPQPLPSLRDLINSRKRAKRGIKY

SEQ ID NO: 12176 - DNA, 1595 bp, Glycine max
  misc_feature (1517)..(1517): n is a, c, g, or t
  misc_feature (1579)..(1579): n is a, c, g, or t
gatcagagttgccatatatatagcaaagtgggaagaaagcaaggtaggtagccatggagcagtcagaaaaatcgcccacgaaaatatcaccactaagatcatcatttccgagagatccacgtggctcactcgaagtgttcaacccaaacacttcagctttagcttcaacttcaaccaacgcccgcgtgcgttcacagcctctttggaaatcgtggacggagtcggaagaaccgcgcaatgaaatcgctgccacgtcgtggatggccatcaatccggcggccggagaaagcggcgaggcggcgcagagggcggcggagtgggggttggtgctccggaccgacaccgagaccggcaagccgcagggggtggcggtgaggaactccggcggcgaggaacctaacgccgcgaaactcgccgccgctgcttcgtcatccaggaagaactctcagaactccgccagaacttccggcgactcttcggacggcggcggcggaggcggagggattccgagaatttcggaggatgtgatgggagctttgtcggcttttcaacagactttcgtggtttcggatgctaccaaagccgattacccgatcctgtatgcgagtgctgggttctttaaaatgacgggttataagtccaaggaagttattgggagaaattgtcgttttttacagggtgcggacacggatcccgaagacgtggcaaagataagggaagcattgcaagctgggaaaatttactgcggaaggctattaaattacaagaaggatgggacacctttctggaaccttctcactatttcacccatcaaggatgaagatggcaaagttctcaaatttattggaatgcaagtggaggttagcaagcacacggaggggtccaaggagaagacgctacgtccaaatggattgcccgaatccttgattcgatatgatgcacggcagaaagagaaggctacaagttcagtaactgagttgctgcaggccatgaagcgcccccgagcattaagtgaatccgcaagccgtccctccatcagaaaatcaggatctagatcttcagacgaagaaaaattagaacaagaacaagaagatgacaaagagaaagcacaaaaaacattaagaagaatatctgagagtggagcttcatttggacgcaagtccgaaggatcaggaaatagaatttcaatggaaagaatcagtgaactgcccgaaaataaacacagaaactctcaacgacgttctttcatggggttcaggaggaaaagtcagtccaatgatgaaagcatggatagtgaagtcattgaggacgagagctctgagagtgaggatgatgagaggcctaatagttttgaattagatgacaaagaaaagcagagggaaaagcgaaaaggtcttgatcttgctaccacgcttgaacgtattgagaaaaacttcgtcattactgatccaaggcttccagacaatcctataatctttgcatcggatagcttcttagagcttacagaatatagtcgngaagaaatcttgggaaggaattgcaggtttctgcaaggacctgaaactgatccagcaactgngaacaaaattagagag

SEQ ID NO: 12177 - protein, 514 aa, Glycine max
  misc_feature (488)..(488): Xaa can be any naturally occurring amino acid
  misc_feature (509)..(509): Xaa can be any naturally occurring amino acid
MEQSEKSPTKISPLRSSFPRDPRGSLEVFNPNTSALASTSTNARVRSQPLWKSWTESEEPRNEIAATSWMAINPAAGESGEAAQRAAEWGLVLRTDTETGKPQGVAVRNSGGEEPNAAKLAAAASSSRKNSQNSARTSGDSSDGGGGGGGIPRISEDVMGALSAFQQTFVVSDATKADYPILYASAGFFKMTGYKSKEVIGRNCRFLQGADTDPEDVAKIREALQAGKIYCGRLLNYKKDGTPFWNLLTISPIKDEDGKVLKFIGMQVEVSKHTEGSKEKTLRPNGLPESLIRYDARQKEKATSSVTELLQAMKRPRALSESASRPSIRKSGSRSSDEEKLEQEQEDDKEKAQKTLRRISESGASFGRKSEGSGNRISMERISELPENKHRNSQRRSFMGFRRKSQSNDESMDSEVIEDESSESEDDERPNSFELDDKEKQREKRKGLDLATTLERIEKNFVITDPRLPDNPIIFASDSFLELTEYSXEEILGRNCRFLQGPETDPATXNKIRE

SEQ ID NO: 12178 - protein, 445 aa, Glycine max
  misc_feature (419)..(419): Xaa can be any naturally occurring amino acid
  misc_feature (440)..(440): Xaa can be any naturally occurring amino acid
MAINPAAGESGEAAQRAAEWGLVLRTDTETGKPQGVAVRNSGGEEPNAAKLAAAASSSRKNSQNSARTSGDSSDGGGGGGGIPRISEDVMGALSAFQQTFVVSDATKADYPILYASAGFFKMTGYKSKEVIGRNCRFLQGADTDPEDVAKIREALQAGKIYCGRLLNYKKDGTPFWNLLTISPIKDEDGKVLKFIGMQVEVSKHTEGSKEKTLRPNGLPESLIRYDARQKEKATSSVTELLQAMKRPRALSESASRPSIRKSGSRSSDEEKLEQEQEDDKEKAQKTLRRISESGASFGRKSEGSGNRISMERISELPENKHRNSQRRSFMGFRRKSQSNDESMDSEVIEDESSESEDDERPNSFELDDKEKQREKRKGLDLATTLERIEKNFVITDPRLPDNPIIFASDSFLELTEYSXEEILGRNCRFLQGPETDPATXNKIRE

SEQ ID NO: 12179 - protein, 356 aa, Glycine max
  misc_feature (330)..(330): Xaa can be any naturally occurring amino acid
  misc_feature (351)..(351): Xaa can be any naturally occurring amino acid
MGALSAFQQTFVVSDATKADYPILYASAGFFKMTGYKSKEVIGRNCRFLQGADTDPEDVAKIREALQAGKIYCGRLLNYKKDGTPFWNLLTISPIKDEDGKVLKFIGMQVEVSKHTEGSKEKTLRPNGLPESLIRYDARQKEKATSSVTELLQAMKRPRALSESASRPSIRKSGSRSSDEEKLEQEQEDDKEKAQKTLRRISESGASFGRKSEGSGNRISMERISELPENKHRNSQRRSFMGFRRKSQSNDESMDSEVIEDESSESEDDERPNSFELDDKEKQREKRKGLDLATTLERIEKNFVITDPRLPDNPIIFASDSFLELTEYSXEEILGRNCRFLQGPETDPATXNKIRE

SEQ ID NO: 12180 - DNA, 2289 bp, Glycine max
  misc_feature (713)..(714): n is a, c, g, or t
  misc_feature (1489)..(1489): n is a, c, g, or t
ggttggtgaatgagaatcggattgaagaagaagaagacgaccagcggtgcagcttcgaaattgctggccatggcgaagaagctaagctcgaagcccaccattttgttcatcttcgtctctttcatgcttttttgcgcctttcttcctgttttcgctcctcttccttctttctcctctcaccattctcatcgcaatacagttaacagaaagttcgagatcgccaacgataggttctggaaagatggtgaaccatttcagatcatcggtggtgacgtgcattattttcgagtgcatccagagtactgggaagatagactgctaaaagccaaggcattgggcttgaacacaattcagacatatgttccttggaatctgcatgagcccgcaccgggaaagcttgtttttgagggttttgcaaacattgaagcattcctcaacctttgtcacaaacatggtctccttgtgatgattcgacccggaccatacatatgcggagagtgggattggggcggtttcccaggttggttctattccatgatcccaacccccaaaccaagatcatctgatcctacttatcttcaactggttgaaagatggtggggtaacctgcttccaaagtttgttcctcttctatatgaaaatggaggccctataataatggttcagattgaaaatgagtatggttcttatggagatgacaaagaatatctccnntccaaaccccttggaatcaccctggcaagaggtcatcttgggcatgatgttattttatacactacagatggaggcaccagggaaactcttgagaaaggaaccattcgtggggataccatcttttcagctgttgactttggtactggtgaagatccttggcctatattcaagttacaaaaggagttcaatgccccaggaaaatcaccacctttgtcagctgaattttacaccgggtggcttacacactggggagagaaaaatgctcagactgatgctgattttacagcagctgctcttgaaaaaattttgcaaaaaaatggttctgcagttctctatatggcccatggtgggacaaactttggattttataatggagcaaatactggtgtagatgaggctgactacaaacctgatctcacttcatacgattatgatgcaccaattagggaatctggtgacgttgacaattcaaaattcaatgctattcgaagggttatagccagatatagctcagtacctcttccatctattccctctaataatgaaaaggcaagatacggaccaattcacttacaaagagaggctttcgtatttgacatgtttgatttcaccaattccaccaatgtgtttaaatctgaaaccccaatgtcaatggagtatgtgggccagttgtttggtttcgtattgtatgtcactgaatacaaagcaaagagaggtggaagaattttgttcataccaaagttacatgacagagctcaagtattttaaaattttncatgcccctctgaagaaagtggtgcaaggccaacttacattggaactattgaaaggtggttaaataacaaagtaactcttccggatattaaatgccattctaagatcaacttatttattctggttgaaaacatgggtcgtgtaaattacgggtctttcatctttgataggaagggcattctgtcttctgtttatctggacaaggaacaagtaaaagggtggaaaatgttccctattcctttgcacaacctgaatgaaatgtcaacctacaatcccatcacgcaagttgcatattctgcattcagtggcatatcatcattcagaaaaaagttgatttataagaatgggaatacttcaaaagaacctgctttttattcgggccacttcttaattgataaatcaagtcaggtcaaggatacatttatatcattcaacaattggggaaaaggcattgtgtttgttaatgacttcaatataggaagatattggccgttgagaggaccacagtgcaacctctacgttcctgctccactccttaaacaaggagataactttttggtaatactagagttggaatctccagaccccgaacttgtggtgcacacagtggatgagccagacttcacatgtggctctagtgggacgagtctccatcagctgtaataaattgtcataaaaatatgcttgacctttgaaaatacatgtaagaatttggaggttatcgaatgactatcaagtcattatgcttgtaaatattaactatggttattattgctctttaatttttagctacaattctgc

SEQ ID NO: 12181 - protein, 490 aa, Glycine max
  misc_feature (235)..(235): Xaa can be any naturally occurring amino acid
MRIGLKKKKTTSGAASKLLAMAKKLSSKPTILFIFVSFMLFCAFLPVFAPLPSFSSHHSHRNTVNRKFEIANDRFWKDGEPFQIIGGDVHYFRVHPEYWEDRLLKAKALGLNTIQTYVPWNLHEPAPGKLVFEGFANIEAFLNLCHKHGLLVMIRPGPYICGEWDWGGFPGWFYSMIPTPKPRSSDPTYLQLVERWWGNLLPKFVPLLYENGGPIIMVQIENEYGSYGDDKEYLXSKPLGITLARGHLGHDVILYTTDGGTRETLEKGTIRGDTIFSAVDFGTGEDPWPIFKLQKEFNAPGKSPPLSAEFYTGWLTHWGEKNAQTDADFTAAALEKILQKNGSAVLYMAHGGTNFGFYNGANTGVDEADYKPDLTSYDYDAPIRESGDVDNSKFNAIRRVIARYSSVPLPSIPSNNEKARYGPIHLQREAFVFDMFDFTNSTNVFKSETPMSMEYVGQLFGFVLYVTEYKAKRGGRILFIPKLHDRAQVF

SEQ ID NO: 12182 - protein, 470 aa, Glycine max
  misc_feature (215)..(215): Xaa can be any naturally occurring amino acid
MAKKLSSKPTILFIFVSFMLFCAFLPVFAPLPSFSSHHSHRNTVNRKFEIANDRFWKDGEPFQIIGGDVHYFRVHPEYWEDRLLKAKALGLNTIQTYVPWNLHEPAPGKLVFEGFANIEAFLNLCHKHGLLVMIRPGPYICGEWDWGGFPGWFYSMIPTPKPRSSDPTYLQLVERWWGNLLPKFVPLLYENGGPIIMVQIENEYGSYGDDKEYLXSKPLGITLARGHLGHDVILYTTDGGTRETLEKGTIRGDTIFSAVDFGTGEDPWPIFKLQKEFNAPGKSPPLSAEFYTGWLTHWGEKNAQTDADFTAAALEKILQKNGSAVLYMAHGGTNFGFYNGANTGVDEADYKPDLTSYDYDAPIRESGDVDNSKFNAIRRVIARYSSVPLPSIPSNNEKARYGPIHLQREAFVFDMFDFTNSTNVFKSETPMSMEYVGQLFGFVLYVTEYKAKRGGRILFIPKLHDRAQVF

SEQ ID NO: 12183 - protein, 452 aa, Glycine max
  misc_feature (197)..(197): Xaa can be any naturally occurring amino acid
MLFCAFLPVFAPLPSFSSHHSHRNTVNRKFEIANDRFWKDGEPFQIIGGDVHYFRVHPEYWEDRLLKAKALGLNTIQTYVPWNLHEPAPGKLVFEGFANIEAFLNLCHKHGLLVMIRPGPYICGEWDWGGFPGWFYSMIPTPKPRSSDPTYLQLVERWWGNLLPKFVPLLYENGGPIIMVQIENEYGSYGDDKEYLXSKPLGITLARGHLGHDVILYTTDGGTRETLEKGTIRGDTIFSAVDFGTGEDPWPIFKLQKEFNAPGKSPPLSAEFYTGWLTHWGEKNAQTDADFTAAALEKILQKNGSAVLYMAHGGTNFGFYNGANTGVDEADYKPDLTSYDYDAPIRESGDVDNSKFNAIRRVIARYSSVPLPSIPSNNEKARYGPIHLQREAFVFDMFDFTNSTNVFKSETPMSMEYVGQLFGFVLYVTEYKAKRGGRILFIPKLHDRAQVF

SEQ ID NO: 12184 - DNA, 475 bp, Glycine max
aggttcttacttatggggaaaggaagcccatcgagtatttcctgaaaacagttgaggagattactttgaatgacattttgtcaaccgcaaaggagatgatgtctacaccactcacaatggcatcgtggggcgacgttattcatgttcctagctacgagtctgttagccgcaagtttcactcgaagtgagaggatccagcatgacctgttccaacaactgatgtgaagcctgcaacggccctcagctgggacagttactctcccacagaataaaaaaccatgtggtttctagcgcccctcctaattactccctctgcatgtatacgccaagcatgtttttttggtaagaatcatcaagccccttggcgactcgtttctgagtttcgcagcggcgctagattttattttatgtggacaagcgagctttctgggtgcgctcgtgcagaaatattttgccaacgtattttgcagtttag

SEQ ID NO: 12185 - protein, 65 aa, Glycine max
MWFLAPLLITPSACIRQACFFGKNHQAPWRLVSEFRSGARFYFMWTSELSGCARAEIFCQRILQF

SEQ ID NO: 12186 - protein, 61 aa, Glycine max
VLTYGERKPIEYFLKTVEEITLNDILSTAKEMMSTPLTMASWGDVIHVPSYESVSRKFHSK

SEQ ID NO: 12187 - DNA, 620 bp, Glycine max
tggttttggatgcagcatactccgagcagccggcttctttaatggggacgttatcggatacacaaactccaggtcgaaaaaggggtgcctctggtgttgtggtggagaaaactgtggagaggaggcagaagaggatgattaaaaatagggaatctgctgctcggtcacgggcaagaagacaggcatacacacaagaactggagattaaagtttcacgattagaagaggagaatgaaaggcttagaagactaaatgaaatggagagggcattgccatctgtgccaccacctgagcctaagccaaagcaacagcttcgcagaactagttcagccatcttttgatatcttaattgcaatgaattcctaattcttgcccatgctatcacatcacatagctctcatgtgcattatactcccgcctcttcaagtttggttatagatgggaggctattgtttgtgatgctatcagttctccccagcttgctctattctactaatgtttacctcttatgtatattttgataagtttggcttacaacttaagctgctctataaatatacttactctaattttgggcccatttgtgggaattatgaaattataagtcttactttttattt

SEQ ID NO: 12188 - protein, 112 aa, Glycine max
VLDAAYSEQPASLMGTLSDTQTPGRKRGASGVVVEKTVERRQKRMIKNRESAARSRARRQAYTQELEIKVSRLEEENERLRRLNEMERALPSVPPPEPKPKQQLRRTSSAIF

SEQ ID NO: 12189 - protein, 99 aa, Glycine max
MGTLSDTQTPGRKRGASGVVVEKTVERRQKRMIKNRESAARSRARRQAYTQELEIKVSRLEEENERLRRLNEMERALPSVPPPEPKPKQQLRRTSSAIF

SEQ ID NO: 12190 - protein, 68 aa, Glycine max
MIKNRESAARSRARRQAYTQELEIKVSRLEEENERLRRLNEMERALPSVPPPEPKPKQQLRRTSSAIF

SEQ ID NO: 12191 - DNA, 914 bp, Glycine max
  misc_feature (265)..(265): n is a, c, g, or t
ttcagttcaccagcttttggcaagagagatcaattacaaactggtacatttgatgctgcacaagcaaaggaaactggcagattaggtgaatttcttgcatgcaaatactttgtcgataaagttggcaatactgcagtaaggtgggttaataaagataatgaaactggacttccatatgatttagtcattggggaggataacagccaagaattcatagaagttaaagcaaccagatctccaagaaaagactggttcaacatatcancgagagagtggcagtttgcaaatgaaagaggccaatcttttagcattgcatttgtcgctataatgggaaataatgttgcaagggtcacgatattcaaagatccagtgaagttatgccagcgaggtgagctgcaattggctgttatgatgcgaagacaacagaagcagttctctgttgtctcatagcttctgttcttgttttactatgttgggtggatagacttagtgaagcccatattatgatttgcaaaaagctatcttttggcatcatggcatgccatagaaatccaattggatatcacttaatgcaagatatgttgatcacgtgagttgttgtacacaacattttgctgctacatggatttgtttctacttttgcatggaagatacctgatgcaaatagtgtgagaatacaataagcagattttttctgccttctcttattcatggagattcagtttcattcaggtcttcttgaaagtagttcctgtcagtttcagctttttgtatgtgtatatctctagtgtttatggctgcaacatttgcgtgtaacatatttttcgtttaattgggcgaagcttaaggtccacatctgagcatgtaaatacaaacttgtctacgcggttatgttccactatctattaagactt

SEQ ID NO: 12192 - protein, 149 aa, Glycine max
  misc_feature (89)..(89): Xaa can be any naturally occurring amino acid
FSSPAFGKRDQLQTGTFDAAQAKETGRLGEFLACKYFVDKVGNTAVRWVNKDNETGLPYDLVIGEDNSQEFIEVKATRSPRKDWFNISXREWQFANERGQSFSIAFVAIMGNNVARVTIFKDPVKLCQRGELQLAVMMRRQQKQFSVVS

SEQ ID NO: 12193 - DNA, 584 bp, Glycine max
tggctgggatgactatggctgtgatggtattttaggccattttagtgaaacactcttgattttcttcttacctcaagttttgaacttcctcttgtcactcccccagctttctggctatattccttgtccacgtcatcgactgccaaggtttgaccctcaaactggactactgactgggacaaatgatgggacacttcttaacttctttctaagaaatttaggccgaaagtccgaaaaggcactttgtatttatcttcttgctttccaggctatagcgtgctgtttatgtttcttgctacggtatttccttgctggttggtacaaatgaaagcacgaagtggataaaagaaaagatatggatgagaaccacgcgataggctgattttgttgtatatcatttttgtagaataacttagtgagaataggcatatatgttggtggtgaaggaattttgttaacttaaagattttgcatagattttcgttatctgaatgttgtgtactaatatcaacttagggggtgtttggtacaagaaaagttattttttaccgaggaatcaagattcatgggaatcataaatcacg

SEQ ID NO: 12194 - protein, 108 aa, Glycine max
GWDDYGCDGILGHFSETLLIFFLPQVLNFLLSLPQLSGYIPCPRHRLPRFDPQTGLLTGTNDGTLLNFFLRNLGRKSEKALCIYLLAFQAIACCLCFLLRYFLAGWYK

SEQ ID NO: 12195 - DNA, 598 bp, Glycine max
  misc_feature (200)..(200): n is a, c, g, or t
aatgaaggccaactctatggtacctattatctatttttactttgtattaatgactttaacaaattaaatttggtgtgcagatcatggattactcgtctctaccacatttctgtagaagagaaggttctggatcatccagacattctgagagtggtagtgaaaattgctattccttggatcatcccttccatcaagagctntacaatcacatcaagcagcaagccagactccgtgaagctgttgaacccatcaagcagggatcatttcatgtagattttccagtacctccagatgatgaagttgagattgccaagactatagagtcagagttacataagtttgagaacggaaatggtgtctaatacgttcttttaggatctactgtggagaccttaaaatcagagatcttttgcttagtacaaccaatgtaggaagaagactccacattagaattacttctatcaggattcggcagaattagttagcattgtttatgtatgttaaaagagaaattaaggggtagtcaacttaatgcaaatcccagctttacatcgtatcacaatgcaagagatcaatgttaaatataatattttatcct

SEQ ID NO: 12196 - protein, 92 aa, Glycine max
  misc_feature (39)..(39): Xaa can be any naturally occurring amino acid
MDYSSLPHFCRREGSGSSRHSESGSENCYSLDHPFHQEXYNHIKQQARLREAVEPIKQGSFHVDFPVPPDDEVEIAKTIESELHKFENGNGV

SEQ ID NO: 12197 - protein, 90 aa, Glycine max
  misc_feature (67)..(67): Xaa can be any naturally occurring amino acid
NEGQLYGTYYLFLLCINDFNKLNLVCRSWITRLYHISVEEKVLDHPDILRVVVKIAIPWIIPSIKSXTITSSSKPDSVKLLNPSSRDHFM

SEQ ID NO: 12198 - DNA, 547 bp, Glycine max
  misc_feature (519)..(519): n is a, c, g, or t
accgtacggcgtacacggatctcgctcggccatcgggactgtacaaggacgagagggagaagagaacagcggattcatcaccgccaggcgtcaggtcagagtgtgttaagacaagatggtggcgaatggcgacgcacctgctagagggagtgcggcggcagctgcaagcctgcgcgggcgtaggaccacaagcggtgctgctgctggcggaggtggtgccagctcgatgctccagttttacaccgatgaggctgcgggccgcaaaatgtcaccaaacaccgttctgatcatgagcattgggttcatcgctgttgtcgctatgctccatgtttttgggaagctgtaccgcacctccaactaggttggtactaccataaccaagaaacagaggccaccaagagaggagccttatagagccatttcaatggatagcaagtgactatcagagaggaaccttgtagagtgatttcaatggatagcaagtgactatcggattgtgaactgttatagaagtttatntacacaacttgcaatgctcagggctatg

SEQ ID NO: 12199 - protein, 94 aa, Glycine max
RTAYTDLARPSGLYKDEREKRTADSSPPGVRSECVKTRWWRMATHLLEGVRRQLQACAGVGPQAVLLLAEVVPARCSSFTPMRLRAAKCHQTPF

SEQ ID NO: 12200 - protein, 81 aa, Glycine max
MVANGDAPARGSAAAAASLRGRRTTSGAAAGGGGASSMLQFYTDEAAGRKMSPNTVLIMSIGFIAVVAMLHVFGKLYRTSN

SEQ ID NO: 12201 - protein, 53 aa, Glycine max
MATHLLEGVRRQLQACAGVGPQAVLLLAEVVPARCSSFTPMRLRAAKCHQTPF

SEQ ID NO: 12202 - DNA, 637 bp, Glycine max
  misc_feature (630)..(630): n is a, c, g, or t
ggtatcaggatccatttgctgcatcgctgagtgttccaccaccatcctatgtgcaaatggctgatatggagaagaagcagcacttgcttgtgcaggagcagcaggtgtggcatcagtatgcaagggatgggatgcaaggtcaatctagcttggccaaactgaatggcgctggatactatgccggaggtcctatgcccatgatgccttatgggatgcccccagttaatggaatgggacctccaaccgggtattatcacactccttactgataccccttttcacttttttctttgtgtcatatctataggttgtttcgtttattttttactatgacatagtgttttccttggtttcaaatgatgtcatcttattcttgggatctgcacattagtacaacggggatgctaaggagactgggttgaagagacaaattcttgttgggttttgatgctgggagatgtgaaactcatccgtgatgtctctctgtattttgtaatagtagcattttcttctcgattttgtacttccaagtgattcttgcaccttaaaaacaaactattaactactgtaaattttattaaatgctggtgctgatgaacacgattggttataccaaatgatatttccttnttgtggg

SEQ ID NO: 12203 - protein, 88 aa, Glycine max
YQDPFAASLSVPPPSYVQMADMEKKQHLLVQEQQVWHQYARDGMQGQSSLAKLNGAGYYAGGPMPMMPYGMPPVNGMGPPTGYYHTPY

SEQ ID NO: 12204 - protein, 70 aa, Glycine max
MADMEKKQHLLVQEQQVWHQYARDGMQGQSSLAKLNGAGYYAGGPMPMMPYGMPPVNGMGPPTGYYHTPY

SEQ ID NO: 12205 - protein, 67 aa, Glycine max
MEKKQHLLVQEQQVWHQYARDGMQGQSSLAKLNGAGYYAGGPMPMMPYGMPPVNGMGPPTGYYHTPY

SEQ ID NO: 12206 - DNA, 1118 bp, Glycine max
  misc_feature (235)..(235): n is a, c, g, or t
  misc_feature (259)..(259): n is a, c, g, or t
  misc_feature (953)..(953): n is a, c, g, or t
gaacaactgaagtaagaaagagagagagagagagaaagagaagtgtgtagttggtgaagtttttgagaagaatatggaacgaagtggcggaatggtaacggggtcgcatgaaaggaacgaacttgttagagttagacacggttctgacagtgggtctaaacccttgaagaatttaaatggtcagatttgtcaaatatgtggtgacaccattggattaacggctactggtgacctntttgttgcttgtcatgagtgtggnttcccactttgtcattcttgttacgagtatgagctgaaaaatgtgagccagtcttgtccccagtgcaagactgcattcacaagtcaccaagagggtgctgaagtggagggagatgatgatgatgaagacgatgctgatgatctagataatgagatcaactatggccaaggaaacagttccaaggcggggatgctatgggaagaagatgctgacctctcttcatcttctggacatgattctcaaataccaaacccccatctagcaaacgggcaaccgatgtctggtgagtttccatgtgctacttctgatgctcaatctatgcaaactacatctataggtcaatccgaaaaggttcactcactttcatatgctgatccaaagcaaccaggtcctgagagtgatgaagagataagaagagtgccagagattggaggtgaaagtgccggaacttcggcctctcagccagatgccggttcaaatgctggtacagagcgtgttcaggggacaggggagggtcagaagaagagagggagaagcccagctgataaagaaagtaaacggctaaagaggctactgaggaaccgagtttcagctcagcaagcaagggagaggaagaaggcatacttgattgatttggaaacaagagtcaaagacttagagaagaagaactcagagctcaaagaaagactttccnctttgcagaatgagaaccaaatgcttagacaaatattgaagaacacaacagcaagcaggagagggagcaataatggtaccaataatgctgagtgaacataatgtcaaaagatggcagagaaaacttatagatggaatagatttagaaagagagaatacattagcc

SEQ ID NO: 12207 - protein, 324 aa, Glycine max
  misc_feature (54)..(54): Xaa can be any naturally occurring amino acid
  misc_feature (62)..(62): Xaa can be any naturally occurring amino acid
  misc_feature (294)..(294): Xaa can be any naturally occurring amino acid
MERSGGMVTGSHERNELVRVRHGSDSGSKPLKNLNGQICQICGDTIGLTATGDXFVACHECXFPLCHSCYEYELKNVSQSCPQCKTAFTSHQEGAEVEGDDDDEDDADDLDNEINYGQGNSSKAGMLWEEDADLSSSSGHDSQIPNPHLANGQPMSGEFPCATSDAQSMQTTSIGQSEKVHSLSYADPKQPGPESDEEIRRVPEIGGESAGTSASQPDAGSNAGTERVQGTGEGQKKRGRSPADKESKRLKRLLRNRVSAQQARERKKAYLIDLETRVKDLEKKNSELKERLSXLQNENQMLRQILKNTTASRRGSNNGTNNAE

SEQ ID NO: 12208 - protein, 318 aa, Glycine max
  misc_feature (48)..(48): Xaa can be any naturally occurring amino acid
  misc_feature (56)..(56): Xaa can be any naturally occurring amino acid
  misc_feature (288)..(288): Xaa can be any naturally occurring amino acid
MVTGSHERNELVRVRHGSDSGSKPLKNLNGQICQICGDTIGLTATGDXFVACHECXFPLCHSCYEYELKNVSQSCPQCKTAFTSHQEGAEVEGDDDDEDDADDLDNEINYGQGNSSKAGMLWEEDADLSSSSGHDSQIPNPHLANGQPMSGEFPCATSDAQSMQTTSIGQSEKVHSLSYADPKQPGPESDEEIRRVPEIGGESAGTSASQPDAGSNAGTERVQGTGEGQKKRGRSPADKESKRLKRLLRNRVSAQQARERKKAYLIDLETRVKDLEKKNSELKERLSXLQNENQMLRQILKNTTASRRGSNNGTNNAE

SEQ ID NO: 12209 - protein, 199 aa, Glycine max
  misc_feature (169)..(169): Xaa can be any naturally occurring amino acid
MLWEEDADLSSSSGHDSQIPNPHLANGQPMSGEFPCATSDAQSMQTTSIGQSEKVHSLSYADPKQPGPESDEEIRRVPEIGGESAGTSASQPDAGSNAGTERVQGTGEGQKKRGRSPADKESKRLKRLLRNRVSAQQARERKKAYLIDLETRVKDLEKKNSELKERLSXLQNENQMLRQILKNTTASRRGSNNGTNNAE

SEQ ID NO: 12210 - DNA, 589 bp, Glycine max
attggagagacagagtagtgagtagtgagagggcgaagcgatgaatgccccagatcgttacgagcgtttcgtcgtccctgaaggcaccaaaaaggtttcttatgagagggacacgaagatcatcaatgcggcgtccttcaccatcgagagagaggagcacactatcggcaacatcctccgcatgcagctgcacagagaccccaatgtcttgtttgccggatacaagcttcctcatcctcttcaatacaaaattattgtcaggatacacaccactagtcagtcttcgccaatgcaggcatataaccagtctgttaatgatctggacagggaacttgatcatttgaagagtgcctttgaggcagagatgttgaagttttctagggactattgatatacggccaagatgtacggtgttgcgttacaagccctggcagatattgagatagcaaatcccttctgctaaatggaatttaaataggatgcttttgagtgttttgggaaatttgttaaatatgggtgtgttggaggaattttaataattgtgaacaattacgaagttagcaaaaatgcattaatattagcaactatt

SEQ ID NO: 12211 - protein, 116 aa, Glycine max
MNAPDRYERFVVPEGTKKVSYERDTKIINAASFTIEREEHTIGNILRMQLHRDPNVLFAGYKLPHPLQYKIIVRIHTTSQSSPMQAYNQSVNDLDRELDHLKSAFEAEMLKFSRDY

SEQ ID NO: 12212 - protein, 99 aa, Glycine max
MPQIVTSVSSSLKAPKRFLMRGTRRSSMRRPSPSRERSTLSATSSACSCTETPMSCLPDTSFLILFNTKLLSGYTPLVSLRQCRHITSLLMIWTGNLII

SEQ ID NO: 12213 - protein, 80 aa, Glycine max
MRGTRRSSMRRPSPSRERSTLSATSSACSCTETPMSCLPDTSFLILFNTKLLSGYTPLVSLRQCRHITSLLMIWTGNLII

SEQ ID NO: 12214 - DNA, 1047 bp, Glycine max
atcactgtaagacaaggtaaaagcgggaccagagagaaaacagtgggatttgtttctctctgcagttgcactcttgcagtgcaggtgcagctgtttcccgttctgctcctctcccaacccctctgtttctttggagtgagaaagttttatactttagaaccagctagcgagcaagtgagcgagtgtcatacatatatataaatagcgtgcgagaaatgcagcagcacctgatgcagatgcagcctatcatggcagcctactaccccaacaacgtcaccactgatcacattcaacagtacctggatgagaacaagtccttgatcctgaagattgttgaaagccagaattctggcaagctgagcgagtgtgcagagaaccaatcaaggctgcagagaaatctcatgtacctagctgcaatagctgattctcaaccccaaccatctccaatgcctggtcagtatccttctagtggacttatgcagcagggagcacactacatgcaggctcagcaggctcagcagatgtcacaacaacagctaatggcttcgcgctcctcactcttgtactcccaacagcctttctcagtgcttcaacagcagcaaggcatgcacagccaacttggcatgagctccaatggaagtcaaggcctccacatgttgcaaactgaagccactaatgttggaggcaatgcaaccataggaaccggaggaaggtttcccgactttgtacgcattgctagtggcaagcaagatattggaagttctggtgaaggccgaggaggaagctctagtggccattctggtgatggtggtgaaacccttaattacctgaaagctgctggtgatggaaactgaactagccagggagaatggtaaaagtttccttggcctttttagccgtttattgagttaggagaattaagtaggggaagggaaggaggaaagggaaaagttgctgcttagatatcttgtttgttaatcttgtgctgaaggcaaactgccttaacgtttctgtagtagtactagtaagtaacatgatgcatgcttt

SEQ ID NO: 12215 - protein, 212 aa, Glycine max
MQQHLMQMQPIMAAYYPNNVTTDHIQQYLDENKSLILKIVESQNSGKLSECAENQSRLQRNLMYLAAIADSQPQPSPMPGQYPSSGLMQQGAHYMQAQQAQQMSQQQLMASRSSLLYSQQPFSVLQQQQGMHSQLGMSSNGSQGLHMLQTEATNVGGNATIGTGGRFPDFVRIASGKQDIGSSGEGRGGSSSGHSGDGGETLNYLKAAGDGN

SEQ ID NO: 12216 - protein, 207 aa, Glycine max
MQMQPIMAAYYPNNVTTDHIQQYLDENKSLILKIVESQNSGKLSECAENQSRLQRNLMYLAAIADSQPQPSPMPGQYPSSGLMQQGAHYMQAQQAQQMSQQQLMASRSSLLYSQQPFSVLQQQQGMHSQLGMSSNGSQGLHMLQTEATNVGGNATIGTGGRFPDFVRIASGKQDIGSSGEGRGGSSSGHSGDGGETLNYLKAAGDGN

SEQ ID NO: 12217 - protein, 205 aa, Glycine max
MQPIMAAYYPNNVTTDHIQQYLDENKSLILKIVESQNSGKLSECAENQSRLQRNLMYLAAIADSQPQPSPMPGQYPSSGLMQQGAHYMQAQQAQQMSQQQLMASRSSLLYSQQPFSVLQQQQGMHSQLGMSSNGSQGLHMLQTEATNVGGNATIGTGGRFPDFVRIASGKQDIGSSGEGRGGSSSGHSGDGGETLNYLKAAGDGN

SEQ ID NO: 12218 - DNA, 1018 bp, Glycine max
aaaattcacacacacatattctttgttgcaatatcacaaacacctcgtccgtcacaatgcagctagctgtggcggccaacgctgtcgtttcaccgtcgccgttccgacctcatccccttctccggtcatccttctccggcgtctccgttaagctcactccccaatccataacgttttcacgcttgaagcccctcaccgtcttcgccgccaccaagaaggccgtcgccgtcctcaaggggacctccgccgtcgaaggcgtcgccactctcatccaagaagacgatggcccgacgacagtttctgttagcatcactggccttactccggggcttcatggttttcacctacatgagtatggtgataccacaaatgggtgtatatcaacaggagcacattttaatcctaataacttgacacatggtgctcctgaggatgaagtccgtcatgcgggtgacctgggaaacatagttgctaatgcagagggggttgcagaggctacaattgtggataatcagataccactctctggccctaattcagtagttggaagagccttggtggtccatgagcttgaggatgaccttggaaagggtgggcatgaactcagtttgacaactggaaatgctggtggaagattagcgtgtggtgtggttggtttgactccagcataaatagtgaagcaaatgtttttgtagcagtcgtgttattttatctgatgttatgtcttctgtgaagcatgatgactcacgttcttactttcttcagttaccaatgcaaactgtaaagcataatgtccttctaaagatgagtgtgcaaatgaatcgtgaaaacatgttagtcctttactggagattcatcatgcagtcgagtgtgtactccccaataaaattcatcatgcggtcagatgtttattccccaacgaaattgatttgtgtagtccttgttgcctgcttgagaaagaacctatgttaatattctatattaattatgcaagtgcaacaactggttacttgtgtct

SEQ ID NO: 12219 - protein, 222 aa, Glycine max
NSHTHILCCNITNTSSVTMQLAVAANAVVSPSPFRPHPLLRSSFSGVSVKLTPQSITFSRLKPLTVFAATKKAVAVLKGTSAVEGVATLIQEDDGPTTVSVSITGLTPGLHGFHLHEYGDTTNGCISTGAHFNPNNLTHGAPEDEVRHAGDLGNIVANAEGVAEATIVDNQIPLSGPNSVVGRALVVHELEDDLGKGGHELSLTTGNAGGRLACGVVGLTPA

SEQ ID NO: 12220 - protein, 204 aa, Glycine max
MQLAVAANAVVSPSPFRPHPLLRSSFSGVSVKLTPQSITFSRLKPLTVFAATKKAVAVLKGTSAVEGVATLIQEDDGPTTVSVSITGLTPGLHGFHLHEYGDTTNGCISTGAHFNPNNLTHGAPEDEVRHAGDLGNIVANAEGVAEATIVDNQIPLSGPNSVVGRALVVHELEDDLGKGGHELSLTTGNAGGRLACGVVGLTPA

SEQ ID NO: 12221 - DNA, 1047 bp, Glycine max
  misc_feature (845)..(845): n is a, c, g, or t
tctctctgcgatctggttcgtgttgtagctagctcctcgaaaatggttgggaacgcctcgccgcgagtcgcttcaacgagatccgtcagattttccgtcagccttctagggctttctcgaccgctctgaactaccaccttgacacaccggacaacaaccctaaacttccatgggaattcaccgaggccaatcaagcaaaggttaaggagattttgtctcactatccatccaactataagcaatctgctacaattcctcttttggatcttgcccagcagcagcatggtggctggctccctgtttctgcaatggatgcggtagctaagattgtagaggttcctcccatacgggtctatgaggttgccacattttactccatgttcaaccgagctaaggttgggaagtaccatctgttggtttgtggaacaacaccttgtatgataagaggttcacgaggaattgaagaagccttattgaaacacttgggagtgaagcgcaatgaagtaacaccagatggtttgttttctgttggagaaatggaatgcatgggatgctgtgtgaatgctcctatgattacagtggccgattattcaaatggatcggagggatatacttataattactttgaagatataaccccagagaaagtagttgagatagtagaaaagctgagaaagggtgagaagccaccgcacggcacccaaaatccccgccgaattaagagtggacctgaaggagggaacactactttgttaagtgagcccaagcctcctccctgccgtgacctggattcctgctgaagtgttgtatactttttgccttcaataatgtgaggcttgcatgtnttggagcttgccttaattgaaacattgtcagactgttagatgctcaaccaatttttgtatgaatcatcctggatggcttccgtttcaaaaatttgttccataaacgccatccataaatttcttggcttgtttattacttaccagcgttatctatgcgtttctgtactctgtacattaatcatcatgaatgaaatttgagatt

SEQ ID NO: 12222 - protein, 163 aa, Glycine max
MDAVAKIVEVPPIRVYEVATFYSMFNRAKVGKYHLLVCGTTPCMIRGSRGIEEALLKHLGVKRNEVTPDGLFSVGEMECMGCCVNAPMITVADYSNGSEGYTYNYFEDITPEKVVEIVEKLRKGEKPPHGTQNPRRIKSGPEGGNTTLLSEPKPPPCRDLDSC

SEQ ID NO: 12223 - protein, 140 aa, Glycine max
MFNRAKVGKYHLLVCGTTPCMIRGSRGIEEALLKHLGVKRNEVTPDGLFSVGEMECMGCCVNAPMITVADYSNGSEGYTYNYFEDITPEKVVEIVEKLRKGEKPPHGTQNPRRIKSGPEGGNTTLLSEPKPPPCRDLDSC

SEQ ID NO: 12224 - protein, 120 aa, Glycine max
MIRGSRGIEEALLKHLGVKRNEVTPDGLFSVGEMECMGCCVNAPMITVADYSNGSEGYTYNYFEDITPEKVVEIVEKLRKGEKPPHGTQNPRRIKSGPEGGNTTLLSEPKPPPCRDLDSC

SEQ ID NO: 12225 - DNA, 952 bp, Glycine max
atttgattttttctctctcctttttctcttccctctcctaaacaaacacaacaacaacaacataaaatggcggcgtacaaagccgacgatgattacgattacttgttcaaggtggttctgatcggcgactccggcgtcggaaaatctaaccttctttctcggttcacgcgaaacgagttcagcctcgaatcgaaatccaccattggcgttgagttcgccaccagaagcattcgcgtcgatgataaggtcgtcaaggctcagatttgggacactgctggtcaagaacggtaccgagctattacaagtgcatattatcgaggagctgttggtgctttactagtctatgatgttacacgtcatgttacttttgaaaatgtggagagatggctaaaagagctgagagatcacacagatgccaacattgtggtgatgcttgtagggaacaaagcagacctgcgtcatctgcgtgcagtttccactgaagatgctacaactttcgctgagcgagagaacacatttttcatggaaacatctgccctcgagtccttgaacgttgaaaatgccttcacagaagtgctgacccagatctatcatgttgtaagcaagaaggcccttgaggttggagatgatccagcagctttaccaaaaggacagacaattaatattgggtcccgtgatgatgtatcggctgtgaagaaatctggatgttgttctgcttgagtgtgtagaagacagtctctgtatttttataaattatatgccttgtttataccatgtagagattggcctcacagcatgaagatgattatttagcgagcatcaaattttaaagtttctgcttagaattatgttcaaaattagccaaatgtttagaaaacaagcacattcattttgcattgtgcctatttttgtgccatttaaagatatttatttatcaaatttccaatttatt

SEQ ID NO: 12226 - protein, 217 aa, Glycine max
MAAYKADDDYDYLFKVVLIGDSGVGKSNLLSRFTRNEFSLESKSTIGVEFATRSIRVDDKVVKAQIWDTAGQERYRAITSAYYRGAVGALLVYDVTRHVTFENVERWLKELRDHTDANIVVMLVGNKADLRHLRAVSTEDATTFAERENTFFMETSALESLNVENAFTEVLTQIYHVVSKKALEVGDDPAALPKGQTINIGSRDDVSAVKKSGCCSA

SEQ ID NO: 12227 - DNA, 1026 bp, Glycine max
  misc_feature (591)..(591): n is a, c, g, or t
  misc_feature (694)..(694): n is a, c, g, or t
tgcaccagctcgttgaaaatgcagatgaatgcatggttttggataacgaagctctctatgacatatgcttccgcacccttaagctcaccaccccaagctttggagatctgaaccatctaatttcagccaccatgagtggtgtgacatgttgtcttcgattccctggtcaactcaactcagatcttcgcaaactcgccgtgaatctcattcccttccctcgtctgcacttcttcatggtgggatttgccccactcacttcccgcggttcccaacagtacagggctctcactgtccctgaattgacccaacaaatgtgggatgctaagaacatgatgtgtgcagctgatcctcgccacggtcgttacttgacagcttctgcgatgttccgtggaaagatgagcacaaaggaggttgatgaacagatgatcaatgttcagaacaagaactcatcgtacttcgtggaatggatccccaacaatgtgaaatccactgtctgtgacatccctccaactgggttgaaaatggcatcaaccttcattggcaattctacctctattcaagaaatgttcaggagggtgagcgagcaattcncggctatgttccgcagaaaggccttcttgcattggtatactggagaaggtatggatgaaatggagttcactgaagctgagagcaacatgaatgaccttgtgtntgagtaccagcaataccaagatgcaactgctgatgacgagggctatgagtatgaagatgaggaagaacctcaggaagatgaggcttaaaacagtgtagtagtgttttgcagggtgttcttgtttgtgtgttttgttgtgatactctgtttaacgttgtgttttttttcatcatcccttgacctgaatatctttttcgggattttggattgctttgggggcactctctggcttcgtggcttatctcttctagtttagggattttatttttctgcatgttttcattattgttaacatggtggtcgccctttgattgaaacgtagttgatatatt

SEQ ID NO: 12228 - protein, 259 aa, Glycine max
  misc_feature (197)..(197): Xaa can be any naturally occurring amino acid
  misc_feature (231)..(231): Xaa can be any naturally occurring amino acid
HQLVENADECMVLDNEALYDICFRTLKLTTPSFGDLNHLISATMSGVTCCLRFPGQLNSDLRKLAVNLIPFPRLHFFMVGFAPLTSRGSQQYRALTVPELTQQMWDAKNMMCAADPRHGRYLTASAMFRGKMSTKEVDEQMINVQNKNSSYFVEWIPNNVKSTVCDIPPTGLKMASTFIGNSTSIQEMFRRVSEQFXAMFRRKAFLHWYTGEGMDEMEFTEAESNMNDLVXEYQQYQDATADDEGYEYEDEEEPQEDEA

SEQ ID NO: 12229 - protein, 249 aa, Glycine max
  misc_feature (187)..(187): Xaa can be any naturally occurring amino acid
  misc_feature (221)..(221): Xaa can be any naturally occurring amino acid
MVLDNEALYDICFRTLKLTTPSFGDLNHLISATMSGVTCCLRFPGQLNSDLRKLAVNLIPFPRLHFFMVGFAPLTSRGSQQYRALTVPELTQQMWDAKNMMCAADPRHGRYLTASAMFRGKMSTKEVDEQMINVQNKNSSYFVEWIPNNVKSTVCDIPPTGLKMASTFIGNSTSIQEMFRRVSEQFXAMFRRKAFLHWYTGEGMDEMEFTEAESNMNDLVXEYQQYQDATADDEGYEYEDEEEPQEDEA

SEQ ID NO: 12230 - protein, 216 aa, Glycine max
  misc_feature (154)..(154): Xaa can be any naturally occurring amino acid
  misc_feature (188)..(188): Xaa can be any naturally occurring amino acid
MSGVTCCLRFPGQLNSDLRKLAVNLIPFPRLHFFMVGFAPLTSRGSQQYRALTVPELTQQMWDAKNMMCAADPRHGRYLTASAMFRGKMSTKEVDEQMINVQNKNSSYFVEWIPNNVKSTVCDIPPTGLKMASTFIGNSTSIQEMFRRVSEQFXAMFRRKAFLHWYTGEGMDEMEFTEAESNMNDLVXEYQQYQDATADDEGYEYEDEEEPQEDEA

SEQ ID NO: 12231 - DNA, 1084 bp, Glycine max
  misc_feature (479)..(479): n is a, c, g, or t
  misc_feature (561)..(561): n is a, c, g, or t
  misc_feature (670)..(670): n is a, c, g, or t
  misc_feature (784)..(785): n is a, c, g, or t
  misc_feature (787)..(787): n is a, c, g, or t
  misc_feature (854)..(854): n is a, c, g, or t
  misc_feature (865)..(865): n is a, c, g, or t
  misc_feature (873)..(873): n is a, c, g, or t
  misc_feature (892)..(892): n is a, c, g, or t
  misc_feature (907)..(907): n is a, c, g, or t
  misc_feature (913)..(913): n is a, c, g, or t
  misc_feature (958)..(958): n is a, c, g, or t
  misc_feature (994)..(994): n is a, c, g, or t
  misc_feature (1032)..(1032): n is a, c, g, or t
  misc_feature (1047)..(1047): n is a, c, g, or t
tttaattaattgataatttttggtgatgggcaattacatttcttgcaccttggctcctcctttgatgaagaacacaagggcagcacgcgtgatcttccccacgggcgaagtgaagcaatacaaggagcaagtgatcaatgtcgccgagctcatgatggagtgccccactcacttcttagccaactccaactccctacacatcggacgccggttttcgcctctcggcgccgacgaggagttggagtgtggcaacgtctacatcttcttccccatgagaagactcaattccgttgtcactgccgccgacgtggcagtgcttttcatggcggccaatatgaccgcgaaacggataactaacgacaaagatttaatgtcatgtgatcatttagctgaaggtgttggaacaaatgatgatgtcccaaggttgagcttggaaggggtagaggttgagtcagggtttcggaataggtttagttatngtaggtcaaggaagcctgcattggaaaccatcaacgaggaacccatttggttaaggtgaagaaaagtgaaagaaaatagatngaggcggccaaaacatcaatgtacgtaggtacgttagtggtagatttttattaatgatcatatacaagaattgttatgtgatatttaattgacagacttcagattatanagagttgtggtagattcatatatatttgtgtatatacaacacttttgatttttgtatacaaagagtttgatcaaggaggtgtatggtggctttgtacaaattaaattgagtttnngnaaaaatataaaaattgtatatgggcgtatattgacttaaattcttctctctttttttcggggacganctagatatttnatggttgntttccctccttttcttgtnggtggagtgaaacanacatanatcatatatagattatataggctatatatgactggtctttttttntacagagatcttatatacaatgttttggaaaacggntggtgactgtaattatatatagtcacatcaattatatntgtatgtaatttgtnacaatattataaaatacaaggcaataagtgtaatctt

SEQ ID NO: 12232 - protein, 170 aa, Glycine max
  misc_feature (152)..(152): Xaa can be any naturally occurring amino acid
MGNYISCTLAPPLMKNTRAARVIFPTGEVKQYKEQVINVAELMMECPTHFLANSNSLHIGRRFSPLGADEELECGNVYIFFPMRRLNSVVTAADVAVLFMAANMTAKRITNDKDLMSCDHLAEGVGTNDDVPRLSLEGVEVESGFRNRFSYXRSRKPALETINEEPIWLR

SEQ ID NO: 12233 - protein, 157 aa, Glycine max
  misc_feature (139)..(139): Xaa can be any naturally occurring amino acid
MKNTRAARVIFPTGEVKQYKEQVINVAELMMECPTHFLANSNSLHIGRRFSPLGADEELECGNVYIFFPMRRLNSVVTAADVAVLFMAANMTAKRITNDKDLMSCDHLAEGVGTNDDVPRLSLEGVEVESGFRNRFSYXRSRKPALETINEEPIWLR

SEQ ID NO: 12234 - protein, 128 aa, Glycine max
  misc_feature (110)..(110): Xaa can be any naturally occurring amino acid
MMECPTHFLANSNSLHIGRRFSPLGADEELECGNVYIFFPMRRLNSVVTAADVAVLFMAANMTAKRITNDKDLMSCDHLAEGVGTNDDVPRLSLEGVEVESGFRNRFSYXRSRKPALETINEEPIWLR

SEQ ID NO: 12235 - DNA, 1359 bp, Glycine max
  misc_feature (624)..(624): n is a, c, g, or t
gatgtctccttctcctccttctttctccctctctctcatacacaaagaggccatgggttacttggacgatgatcatgatcatgacacattccacgaccacaacgacttcaacagaaggatactcatcatggctatagtttccttatcagtggtattggttcttgtctttacacttcacctctacgcaaggtttttcctccgccgcagagccgccatataccaactcagcctcaacgtggcacacgcacacgccgagccagacaacaacacagggctcgaccctgtcctcatcaccaccctccccaccttccccttcaaacaaccaaacaacgattctgtggagtgtaccgtgtgcttgagcgttctagaagatggagaacaagtgaggcttcttcccaattgcaaacacagcttccacgtcggttgcatcgacacgtggcttgcttcgcactccacgtgtcccatttgccggaccaaggccgaaccggtccggctcgaaccgcagccgcgtgagggccccaccggctcggttcttctcgatgttgttgcacccacggctccgctattgtttgaaaacgtggaaggaaccttggatggtgctaataataatgggtcacctaaggntagtggttcgaattcgaggttgagttcgttcagaaggattcttagtagggacagatcgatgaggaggattcaaccttctagccatgatgatgttgaacatgatttagagaggcagtgacaaattaattaattattgaggtaccaataccaagtatctggttttattaattattatattgtttgttgatcgattttctcgtcatacagattgatacacacggaaagagcttgggaaaaaaaaattgtcaaggtgacatataacacggttttgaattgttattttatacatgttagtcaaatatgagtgattattttgtattgaatttgatttgattgctcgtatattgctgtgattatatatatatatatatacatatattgtaaaaaggatttggtgtttggtaacctaaattaacataacaatgacggtggagatataatattgtagattagggggtagaccatgtgagcttagtaaagattaattaacggattatttgtagattagtgcgtgtgtcttttaaatttcgtagttggttttgttctattgcggccttattaccatatagtgaatgagcttcggtgggaagtcaaaaatcaggagcctcatatttgggattcttgttgacttgctcctataaatataatgtataaacaagaaggtgccaaaccccagattgacgatctaactttcagtttcacacagaataaaatggatttgagtctcttgctgtc

SEQ ID NO: 12236 - protein, 246 aa, Glycine max
  misc_feature (208)..(208): Xaa can be any naturally occurring amino acid
MSPSPPSFSLSLIHKEAMGYLDDDHDHDTFHDHNDFNRRILIMAIVSLSVVLVLVFTLHLYARFFLRRRAAIYQLSLNVAHAHAEPDNNTGLDPVLITTLPTFPFKQPNNDSVECTVCLSVLEDGEQVRLLPNCKHSFHVGCIDTWLASHSTCPICRTKAEPVRLEPQPREGPTGSVLLDVVAPTAPLLFENVEGTLDGANNNGSPKXSGSNSRLSSFRRILSRDRSMRRIQPSSHDDVEHDLERQ

SEQ ID NO: 12237 - protein, 229 aa, Glycine max
  misc_feature (191)..(191): Xaa can be any naturally occurring amino acid
MGYLDDDHDHDTFHDHNDFNRRILIMAIVSLSVVLVLVFTLHLYARFFLRRRAAIYQLSLNVAHAHAEPDNNTGLDPVLITTLPTFPFKQPNNDSVECTVCLSVLEDGEQVRLLPNCKHSFHVGCIDTWLASHSTCPICRTKAEPVRLEPQPREGPTGSVLLDVVAPTAPLLFENVEGTLDGANNNGSPKXSGSNSRLSSFRRILSRDRSMRRIQPSSHDDVEHDLERQ

SEQ ID NO: 12238 - protein, 204 aa, Glycine max
  misc_feature (166)..(166): Xaa can be any naturally occurring amino acid
MAIVSLSVVLVLVFTLHLYARFFLRRRAAIYQLSLNVAHAHAEPDNNTGLDPVLITTLPTFPFKQPNNDSVECTVCLSVLEDGEQVRLLPNCKHSFHVGCIDTWLASHSTCPICRTKAEPVRLEPQPREGPTGSVLLDVVAPTAPLLFENVEGTLDGANNNGSPKXSGSNSRLSSFRRILSRDRSMRRIQPSSHDDVEHDLERQ

SEQ ID NO: 12239 - DNA, 2652 bp, Glycine max
gaattcggcacgaggtgaattctgctctttgatcatcatcatcttcttcttcttcaatttaagcaagcatgtctcagcaaggcgaatcatcggacccgaaatcggggaagaaggacttctcaaccgcgattctggaacgcaaaaagtcgccgaaccggcttgtcgtggatgaggctgtcaacgacgacaactccgtggtcaccatgcatccccaaaccatggaaaagcttcagcttttccgaggggacactatcctcatcaagggtaagaaacggaaggataccatttgcatagctcttgctgatgagaactgtgaggagccgaagatcaggatgaataaagttgtgaggtcaaatttgcgggttcggcttggagatgttgtgtctgtgcaccagtgcccggatgttaaatatgggaaacgtgtgcacattctgcctattgatgataccattgaaggtgtcactggcaatctgtttgatgctttcttgaaaccctatttcttggaagcttaccgtcctgtcagaaaaggagatctatttcttgtccggggagggatgagaagtgtagagttcaaggtggttgaaaccgatcctggagaatattgtgttgttgctccagacactgaaattttctgtgagggggagcctttgaaaagagaagatgaagagagactggatgaagtcgggtatgatgatgtgggtggtgtcaggaaacaaatggctcagattcgtgagttggttgagcttccattgaggcatccacagctttttaaatcaattggtgtgaaaccacccaaaggaattttactttatggacccccaggttctgggaagacattaatagcaagagctgtagctaatgaaactggagcttttttcttttgtattaacggaccagagattatgtccaaacttgctggagagagtgaaagcaatctcaggaaagcgtttgaagaagcagaaaagaatgcaccatccattatcttcattgatgaaattgattccattgcccccaagcgggagaagacacatggtgaagttgaaaggaggattgtttcacaacttttgactcttatggatggattaaaatctcgtgctcatgttattgttattggagctactaatcgtccaaatagcattgacccagcattgagaaggtttggtagatttgatagggaaattgatattggtgttcccgatgaagttgggagacttgaagtccttcgcatacatactaaaaacatgaagctatctgatgatgttgatttagagagaattgcaaaagatactcatgggtatgttggtgctgaccttgctgccctttgcactgaagctgctttgcaatgcattagggagaagatggatgtaattgacttggaggatgagactattgatgcagaagtactgaattccatggcagttacaaatgagcatttccagactgcccttggaacaagcaacccatcagctttacgtgaaactgttgttgaagtgcctaatgtcagctgggaagacattggaggccttgaaaatgtcaagcgtgaactgcaagagactgtacaatatccagttgagcacccagaaaagtttgagaagtttggtatgtctccatctaaaggagtacttttctatggtcctccaggatgtgggaaaactttgttagccaaagcaattgctaatgaatgtcaagctaacttcatcagtgtgaaaggtccagaattgcttacaatgtggtttggtgaaagtgaagctaatgttagagaaatttttgacaaggccagacaatcggctccatgtgtcctcttctttgatgagcttgactctattgccactcagagaggaagcagtgttggggatgctggtggtgcggctgatagagttctaaatcaacttttgactgaaatggatggcatgtctgccaaaaagactgtgttcataattggggcaactaacagacctgacatcattgacccagcacttcttcgaccaggccgtctggatcaattgatctatattcctctccctgatgaggattcccggcatcaaatctttaaagcctgcttgaggaagtcacctatcgcaaaaaatgttgatttgagagcattggctaggcacactcaagggttcagtggtgctgatattacagaaatatgccagcgagcatgcaaatatgccataagagaaaacatagagaaggacattgagcgagagaggaagagtagggaaaaccctgaggccatggatgaagataccgtcgacgacgaagttgcggagatcaaggctgctcattttgaggagtcaatgaagtttgcacggaggagtgttagtgatgctgatattcgcaagtatcaggcatttgctcagaccttacagcaatcaagagggtttggaagtgaatttaggtttccagagtctggagataggactactactggatctgacccctttgcagcttctgctggtggggctgacgaagatgatctatatagttaggctttattatcacagtgatgtatgaaatcacatgtctacctcacctctcaggagggataactttgaagcctgtcttatattttgcttttcttgtactcaattatcctgaattgttaccgggttaaccttaaataccatatatggatcgtatcttcatttt

SEQ ID NO: 12240 - protein, 807 aa, Glycine max
MSQQGESSDPKSGKKDFSTAILERKKSPNRLVVDEAVNDDNSVVTMHPQTMEKLQLFRGDTILIKGKKRKDTICIALADENCEEPKIRMNKVVRSNLRVRLGDVVSVHQCPDVKYGKRVHILPIDDTIEGVTGNLFDAFLKPYFLEAYRPVRKGDLFLVRGGMRSVEFKVVETDPGEYCVVAPDTEIFCEGEPLKREDEERLDEVGYDDVGGVRKQMAQIRELVELPLRHPQLFKSIGVKPPKGILLYGPPGSGKTLIARAVANETGAFFFCINGPEIMSKLAGESESNLRKAFEEAEKNAPSIIFIDEIDSIAPKREKTHGEVERRIVSQLLTLMDGLKSRAHVIVIGATNRPNSIDPALRRFGRFDREIDIGVPDEVGRLEVLRIHTKNMKLSDDVDLERIAKDTHGYVGADLAALCTEAALQCIREKMDVIDLEDETIDAEVLNSMAVTNEHFQTALGTSNPSALRETVVEVPNVSWEDIGGLENVKRELQETVQYPVEHPEKFEKFGMSPSKGVLFYGPPGCGKTLLAKAIANECQANFISVKGPELLTMWFGESEANVREIFDKARQSAPCVLFFDELDSIATQRGSSVGDAGGAADRVLNQLLTEMDGMSAKKTVFIIGATNRPDIIDPALLRPGRLDQLIYIPLPDEDSRHQIFKACLRKSPIAKNVDLRALARHTQGFSGADITEICQRACKYAIRENIEKDIERERKSRENPEAMDEDTVDDEVAEIKAAHFEESMKFARRSVSDADIRKYQAFAQTLQQSRGFGSEFRFPESGDRTTTGSDPFAASAGGADEDDLYS

SEQ ID NO: 12241 - protein, 762 aa, Glycine max
MHPQTMEKLQLFRGDTILIKGKKRKDTICIALADENCEEPKIRMNKVVRSNLRVRLGDVVSVHQCPDVKYGKRVHILPIDDTIEGVTGNLFDAFLKPYFLEAYRPVRKGDLFLVRGGMRSVEFKVVETDPGEYCVVAPDTEIFCEGEPLKREDEERLDEVGYDDVGGVRKQMAQIRELVELPLRHPQLFKSIGVKPPKGILLYGPPGSGKTLIARAVANETGAFFFCINGPEIMSKLAGESESNLRKAFEEAEKNAPSIIFIDEIDSIAPKREKTHGEVERRIVSQLLTLMDGLKSRAHVIVIGATNRPNSIDPALRRFGRFDREIDIGVPDEVGRLEVLRIHTKNMKLSDDVDLERIAKDTHGYVGADLAALCTEAALQCIREKMDVIDLEDETIDAEVLNSMAVTNEHFQTALGTSNPSALRETVVEVPNVSWEDIGGLENVKRELQETVQYPVEHPEKFEKFGMSPSKGVLFYGPPGCGKTLLAKAIANECQANFISVKGPELLTMWFGESEANVREIFDKARQSAPCVLFFDELDSIATQRGSSVGDAGGAADRVLNQLLTEMDGMSAKKTVFIIGATNRPDIIDPALLRPGRLDQLIYIPLPDEDSRHQIFKACLRKSPIAKNVDLRALARHTQGFSGADITEICQRACKYAIRENIEKDIERERKSRENPEAMDEDTVDDEVAEIKAAHFEESMKFARRSVSDADIRKYQAFAQTLQQSRGFGSEFRFPESGDRTTTGSDPFAASAGGADEDDLYS

SEQ ID NO: 12242 - protein, 757 aa, Glycine max
MEKLQLFRGDTILIKGKKRKDTICIALADENCEEPKIRMNKVVRSNLRVRLGDVVSVHQCPDVKYGKRVHILPIDDTIEGVTGNLFDAFLKPYFLEAYRPVRKGDLFLVRGGMRSVEFKVVETDPGEYCVVAPDTEIFCEGEPLKREDEERLDEVGYDDVGGVRKQMAQIRELVELPLRHPQLFKSIGVKPPKGILLYGPPGSGKTLIARAVANETGAFFFCINGPEIMSKLAGESESNLRKAFEEAEKNAPSIIFIDEIDSIAPKREKTHGEVERRIVSQLLTLMDGLKSRAHVIVIGATNRPNSIDPALRRFGRFDREIDIGVPDEVGRLEVLRIHTKNMKLSDDVDLERIAKDTHGYVGADLAALCTEAALQCIREKMDVIDLEDETIDAEVLNSMAVTNEHFQTALGTSNPSALRETVVEVPNVSWEDIGGLENVKRELQETVQYPVEHPEKFEKFGMSPSKGVLFYGPPGCGKTLLAKAIANECQANFISVKGPELLTMWFGESEANVREIFDKARQSAPCVLFFDELDSIATQRGSSVGDAGGAADRVLNQLLTEMDGMSAKKTVFIIGATNRPDIIDPALLRPGRLDQLIYIPLPDEDSRHQIFKACLRKSPIAKNVDLRALARHTQGFSGADITEICQRACKYAIRENIEKDIERERKSRENPEAMDEDTVDDEVAEIKAAHFEESMKFARRSVSDADIRKYQAFAQTLQQSRGFGSEFRFPESGDRTTTGSDPFAASAGGADEDDLYS

SEQ ID NO: 12243 - DNA, 1476 bp, Glycine max
  misc_feature (418)..(418): n is a, c, g, or t
atttttgtttctcctaggtttctttcttcccgatctgcatcttcacttcttactgcttattcttcttctttccgattcccatttattccttctttcttctcgatttcgtatatttgtattttctcctcttttttcttcccgcgaagaataaaaaaaacactggagaaatagatcgtgttgtgtgttgtattttagtgaaattgattgtgaagtgatggaatctatatttgaatgtttttattctaaaatcaaattaatgataaaattgagtagtgttatttatttagggcaaaaatactcaattgctcaaactcaaatcaattttggatctagaatcaattatgtagtattatgaatatttacctatgattacgtgtgacacacacttgtcacttaattatgaattgcgtaatattgngaaatttatcttgcagggttaagcggtgagatttgcgaatctgagaaatgtcggattcttctcgggaggagaatgtttacatggcgaaattggcggacgaggccgagcgttacgaggagatggttgagttcatggagaaggtagcaaagactgtggaggttgaggagttgacggtggaggagagaaatcttctctctgtggcttacaagaacgtgattggtgcgaggagggcttcgtggaggatcatatcctccattgagcagaaggaggagagcaggggcaatgaggaccatgtggccattataaaggagtacaggggcaaaattgaggctgaactcagcaagatctgtgacgggattttgaacctccttgagtccaacctcatcccatccgccgcatctcccgagagtaaagtgttttaccttaaaatgaagggtgattaccacaggtaccttgccgagttcaagactggggcagagaggaaagaggcagcagagagtactttgcttgcttacaaatctgctcaggatattgctcttgctgacttggcccccactcaccccattaggctgggacttgctctcaacttttctgtcttctattatgaaatccttaactcgccagatcgggcttgtaatcttgccaaacaggcatttgatgaggcaatttccgagcttgacacattgggtgaagagtcatacaaggatagtacgttgatcatgcaacttctccgtgacaatctgactttgtggacatcagacatcacggacatcgctggagatgagatcaaggaaacatctaagcaacaaccaggtgaataggcgatggcagtagttgatgggatatgtattaccgataatatacatccaatgtggcttgccatagtggaactgtgtattaatgagtttcgtgatttcaattgcgggttgccgcttgagatttacaatgtttcagtcgtgtatgtgttttattgacgagaacaatgtggcttggtggtttagtgatttataaattttttattgttgctatgtagttgcctctttttattgacgagttcg

SEQ ID NO: 12244 - protein, 257 aa, Glycine max
MSDSSREENVYMAKLADEAERYEEMVEFMEKVAKTVEVEELTVEERNLLSVAYKNVIGARRASWRIISSIEQKEESRGNEDHVAIIKEYRGKIEAELSKICDGILNLLESNLIPSAASPESKVFYLKMKGDYHRYLAEFKTGAERKEAAESTLLAYKSAQDIALADLAPTHPIRLGLALNFSVFYYEILNSPDRACNLAKQAFDEAISELDTLGEESYKDSTLIMQLLRDNLTLWTSDITDIAGDEIKETSKQQPGE

SEQ ID NO: 12245 - protein, 246 aa, Glycine max
MAKLADEAERYEEMVEFMEKVAKTVEVEELTVEERNLLSVAYKNVIGARRASWRIISSIEQKEESRGNEDHVAIIKEYRGKIEAELSKICDGILNLLESNLIPSAASPESKVFYLKMKGDYHRYLAEFKTGAERKEAAESTLLAYKSAQDIALADLAPTHPIRLGLALNFSVFYYEILNSPDRACNLAKQAFDEAISELDTLGEESYKDSTLIMQLLRDNLTLWTSDITDIAGDEIKETSKQQPGE

SEQ ID NO: 12246 - protein, 233 aa, Glycine max
MVEFMEKVAKTVEVEELTVEERNLLSVAYKNVIGARRASWRIISSIEQKEESRGNEDHVAIIKEYRGKIEAELSKICDGILNLLESNLIPSAASPESKVFYLKMKGDYHRYLAEFKTGAERKEAAESTLLAYKSAQDIALADLAPTHPIRLGLALNFSVFYYEILNSPDRACNLAKQAFDEAISELDTLGEESYKDSTLIMQLLRDNLTLWTSDITDIAGDEIKETSKQQPGE

SEQ ID NO: 12247 - DNA, 1024 bp, Glycine max
gtacaaaacaaaaaccacctcactcttattgttttcttaaaatttcttccttgccactgccagtgtgtcaccaccatggccaccgtcacaacccaagcctccgccgcgattttccggccatgtgcctcgaaatcgaggtttctgaccgtctcttccggtaaactcaaccgggaagtgactatgaggccaatggggtgccctccttctgcctctttcaaggttgaagccaagaagggagagtggttacctggcttggcctccccaacttacctcaatggcactcttcctggtgacaatggatttgaccctctgggactagctgaggacccagagaacttgaggtggtacgttcaagccgagcttgtgaatggacgttgggccatgttgggtgttgcaggaatgctacttcctgaggttttcaccaagattggaatcatcaatgcccctcaatggtatgatgctgggaaatcggagtactttgcttcatcgtcgaccctctttgtgatcgagttcatcttgttccactacgtcgagatccggagatggcaggacatcaagaaccctggctctgtcaaccaagaccccatcttcaagcaatacagcttgccccaacatgagtgtggataccctggtagtgtgtttaaccccttgaactttgcacctactttggaggccaaggagaaggaacttgccaatgggagattggctatgttggcattcttgggattcatagttcaacacaacgtgacaggcaaaggaccatttgagaacctattgcagcacctctctgacccgtggcacaacaccatcatcaatacaattcgtggctactaagtttgtatccaatgacatggataagcctgtgtccttctcgtgtaatcctgaatggatgaattttgagagtgatttgggcatgattgttatgatccgtctattttcatgtacagaggaactacgatggttttacattgttatttagactgtccatcaatcagtaatcaagcatgatactttctaaaaattt

SEQ ID NO: 12248 - protein, 277 aa, Glycine max
VQNKNHLTLIVFLKFLPCHCQCVTTMATVTTQASAAIFRPCASKSRFLTVSSGKLNREVTMRPMGCPPSASFKVEAKKGEWLPGLASPTYLNGTLPGDNGFDPLGLAEDPENLRWYVQAELVNGRWAMLGVAGMLLPEVFTKIGIINAPQWYDAGKSEYFASSSTLFVIEFILFHYVEIRRWQDIKNPGSVNQDPIFKQYSLPQHECGYPGSVFNPLNFAPTLEAKEKELANGRLAMLAFLGFIVQHNVTGKGPFENLLQHLSDPWHNTIINTIRGY

SEQ ID NO: 12249 - protein, 252 aa, Glycine max
MATVTTQASAAIFRPCASKSRFLTVSSGKLNREVTMRPMGCPPSASFKVEAKKGEWLPGLASPTYLNGTLPGDNGFDPLGLAEDPENLRWYVQAELVNGRWAMLGVAGMLLPEVFTKIGIINAPQWYDAGKSEYFASSSTLFVIEFILFHYVEIRRWQDIKNPGSVNQDPIFKQYSLPQHECGYPGSVFNPLNFAPTLEAKEKELANGRLAMLAFLGFIVQHNVTGKGPFENLLQHLSDPWHNTIINTIRGY

SEQ ID NO: 12250 - protein, 217 aa, Glycine max
MRPMGCPPSASFKVEAKKGEWLPGLASPTYLNGTLPGDNGFDPLGLAEDPENLRWYVQAELVNGRWAMLGVAGMLLPEVFTKIGIINAPQWYDAGKSEYFASSSTLFVIEFILFHYVEIRRWQDIKNPGSVNQDPIFKQYSLPQHECGYPGSVFNPLNFAPTLEAKEKELANGRLAMLAFLGFIVQHNVTGKGPFENLLQHLSDPWHNTIINTIRGY

SEQ ID NO: 12251 - DNA, 723 bp, Glycine max
aatatgaaggaggaatctttcatatattggaatgggctagatatagtaaatagctcacattatatctggtcctggaattgtggaaggactgaagttgaagggtttgcctcgtggaaggggtctattgctgcttgctgaaatgagttcagctggtaaccttgccaagggagattacaccactgctgcggtgaaaattgctgaggatcactctgactttgttattggcttcatctcagtcaatcctgcatcatggcctggagcacccataaatccctcttttgttcatgcaactcctggagttcaaatggtgactggtggtgatgctttaggacaacaatatagtacaccgcattctgttgtctatgatgggggtagtgacattatcatagtaggtcgtggcatcatcaaggcagcaaatccagctcaggcagctcgcgaataccgtcttcaaggatggaatgcgtatttggctaagtgcagctgaagcctgcattctcagactaattggatgaggctaagttgtatttcatttcacctcagtatatatataacttctaaaaatgtaagcagcacttgagttttcttttcttttcttcttgtttccttccctcccattttggctagaaaatatttgcggttcagctagctatctggatcttccaaacgaagtgcttcattttatgattttccttagcatgtaataggttgaataatgcatttcac

SEQ ID NO: 12252 - protein, 114 aa, Glycine max
MSSAGNLAKGDYTTAAVKIAEDHSDFVIGFISVNPASWPGAPINPSFVHATPGVQMVTGGDALGQQYSTPHSVVYDGGSDIIIVGRGIIKAANPAQAAREYRLQGWNAYLAKCS

SEQ ID NO: 12253 - protein, 59 aa, Glycine max
MVTGGDALGQQYSTPHSVVYDGGSDIIIVGRGIIKAANPAQAAREYRLQGWNAYLAKCS

SEQ ID NO: 12254 - DNA, 448 bp, Glycine max
agagcaaagcataagtcacctgcctatctatctagcgagagagagagaggaaagctagctagctagcatggagtgcggcagcaagaaggcagcaggcggtgtgttggcgctgctgcttctccagctggtgttagctccgacgacggcgacggcccgcctcctgcaggcggatacctccaccgtggttggccttgacatcatcgcgagggagtttggccatccagtgagaggcatcctctgtggtgaaacctgtgtcttcctaccatgctatacggcagccatgggttgccaatgcattggccaaatctgcatgatgtgatatctggactagcgctatttgtaatttgtgttgggagaaacacaaggacggtacggtggtgttcaacttattgcatgtgtatggtgatctaataagtaaagtataataaaaagggatatgttggatgtg

SEQ ID NO: 12255 - protein, 83 aa, Glycine max
MECGSKKAAGGVLALLLLQLVLAPTTATARLLQADTSTVVGLDIIAREFGHPVRGILCGETCVFLPCYTAAMGCQCIGQICMM

SEQ ID NO: 12256 - protein, 48 aa, Glycine max
MLYGSHGLPMHWPNLHDVISGLALFVICVGRNTRTVRWCSTYCMCMVI

SEQ ID NO: 12257 - DNA, 597 bp, Glycine max
atgaatgagccgaatggttcagatatgctgcaaccttcggcttcatagagcaaaggtatgcggtacaaccgaccttcagaagatttctagcctcaaagttacggcgacttgcagactcaaacaaaattgaaaagatcgataagtcctataggatcccagactcccttgcaacaaggactccagctccaatgaaagcttcagctccaaaacagaaggatccatcaaagccatcgaaggtgtcaaaggccataggattgttttctgcctccagccctgcactagaggctgcgatggcagctgctgtcaaggtggctgacgcggaggcaaaagcacatgatgcacatgatcagacgatggaggcagaaaggatcctcaagatggccgaggataccgagtctctcctcataattgcagcagagatctatgatcgatgttcaaggggagagataaccacgttagttccagtggcacaaagggggatttgagatctattggagtctctcttgtgttgttgtacatggataggttctggaatccagtggcccggattgctcctgttgtatgatgtaaccgtttgtgttgtactacctcttctcg

SEQ ID NO: 12258 - protein, 98 aa, Glycine max
MKASAPKQKDPSKPSKVSKAIGLFSASSPALEAAMAAAVKVADAEAKAHDAHDQTMEAERILKMAEDTESLLIIAAEIYDRCSRGEITTLVPVAQRGI

SEQ ID NO: 12259 - protein, 64 aa, Glycine max
MAAAVKVADAEAKAHDAHDQTMEAERILKMAEDTESLLIIAAEIYDRCSRGEITTLVPVAQRGI

SEQ ID NO: 12260 - DNA, 653 bp, Glycine max
agggttaagattgaaagcgtgagaatgccggtgaagaagtattactgcgattactgcgacaagctattccaagacacaccagcagatcggaaacgacacgttcagggcattcaacaccaccaagccaaagctcgctggtacgattccttcaaacaacaacaaatccctccgattcccaatcgacccctttgctttcacttcgtcaacacgggattttgccgctacggcgactcttgcaaatatctccatcccgttcccaacaacaatgtccagcagccgccaatcgtaaccacaccgtcgccttcaccagggagtgtggtaggagtgtcattcggcaatcttcccccctccctgcagcctccgcctgacggcgtatatctccaccttccctttctcgactggggatagatttgtaattctacccacttctcataactgcatctccgtgtctgtgttctgttcaatcatttcttaatttaaccttttagttcttctaattttcattgtgtggctggattctagtgatttcttatgacctagctccaccgtattatttggagttttcttatatctacccaacgcttaacttatgattaaatccaaaatctatcttattgtaatacagtatgataatagactgctgagtttgcttc

SEQ ID NO: 12261 - protein, 135 aa, Glycine max
RVKIESVRMPVKKYYCDYCDKLFQDTPADRKRHVQGIQHHQAKARWYDSFKQQQIPPIPNRPLCFHFVNTGFCRYGDSCKYLHPVPNNNVQQPPIVTTPSPSPGSVVGVSFGNLPPSLQPPPDGVYLHLPFLDWG

SEQ ID NO: 12262 - protein, 127 aa, Glycine max
MPVKKYYCDYCDKLFQDTPADRKRHVQGIQHHQAKARWYDSFKQQQIPPIPNRPLCFHFVNTGFCRYGDSCKYLHPVPNNNVQQPPIVTTPSPSPGSVVGVSFGNLPPSLQPPPDGVYLHLPFLDWG

SEQ ID NO: 12263 - DNA, 778 bp, Glycine max
tctctaaaccaataattcatattcactcaaaaaattaaaacaccatgcaacaagcaattccttataggtcatggcaacctctcatcacacacacctccaccaccaccaccactcacttcacaattagcccacacacattaacctattcgacagtgtctccaacaggattatctccgaaagacaatatcggtttggaaccgaataacaacaataatggtaatagtcatttcttcatttcctccaaaatggtacccaacatggtgttagaaaacgcgattatagtctttgctagccgcggttgttgcatgagccatgttgtgaagcgattgctattgggtcttggggccaaccctgcggtgcacgaggtggaggagagtgatgaagtgggtgttgttagagaattggaagcaattgtgggtgccaataatggagggaataagatgcaatttccagcggtttttattggtggcaaattatttgggggattggatcgggttatggctactcatatttctggggaattgattccaattctcaaagaagcaggggcactatggctttaactctcttttttttccccttagattaatttttccattttcgttcttggttttcttattgtattatatactattatttgttatttacgtgttaatttccttctccctgggaggctgtagagaaaaaaaaattgaatgtaataaaaaattattttcgatgtgttctgacatggatgcaaaatttgatgatgtgggaatagaaaattttctggagttgc

SEQ ID NO: 12264 - protein, 172 aa, Glycine max
MQQAIPYRSWQPLITHTSTTTTTHFTISPHTLTYSTVSPTGLSPKDNIGLEPNNNNNGNSHFFISSKMVPNMVLENAIIVFASRGCCMSHVVKRLLLGLGANPAVHEVEESDEVGVVRELEAIVGANNGGNKMQFPAVFIGGKLFGGLDRVMATHISGELIPILKEAGALWL

SEQ ID NO: 12265 - protein, 105 aa, Glycine max
MVPNMVLENAIIVFASRGCCMSHVVKRLLLGLGANPAVHEVEESDEVGVVRELEAIVGANNGGNKMQFPAVFIGGKLFGGLDRVMATHISGELIPILKEAGALWL

SEQ ID NO: 12266 - protein, 101 aa, Glycine max
MVLENAIIVFASRGCCMSHVVKRLLLGLGANPAVHEVEESDEVGVVRELEAIVGANNGGNKMQFPAVFIGGKLFGGLDRVMATHISGELIPILKEAGALWL

SEQ ID NO: 12267 - DNA, 816 bp, Glycine max
  misc_feature (563)..(563): n is a, c, g, or t
  misc_feature (579)..(579): n is a, c, g, or t
  misc_feature (715)..(715): n is a, c, g, or t
  misc_feature (810)..(810): n is a, c, g, or t
gacgttgtgaaaataaaaaattgttcttgttttgtccatttagccatgaagaagttgtctttctccatccccaccgcaaaaccccaatcggtggacacttccaccacccgaaaggacgacgacagcgacggaaccaaacagtacatcaccgaattcgacccttccaaacccgcaaaccccaaaatcacaatccccccaatccaaaaccagtggaacccccaacaagacaacgaacacagcaccacgcggtggcgccgcactccggaggagaccgagctgctgcgtaagctgaaactggaggaagatctgcagaggttgccggaggaccaggggttggaggagttcaaggatgtccccgtcgaggttttcggcgaggcgttgctcgctgggtatggctggacggaagggatggggattgggaagaaggccaaagaggacgtgaaggtggtacaggtcaaggggagaacctcaagggaaggattagggttcgttgccaatgcttctggcaacaatttgaatcactgcgaccatcatttatgtaatttgcagttctagtattcacnccttagtggtgggttntctagtaatagagatatgccgtacagaatcaagggtctattggttacaatagtattattctctctttctctaatcatagctctccaagttctcttttctttgggtcaatccctatggaagcttgattcctaagatntagtacgttgaatccatgctctgattctgtttcttttaatttaatatttgttgtttccaaatgctgtctccatcggcattatgaattggtgattntatgtt

SEQ ID NO: 12268 - protein, 184 aa, Glycine max
DVVKIKNCSCFVHLAMKKLSFSIPTAKPQSVDTSTTRKDDDSDGTKQYITEFDPSKPANPKITIPPIQNQWNPQQDNEHSTTRWRRTPEETELLRKLKLEEDLQRLPEDQGLEEFKDVPVEVFGEALLAGYGWTEGMGIGKKAKEDVKVVQVKGRTSREGLGFVANASGNNLNHCDHHLCNLQF

SEQ ID NO: 12269 - protein, 169 aa, Glycine max
MKKLSFSIPTAKPQSVDTSTTRKDDDSDGTKQYITEFDPSKPANPKITIPPIQNQWNPQQDNEHSTTRWRRTPEETELLRKLKLEEDLQRLPEDQGLEEFKDVPVEVFGEALLAGYGWTEGMGIGKKAKEDVKVVQVKGRTSREGLGFVANASGNNLNHCDHHLCNLQF

SEQ ID NO: 12270 - protein, 94 aa, Glycine max
RCENKKLFLFCPFSHEEVVFLHPHRKTPIGGHFHHPKGRRQRRNQTVHHRIRPFQTRKPQNHNPPNPKPVEPPTRQRTQHHAVAPHSGGDRAAA

SEQ ID NO: 12271 - DNA, 1352 bp, Glycine max
  misc_feature (403)..(403): n is a, c, g, or t
  misc_feature (472)..(472): n is a, c, g, or t
  misc_feature (1310)..(1310): n is a, c, g, or t
  misc_feature (1323)..(1323): n is a, c, g, or t
ggttgaacttgaagttgcagagagaaaatggattgagaattctctctcttttctctttctcttcccaactttccttccttgggatcattctgcttctttgctatggaagactcagattcagttgctacgctgatagattccacaacttctaagatacagcagctgcaaaaggcatttgctgaacttgaaagttaccgagctgttactctgaacttgaaatggaaagaactcgaggaacattttcatggtctggagaaatccttgaagaggcgctttcatgaattggaagaccaggaaaaagagtttgagaacaaaacaaggaaggctcaggagatactggagaagcggcaagcagctgtttatgccaaggagcaagccacgttgcagaggcttcaggagaaangggatgctgctgtatttgacattgtgaatgctcgagaaaagcagaggaaggtcacgataagtgatttgnctattgtctccaatgggggtaaggggacatttcatgtggaggacaaaccagtggatgctgtgtcctttgcagctaatggtaatgtggaagaggtggtactttctcctgaaaatggaaatgtggagttggtatcttatccagacttggtaaaactttgtaaagagatggatgctgctgggcttcacaaattcatatctgacaaccgtaagaaccttgctgctgtaagggatgaaataccaaatgctttaagagctgctcctaatgctgcctgtttagttttagattctctggaaggattttactgtacagaagtgtcaaatcaggacgtaaagaaggatgctaacttattgggtcttcgccgaacctgtatcatgctgatggaatgtctctgtgatttcctgagcagctcaggttttgtttctaatgtgatttcagaagatatcaaggacagggcaaaagcagttgctgaagaatggaaacccaggctggatgctcttgacatggatgctagcaatgggaattccttggaggctcatgcatttttacaacttcttgctagttttggaattgcctctggttttgatgaggaggagttatctagattgattccaatggtgtctcggcgccgccaaactgctgatttatgtcgttttcttgggctgtcagaaaagatgcctggtgtaattgaggttttggtgaacagtgggcgacaaattgatgctgttaacttggcttttgcatttgatcttactgaacagttttgtcctgtttctttactgaagtcttacttgaaagatgctagaaaagcttcttctcctgttagaagtgctcactcttntcccactgcacanattgaggtgaatgaacgagagctggttgc

SEQ ID NO: 12272 - protein, 416 aa, Glycine max
  misc_feature (101)..(101): Xaa can be any naturally occurring amino acid
  misc_feature (124)..(124): Xaa can be any naturally occurring amino acid
  misc_feature (403)..(403): Xaa can be any naturally occurring amino acid
  misc_feature (407)..(407): Xaa can be any naturally occurring amino acid
MEDSDSVATLIDSTTSKIQQLQKAFAELESYRAVTLNLKWKELEEHFHGLEKSLKRRFHELEDQEKEFENKTRKAQEILEKRQAAVYAKEQATLQRLQEKXDAAVFDIVNAREKQRKVTISDLXIVSNGGKGTFHVEDKPVDAVSFAANGNVEEVVLSPENGNVELVSYPDLVKLCKEMDAAGLHKFISDNRKNLAAVRDEIPNALRAAPNAACLVLDSLEGFYCTEVSNQDVKKDANLLGLRRTCIMLMECLCDFLSSSGFVSNVISEDIKDRAKAVAEEWKPRLDALDMDASNGNSLEAHAFLQLLASFGIASGFDEEELSRLIPMVSRRRQTADLCRFLGLSEKMPGVIEVLVNSGRQIDAVNLAFAFDLTEQFCPVSLLKSYLKDARKASSPVRSAHSXPTAXIEVNERELV

SEQ ID NO: 12273 - protein, 238 aa, Glycine max
  misc_feature (225)..(225): Xaa can be any naturally occurring amino acid
  misc_feature (229)..(229): Xaa can be any naturally occurring amino acid
MDAAGLHKFISDNRKNLAAVRDEIPNALRAAPNAACLVLDSLEGFYCTEVSNQDVKKDANLLGLRRTCIMLMECLCDFLSSSGFVSNVISEDIKDRAKAVAEEWKPRLDALDMDASNGNSLEAHAFLQLLASFGIASGFDEEELSRLIPMVSRRRQTADLCRFLGLSEKMPGVIEVLVNSGRQIDAVNLAFAFDLTEQFCPVSLLKSYLKDARKASSPVRSAHSXPTAXIEVNERELV

SEQ ID NO: 12274 - DNA, 731 bp, Glycine max
  misc_feature (607)..(607): n is a, c, g, or t
  misc_feature (703)..(703): n is a, c, g, or t
gcggctcctccactcagaaaacccagccgccgccgcatcggcctcccaggtaagcaggagcgtccaccccagccgccgccatgaagcgcaacccccgcgtcacgagctcccgccggaagtgccgcaaggcgcacttcacggccccgtcctccgtccgccgcgtgctcatgtccgcggcgctatcgacggagctccgccacaagtacaatgtgcgttccatcccgatccgcaaggacgacgaggtgcaggtcgtgcgcggcacctacaagggccgtgagggcaaagtggtgcaggtgtaccgccgtcgctgggtcatccacgtcgagcggatcacccgcgagaaggtgaacggctccaccgtgaacgtgggcatccacccttccaaggtgatggttacaaagctgaagcttgacaaggaccgcaaggctctcctcgaccgcaaggcccggggccgcgccgccgacaaggctaagggcaagtttactgccgacgacgtcgccgccgttgctggtggcgccgccgccactggcgcgtctctccaggagatcgactaggcgcttcgcggggatctgatggtggtcctaccgcctattactccttatcgctntagtttttgctatcaatgattatgtgctaggagttttatgttacttataaactgctttgagcctcgatgggagttgaacttaatgtggagtgtatntgagatatgaagaactcattatatggcc

SEQ ID NO: 12275 - protein, 157 aa, Glycine max
MKRNPRVTSSRRKCRKAHFTAPSSVRRVLMSAALSTELRHKYNVRSIPIRKDDEVQVVRGTYKGREGKVVQVYRRRWVIHVERITREKVNGSTVNVGIHPSKVMVTKLKLDKDRKALLDRKARGRAADKAKGKFTADDVAAVAGGAAATGASLQEID

SEQ ID NO: 12276 - protein, 128 aa, Glycine max
MSAALSTELRHKYNVRSIPIRKDDEVQVVRGTYKGREGKVVQVYRRRWVIHVERITREKVNGSTVNVGIHPSKVMVTKLKLDKDRKALLDRKARGRAADKAKGKFTADDVAAVAGGAAATGASLQEID

SEQ ID NO: 12277 - protein, 91 aa, Glycine max
RLLHSENPAAAASASQVSRSVHPSRRHEAQPPRHELPPEVPQGALHGPVLRPPRAHVRGAIDGAPPQVQCAFHPDPQGRRGAGRARHLQGP

SEQ ID NO: 12278 - DNA, 628 bp, Glycine max
  misc_feature (593)..(593): n is a, c, g, or t
  misc_feature (621)..(621): n is a, c, g, or t
aggaacttcctcgattctcttctcttatctcaatcacaatttctctctcttttctctcttctgaattattgtcatggctaagagctcattcaagatggaacacccacttgagaggaggcaggctgaagcatctcggataagggagaagtatcccgaaagaattccagtaattgttgaaagggcagagaagagtgatgttcctgaaattgataagaaaaagtatctggtccctgctgatttgactgttggccagtttgtgtatgtggtgcggaagagaatcaagctgagtcccgagaaggccatcttcatttttgttaagaatattttgccaccaactgcggcaatgatgtctgcaatttatgaggaaaacaaggatgaagatggatttctatacatgacttacagtggagagaacacatttgggcttgtgttctgaaataatccgtgactggtaaccatctgaatagtacttcctaaaattgaccaatgtgaagaagtcagcttaattgtaaattctctggtttgatgcttttatgtaaagtttattatgtctactggaacttatttgaaaattgtcgtgtttctatcagttntaaattgcataagtttaagggtatgttntttgttc

SEQ ID NO: 12279 - protein, 120 aa, Glycine max
MAKSSFKMEHPLERRQAEASRIREKYPERIPVIVERAEKSDVPEIDKKKYLVPADLTVGQFVYVVRKRIKLSPEKAIFIFVKNILPPTAAMMSAIYEENKDEDGFLYMTYSGENTFGLVF

SEQ ID NO: 12280 - protein, 113 aa, Glycine max
MEHPLERRQAEASRIREKYPERIPVIVERAEKSDVPEIDKKKYLVPADLTVGQFVYVVRKRIKLSPEKAIFIFVKNILPPTAAMMSAIYEENKDEDGFLYMTYSGENTFGLVF

SEQ ID NO: 12281 - DNA, 549 bp, Glycine max
aaaaggccatataatttttttttatttgaaataatgtccgggatcatccacaagattgaggagaccctccatgtgggagggcacaagaaagaggagcacaaaggagaacaccatggtgagcacaaaggtgaacacaaaggagaacaccatggtgagcacaaaggtgaacacaaaggagaacaacaccatggggagcacaaggagggacttgtggataagatcaaggacaagatccatggtgatggccatgacaagggtgagaaaaagaagaagaaggacaagaagaagaaggagcatggacatgaccatcatggtcatagcagcagcagtgacagtgattagatcttatatgttaagcaggtgtacggtacgatggtagtgaggagccagaatccctcttcctgctttatgatataatacaaataaaatagcgattccggaaatcatgtctgtagctgctctttttatttatgtgataaatgtaaaacgctttggtttggcttggccgttgtgcattaggttgaaaaaataaatgttataattactcag

SEQ ID NO: 12282 - protein, 113 aa, Glycine max
KRPYNFFLFEIMSGIIHKIEETLHVGGHKKEEHKGEHHGEHKGEHKGEHHGEHKGEHKGEQHHGEHKEGLVDKIKDKIHGDGHDKGEKKKKKDKKKKEHGHDHHGHSSSSDSD

SEQ ID NO: 12283 - protein, 102 aa, Glycine max
MWEGTRKRSTKENTMVSTKVNTKENTMVSTKVNTKENNTMGSTRRDLWIRSRTRSMVMAMTRVRKRRRRTRRRRSMDMTIMVIAAAVTVIRSYMLSRCTVRW

SEQ ID NO: 12284 - protein, 102 aa, Glycine max
MSGIIHKIEETLHVGGHKKEEHKGEHHGEHKGEHKGEHHGEHKGEHKGEQHHGEHKEGLVDKIKDKIHGDGHDKGEKKKKKDKKKKEHGHDHHGHSSSSDSD

SEQ ID NO: 12285 - DNA, 995 bp, Glycine max
  misc_feature (584)..(584): n is a, c, g, or t
  misc_feature (809)..(809): n is a, c, g, or t
gtctttctcttttcactctcccagcatgtaacccacgccctcatgcatcgccctcttcccttccctttcaagtgagtctcatcaccttacttcaacaccgcggcgaacgacaataatccgtattcagatttgctcaccgtggacaatagtcatcatcgatccagattcagatctgctcataacgcacaacgactatcgatctagattggttcgtgcggttgttctgtgatattggatcagatctgtgatttgattccaccatgacattaccgacgaccacaaccatgcatgcctcgaaactcccacacgtcggaggagtgacgattgataccgctacggaaccttgcaatgcaattctgcaacgcctaccttgaacgtcatcacgatccaatgagtggcatgatgatgatggtgatcacgaaggaacttgagacttgcatggaattctatgagaagaacctctctgatcatcaagaataaatgtagaaaatgttgtaaatggtgcagaaatcgatcgaaagcctcacagcggcaattgcagtgatgaacgttggcaagaaaatcatgaacgacaaagatcatcncagtggaatgctggaaacagttctttcaatagttgataaagcatagattccatttccatcctttgatggctccaactttcgagattggaaagcaaaagcagaacaattttttgaattgaagggtatccctaaagaataaaggagtcgtttgttattactatcgatggatggtaaagcctttgcatggcaaaggcattatatgctaaacaataacagagggaattnttggcaacaaatcattcataatgctggaagcagattcgacacaagtgcattcgatgatccaatagcagaaattgcaagattgaagcaagatggccctttgatcgattacctagaaaactttgacacattgttagctcgagtatcaattacagaagacgtagcattaagtttttttctttctggttc

SEQ ID NO: 12286 - protein, 82 aa, Glycine max
  misc_feature (21)..(21): Xaa can be any naturally occurring amino acid
MDGKAFAWQRHYMLNNNRGNXWQQIIHNAGSRFDTSAFDDPIAEIARLKQDGPLIDYLENFDTLLARVSITEDVALSFFLSG

SEQ ID NO: 12287 - protein, 70 aa, Glycine max
  misc_feature (9)..(9): Xaa can be any naturally occurring amino acid
MLNNNRGNXWQQIIHNAGSRFDTSAFDDPIAEIARLKQDGPLIDYLENFDTLLARVSITEDVALSFFLSG

SEQ ID NO: 12288 - protein, 43 aa, Glycine max
MQFCNAYLERHHDPMSGMMMMVITKELETCMEFYEKNLSDHQE

SEQ ID NO: 12289 - DNA, 546 bp, Glycine max
  misc_feature (539)..(539): n is a, c, g, or t
agccaatgcaaataagacgacttgtttcattgatccttgaagagatcgagcttcttttgcaccacaatggtcgagtgatgtcttgcaactgcggatcaagctgcggctgcggctcaagctgcaagtgcggcaagaagtaccctgacctggaggagacgagcaccgccgcgcaggccaccgtcgtcctcggcgtggccccggagaagaaggccgcgcccgagttcgtcgaggccgcggcggagtccggcgaggccgcccacgcctgcggctgcggtagcagctgcaagtgcgacccctgcaactgctgatcacatcgatcgacgaccatggatatgattattatctatctagcttgtggtggtggttgaacaataataagcgaggccgagctggctgccatacataggtattgtgtggtgtgtgagagagagagagaaacagagttcttcagtttgctatctctctctctgcatgtttggcgtcagtctttgtgctcatgtacgtgtgtctacatgcatgttggttgatccgattgcgtntgctgta

SEQ ID NO: 12290 - protein, 101 aa, Glycine max
PMQIRRLVSLILEEIELLLHHNGRVMSCNCGSSCGCGSSCKCGKKYPDLEETSTAAQATVVLGVAPEKKAAPEFVEAAAESGEAAHACGCGSSCKCDPCNC

SEQ ID NO: 12291 - protein, 100 aa, Glycine max
MQIRRLVSLILEEIELLLHHNGRVMSCNCGSSCGCGSSCKCGKKYPDLEETSTAAQATVVLGVAPEKKAAPEFVEAAAESGEAAHACGCGSSCKCDPCNC

SEQ ID NO: 12292 - protein, 76 aa, Glycine max
MSCNCGSSCGCGSSCKCGKKYPDLEETSTAAQATVVLGVAPEKKAAPEFVEAAAESGEAAHACGCGSSCKCDPCNC

SEQ ID NO: 12293 - DNA, 566 bp, Glycine max
  misc_feature (547)..(547): n is a, c, g, or t
gatactggaacttgcccaagcccaatggcctgagaagcctaaagcagaccctcccaaagctgagaagcccaaggccgagcccgagaaaaagaaggacggtggcggcgagaagcccaaggcctgagcccgagaaaaagaaggacggtggctggtgagaaacccaaggccgagcccgagaaaaagaaggatggtggggagaagcccaaaggggatgctccgaaaaaggaagccgagaagcccaagcccgggcccgagaagcccaaggacaagcccgcgccagctcccttacccgtgcagccacatatggctgcacctatggcggttccagttgggatgctctatgctcctcctccgtgctacgaaggcaggcccgttgggcctgggtacgaatacggtgggcccatgttctgttacgacgggtactatgcaaggcccgtatatgatagttacggtggaggcagaccctgttatgtgaaccgtggtgatcaatatttcagcgaagagaatccacaaggctgcataattatgtgacaattacgtccacggngttgcattattgggttctg

SEQ ID NO: 12294 - protein, 95 aa, Glycine max
MVGRSPKGMLRKRKPRSPSPGPRSPRTSPRQLPYPCSHIWLHLWRFQLGCSMLLLRATKAGPLGLGTNTVGPCSVTTGTMQGPYMIVTVEADPVM

SEQ ID NO: 12295 - protein, 87 aa, Glycine max
MLRKRKPRSPSPGPRSPRTSPRQLPYPCSHIWLHLWRFQLGCSMLLLRATKAGPLGLGTNTVGPCSVTTGTMQGPYMIVTVEADPVM

SEQ ID NO: 12296 - protein, 75 aa, Glycine max
MAAPMAVPVGMLYAPPPCYEGRPVGPGYEYGGPMFCYDGYYARPVYDSYGGGRPCYVNRGDQYFSEENPQGCIIM

SEQ ID NO: 12297 - DNA, 1850 bp, Glycine max
  misc_feature (1411)..(1411): n is a, c, g, or t
  misc_feature (1448)..(1448): n is a, c, g, or t
  misc_feature (1526)..(1526): n is a, c, g, or t
  misc_feature (1528)..(1528): n is a, c, g, or t
  misc_feature (1637)..(1637): n is a, c, g, or t
  misc_feature (1670)..(1670): n is a, c, g, or t
tttttttggttaaaatttaatatattttggtcctgggagtttaactaagtaaggaaatgtaaaataattcgatggagttaatttataaaaaaacttaagtagaaaatgaggatttgaattatttctaaagtggtaaaagtataattaatccaatggtccataaaggttgattcatttagtaaggatcaaacttatcccctaagaatgcatatttgaatcccgctatgaatatgaagatcttgttggtgggtgatccataagtaccttttaagcattcagtgaggcttgaggtgagcactgatcttcatgagtccccgaaatcaaggttattaagtccaagagtctacttcatataaaaataataataaaatatatataaatgacatacaaattaaacattttaataacataataaagaaaaatattaaatcataaattctataatacttaaataactaagtatagtaatgcaccactactagatatttagtaacttgtggaggtgatagttgtggaagaagattttcgtcaagggtttgatgttgttgtagaaataagagttgttcgattcaaagacgacactttgaaatgaaggtatatgttgaaccttaaacatatagaaaataacttaaaatgacttacattttagtataatatttttaccttgttgactcgctaatttggtggtaaattcgagagtctaccgaatttattataaagagagcttgctcatgagccaactttcataagataattggattcataaactcgtaagagttaataagttagttcaagagtttgataaatatgtccagaatccaactcaccgatctttttggtcagaaagaaaaaatataattaagccaatcatagttatatgtgtggaaacttttatccatgcagaaaaattgctagaaagtaccagaaatgcaaatgggaaatgcttaacggcatctactactttgggcctcaagaaattagtaggcaatggattgaagaacaatggccaaatcttcactggctatccagtagtgggttaccaaggcaaaatgcaaacttcaggttcatgcttatattcatcaagatttgacaccgcatgtgcctgggatccaagaatcaaagggctattcttctacgagagcacagcaatcttccctgcgtcgaaattcggagacttcgccggcgatgtgagaaaacttagagacctcaagccagaaaatttctgtggggtggacaactacaacgggttgctaattcgctttatcaaagcctcaagtgcctatctagggcaacctgaagattctgtggttgttgatttcaactattatcgcggaaacgatccgtcaaaccctaggctaaatcaagatgtgtgggaagaagttgagcaattggcattcttcaagcatggggntaagccacactgggctaagaataggaacatagcattnttaggggtgaatcagaagtatcccaagtttaacatgtttattgcagccaaaaaacaaatggatccactcaatgtgttntntagtgaatggtcagatgagatactttatgggcaggaattatcagagaaagttgatgggtgtgctttggagggactatgcatttgtagcgaacatagacattgtagcccncaaaaggggtattattgcagtcatggccttgtntacaaggaagccagggtatgtagatatttacaatcattcatttcatcaaccatagtatgatgtgtgcctttatatcatatcattgttttaaattatagttgtagttacagtcaatatgactgcaattacagtcagaaaactacaataatatatcttttgataatatatcatattacatgt

SEQ ID NO: 12298 - protein, 226 aa, Glycine max
  misc_feature (121)..(121): Xaa can be any naturally occurring amino acid
  misc_feature (133)..(133): Xaa can be any naturally occurring amino acid
  misc_feature (159)..(160): Xaa can be any naturally occurring amino acid
  misc_feature (196)..(196): Xaa can be any naturally occurring amino acid
  misc_feature (207)..(207): Xaa can be any naturally occurring amino acid
MQTSGSCLYSSRFDTACAWDPRIKGLFFYESTAIFPASKFGDFAGDVRKLRDLKPENFCGVDNYNGLLIRFIKASSAYLGQPEDSVVVDFNYYRGNDPSNPRLNQDVWEEVEQLAFFKHGXKPHWAKNRNIAXLGVNQKYPKFNMFIAAKKQMDPLNVXXSEWSDEILYGQELSEKVDGCALEGLCICSEHRHCSXQKGYYCSHGLXYKEARVCRYLQSFISSTIV

SEQ ID NO: 12299 - DNA, 1015 bp, Glycine max
  misc_feature (516)..(516): n is a, c, g, or t
  misc_feature (566)..(566): n is a, c, g, or t
  misc_feature (995)..(996): n is a, c, g, or t
attcccattttaagttattcctgtctctctcttagataaagcaaagaaaaatactattttttccattacatcacatacaatattttctccattatttatctttttatctctatcttctttacatctcaattaatcccatttgggagatgtttattggaatcatattcctatggcgagaaattttttatatataattatgtcttttatttctggaaatattttagataccaaatatatatatatatatatatgaatgaatgaatgatatttcagaaatttgattctcaagaaatataatttctaatattgatgattctcaataataaaaaatagattcatatactaattactaaagacaccataaccaagccaatttttggcatctttttgtgctctctctttgtatgtttgagtttgttgacgttacgtaataaacatttttgttgcatgtttattggacaggccaaagccattgaaacctacaaaaatcaccagctaagcctcacatcacttatntgcttcataggcactcttcaagctattgcagttacttttgttatggaacncaagccatccgtgtggacaattggctgggatatgaacttacttgccgctgcctatgctgggattgttacatcaagcataacatactatgtccaaggattggtaattaagaagaaagggcctgttttcgcaactgcatttagccctctgatgatgatcattgtagccatcatgggctcctttatcctttcagagcagctttttcttggaggtgttcttggtgctatcttgatcgttataggcttatactcagttctttggggaaagcacaaagaacaagtggtgaagaacgaggtagaggatatacccttgcctgtaaagggtgctcaacttgatggaaacccagaaacacttattgattccactgatcagaaatctgattccaacaagatctcttcacatataattaatgtgtctatccctgagcttcnnatgaaatctaataacagtt

SEQ ID NO: 12300 - protein, 189 aa, Glycine max
  misc_feature (23)..(23): Xaa can be any naturally occurring amino acid
  misc_feature (40)..(40): Xaa can be any naturally occurring amino acid
  misc_feature (183)..(183): Xaa can be any naturally occurring amino acid
MFIGQAKAIETYKNHQLSLTSLXCFIGTLQAIAVTFVMEXKPSVWTIGWDMNLLAAAYAGIVTSSITYYVQGLVIKKKGPVFATAFSPLMMIIVAIMGSFILSEQLFLGGVLGAILIVIGLYSVLWGKHKEQVVKNEVEDIPLPVKGAQLDGNPETLIDSTDQKSDSNKISSHIINVSIPELXMKSNNS

SEQ ID NO: 12301 - protein, 152 aa, Glycine max
  misc_feature (3)..(3): Xaa can be any naturally occurring amino acid
  misc_feature (146)..(146): Xaa can be any naturally occurring amino acid
MEXKPSVWTIGWDMNLLAAAYAGIVTSSITYYVQGLVIKKKGPVFATAFSPLMMIIVAIMGSFILSEQLFLGGVLGAILIVIGLYSVLWGKHKEQVVKNEVEDIPLPVKGAQLDGNPETLIDSTDQKSDSNKISSHIINVSIPELXMKSNNS

SEQ ID NO: 12302 - protein, 139 aa, Glycine max
  misc_feature (133)..(133): Xaa can be any naturally occurring amino acid
MNLLAAAYAGIVTSSITYYVQGLVIKKKGPVFATAFSPLMMIIVAIMGSFILSEQLFLGGVLGAILIVIGLYSVLWGKHKEQVVKNEVEDIPLPVKGAQLDGNPETLIDSTDQKSDSNKISSHIINVSIPELXMKSNNS

SEQ ID NO: 12303 - DNA, 565 bp, Glycine max
tcttgttgatcaaactcaacaaccaggttccggatgcaagattcatctatataaacgtttatggtatctttcaagatattttaagcaacccatcttcctatggatttagggtcacaaatgctgggtgctgtggggtaggaaggaacaatggtcaagttacatgtctgcctctgcaaaccccatgcaggaccaggggtgcgttcctgttttgggatgcatttcatccaactgaggctgccaataccatcattggtaggagagcttacaatgctcaatctgcatcagatgcttaccctgttgatatcaatcgcttagctcagatctaaagagggtcttgtagtagccataagctgtgccgtgataactataattgtaatgtttgtgtagtcttcgcatccttttcttgttcaggttttaaatgtttgtgttcagaagtctaagtgtaatttggcataaaaattttggttaagaaatttgcatattttttagtgagtactacttgttggctgatgttatgtatattttcatccaaagtgaataaaatgacaagaaattgtttgctttc

SEQ ID NO: 12304 - protein, 107 aa, Glycine max
LLIKLNNQVPDARFIYINVYGIFQDILSNPSSYGFRVTNAGCCGVGRNNGQVTCLPLQTPCRTRGAFLFWDAFHPTEAANTIIGRRAYNAQSASDAYPVDINRLAQI

SEQ ID NO: 12305 - protein, 55 aa, Glycine max
MVKLHVCLCKPHAGPGVRSCFGMHFIQLRLPIPSLVGELTMLNLHQMLTLLISIA

SEQ ID NO: 12306 - DNA, 744 bp, Glycine max
aatgctattgaaactggtcagaatatttggttcagtaatttattcaaccgtatcagctacacaacctgttggtgtcgatatcgaggcagagaacaggctagagcgttgcaacctctgcttcacagagcttgaaaaagtcaaacgttttttgccttctttttcaagaagaggaggatcaattgcaaaatctgcacaagagttgaatctggctttgcaggatgtttcgtgatcttttcctgattcaattatttccgccgctcaagttttaccggtgctttttaggggttttgtgcattttaaagatttaaacctccatacaagccaccgaatagtttgatgcattgtcatttggcattgaatgaagccttttcctgtatgtacatttattgctgttaaaaattcatggtaattgattagtggaggcactgatagctgctaattctgcgacatatactcgaagccaaagcttgaggcatgtcaccctctgctgatggttgcacagctgactataacctgtcgatatctgcttaatgtgtagatctcagtcggttccataactaacctaatatgtggcgcaagatactactgcctatctaatcttatttcaaaatttcatgatttttgttatggttctttaagtgcggttatacacagtgagtggtgccgttcatatttctatttgttgcatatttttgtatgatttttttaaaatgctttggtgaattatgccgacggataagtgtc

SEQ ID NO: 12307 - protein, 75 aa, Glycine max
MLLKLVRIFGSVIYSTVSATQPVGVDIEAENRLERCNLCFTELEKVKRFLPSFSRRGGSIAKSAQELNLALQDVS

SEQ ID NO: 12308 - protein, 43 aa, Glycine max
NAIETGQNIWFSNLFNRISYTTCWCRYRGREQARALQPLLHRA

SEQ ID NO: 12309 - DNA, 644 bp, Glycine max
  misc_feature (632)..(632): n is a, c, g, or t
ggtttcccgtgatagtgaagggacttttggcattgttgattacacttattatgatgacatgaagtatgccattcggaaattggatgacactgagtttagaaatccctgggcgagagcttatattcgggtgaggaagtatgagagtagtcgttctaggagccgcagcaggagccccagcaggagccccagcaggagcagaagtccaaaaagagttagaagtagatctctggagcgttctgtgtctaggtcacgatctagatctcaatcagcatcaccaatcaaatcttctaggccaagatcacgatcccgatcacgatcacgatctggatctggatctcctcatcaggtcctgtcaggtagtggttgaatttctgacaaagctggtggttctctggtgatattgttccattctggtgggcagtatcggaattatattggagttggactaaattgttttaagggaaaattattgatgtgcctaggctgtttggtgattgtcttatttcttttaaattaaaatgttggacattggccttgccctttgtaccttagcaaacacaagaatatctttagtcctcgcaaactgtgaatccaatttgaatggttttaaacagatttataaaaaaaaaatntacatatatcgc

SEQ ID NO: 12310 - protein, 121 aa, Glycine max
VSRDSEGTFGIVDYTYYDDMKYAIRKLDDTEFRNPWARAYIRVRKYESSRSRSRSRSPSRSPSRSRSPKRVRSRSLERSVSRSRSRSQSASPIKSSRPRSRSRSRSRSGSGSPHQVLSGSG

SEQ ID NO: 12311 - protein, 102 aa, Glycine max
MKYAIRKLDDTEFRNPWARAYIRVRKYESSRSRSRSRSPSRSPSRSRSPKRVRSRSLERSVSRSRSRSQSASPIKSSRPRSRSRSRSRSGSGSPHQVLSGSG

SEQ ID NO: 12312 - protein, 86 aa, Glycine max
MRVVVLGAAAGAPAGAPAGAEVQKELEVDLWSVLCLGHDLDLNQHHQSNLLGQDHDPDHDHDLDLDLLIRSCQVVVEFLTKLVVLW

SEQ ID NO: 12313 - DNA, 769 bp, Glycine max
tgaaatatcttgctcatgggattgatcttacaacacttgggttgaatttgaattcatcagaaaacctttacaagacttttcggtccccgtggtctgatgaaccagccaagggtgatccagagttcagtgtgttacaatgttattatgttaaacagcctcctgctcttcaccaaggttatttttcaaagttttcggtggaaactttgttttacatattttacagcatgcccaaagatgaagcacaactatacgcggcaaatgaactttacaaacgtggttggttttatcataaagagcatcgtttatggtttataagagttcccaacatggagccgcttgtcaaaacaaacacatacgagagaggatcttaccactgttttgatccaaacacatttgaaacagtccggaaggataattttgttcttcattatgaaatggtggaaaagagaccgtctgtgcctcaacattgaggaaggaaaaagaaaaccttaaatgtaaagtttttatttatggatttaatttttaggacgcaagtcattttgaatcattagcgttccttcaatttggcgtatttcttacattctcgtaaatcttgatgcactgagggctgttatccctttccccccagccataatgtagttaaataatggacgttaggataatctggctgtctggaagtggcggatatggatgtcttcccaatgcacagtgacacagttatacacctgactcctgggtgtctagtatttttttagcaatttactgcatg

SEQ ID NO: 12314 - protein, 155 aa, Glycine max
KYLAHGIDLTTLGLNLNSSENLYKTFRSPWSDEPAKGDPEFSVLQCYYVKQPPALHQGYFSKFSVETLFYIFYSMPKDEAQLYAANELYKRGWFYHKEHRLWFIRVPNMEPLVKTNTYERGSYHCFDPNTFETVRKDNFVLHYEMVEKRPSVPQH

SEQ ID NO: 12315 - protein, 81 aa, Glycine max
MPKDEAQLYAANELYKRGWFYHKEHRLWFIRVPNMEPLVKTNTYERGSYHCFDPNTFETVRKDNFVLHYEMVEKRPSVPQH

SEQ ID NO: 12316 - DNA, 651 bp, Glycine max
  misc_feature (66)..(66): n is a, c, g, or t
aggtggtcgtggtggaggtggtcgcaggggttactcaaatggtcgtggaggtcgaagtggtggcanaggaggctaccaaaacgggcgcaatcaatactacgatcagcctggaaattattatccaaggaacaactattataacaacagaggaaggggcggcagaggtggtggctattacaacaaccatggtgcaggcggtcaagttaatcatgtcgcaggtgatgtgggggtgcaatcatgataagttatgagttgtttatagtggttattactgtcactagttggtggtgaaccattttttatcctcctggcatgaaaacatgttttgaacaattttgtttgacacttgaatgttcaaacgtctagactccactattttgtagtccagtggctagtgtgggcctttgtccgaaatctcactctggagattggaatgttgcccttgttttcgctttctgcgatagccgccgactagttggcacttgtgtcgccccttgtttaggtaggtagatattttcgtaaggcacaaaattgcaaaagcagtatctcgttagaaaaaaattgcaattgcaattgcattctctgggtggtttttatttctcatcgagccataacttttcactgcagtatgggcacatgacatcttcgact

SEQ ID NO: 12317 - protein, 82 aa, Glycine max
  misc_feature (22)..(22): Xaa can be any naturally occurring amino acid
VVVVEVVAGVTQMVVEVEVVAXEATKTGAINTTISLEIIIQGTTIITTEEGAAEVVAITTTMVQAVKLIMSQVMWGCNHDKL

SEQ ID NO: 12318 - protein, 79 aa, Glycine max
  misc_feature (22)..(22): Xaa can be any naturally occurring amino acid
GGRGGGGRRGYSNGRGGRSGGXGGYQNGRNQYYDQPGNYYPRNNYYNNRGRGGRGGGYYNNHGAGGQVNHVAGDVGVQS

SEQ ID NO: 12319 - protein, 70 aa, Glycine max
  misc_feature (10)..(10): Xaa can be any naturally occurring amino acid
MVVEVEVVAXEATKTGAINTTISLEIIIQGTTIITTEEGAAEVVAITTTMVQAVKLIMSQVMWGCNHDKL

SEQ ID NO: 12320 - DNA, 723 bp, Glycine max
  misc_feature (577)..(577): n is a, c, g, or t
  misc_feature (719)..(719): n is a, c, g, or t
gattaaaacccaaaacacaacacggcactgagttattagtaattgtgttgtgttgtgttgagcagagagaaggatcaagaaaggataagaagaaagagggaatagggttagggttagggttagggttaggttgaggatgccgaagaacaagggaaagggaggtaagaacaggaagaggggaaagaacgaggcggacgacgagaagcgagagctggtgttcaaggaggacgggcaggagtacgcgcaggtgctccggatgctggggaacgggcggtgcgaggcgatgtgcatcgacgggacgaagaggctctgccacatccgcgggaagatgcacaagaaggtgtggatcgccgccggagacatcatcctggttggactcagggactaccaggacgacaaggctgacgtcatcctcaagtacatgcccgacgaggccaggctcctcaaggcctacggcgagctccccgacaccactcgcctcaacgagggcatcggcgccggcttggacgaggaggacgacgccaccgccaacgactacatcgagttcgaggatgaggatattgataaaatctaatcnccctcgcaatcgcaattatcattcatatctgtctctgtctgtctctagtagtatttcgctctctgcttgtttgcaactccccgtgttggatttcattttataattgtgcactattattcaataactcagatatttccgattntcgt

SEQ ID NO: 12321 - protein, 145 aa, Glycine max
MPKNKGKGGKNRKRGKNEADDEKRELVFKEDGQEYAQVLRMLGNGRCEAMCIDGTKRLCHIRGKMHKKVWIAAGDIILVGLRDYQDDKADVILKYMPDEARLLKAYGELPDTTRLNEGIGAGLDEEDDATANDYIEFEDEDIDKI

SEQ ID NO: 12322 - protein, 105 aa, Glycine max
MLGNGRCEAMCIDGTKRLCHIRGKMHKKVWIAAGDIILVGLRDYQDDKADVILKYMPDEARLLKAYGELPDTTRLNEGIGAGLDEEDDATANDYIEFEDEDIDKI

SEQ ID NO: 12323 - protein, 96 aa, Glycine max
MCIDGTKRLCHIRGKMHKKVWIAAGDIILVGLRDYQDDKADVILKYMPDEARLLKAYGELPDTTRLNEGIGAGLDEEDDATANDYIEFEDEDIDKI

SEQ ID NO: 12324 - DNA, 1175 bp, Glycine max
  misc_feature (757)..(757): n is a, c, g, or t
  misc_feature (797)..(797): n is a, c, g, or t
acattttcccttcgttcaccatttcacctcaccagttagcgaaaatttcaagtccaacgacactcacttcgtgcaggggtggtgctactagtttgttgaaagagcatcttttttcaacctcttgatttcatgattcactattttgattgaacaagagatgagatttatgcccctttccagattaattttccgtctccctcgtcattatacacatgggcctttgcaatctcgtgccttacagactgattctgttcctaaagatcctcaggctaagccaataaagtacaaaattcctcaattctatgatccctatggccccagacctccaccctcagaaaaaatcgttcagcttgcagaacaaattgaagcactatcagaagaagaacgtggtcaaattatgcccactttgtcagaaagattaaagcttccaaagttgcagccaatttccacagatggcatggacatgggtacagaaggtggtgctgctggaccgaaggttgaggagaaaaaggcagagaaaacagcttttgatgtgaagttggagaaatttgatgctgctgcaaagatcaaggtgattaaggaggtaagagcatttaccaacctaggattgaaagaggccaaagatcttgttgaaaaggttccagttgtgctaaaacaaggagtcacaaaagaggaggcaaatgaaataatagaaaaaataaaagctgctggaggagttgcagtcatggagtagaattttgattgttggttgagatcncaattcttcatttccaatatgtttttaagttgccatacgngtggtgaatgactgttggaagaaaattataaaggcacgaagcagatttaagggttaataaccaattgttgaataatctatttgaatcaattttttcttagttgagttttctggttaattactgtatcacttagaactgctgtgttggtttgacatttgtaacactcgttttgcctatcctctgctcaaatattttctttcagagtgaaatatttctgggatcatagggaaaattactttatggaatttcttttagttatttgagattcctgtgcttgatatactaaacttggtggtcttctttggactggtgcctggtggacctcttatgaagtattgtgcctccttttatagatttatagtctattaatttagatgc

SEQ ID NO: 12325 - protein, 191 aa, Glycine max
MRFMPLSRLIFRLPRHYTHGPLQSRALQTDSVPKDPQAKPIKYKIPQFYDPYGPRPPPSEKIVQLAEQIEALSEEERGQIMPTLSERLKLPKLQPISTDGMDMGTEGGAAGPKVEEKKAEKTAFDVKLEKFDAAAKIKVIKEVRAFTNLGLKEAKDLVEKVPVVLKQGVTKEEANEIIEKIKAAGGVAVME

SEQ ID NO: 12326 - protein, 188 aa, Glycine max
MPLSRLIFRLPRHYTHGPLQSRALQTDSVPKDPQAKPIKYKIPQFYDPYGPRPPPSEKIVQLAEQIEALSEEERGQIMPTLSERLKLPKLQPISTDGMDMGTEGGAAGPKVEEKKAEKTAFDVKLEKFDAAAKIKVIKEVRAFTNLGLKEAKDLVEKVPVVLKQGVTKEEANEIIEKIKAAGGVAVME

SEQ ID NO: 12327 - protein, 111 aa, Glycine max
MPTLSERLKLPKLQPISTDGMDMGTEGGAAGPKVEEKKAEKTAFDVKLEKFDAAAKIKVIKEVRAFTNLGLKEAKDLVEKVPVVLKQGVTKEEANEIIEKIKAAGGVAVME

SEQ ID NO: 12328 - DNA, 562 bp, Glycine max
accctaattgccctcttctctcttccttccttccaacgaccacaaatcactgcaattcaaggtttgaacttcccatggcgagcgctgttgatgcttccggaaacccgatcccaacttctgcggtgttgatggcgtcgtcgaagcacattgggataaggtgccactccgagaatttggagtttctgaagtgcaagaagaaggatcagaaccctgaaaagtgcctcgataagggtcgtgatgttacccgttgtgtccttggccttctgaaggatctgcaccaaaagtgcacaaaggagatggatgaatatgttggctgcatgtactaccatacaaatgaatttgacttgtgtcgcaaagagcagcaagcatttgagaaaaagtgctctttggaatgaaattatgcactgctgttgtcgaaaataatatcacaggcaatttggagtgagcaaatgagcctgttttccaaaaattcattgatcttttctgtttgtatgacagtgttggaatcttcaccatttactatgttggtcgactaaatttttctagagaaatgcatccaagc

SEQ ID NO: 12329 - protein, 130 aa, Glycine max
PNCPLLSSFLPTTTNHCNSRFELPMASAVDASGNPIPTSAVLMASSKHIGIRCHSENLEFLKCKKKDQNPEKCLDKGRDVTRCVLGLLKDLHQKCTKEMDEYVGCMYYHTNEFDLCRKEQQAFEKKCSLE

SEQ ID NO: 12330 - protein, 106 aa, Glycine max
MASAVDASGNPIPTSAVLMASSKHIGIRCHSENLEFLKCKKKDQNPEKCLDKGRDVTRCVLGLLKDLHQKCTKEMDEYVGCMYYHTNEFDLCRKEQQAFEKKCSLE

SEQ ID NO: 12331 - protein, 88 aa, Glycine max
MASSKHIGIRCHSENLEFLKCKKKDQNPEKCLDKGRDVTRCVLGLLKDLHQKCTKEMDEYVGCMYYHTNEFDLCRKEQQAFEKKCSLE

SEQ ID NO: 12332 - DNA, 1392 bp, Glycine max
taacaatcattattataacgcaaacttcaacttgtaatcaagggagagagaaaatttcaagcacaaaaaatggcggagaagaaagtggtgatcctaggaggtggtgttgccggtgccaaccttgcaaaaactatacaacgtcaagccaacgtcacccttattgatccgaaggaatattttgagattccatgggcaagtttgaggggattggttgagccaacttttgctgaaaggatagtgatcaaccatagagagtacttcaaaaagggtaaccttgttgtatccagtgctgtcaacataactgaaactgcagtggtgactgaagatggccagcagattgcctatgactatcttgttattgccactggacacacagaaccaatccccaaaaccaggagtgaaagacttgaccaatacaaaggagaaaatgcaaagatcaaatctgcaagttcagttttgattgttgggggaggtccaactggtgttgagcttgcagcagagattgctgttgattttcctgataagaaggtcaccatagtgcataaaggaacgaggttgcttgaatacattgggacaaaagcttccagcaagactttaaagtggctcaaatcaaagaaaattgatgtgaaactagaacaatcggtcgatttgagctcctcttcagaagaaaataagacatatcaaacttcaaatggagagactataaaagcagatcttcattttctatgcacagggaaaccacttggttcaacatggattagagaaactcttctaaagaatgacttggatgctgatggaaggatcaaggtcgatgagcacttgagagtgaagggcaagagcaacatttttgcaattggagatattacagatgttcaagaaatcaaacaagggatgtatgcaagtgctcatgctcaagtggttgccaagaacctgaagctattgatagagggaggaggcaaagagcgtaagttgggaacatacaaggcacagccaccaatatctatagtttcacttggaaggaaaatagctgttgcacagttcccattcatgactgtgcttggaaggcttcctggcatgatcaagtcaggggatttgtttgttgggaaaaccagaaaggaattaggactcgaacctaatgttaaaaaatcttaaatttggtatattgagtgagtgttgtggtgtgtaattgtgtatatacacttcttcaactctttttcttccttgtcattgttgtgcatgtgtaagttgattgtatgtgtttactttcctattgtattcaacaaattactttgtatctgtaatgtttcttaatgattttgatgttgtcggtgttgtctcttgagatatgggattggagtcagaagcagaatgagttagagtgttattcattgg

SEQ ID NO: 12333 - protein, 360 aa, Glycine max
MAEKKVVILGGGVAGANLAKTIQRQANVTLIDPKEYFEIPWASLRGLVEPTFAERIVINHREYFKKGNLVVSSAVNITETAVVTEDGQQIAYDYLVIATGHTEPIPKTRSERLDQYKGENAKIKSASSVLIVGGGPTGVELAAEIAVDFPDKKVTIVHKGTRLLEYIGTKASSKTLKWLKSKKIDVKLEQSVDLSSSSEENKTYQTSNGETIKADLHFLCTGKPLGSTWIRETLLKNDLDADGRIKVDEHLRVKGKSNIFAIGDITDVQEIKQGMYASAHAQVVAKNLKLLIEGGGKERKLGTYKAQPPISIVSLGRKIAVAQFPFMTVLGRLPGMIKSGDLFVGKTRKELGLEPNVKKS

SEQ ID NO: 12334 - DNA, 630 bp, Glycine max
  misc_feature (591)..(591): n is a, c, g, or t
ccctttgcttcgcccactcccaaaccctacctcctagctccccctcccctcccatcgttgcggcggcgacagagagagagagagagagagagagagagagagatggcgaagtctctgcgctccaagcgggagaagcggctgcggactctccggcgggagatcgcggagcccttctacgacaagaaggaggccgccaagcaggccgcgcaggccgccgccctcgaggcccccaagctccccgtccgcgtgcacccggcgtacgaggagtccctcgccgccgccgctgccgccgccgccagccgggcctctgccatggaggttgatggaggaagcaagaagtcgacatcctttctgaagccaatgggcaccattagcaagaagaaggtacagcttcacttgaagatcaagaaagacaagagaaaagctaggaagaagggaaattctgggaagaagagttactagatgtgcgagctgctgtgttatgtatcatgcaatcttgtttcgttagtttgaacaacgcatgtaacggtaattctgcttgtgaacccaagtgttaatcctagggtggtcaacaatgtactgaaaaatatntcaatgagcaccccaaacgaaaatagtgtcgccatgttc

SEQ ID NO: 12335 - protein, 153 aa, Glycine max
PFASPTPKPYLLAPPPLPSLRRRQREREREREREMAKSLRSKREKRLRTLRREIAEPFYDKKEAAKQAAQAAALEAPKLPVRVHPAYEESLAAAAAAAASRASAMEVDGGSKKSTSFLKPMGTISKKKVQLHLKIKKDKRKARKKGNSGKKSY

SEQ ID NO: 12336 - protein, 119 aa, Glycine max
MAKSLRSKREKRLRTLRREIAEPFYDKKEAAKQAAQAAALEAPKLPVRVHPAYEESLAAAAAAAASRASAMEVDGGSKKSTSFLKPMGTISKKKVQLHLKIKKDKRKARKKGNSGKKSY

SEQ ID NO: 12337 - protein, 106 aa, Glycine max
LCFAHSQTLPPSSPSPPIVAAATERERERERERDGEVSALQAGEAAADSPAGDRGALLRQEGGRQAGRAGRRPRGPQAPRPRAPGVRGVPRRRRCRRRQPGLCHGG

SEQ ID NO: 12338 - DNA, 500 bp, Glycine max
  misc_feature (476)..(476): n is a, c, g, or t
  misc_feature (492)..(492): n is a, c, g, or t
aaccgccgccactcccattcgctcgcctcctccaaccctaagcgatgacgaagggtaccggcagtttcggcaagcgccggaacaagacccacacgctctgcatccgctgcggccgccgcagcttccacctccagaagagcacctgctcctcctgcggctaccccgccgcccgcatccgcaagtacaactggagtgtgaaggccatcaggcgcaagaccaccggcactggaaggatgaggtacatgcgccacgtgcctcgcaggttcaagagcaacttcagagaaggtaccgaggctgcgcccaggaacagggccgcggccaactagttctggattttgccccatcaggaataccctgaagctagaatttaaagactttttgcttgggttgtaccccgcctaaactattgttgctatagaattgagtatggatctgatatgttttgttgcatgggtttggaaattgacctctgaatntaagtccaaatttgtntgaatgtt

SEQ ID NO: 12339 - protein, 118 aa, Glycine max
TAATPIRSPPPTLSDDEGYRQFRQAPEQDPHALHPLRPPQLPPPEEHLLLLRLPRRPHPQVQLECEGHQAQDHRHWKDEVHAPRASQVQEQLQRRYRGCAQEQGRGQLVLDFAPSGIP

SEQ ID NO: 12340 - protein, 93 aa, Glycine max
MTKGTGSFGKRRNKTHTLCIRCGRRSFHLQKSTCSSCGYPAARIRKYNWSVKAIRRKTTGTGRMRYMRHVPRRFKSNFREGTEAAPRNRAAAN

SEQ ID NO: 12341 - DNA, 1433 bp, Glycine max
cccgatccatatttatgcagcaatgaggagaaacaaatttcttgtgaaagccacacaaattttttagacttatttctattctgtccctctcctttcaaatttattactttggaggtcaaccaaaacaaacagtgtaagactacagcgaatgcttcaagagttgaatctggattaaaagcattgaccagaccacccactagcggcgaattgtgtagcaaggaaagaagcagaggctgaggaaacaatgaagatattggtgaccggcgcatccggtttcctcggtggaaaactctgcgacgccctcgtccggcaaggttactctgtcagggttctcgtaagatccaccagcgatatctccgccctttctccgcacatcgaaatcttctacggcgacatcaccgactacgcctctctcctcgccgcctgcttctcctgcactctcgtcttccaccttgccgccctcgtcgaaccctggcttcctgatccttccaaattcttctccgtcaacgttggaggattgaaaaacgtgttggcggcggtgaaggagactcgcacagtggaaaaactcctgtatacgtcgtcgtttttcgctctcggaccaactgatggaatcgtcgccgacgagaatcaagtccatcacgagaaatatttctgtacggaatatgagaaatcgaaggtggccgcggataagattgcggtgcaagctgcgtcggagggggtgccaatagtactactgtatcccggagtaatctatgggcctggcaaggtcactgcaggaaacgttcttgcacgaatgatagtagagcggtttagtggtcgattgcctggttacgtggggtatggaaacgatagattttcgttcagccatgtggaggatgtggtggaagggcacattgcagcaatgaaaaaaggagaagctgggaataggtatctactaacgggggaaaatgcgtccttcaagcatgtttttgatatggctgctgcgattactcatactaaaaaaccactgttcagcatcccattgtggctaattcaactctatggctgcctctctgttttcttctctagaatcaccggaatgctacctctcatcagtccaccgacagtacatgttttaagacatcggtgggaatattcctgcgacaaagctaaaagggagcttgattataggcccagaagcctgaaagatggacttgcagaggtactactatggttgaagaacttgggcctgataagatattagccagaacattctaatactttatttcatttttttgagacgtcgtagtactttctgggcttcagtgtttcaccttgtggaatatcaatcaaaaaataaatactgtaataaaaccacgataagacttttttggtagagaaaaccacgataagatgtaacttttacaatgagtaagtacctattcagtcctgct

SEQ ID NO: 12342 - protein, 332 aa, Glycine max
MKILVTGASGFLGGKLCDALVRQGYSVRVLVRSTSDISALSPHIEIFYGDITDYASLLAACFSCTLVFHLAALVEPWLPDPSKFFSVNVGGLKNVLAAVKETRTVEKLLYTSSFFALGPTDGIVADENQVHHEKYFCTEYEKSKVAADKIAVQAASEGVPIVLLYPGVIYGPGKVTAGNVLARMIVERFSGRLPGYVGYGNDRFSFSHVEDVVEGHIAAMKKGEAGNRYLLTGENASFKHVFDMAAAITHTKKPLFSIPLWLIQLYGCLSVFFSRITGMLPLISPPTVHVLRHRWEYSCDKAKRELDYRPRSLKDGLAEVLLWLKNLGLIRY

SEQ ID NO: 12343 - DNA, 604 bp, Glycine max
  misc_feature (284)..(285): n is a, c, g, or t
  misc_feature (472)..(472): n is a, c, g, or t
  misc_feature (549)..(549): n is a, c, g, or t
  misc_feature (551)..(551): n is a, c, g, or t
  misc_feature (567)..(567): n is a, c, g, or t
  misc_feature (586)..(587): n is a, c, g, or t
cattcaacacaagtgtagaacttgtgatgcaggacaccagcattcttggtgctgaaagccaccctctccatttgcatggctttaacttttttgttgttggtcaaggatttggtaactatgatccaaataaggaccctgcaaacttcaatcttgatgacccaattgagaggaacacagttggtgttccatcaggtggatgggttgctatcagattcctagcagataatccaggggtatggttcatgcattgtcacttagaagtgcacacaagctggggtcttaannatggcatgggttgtcttggatggaaaactcccaaatcaaaagttgttcccaccgccagctgatcttcccatgtgttaacaaaaaactcaaattgattcaacaatgagcaattgcttcttaccggttgctttcattttctattttttattttttattttcatttttgggtgaaaaaggagttgaggtnttgaggattgaattgagattgaggttgaactttttcctttttttggatgataattttatttataggagacgtctttntntacaaaattgtaatcnattaatttgaatgaaaatnngtcatgaatatattatt

SEQ ID NO: 12344 - protein, 114 aa, Glycine max
  misc_feature (94)..(95): Xaa can be any naturally occurring amino acid
FNTSVELVMQDTSILGAESHPLHLHGFNFFVVGQGFGNYDPNKDPANFNLDDPIERNTVGVPSGGWVAIRFLADNPGVWFMHCHLEVHTSWGLXXGMGCLGWKTPKSKVVPTAS

SEQ ID NO: 12345 - protein, 106 aa, Glycine max
  misc_feature (86)..(87): Xaa can be any naturally occurring amino acid
MQDTSILGAESHPLHLHGFNFFVVGQGFGNYDPNKDPANFNLDDPIERNTVGVPSGGWVAIRFLADNPGVWFMHCHLEVHTSWGLXXGMGCLGWKTPKSKVVPTAS

SEQ ID NO: 12346 - DNA, 508 bp, Glycine max
  misc_feature (490)..(491): n is a, c, g, or t
gctcaatatttatcatgaacttattcagatgggattgaggatatgggtgttcagtggtaatacagacgtggtaatacccgtgacatctactcgctatagcataaaagctctcgaccttcctactgtgagtccttggcgagcatggtatgatgatggggaggtgggaggatggactcaagaatatgctggccttacgtttgtggttgtaaggggtgcggggcacgaagttcctttgcattcaccaaaacttgctttgacactgttcaaagccttcctagcaggaacatcaatgcccaatcttgagctagtcggtgcctcctgaatttacgttaatattctccctttaaataagttctaattgactgtatttgactgtttcacatggggaatccgatgttgatttcttttacgcgttactcaatttgtgttttttttttatgtaccaaacaaaatattagatgtaccgatttatgttttttcttttctttannatctttttaatagtgct

SEQ ID NO: 12347 - protein, 106 aa, Glycine max
LNIYHELIQMGLRIWVFSGNTDVVIPVTSTRYSIKALDLPTVSPWRAWYDDGEVGGWTQEYAGLTFVVVRGAGHEVPLHSPKLALTLFKAFLAGTSMPNLELVGAS

SEQ ID NO: 12348 - protein, 97 aa, Glycine max
MGLRIWVFSGNTDVVIPVTSTRYSIKALDLPTVSPWRAWYDDGEVGGWTQEYAGLTFVVVRGAGHEVPLHSPKLALTLFKAFLAGTSMPNLELVGAS

SEQ ID NO: 12349 - DNA, 387 bp, Glycine max
gattgtaacttcccgctcgccatcacatatctagggttttagaatttacccaaaaccctcttccatggcagaagaagcagcactggaagtcgttgatcccaacaccgccgctgccgccgccgccgtggacatggacgtcgagaatgtcgaggccggcggcaacggcgccgagccgaaccagaagcgcgccagggaggaagaggagccccagggcggcgacgacgacgtttcgaagaagcagagggtggacgaggaaaacgaaaagtccgtagaggaacaacgcttggagaagcgcgatgaacaagaagaagaaaaaggagaagaaaaagaagcagaaaaagaagaggaagaagagaaggaagcaagtggttccgtgaacttgggatt

SEQ ID NO: 12350 - protein, 107 aa, Glycine max
MAEEAALEVVDPNTAAAAAAVDMDVENVEAGGNGAEPNQKRAREEEEPQGGDDDVSKKQRVDEENEKSVEEQRLEKRDEQEEEKGEEKEAEKEEEEEKEASGSVNLG

SEQ ID NO: 12351 - protein, 85 aa, Glycine max
MDVENVEAGGNGAEPNQKRAREEEEPQGGDDDVSKKQRVDEENEKSVEEQRLEKRDEQEEEKGEEKEAEKEEEEEKEASGSVNLG

SEQ ID NO: 12352 - DNA, 744 bp, Glycine max
taacatcaatcacttcgttcttttctttctcatctaaactagtaccgtacccgtgagccatgcaccgacagttggattacatctcttagttttgtccgtggaaggagctttttccggacaagaagtgaggaagccaaaatctctgcatgggagaacttgcaaaaggcaaaagcagaagcagcaatacggaaactagagatgaaattggaaaaaaggcgagcatcctctatggataagattatgaacaagcttagattggcccagaaaaaagctcaggaaatgagaagttcagttccacacaaccaaaccgatcgggttgtaagaacttcacacaaggcttcatcatttcttagaaccagccagatgcgttctttgagtggttgtttcacttgccatgtcttttaagcattctttcatgtttgagtgatggtgggtttccgaaggattcaaatgggccacatgttaatgattgaaaggggcacaacagttgacaaaattggtgttgttgcgttttgctatccatggcaccttctttgaaagtctcagatatcataaaatttaagccccgtgttcgggagtttggattcaatgggtagcaatatttgtaagtaggccaaattttagaaataagatcttttgtatttttttctctcctcccaacatgattgtgtgctgttcaaaaacttcaaatgtaatctaccttatagttgaacgagaaaagcaaccccaatatcattttgtttt

SEQ ID NO: 12353 - protein, 68 aa, Glycine max
MKLEKRRASSMDKIMNKLRLAQKKAQEMRSSVPHNQTDRVVRTSHKASSFLRTSQMRSLSGCFTCHVF

SEQ ID NO: 12354 - protein, 58 aa, Glycine max
MDKIMNKLRLAQKKAQEMRSSVPHNQTDRVVRTSHKASSFLRTSQMRSLSGCFTCHVF

SEQ ID NO: 12355 - protein, 54 aa, Glycine max
MNKLRLAQKKAQEMRSSVPHNQTDRVVRTSHKASSFLRTSQMRSLSGCFTCHVF

SEQ ID NO: 12356 - DNA, 733 bp, Glycine max
aaaaaaaatccataaccatggcgtctaactctgcttccgctctttacttccttttatgcctatcgcccatcactttgcttctttctgcgtttcgtgctcaagctcaatctcatgctccagctcccactttcaagtactgtgaaaagaatgcagactatgctgtgaaggtgagtggagtggaaatattgcctgaccccgtggagagaggaatgccattcacctttaagatcccagcttatactcctgaaccaattcaaagcggggacttgttatatgaaatttcttatgctggaatagaagcacaacctgctacatttctccatgatctctgtgaggaagcaccatgcccagtacctgcaggcaactttgtgctcgttcacaccgaattattgcctccggttaccccaccaggcacctataatgtgaagctgaattttaaggatcataacgacaagctgttaacttgcatcatctttcccttcaaaatcggttctaaatcttcagtgtctgctatctaactgtccagcgcaaaactgctcctagatgctacctcaactttgcgtattacttttgtttagggtgtagttttagtgtgtactagttgagtgcaatgctgtgggctatgaatgatgctttttcgcacccaataatggtataaatagccctacgagaagtgattgtcacatctattttgtattgttgtcttcaataaatttggacttctaaaaatccc

SEQ ID NO: 12357 - protein, 171 aa, Glycine max
KKSITMASNSASALYFLLCLSPITLLLSAFRAQAQSHAPAPTFKYCEKNADYAVKVSGVEILPDPVERGMPFTFKIPAYTPEPIQSGDLLYEISYAGIEAQPATFLHDLCEEAPCPVPAGNFVLVHTELLPPVTPPGTYNVKLNFKDHNDKLLTCIIFPFKIGSKSSVSAI

SEQ ID NO: 12358 - protein, 166 aa, Glycine max
MASNSASALYFLLCLSPITLLLSAFRAQAQSHAPAPTFKYCEKNADYAVKVSGVEILPDPVERGMPFTFKIPAYTPEPIQSGDLLYEISYAGIEAQPATFLHDLCEEAPCPVPAGNFVLVHTELLPPVTPPGTYNVKLNFKDHNDKLLTCIIFPFKIGSKSSVSAI

SEQ ID NO: 12359 - protein, 102 aa, Glycine max
MPFTFKIPAYTPEPIQSGDLLYEISYAGIEAQPATFLHDLCEEAPCPVPAGNFVLVHTELLPPVTPPGTYNVKLNFKDHNDKLLTCIIFPFKIGSKSSVSAI

SEQ ID NO: 12360 - DNA, 572 bp, Glycine max
attccctcactagtgtggaagaaatccagggtggtgccgaggcagtttcagaactgaaaagtacaaatggatctgccatggcaagggaagacaaacatgaactccagcagtttctgcatctacttaggttgtctactgaaggacttgagataaaccggggacgaacagaatggagaaagaaagctccaagatgagaaccattacgtgtgcttccacccaaatccatgattctgtttttgtctttcttgtgttgtttcacgttaccagggttgtcttatcaattttccctttatattttgcttagagtttgtgcccttaatatgggattggagagttaaaattttgtcgctgttttcttgtcatgctcacaaatttaaattgttgtccaaatcctgtagttaggctaaataggttgacatcaatctctgatccattagcatcagattccatgaatgtcattgtaccttaagggagcatagaaatccaggaaattggtatggttctgtcatctactgtatgattcgaacaatgcgtgttgctaaaataatcattttaaaattattcaattagcc

SEQ ID NO: 12361 - protein, 63 aa, Glycine max
SLTSVEEIQGGAEAVSELKSTNGSAMAREDKHELQQFLHLLRLSTEGLEINRGRTEWRKKAPR

SEQ ID NO: 12362 - protein, 44 aa, Glycine max
MEKESSKMRTITCASTQIHDSVFVFLVLFHVTRVVLSIFPLYFA

SEQ ID NO: 12363 - protein, 38 aa, Glycine max
MAREDKHELQQFLHLLRLSTEGLEINRGRTEWRKKAPR

SEQ ID NO: 12364 - DNA, 929 bp, Glycine max
  misc_feature (79)..(79): n is a, c, g, or t
cttccccagaaacactctttctcttaagctctcgtagttaaatctgcgagccattagttgaagaaaaaaaaaaaaacanaacaaaacaaaacaaaaacactagggtttaagatgggttccaaaactcgctcttcccttgctcttttcctaacagtcaacattctcttctttgcccttgtctctgcctgcgggacatgccctagcccaacgccaaggcataagcacaagcctgttaagccaagcccttcaggtggctcaggtggttcaggaggttcaggaggttcaggaggttctggtggctcaggtggttcaggaggttctggtggctcaggtggttcaggaggttctggtggttctggaggttccggtgcgtcttgccctcgtgatgcactcaaactaggagtgtgtgccaatgtgctaaacgggttgttgaacgtgactttgggtcaaccaccagttaccccatcctgttcccttctcaatggtctcgttgatcttgaagctgcagtgtgcctttgcactgccctaaaagcaaacattttgggcatcaacctcaaccttccaatctcactcagcttacttctcaatgtttgctcaaggaacgccccacgtgatttccaatgtgcctaaatcatggcctatgctatgcacaagttgcttcaatacgtgtttgctagctagttctggctttctgttgtctcttttattttataaatttcattgctcatgagtcatgatgcgattcttgtacgtgcatggatggttaacttctcgttattctgtcgctttaattggtgtttgtttttatttaacaaagtgtcaaattaaataaattcccgatgctttcttatgcaaaagcaaaaggaatcaaagatgatactagtgttatttatttgacagataaatgattaatgttgcgaacaattttt

SEQ ID NO: 12365 - protein, 172 aa, Glycine max
MGSKTRSSLALFLTVNILFFALVSACGTCPSPTPRHKHKPVKPSPSGGSGGSGGSGGSGGSGGSGGSGGSGGSGGSGGSGGSGGSGASCPRDALKLGVCANVLNGLLNVTLGQPPVTPSCSLLNGLVDLEAAVCLCTALKANILGINLNLPISLSLLLNVCSRNAPRDFQCA

SEQ ID NO: 12366 - DNA, 1320 bp, Glycine max
gtgtcgtgtcgtgtcttcttctctaaaataaaaaaccctaacttctgaacctttcaccgcatcgccaccgattccctatctccactaatcaaagaaaagaaaatgagtagacgctcgagcagaactgtctacgttgggaatctacccggtgatatccgtgaaagagaagttgaagatttgtttctgaagtacggacacataacacacatcgacctaaaggttcccccaagaccacctggttatgcatttgtagagtttgaagatgctcaagatgctgaggatgcaattcgtggtcgtgatggctatgattttgatggccaccggttacgggtggagcctgcccatggtgggcgtggtcattcatcctcaaaagatcggcacaatagtcacagcaatggccgaggtggacgtggggtatctaggcgctctgaatatcgtgttctagtcactggattgccctcttcggcatcctggcaggatcttaaggatcacatgcgcaaggcaggggatgtttgcttttctcaagtttttcatgatggaaggggtactaccggtattgtggattacacaaattatgatgatatgaaatatgctattaagaagcttgatgactctgagttccggaatgcattttccaagggatatgttcgggtgagggaatatgattcaaggcgggattcttctagaagtcctagtcatggcccatctcattctagaggaaggagctatagccgcagtcgtagccgtagccatagttacagtcgggaccggagccaaagcaaatctccaaaaggaaagtcttcacagcgttcacctgctaaatctccaaaaggaaagtcttcacagcgttcacctgctaaatctccatcaagatctccctctcgttctcgctcaaggtcaaggtcccgttcgttatcaggatcacggtccaggtccaggtctccattgcctccgcgtaataaaagccccaaaaaacgcagtgctagcaggagtccaagtaggagcaggagcaggagcaagagtttgtctcggtaagctctgattgttgcaattgaagaagttgtggatgatggtgagtgctaccaagtttttctagtaaaattgacattagccaaaaaaggcatttgggttttatatttgatcttctttttaattgaacttgagacttctgacctattggcgtcttagttttaatattgaggatttgaaggaccctagatttctgtaatagactgttaaatgtcaaaaacatgtgctatttggttaattatgccagtttatttgatattgtcttatatttataagtataatttggttttc

SEQ ID NO: 12367 - protein, 310 aa, Glycine max
MSRRSSRTVYVGNLPGDIREREVEDLFLKYGHITHIDLKVPPRPPGYAFVEFEDAQDAEDAIRGRDGYDFDGHRLRVEPAHGGRGHSSSKDRHNSHSNGRGGRGVSRRSEYRVLVTGLPSSASWQDLKDHMRKAGDVCFSQVFHDGRGTTGIVDYTNYDDMKYAIKKLDDSEFRNAFSKGYVRVREYDSRRDSSRSPSHGPSHSRGRSYSRSRSRSHSYSRDRSQSKSPKGKSSQRSPAKSPKGKSSQRSPAKSPSRSPSRSRSRSRSRSLSGSRSRSRSPLPPRNKSPKKRSASRSPSRSRSRSKSLSR

SEQ ID NO: 12368 - protein, 180 aa, Glycine max
MRKAGDVCFSQVFHDGRGTTGIVDYTNYDDMKYAIKKLDDSEFRNAFSKGYVRVREYDSRRDSSRSPSHGPSHSRGRSYSRSRSRSHSYSRDRSQSKSPKGKSSQRSPAKSPKGKSSQRSPAKSPSRSPSRSRSRSRSRSLSGSRSRSRSPLPPRNKSPKKRSASRSPSRSRSRSKSLSR

SEQ ID NO: 12369 - DNA, 1667 bp, Glycine max
  misc_feature (607)..(607): n is a, c, g, or t
  misc_feature (661)..(661): n is a, c, g, or t
  misc_feature (681)..(681): n is a, c, g, or t
  misc_feature (698)..(698): n is a, c, g, or t
  misc_feature (769)..(769): n is a, c, g, or t
  misc_feature (784)..(784): n is a, c, g, or t
  misc_feature (801)..(801): n is a, c, g, or t
  misc_feature (805)..(805): n is a, c, g, or t
  misc_feature (826)..(826): n is a, c, g, or t
  misc_feature (843)..(843): n is a, c, g, or t
  misc_feature (871)..(871): n is a, c, g, or t
  misc_feature (887)..(887): n is a, c, g, or t
  misc_feature (912)..(912): n is a, c, g, or t
  misc_feature (962)..(962): n is a, c, g, or t
  misc_feature (964)..(964): n is a, c, g, or t
  misc_feature (980)..(980): n is a, c, g, or t
  misc_feature (1012)..(1012): n is a, c, g, or t
gagaaataagtcagaacctaggcaggtcgatgacataacacccgaatccaagtgaaacgaaaaacactcatcatcatggattcagttgcattaaatggcaaaagcaatgataagcctcttcacgttgccatgctcccatggctggccatgggtcacatatacccttacttcgaagtcgccaagattcttgctcaaaagggtcactttgttaccttcataaacagccccaaaaacattgaccgcatgcccaaaaccccgaaacacttagaaccattcatcaaactcgtgaagctacccttgccaaaaatagagcatctcccagaaggcgcagagagcacaatggacattccgtccaaaaaaaactgtttcctcaagaaagcttacgagggcctacaatacgccgtttccaagttgctgaaaacgtcaaaccctgactgggttttgtatgacttcgcagctgcttgggtcataccaatagccaagagctacaacattccttgtgctcactacaacattaccccagctttcaacaaagtctttttcgatccaccaaaggacaaaatgaaggattactcgctcgcaagcatatgtggtcctcccacgtggnttcctttcaccacaacgatccatatcaggccttacgagtttttgagagcatacnaaggtaccaaagacgagganacaggtgaaagggcttnttttgatctcaacaaggcatattcaagctgtgacctttttcttctaagaacctccagagagcttgaagganactggttggattatnttgctggtaattacaangttnctgtggttccagttgggttgnttccaccatccatgcanataagggacgttgaagaggaagacaatnaccctgattgggtcanaatcaaggattggttagacacacangagtcgtcatccgtggtttatattgggtttgggagcgagttgaagctgantnaggaggacctcactgngttggcacatggcattgagctttcaaatttgnctttcttttgggcattgaagaacctgaaagaaggtgtgcttgagttgccagaagggttgaagaaagaaccaaggaacgtggcattgtttggaagacttgggcaccccagcttaagatcttggctcatggagcaattggagggtgcatgagtcactgtggctctggctctgtgattgagaaggttcattttgggcacgtgcttgtgactctgccttatttgcttgaccaatgtctgttttcgagggtgctggaggaaaagcaagtggctgttgaggttccaaggagcgagaaagatgggtcttttactagggtcgatgtggctaagacattgagatttgcgattgtggatgaggaagggagtgctctaagagagaatgccaaggagatgggcaaggttttcagttccgaagaacttcataataagtatattcaagatttcattgatgcgcttcagaagtataggattccttccgctagctaagcaggattcatgctttccatttttccccttcttcattagcgtgcttttttatcctgtaataaacaaggttatttcaaccctgattttaaaaaataattagcaaccgcgattttagttggaatgtcaagttaaggtttgttcttgtttctctctgtattttagtttttactcttt

SEQ ID NO: 12370 - protein, 361 aa, Glycine max
  misc_feature (178)..(178): Xaa can be any naturally occurring amino acid
  misc_feature (196)..(196): Xaa can be any naturally occurring amino acid
  misc_feature (202)..(202): Xaa can be any naturally occurring amino acid
  misc_feature (208)..(208): Xaa can be any naturally occurring amino acid
  misc_feature (232)..(232): Xaa can be any naturally occurring amino acid
  misc_feature (237)..(237): Xaa can be any naturally occurring amino acid
  misc_feature (242)..(242): Xaa can be any naturally occurring amino acid
  misc_feature (244)..(244): Xaa can be any naturally occurring amino acid
  misc_feature (251)..(251): Xaa can be any naturally occurring amino acid
  misc_feature (256)..(256): Xaa can be any naturally occurring amino acid
  misc_feature (266)..(266): Xaa can be any naturally occurring amino acid
  misc_feature (271)..(271): Xaa can be any naturally occurring amino acid
  misc_feature (279)..(279): Xaa can be any naturally occurring amino acid
  misc_feature (296)..(297): Xaa can be any naturally occurring amino acid
  misc_feature (302)..(302): Xaa can be any naturally occurring amino acid
  misc_feature (313)..(313): Xaa can be any naturally occurring amino acid
MDSVALNGKSNDKPLHVAMLPWLAMGHIYPYFEVAKILAQKGHFVTFINSPKNIDRMPKTPKHLEPFIKLVKLPLPKIEHLPEGAESTMDIPSKKNCFLKKAYEGLQYAVSKLLKTSNPDWVLYDFAAAWVIPIAKSYNIPCAHYNITPAFNKVFFDPPKDKMKDYSLASICGPPTWXPFTTTIHIRPYEFLRAYXGTKDEXTGERAXFDLNKAYSSCDLFLLRTSRELEGXWLDYXAGNYXVXVVPVGLXPPSMXIRDVEEEDNXPDWVXIKDWLDTXESSSVVYIGFGSELKLXXEDLTXLAHGIELSNLXFFWALKNLKEGVLELPEGLKKEPRNVALFGRLGHPSLRSWLMEQLEGA

SEQ ID NO: 12371 - protein, 343 aa, Glycine max
  misc_feature (160)..(160): Xaa can be any naturally occurring amino acid
  misc_feature (178)..(178): Xaa can be any naturally occurring amino acid
  misc_feature (184)..(184): Xaa can be any naturally occurring amino acid
  misc_feature (190)..(190): Xaa can be any naturally occurring amino acid
  misc_feature (214)..(214): Xaa can be any naturally occurring amino acid
  misc_feature (219)..(219): Xaa can be any naturally occurring amino acid
  misc_feature (224)..(224): Xaa can be any naturally occurring amino acid
  misc_feature (226)..(226): Xaa can be any naturally occurring amino acid
  misc_feature (233)..(233): Xaa can be any naturally occurring amino acid
  misc_feature (238)..(238): Xaa can be any naturally occurring amino acid
  misc_feature (248)..(248): Xaa can be any naturally occurring amino acid
  misc_feature (253)..(253): Xaa can be any naturally occurring amino acid
  misc_feature (261)..(261): Xaa can be any naturally occurring amino acid
  misc_feature (278)..(279): Xaa can be any naturally occurring amino acid
  misc_feature (284)..(284): Xaa can be any naturally occurring amino acid
  misc_feature (295)..(295): Xaa can be any naturally occurring amino acid
MLPWLAMGHIYPYFEVAKILAQKGHFVTFINSPKNIDRMPKTPKHLEPFIKLVKLPLPKIEHLPEGAESTMDIPSKKNCFLKKAYEGLQYAVSKLLKTSNPDWVLYDFAAAWVIPIAKSYNIPCAHYNITPAFNKVFFDPPKDKMKDYSLASICGPPTWXPFTTTIHIRPYEFLRAYXGTKDEXTGERAXFDLNKAYSSCDLFLLRTSRELEGXWLDYXAGNYXVXVVPVGLXPPSMXIRDVEEEDNXPDWVXIKDWLDTXESSSVVYIGFGSELKLXXEDLTXLAHGIELSNLXFFWALKNLKEGVLELPEGLKKEPRNVALFGRLGHPSLRSWLMEQLEGA

SEQ ID NO: 12372 - protein, 337 aa, Glycine max
  misc_feature (154)..(154): Xaa can be any naturally occurring amino acid
  misc_feature (172)..(172): Xaa can be any naturally occurring amino acid
  misc_feature (178)..(178): Xaa can be any naturally occurring amino acid
  misc_feature (184)..(184): Xaa can be any naturally occurring amino acid
  misc_feature (208)..(208): Xaa can be any naturally occurring amino acid
  misc_feature (213)..(213): Xaa can be any naturally occurring amino acid
  misc_feature (218)..(218): Xaa can be any naturally occurring amino acid
  misc_feature (220)..(220): Xaa can be any naturally occurring amino acid
  misc_feature (227)..(227): Xaa can be any naturally occurring amino acid
  misc_feature (232)..(232): Xaa can be any naturally occurring amino acid
  misc_feature (242)..(242): Xaa can be any naturally occurring amino acid
  misc_feature (247)..(247): Xaa can be any naturally occurring amino acid
  misc_feature (255)..(255): Xaa can be any naturally occurring amino acid
  misc_feature (272)..(273): Xaa can be any naturally occurring amino acid
  misc_feature (278)..(278): Xaa can be any naturally occurring amino acid
  misc_feature (289)..(289): Xaa can be any naturally occurring amino acid
MGHIYPYFEVAKILAQKGHFVTFINSPKNIDRMPKTPKHLEPFIKLVKLPLPKIEHLPEGAESTMDIPSKKNCFLKKAYEGLQYAVSKLLKTSNPDWVLYDFAAAWVIPIAKSYNIPCAHYNITPAFNKVFFDPPKDKMKDYSLASICGPPTWXPFTTTIHIRPYEFLRAYXGTKDEXTGERAXFDLNKAYSSCDLFLLRTSRELEGXWLDYXAGNYXVXVVPVGLXPPSMXIRDVEEEDNXPDWVXIKDWLDTXESSSVVYIGFGSELKLXXEDLTXLAHGIELSNLXFFWALKNLKEGVLELPEGLKKEPRNVALFGRLGHPSLRSWLMEQLEGA

SEQ ID NO: 12373 - DNA, 1827 bp, Glycine max
atctaaagtgagcatagacccttcaccggcaaatggctttccaagggtcttgcaaggtcaagaattctcgaccttgagaggcaattttgctgaaagtaatgagtctgatactgctgagaagtctgttgtttggccacctgctgcagtagatgatgaaaagatggatgtttctacttcaaggaggtatggttcagagagctggatgtcaatggggaggaatgagcctacatattcggatcttctttcaggctttggggccagtggggatccttctcatttatccttgaaggatcaaatgagccctgcttattctgctagaaagcaatcattggatcatgaaggcaaacttcacatgcctcatccatggcctgtaatgccctctagtctgtcactgagcatcttggactctaatacaaaaggtcctgcacatggtggtgatacaacttacaaagctcgagggaatttgaggtacagtgcatttggtgaataccctgcactgcatggtcataaagttgagcattcacatggaaacttgatgccacccccacctgcactcctaactcaatatcagagtccttgttcaagagagcttatgtcaaaacaagtgtcagcaaaaacttgtgaggctgtgaaaccaaaagatggtgactgtaagctatttggcttctcacttatcagtggccctactttaccagagccttctttatcacaaagaaatgtgagtgaggctgctgatcagatgcatcttacagcacaccaacaaagaacatctgaaaatgatgaaaagttagaccactcgaagggatcaagacctgtagatgatatagttgttgatgaccaggacagaccattacggacttctcagctgcatactaaagatgttcaagctaaacctctcagtggttctgctaggagttgcactaaagttcacaagaagggcattgcacttggtagatcagtggaccttacaaagtacagtggctatgatgaattagttgctgaattggatcagctgtttgaatttgggggtgaattattgtcaactaaaaaagattggcttatcgtctttactgataatgagggtgatatgatgcttgtaggcgatgatccatggcaggaattctgtgccatggttcgcaaaatttatatctaccctaaagaggagatccagaaaatgagcccaggtaccttgagctcgaaaaatgaagagaatcattcggtgacggctagtgaaggtgcagatacaaaagatgttaaatgtcagccgcatcaaaagttcaattcagaaaatggtcttgacgcctaatgattagtagattgatttccgtagctctcagattccgggatggaaagtagggaactgccatgaagccatccagttggaaaacttaacttgaagacgaaatcgaggctgactgctgcttatcagtgactgcttcgaatcaatatataagatggcacgaaagagtatccgttcaattttggaaatcccggaattagtagtataatgctcagctatatacaatccctagtatgtaatcaattgtgtttttgagtgaggtgatatagggtgatatcaaccttgcttttcttttccaaacaatcccaccttgtagctgtacatagttgtttctcatctaccctctgaacaacaaaccgttaatgtaatgaaaattgatagtataccagggaggccttgtggttggtatccagtttatttgattttaattttgattcttattagtcataatttgtgagatggaaattatcgagattccattctgcatgctgtataattaaattttgttttaagtgtacatttgtttt

SEQ ID NO: 12374 - protein, 434 aa, Glycine max
SKVSIDPSPANGFPRVLQGQEFSTLRGNFAESNESDTAEKSVVWPPAAVDDEKMDVSTSRRYGSESWMSMGRNEPTYSDLLSGFGASGDPSHLSLKDQMSPAYSARKQSLDHEGKLHMPHPWPVMPSSLSLSILDSNTKGPAHGGDTTYKARGNLRYSAFGEYPALHGHKVEHSHGNLMPPPPALLTQYQSPCSRELMSKQVSAKTCEAVKPKDGDCKLFGFSLISGPTLPEPSLSQRNVSEAADQMHLTAHQQRTSENDEKLDHSKGSRPVDDIVVDDQDRPLRTSQLHTKDVQAKPLSGSARSCTKVHKKGIALGRSVDLTKYSGYDELVAELDQLFEFGGELLSTKKDWLIVFTDNEGDMMLVGDDPWQEFCAMVRKIYIYPKEEIQKMSPGTLSSKNEENHSVTASEGADTKDVKCQPHQKFNSENGLDA

SEQ ID NO: 12375 - protein, 381 aa, Glycine max
MDVSTSRRYGSESWMSMGRNEPTYSDLLSGFGASGDPSHLSLKDQMSPAYSARKQSLDHEGKLHMPHPWPVMPSSLSLSILDSNTKGPAHGGDTTYKARGNLRYSAFGEYPALHGHKVEHSHGNLMPPPPALLTQYQSPCSRELMSKQVSAKTCEAVKPKDGDCKLFGFSLISGPTLPEPSLSQRNVSEAADQMHLTAHQQRTSENDEKLDHSKGSRPVDDIVVDDQDRPLRTSQLHTKDVQAKPLSGSARSCTKVHKKGIALGRSVDLTKYSGYDELVAELDQLFEFGGELLSTKKDWLIVFTDNEGDMMLVGDDPWQEFCAMVRKIYIYPKEEIQKMSPGTLSSKNEENHSVTASEGADTKDVKCQPHQKFNSENGLDA

SEQ ID NO: 12376 - protein, 367 aa, Glycine max
MSMGRNEPTYSDLLSGFGASGDPSHLSLKDQMSPAYSARKQSLDHEGKLHMPHPWPVMPSSLSLSILDSNTKGPAHGGDTTYKARGNLRYSAFGEYPALHGHKVEHSHGNLMPPPPALLTQYQSPCSRELMSKQVSAKTCEAVKPKDGDCKLFGFSLISGPTLPEPSLSQRNVSEAADQMHLTAHQQRTSENDEKLDHSKGSRPVDDIVVDDQDRPLRTSQLHTKDVQAKPLSGSARSCTKVHKKGIALGRSVDLTKYSGYDELVAELDQLFEFGGELLSTKKDWLIVFTDNEGDMMLVGDDPWQEFCAMVRKIYIYPKEEIQKMSPGTLSSKNEENHSVTASEGADTKDVKCQPHQKFNSENGLDA

SEQ ID NO: 12377 - DNA, 1600 bp, Glycine max
  misc_feature (1312)..(1312): n is a, c, g, or t
gatctatgttttcccaagtgacagaaaagaaggtttattcaatcttttggaggcctgagtgtcgtccccaatccatagcttggaattccagaaaggcttcagcttcagcttgctgctcccttctcaacttcaacaatttcgatagcacttaatgtcctgttattgtagggacatcagtattgctaatcatgatatggtcaaggctaagtaggagaactcatctcttgccataccttagggctttgcaaacagactcaattgaatccaggtgcctatctatcattcctaaaggatcaagttacaagttcattaatcctaataccagcttccaacacaatttctcttgtaatatacggctatcaaagtttaagcaagaattgagtacaaaaccattccatctgtgttgccgctcttcagctttggcttcacagtatgttggaaagtcatgtgccatacctggtttccgacacttctcatctcatgcatccaaagaacagaaatcccgaaagatgcttttatacttgacgggcttagtttttgctatggttgggtgcacatatgctgcagttcccctatacaggagattttgccaagcaactggctatgggggaactgttacccggcgtgagactgttgaagaaaagattgctcgacatgataccaataatacagtcaccacaagggaaattgtggtccagttcaatgctgatattgctgatgggatgccatggaagtttgttcccacacagagagaggttagggtcaagcccggtgaaagtgccctcgcattttatactgccgaaaacaaaagttctactccaataacaggtgtttctacgtataatgtcactcctatgaaggctgcagtgtacttcaataaaattcaatgcttctgctttgaggagcagcgacttcttcctggagagcatattgacatgcctgtattcttttatattgacccggaatttgagacggatcctaaaatgaatggtatcaataacattatattatcatataccttcttcaaggtttctgaggaataacaccaacttgaatgtttacatgagaatcaaataacaagctccctccatttcaaaggacaaagatgtataatacattgatgaagctcaagttttggtttacttatggtggctgacataaaagactaaaattcatttacttatttgtttagcacatataaagaaggttgcctcttctgtatgattgccaagttcttgaatattttcagcttcagcaaaactaccagaaaacccttgtgatcaagttttgaaggttcaaggtaccatgccgngacatttggaattatgctgattaagttaatgcaagccgaggtttggagtacctcttgaaattagccatttagatgaatgaatcattttgctttcagaatttattgattgtaaaatttatctgaagaactgtaaaggttgagatatattcgcaaaatggtaagtgacaatgacgtctatgaccaggtgaaactagcatggtatgaattttggtgatagtttaacgggtcatttatctttatacttttacaaaacctaattattttcaatatatagttgacagtttgttg

SEQ ID NO: 12378 - protein, 284 aa, Glycine max
MIWSRLSRRTHLLPYLRALQTDSIESRCLSIIPKGSSYKFINPNTSFQHNFSCNIRLSKFKQELSTKPFHLCCRSSALASQYVGKSCAIPGFRHFSSHASKEQKSRKMLLYLTGLVFAMVGCTYAAVPLYRRFCQATGYGGTVTRRETVEEKIARHDTNNTVTTREIVVQFNADIADGMPWKFVPTQREVRVKPGESALAFYTAENKSSTPITGVSTYNVTPMKAAVYFNKIQCFCFEEQRLLPGEHIDMPVFFYIDPEFETDPKMNGINNIILSYTFFKVSEE

SEQ ID NO: 12379 - protein, 177 aa, Glycine max
MLLYLTGLVFAMVGCTYAAVPLYRRFCQATGYGGTVTRRETVEEKIARHDTNNTVTTREIVVQFNADIADGMPWKFVPTQREVRVKPGESALAFYTAENKSSTPITGVSTYNVTPMKAAVYFNKIQCFCFEEQRLLPGEHIDMPVFFYIDPEFETDPKMNGINNIILSYTFFKVSEE

SEQ ID NO: 12380 - protein, 166 aa, Glycine max
MVGCTYAAVPLYRRFCQATGYGGTVTRRETVEEKIARHDTNNTVTTREIVVQFNADIADGMPWKFVPTQREVRVKPGESALAFYTAENKSSTPITGVSTYNVTPMKAAVYFNKIQCFCFEEQRLLPGEHIDMPVFFYIDPEFETDPKMNGINNIILSYTFFKVSEE

SEQ ID NO: 12381 - DNA, 1638 bp, Glycine max
attaatcaaaatcaaatgacctaaccactctctctttttcccaattttcgaatctctctcctccatggacccaacttcgatccctccccctccggccaccaccgtccccttcactgtcgaacccagcaatcacgtgacccccgccgacaacaccaacaccaaccaccctccttacgatgagatgatatacacagcaatcggggctctgaaggagaaagatggttcgagcaagcgagccataggaaagtacatggaacaagtgtacaaggaccttccacccacccactctgctttgttgactcaccatctcaaccgattgaaatccgctggtcttctcatcctcgtcaaaaaatcctacaagctccccggatctgatcctcttcccgtgctccaggcccaaaagccccgcggtcgccccccaaagctcaaatcccagcccaacactgagctcacatggcctgcgctagccctcaacgacaaccctgctcttcaatccgcaaaaagaggcccgggtcgtcccaaaaagattgcaggacccgtaggtgtgagcccgggcccgatggtgccgggcagaaggggtcgtccacctgggaccgggagatctaagctgcccaagaggcctggccgtcctcccaagcccaaatccgtgtcggcgatctccagtgggctcaaacgacgtccgggccgcccacccaaagccgaatccaacgtaaacgtcatccccttcgcagcccctgttgctcccggcctgcccacagtgcagcccatcgttcctactgcttccgtgcccaatggatctcccaggcccagaggaaggcccaaaaagattgttgccggtgcgggggctccggcgctctcttccgttggtggtgcaccacgtggccgcggacggccccgtggggtcttgccgttggtgaggccgggccgccctcagaagctcgccgttggaaggcccaagaatcctgcaagaaggcccgtgggccgccccaagggatcgacagctgctgcaatcacagcacataaggctgctaatgatgatctaagaaggaagcttgaacacttccaatcaaaagtgaaggagtctcttggcacgcttaagccttattttaaccatgaaagtccagtcactgcaattgcggcaattcaagagttggaagtactgtcaactttggaccttaaagcaccattgagggatgagacccatcaacagccacagccacagccacaggtgtatgaacagcaatatccccagccacagccactgctgcagcaattttttcaaccacatacatcagccccaagctaggcctgaacttgatgaaggacaacttgtacaagtgtttttaacaagacacaagagataaaagatctgtaaagcggttaggaagtagtggtactgatttttctgagggtgaagtgactctgtctattttagtttgttgttgtgcaacatttagtttgacccctgaagtaattagcgggtactgttgattctgttgttatttatttgacttttacagtttactttagtcacattaatgtgtatgtttggttcagcctcctttgttgttttatatttttaatggttactgcttgctatttctcatttcccattaatcattattgagtggttgtgtg

SEQ ID NO: 12382 - protein, 413 aa, Glycine max
MDPTSIPPPPATTVPFTVEPSNHVTPADNTNTNHPPYDEMIYTAIGALKEKDGSSKRAIGKYMEQVYKDLPPTHSALLTHHLNRLKSAGLLILVKKSYKLPGSDPLPVLQAQKPRGRPPKLKSQPNTELTWPALALNDNPALQSAKRGPGRPKKIAGPVGVSPGPMVPGRRGRPPGTGRSKLPKRPGRPPKPKSVSAISSGLKRRPGRPPKAESNVNVIPFAAPVAPGLPTVQPIVPTASVPNGSPRPRGRPKKIVAGAGAPALSSVGGAPRGRGRPRGVLPLVRPGRPQKLAVGRPKNPARRPVGRPKGSTAAAITAHKAANDDLRRKLEHFQSKVKESLGTLKPYFNHESPVTAIAAIQELEVLSTLDLKAPLRDETHQQPQPQPQVYEQQYPQPQPLLQQFFQPHTSAPS

SEQ ID NO: 12383 - protein, 374 aa, Glycine max
MIYTAIGALKEKDGSSKRAIGKYMEQVYKDLPPTHSALLTHHLNRLKSAGLLILVKKSYKLPGSDPLPVLQAQKPRGRPPKLKSQPNTELTWPALALNDNPALQSAKRGPGRPKKIAGPVGVSPGPMVPGRRGRPPGTGRSKLPKRPGRPPKPKSVSAISSGLKRRPGRPPKAESNVNVIPFAAPVAPGLPTVQPIVPTASVPNGSPRPRGRPKKIVAGAGAPALSSVGGAPRGRGRPRGVLPLVRPGRPQKLAVGRPKNPARRPVGRPKGSTAAAITAHKAANDDLRRKLEHFQSKVKESLGTLKPYFNHESPVTAIAAIQELEVLSTLDLKAPLRDETHQQPQPQPQVYEQQYPQPQPLLQQFFQPHTSAPS

SEQ ID NO: 12384 - protein, 351 aa, Glycine max
MEQVYKDLPPTHSALLTHHLNRLKSAGLLILVKKSYKLPGSDPLPVLQAQKPRGRPPKLKSQPNTELTWPALALNDNPALQSAKRGPGRPKKIAGPVGVSPGPMVPGRRGRPPGTGRSKLPKRPGRPPKPKSVSAISSGLKRRPGRPPKAESNVNVIPFAAPVAPGLPTVQPIVPTASVPNGSPRPRGRPKKIVAGAGAPALSSVGGAPRGRGRPRGVLPLVRPGRPQKLAVGRPKNPARRPVGRPKGSTAAAITAHKAANDDLRRKLEHFQSKVKESLGTLKPYFNHESPVTAIAAIQELEVLSTLDLKAPLRDETHQQPQPQPQVYEQQYPQPQPLLQQFFQPHTSAPS

SEQ ID NO: 12385 - DNA, 1435 bp, Glycine max
ctgatcgagagacgaaggcagaggaaagatcgcgttatgtggcctcttgtctccttacttgcaaagccggaacagaaatcgcatataaaatgcgaaaagaaatgaattcaatgttcggagatctgcacaggatctctctccgtgtccgttgaactttctttacgccctcctcgtaacataaaaattcagatcccgccaactctgaagacctctattctctttccctcccctttccactttcccgagaaaataaacttttccgtcaattttctctccacggtttccttcttcctcacaatggctccgaacttcgacaatcgaagattcgttctcgctcttcgcattttccttctgttctccttattcttcaacctctcaccgaccttcgctcaggattctctcgttcagaacgcgaaggaagattccggcggatctgtggatctcggtcgccgcgccaaaattgcattgaatgacatagagaatgattcgatcctttctcttggcttggactccaccggtcctggactcttcgacgcatttttcgcgagtttttcgatgatccttgtcagtgagattggggatgagacgtttataatagcagctcttatggctatgcgtcaccctaagtcaattgtcttgtctggtgctctcagtgctctgattataatgacagtactttctacagggcttggcaggattgtgccaaatttgatttctaggaagcatacgaatagtgctgctacagttctttatgctttctttgggttaaggttactgtacattgcatggagatcatcagattcaaaatcctcacagaagaaagaaatggaagaagttgaagaaaaactggatggtggacaagggaaaacttcagttcggcgcttcttttcaagattctgtacaccaatatttttggagtcttttattttaacattccttgctgagtggggtgatcgtagccagatagcgacaattgcactggcaacccacaaaaatgcaattggagtagcagttggggccactataggacacaccatctgtacctctctggctgtggtgggaggaagcatgctggcatctaagatttcccaacgctcagtagccactgttggtggcttgctcttcatcggcttttccatatcttcatacttctatccgcctctatgataattacaagtgcagagtaatctgattcgtaatggcttgtggcctctctgtcctgtttttttcccccctacataattgtctttattgtagattttgttgtacttgttccctaggaaagctcgatactaactggaacatgagattttgaatcccattctttttttgtaaaatatgttaagttttcgtctcctccacactagcacgtagacagacattgttatttatcattatttttggaaggtaaaagtatcatcttcttttcatggtt

SEQ ID NO: 12386 - protein, 289 aa, Glycine max
MAPNFDNRRFVLALRIFLLFSLFFNLSPTFAQDSLVQNAKEDSGGSVDLGRRAKIALNDIENDSILSLGLDSTGPGLFDAFFASFSMILVSEIGDETFIIAALMAMRHPKSIVLSGALSALIIMTVLSTGLGRIVPNLISRKHTNSAATVLYAFFGLRLLYIAWRSSDSKSSQKKEMEEVEEKLDGGQGKTSVRRFFSRFCTPIFLESFILTFLAEWGDRSQIATIALATHKNAIGVAVGATIGHTICTSLAVVGGSMLASKISQRSVATVGGLLFIGFSISSYFYPPL

SEQ ID NO: 12387 - protein, 203 aa, Glycine max
MILVSEIGDETFIIAALMAMRHPKSIVLSGALSALIIMTVLSTGLGRIVPNLISRKHTNSAATVLYAFFGLRLLYIAWRSSDSKSSQKKEMEEVEEKLDGGQGKTSVRRFFSRFCTPIFLESFILTFLAEWGDRSQIATIALATHKNAIGVAVGATIGHTICTSLAVVGGSMLASKISQRSVATVGGLLFIGFSISSYFYPPL

SEQ ID NO: 12388 - protein, 186 aa, Glycine max
MAMRHPKSIVLSGALSALIIMTVLSTGLGRIVPNLISRKHTNSAATVLYAFFGLRLLYIAWRSSDSKSSQKKEMEEVEEKLDGGQGKTSVRRFFSRFCTPIFLESFILTFLAEWGDRSQIATIALATHKNAIGVAVGATIGHTICTSLAVVGGSMLASKISQRSVATVGGLLFIGFSISSYFYPPL

SEQ ID NO: 12389 - DNA, 1668 bp, Glycine max
aacgaatttgcaaaactcaaacgaatacgttttctctttctcttcaatttcacccttattagcatagcatattcatttccctttcttgaatcgttgtaagcgcattgcgattttgcccttatctttatttcaattttttgttctgtttttgttattcatttgggttaatttcgattcgaagcttaactgcgagaggggatatcagagaagttgattggcctcccattaataacagatctgaatgatctgatggagtctaaaggtgggaagaagaagtcgtctagtagtaagtcctttttgtacgaagctcctctcgattacatcattgaagacgttcgaccacacggtggaatcaagaagttcagatctgctgcttactccaactgcatccgcaagccatcctgagattccctaggtcgtgtgaggacgtagcccccttagtcctgcatctgctatatttttctagtctcttctcttctcctttttcttgttttcttccttgcccttttgttctctctacctacacagcaagactttgtttctttttgagtcaagatggctggctcagctattggtttcgaaggctatgaaaaaagacttgagatatcattttttgaacatggtgtgtttgctgaccctgaaggaataggcctccgagcattgtccaaagaccaattggacgagattcttaaaccagcagagtgcagtattgttgcatcactttcaaacgattatgttgactcttatgttctgtcagagtcaagcctgttcatctatccttataaaattatcatcaaaacttgtgggactaccaaattgcttctgtccatccctgtcatcctcaagttggctgatgctcttgacattgctgtgaaatctgtgaggtacactcgtggaagtttcatttttcctggggcacagtcttttcctcaccgcagtttttcagaggaggtttctgttcttgacagctatttcagcaaccttggttctggtagcaaagcttatgttatgggtgacccttcgaagtcacagatttggcacatctactctgcaagtgcacagaccaaagggtcatctgaagttgtctatggccttgagatgtgcatgaccggtttagaaaaggaaagcgcttctgtgtttttcaaggagaatacatcttcagcagctttgatgaccgaaaattctggaattaggaagatccttccacagtctgatatatctgattttgaatttgacccttgcggatattcaatgaatggaatagaagggggtgcaatatccaccatccatgtcactcctgaagatggtttcagttacgcaagtttcgaagctgttggttatgactttgatgagatggctctaggtgaacttgtggaaagagttttagcatgctttcgtccagcagagttttctgttgctttgcacattgacatgcatggcgaaaaacttaacaaatttcccttggacatcaaaggatactactgtggtgagaggagctatgaagagcttggagtaggtggtgcagttgtgtaccaatcatttgttcaaggctgtgatggcagtacatctcccaggtctattctgaaatgctgctggagtgaggatgagaacgaagatgaagtgagggagatataagtacttctggtttttatgttctgttatttatct

SEQ ID NO: 12390 - protein, 359 aa, Glycine max
MAGSAIGFEGYEKRLEISFFEHGVFADPEGIGLRALSKDQLDEILKPAECSIVASLSNDYVDSYVLSESSLFIYPYKIIIKTCGTTKLLLSIPVILKLADALDIAVKSVRYTRGSFIFPGAQSFPHRSFSEEVSVLDSYFSNLGSGSKAYVMGDPSKSQIWHIYSASAQTKGSSEVVYGLEMCMTGLEKESASVFFKENTSSAALMTENSGIRKILPQSDISDFEFDPCGYSMNGIEGGAISTIHVTPEDGFSYASFEAVGYDFDEMALGELVERVLACFRPAEFSVALHIDMHGEKLNKFPLDIKGYYCGERSYEELGVGGAVVYQSFVQGCDGSTSPRSILKCCWSEDENEDEVREI

SEQ ID NO: 12391 - protein, 208 aa, Glycine max
MGDPSKSQIWHIYSASAQTKGSSEVVYGLEMCMTGLEKESASVFFKENTSSAALMTENSGIRKILPQSDISDFEFDPCGYSMNGIEGGAISTIHVTPEDGFSYASFEAVGYDFDEMALGELVERVLACFRPAEFSVALHIDMHGEKLNKFPLDIKGYYCGERSYEELGVGGAVVYQSFVQGCDGSTSPRSILKCCWSEDENEDEVREI

SEQ ID NO: 12392 - DNA, 1044 bp, Glycine max
ggtacttgtcaacactgaattcaaaatcactttcgaccatattctcttcttcttctctctctccatcatggtgcaaacaaggaagttcagaggtgtcaggcagcgccattggggttcatgggtatcggaaattcgccacccttttctcaagaggagggtgtgctaggcacgttcgaaacagcagaagaagcggcacgagcttacgaccaagccgcgatattgatgagcgggcgtaacgcgaaaaccaatttcccaatactccaaaccccggagggtgacccaaagacgacgctaacacccatcgatcacgaaacctcatcatcgtcgacgaccacctcgaaggaactggaagagattcttcacgccaagctccgaaagtgcgggaagcttccgtccccttccatgacctgcctgaggctcgaccccgagaattctcacatcggagtgtggcagaagcgcgccggccagcgttccgattccaactgggtcatgatggttcctcccctcggaaaaaaaggtggtgctaatgaaggaggtactggaggagatgcttcttgttctaactcctttccgttctccgagtgcgatccgaccccgcaagtggcaaggcaggagcttctgaggacggagatggacgaggaagaaagaattgcgctgcaaatgatagaagaactcctcagcaggaactgccccactagcccttcattcaataacttatattaattaagggaaatgtttcctgaagaaggataattttattcagtttctttaagggtctttagagataaattatgctggtgtaacattctctttctaatatttttttaaaatattattgtttgcttaaatttactgacaatcacaaatttcagtacatttcacttctaaacctggaataagacttattaattgagaagtgaaatctatcgatatttgtgatattcagtgaattatagccgataattaaaaaatgttagaaagaaagtgttagagtaaatgttgtctgtcttatatcatggtttttcatgaattagtgcttacttc

SEQ ID NO: 12393 - protein, 201 aa, Glycine max
MGIGNSPPFSQEEGVLGTFETAEEAARAYDQAAILMSGRNAKTNFPILQTPEGDPKTTLTPIDHETSSSSTTTSKELEEILHAKLRKCGKLPSPSMTCLRLDPENSHIGVWQKRAGQRSDSNWVMMVPPLGKKGGANEGGTGGDASCSNSFPFSECDPTPQVARQELLRTEMDEEERIALQMIEELLSRNCPTSPSFNNLY

SEQ ID NO: 12394 - protein, 166 aa, Glycine max
MSGRNAKTNFPILQTPEGDPKTTLTPIDHETSSSSTTTSKELEEILHAKLRKCGKLPSPSMTCLRLDPENSHIGVWQKRAGQRSDSNWVMMVPPLGKKGGANEGGTGGDASCSNSFPFSECDPTPQVARQELLRTEMDEEERIALQMIEELLSRNCPTSPSFNNLY

SEQ ID NO: 12395 - protein, 106 aa, Glycine max
MTCLRLDPENSHIGVWQKRAGQRSDSNWVMMVPPLGKKGGANEGGTGGDASCSNSFPFSECDPTPQVARQELLRTEMDEEERIALQMIEELLSRNCPTSPSFNNLY

SEQ ID NO: 12396 - DNA, 1420 bp, Glycine max
gggttgcaaagaaagcaagaacaattttcattcattcgattcccaataataatgtctcagaccccaccccaaaccctcgattccgatgaggcgccgcaaaccacccacgccacccaaaccccttccctcctccacctctccttcaatcaggactccgggtgcttcgccgccgccaccgaccgcggcttccgcatctacaactgcgaccccttccgcgagatcttccgccgcgacttcggccccggcggcggcgtcggcctcgtccacatgctcttccgctgcaacatcctcgccttcgtcggcggcggctcctcccccgacccccgctaccctcccaacaaggtcatgatctgggacgaccacctgtcccgctgcatcggcgagctctccttccgctcggaggtcaagggcgtccgcctccgccgcgaccgaatcgtcgtcgtcctcgcccacaagatcttcgtctacaacttcgccgatctcaaagtgctgcaccaaatcgagaccattgcaaaccctaagggcctatgcgacctttcacatgtctccgccaccatggtgttggtctgccccgggttgcaaaaggggcaggttagggttgagcactacgcctctaaaagaaccaagttcatcatggctcatgattcccgaatcgcgtgttttgcactcacgcacgatggcaggttgcttgcaaccgccagctccaagggcacactcattaggctcttcaataccctcgacggttcactgctccaagaggtacggaggggtgcagacagagcagagatatacagccttgctttttctcctactgcacagtggctggctgtctcaagtgacaaggggaccgttcatgtcttcaacctcaaggttgattccggactgttggggcatgatagatcgcacagtacttctgaggcaaatcttgctagccccaccgcgatgtcgtctctttccttttttaaaggtgtgctacccaagtattttagctcagagtggtctgtggctcaatttcgcttgcaagaaggtttgcaatatgttgttgcatttggccatcaaaagaatacagttgtaatactaggcatggatggcagcttctatcgatgtcagtttgattccgcagctggtggagagatgacccaacttgaatattacaatttcctaaaggcagaggagacattctagtctagtatggatgcatcatgtatagatcttcagtggcagttgctgtgaatactatttgaattttctgtttacctcgtatttataacgcgtaaactgtaaatatgagtattgctaaatccaccaatattatcctgttcactctgttggcttgtatagattaacaccttattgtaaattagaatgaactgtcagcagcattcgctccaaattcatcacacttttgctgcgtctttcc

SEQ ID NO: 12397 - protein, 394 aa, Glycine max
GLQRKQEQFSFIRFPIIMSQTPPQTLDSDEAPQTTHATQTPSLLHLSFNQDSGCFAAATDRGFRIYNCDPFREIFRRDFGPGGGVGLVHMLFRCNILAFVGGGSSPDPRYPPNKVMIWDDHLSRCIGELSFRSEVKGVRLRRDRIVVVLAHKIFVYNFADLKVLHQIETIANPKGLCDLSHVSATMVLVCPGLQKGQVRVEHYASKRTKFIMAHDSRIACFALTHDGRLLATASSKGTLIRLFNTLDGSLLQEVRRGADRAEIYSLAFSPTAQWLAVSSDKGTVHVFNLKVDSGLLGHDRSHSTSEANLASPTAMSSLSFFKGVLPKYFSSEWSVAQFRLQEGLQYVVAFGHQKNTVVILGMDGSFYRCQFDSAAGGEMTQLEYYNFLKAEETF

SEQ ID NO: 12398 - protein, 377 aa, Glycine max
MSQTPPQTLDSDEAPQTTHATQTPSLLHLSFNQDSGCFAAATDRGFRIYNCDPFREIFRRDFGPGGGVGLVHMLFRCNILAFVGGGSSPDPRYPPNKVMIWDDHLSRCIGELSFRSEVKGVRLRRDRIVVVLAHKIFVYNFADLKVLHQIETIANPKGLCDLSHVSATMVLVCPGLQKGQVRVEHYASKRTKFIMAHDSRIACFALTHDGRLLATASSKGTLIRLFNTLDGSLLQEVRRGADRAEIYSLAFSPTAQWLAVSSDKGTVHVFNLKVDSGLLGHDRSHSTSEANLASPTAMSSLSFFKGVLPKYFSSEWSVAQFRLQEGLQYVVAFGHQKNTVVILGMDGSFYRCQFDSAAGGEMTQLEYYNFLKAEETF

SEQ ID NO: 12399 - protein, 305 aa, Glycine max
MLFRCNILAFVGGGSSPDPRYPPNKVMIWDDHLSRCIGELSFRSEVKGVRLRRDRIVVVLAHKIFVYNFADLKVLHQIETIANPKGLCDLSHVSATMVLVCPGLQKGQVRVEHYASKRTKFIMAHDSRIACFALTHDGRLLATASSKGTLIRLFNTLDGSLLQEVRRGADRAEIYSLAFSPTAQWLAVSSDKGTVHVFNLKVDSGLLGHDRSHSTSEANLASPTAMSSLSFFKGVLPKYFSSEWSVAQFRLQEGLQYVVAFGHQKNTVVILGMDGSFYRCQFDSAAGGEMTQLEYYNFLKAEETF

SEQ ID NO: 12400 - DNA, 1323 bp, Glycine max
actctcttcttacttcccttctctctctgtctctaaaaaccctttttttctctctctttcacacacaccaaccagactcgatcagtggtggcagatagagagagacatgatgtcaacttccggcgccggcaggtacatggcttttccgccgtctccgtccgcgcctccgtcgccgcacctctccggtcttcgctccactcccctctccgacccggacaaatatctagctgagttgttgggagaacgtaacaagcttagtcccttcatggctgtgcttcctcactgctttcgattgtttaaccaagagacccagcttgttacagtcctcatcaacacaaaactggctgagtccacaaggtagctcatctggtattattgttaaaaagacggtcagagtagatattcctgtggacgcatatcctaattttaactttgttggtcgcctcctaggccctagaggaaactctctaaagcgtgtagaagcaagtactgagtgtcgtgtcttgatcaggggccgaggtagcattaaggatccagctagggaggaaatgatgagaggaaaacctgggtatgagcatctgaatgaacctctccacattctagttgaggcagaattaccagttgaaatagtagatgctcgcctgatgcaggcacgtgaaatacttgaagatttgctcaaaccggtggatgaatctcaggatttctacaagaagcagcaacttcgggagctagcaatgctgaatggcactcttcgtgaggagggttctcccatgtctggttctgtttcacccttccacaacagccttggtatgaagagggccaagaccagggggtaaattatcctaaagggtgagagggattttggagcttgtgttaattttctacatcatcacttaccgtgccacaggtaatgctgtcaacgaatgccctgatctgcgatcggggcactggcatcatagtgccagttctaacttgttctatgtgcagtgtgtttatattgagtttgggggaggtttaaagatggtagcacgtagtaaaggtccaattgagtttggtgaatttgcttttatagtgttggttaaggtttggttagatattcaccaaatctgtctatactactattatatggggttatatttgctgataaaaaaaaatatggggttatatttaagcttgcaataacagttttgatatgtttttggtattttctgcgaggaaggtaatgttaatggtttgtacccagattgtgaggcagataaatatctacttcaatgcgtctatgggtgacattttgtagtatctaatttagattataaattcgtg

SEQ ID NO: 12401 - protein, 119 aa, Glycine max
LSSYFPSLSVSKNPFFLSLSHTPTRLDQWWQIERDMMSTSGAGRYMAFPPSPSAPPSPHLSGLRSTPLSDPDKYLAELLGERNKLSPFMAVLPHCFRLFNQETQLVTVLINTKLAESTR

SEQ ID NO: 12402 - protein, 95 aa, Glycine max
MMRGKPGYEHLNEPLHILVEAELPVEIVDARLMQAREILEDLLKPVDESQDFYKKQQLRELAMLNGTLREEGSPMSGSVSPFHNSLGMKRAKTRG

SEQ ID NO: 12403 - protein, 94 aa, Glycine max
MRGKPGYEHLNEPLHILVEAELPVEIVDARLMQAREILEDLLKPVDESQDFYKKQQLRELAMLNGTLREEGSPMSGSVSPFHNSLGMKRAKTRG

SEQ ID NO: 12404 - protein, 84 aa, Glycine max
MMSTSGAGRYMAFPPSPSAPPSPHLSGLRSTPLSDPDKYLAELLGERNKLSPFMAVLPHCFRLFNQETQLVTVLINTKLAESTR

SEQ ID NO: 12405 - DNA, 2669 bp, Glycine max
  misc_feature (2274)..(2274): n is a, c, g, or t
acagacacccttcaacgaccgtagttaaacctcctaactcactctagttgctttgtttgtcttcaatggaataagaacagcagaaagaaagaacacaactttggccagaagacttggtgggggcattttcttttcagccaagaagggattcggtgttgatgagcaatattgatctgttgctgcagtaggggaccgagtaagaatgccaaaccagctatggtttgcactgccaatgatttacaaggatggaaagatttcccaaagggacttagagttcttctgcttgaaggagatagtagttctgctgctgagataagagaacaacttgaggccatggactataaggtttccactttctacgacgagaatgaagccttgtcagcactctcaagtagtcctaaaggcttccatgttgccatagtggaggtgagtacaagctgtagccttggaggtttcaaatttcttgagaatgcaaaggacttgcctaccattatgacttcaaaggaccagtgtctgaacaccatgatgaagtgcattgcgcttggtgcagttgagtttctcagtaaaccactctctgaggacaagctcaagaatatttggcagcatgttgttcacaaggcatttaattctggggaaaatgtcctttctgaatcactaaaacctgtcaaagaatctgtagaatccatgctgcagctccaaacagacattggacaagataaaagtaggatttcaattgatttagagaatgtgtcgaggtttagtgataatgaccatgagcagtctgctgtatgtgataaatatccggctccgtcaacccctcaattaaagcaggggacaaggttactggatgatggagcattgccatgagcagactaattgctcaacagaaaaagaaagtggggaacatgatagggaatgtaaatctgtcgaaacttcatgtgggaatttgaatgccgaaagttctcctcagccaagggaacctgataagactctgattagggaggaagatgattttgccaatgtttccaagggtgagagcgctgtttcactgaatccacataataaaaagtttctcagcaatgccgatggtaatacatctccaaataaaacgggtgtacttaatgattcatgtgagattaaagctaatcggaagaaggtgaaagtagactggacacctgagctgcataaaaaatttgtaaaggctgtcgaacaactaggtattgatcaagccattccttctagaatattggagataatgaaagtggaaggtttgacaaggcacaatgtggcaagccatcttcagaaatatagaatacacaagagacaaagtgcacccagggaagaagatcggaaatggcataatcaaggggatgcaatgcaaaggaactattatatgcaaagaccaatcatggcataccctccatatcattcacatcacaccctttctccagctcctatatatcctatgtggggacaacctggcagtcaaacagccggtgtacagatttggggccatcctggttatcccatgtggcatcctacagaaagttggcactggaagccttatccgggggtgcatgtggatgcttggggatgcccgttggtgccacctcctcaagctccttgttttccctacaatcaaaatacacctggattgcacaatcctaaagcagttgactatagattcagcatgccacgaagttcctttgagcatcatccggcagaggaggtggtagacaaggtagtgaaggaagcaatgagccagccatggctaccattgcccttaggactcaaacctccttccatggatagtgtgttggctgaactctccaaacaaggcatacccagcatccctcttggcaacaagggttcttctactcctaaaccccgtcgagatgtacgaccgaccccgccaccgggtcccacatagtagtggttttgatgatggggccagccagttacatatcaacgccctgttgactcttgtaattattttgtttctcaaatttccttcccaggttgcaactacagtggtagatttggctggaagttgggaccattttactttgcctggtggtccccgccgctacaccgaccactcatgatgtctctccttaagctgttgagcgatgatggttgatatgatatgatatcatcaggtctggtcatacaccaccatgatgcatcacaaatggacaataatacattgatcctattccatggccacttgccaaaacaaaacgctaaaaataacattaaaaaaaaaggttaagntatgcagcagcattcagcagtttcaatgcagtgcatggcatcatttgttgaaactaaggactggccacgcatttgttgaagctttatacaaaatattgtggctgaaagaaagataacaatgtggactttttgatggttgtggtggtgaggggtttttggttgtaagtgaccagcttcggggtccatgtaaaaatagcatgacagggactggaggtgtcttggttctgttggtgttgttggggagggggtctagttgaggtctaataatggaaaaaaaggatagttaggatagtgttgtgaataaaaaatgagtccaggctttggtttatgctaacttgttcttttcccaattcaatttgttcactcagctattttagcttaagttcagcattgag

SEQ ID NO: 12406 - protein, 360 aa, Glycine max
MMEHCHEQTNCSTEKESGEHDRECKSVETSCGNLNAESSPQPREPDKTLIREEDDFANVSKGESAVSLNPHNKKFLSNADGNTSPNKTGVLNDSCEIKANRKKVKVDWTPELHKKFVKAVEQLGIDQAIPSRILEIMKVEGLTRHNVASHLQKYRIHKRQSAPREEDRKWHNQGDAMQRNYYMQRPIMAYPPYHSHHTLSPAPIYPMWGQPGSQTAGVQIWGHPGYPMWHPTESWHWKPYPGVHVDAWGCPLVPPPQAPCFPYNQNTPGLHNPKAVDYRFSMPRSSFEHHPAEEVVDKVVKEAMSQPWLPLPLGLKPPSMDSVLAELSKQGIPSIPLGNKGSSTPKPRRDVRPTPPPGPT

SEQ ID NO: 12407 - protein, 359 aa, Glycine max
MEHCHEQTNCSTEKESGEHDRECKSVETSCGNLNAESSPQPREPDKTLIREEDDFANVSKGESAVSLNPHNKKFLSNADGNTSPNKTGVLNDSCEIKANRKKVKVDWTPELHKKFVKAVEQLGIDQAIPSRILEIMKVEGLTRHNVASHLQKYRIHKRQSAPREEDRKWHNQGDAMQRNYYMQRPIMAYPPYHSHHTLSPAPIYPMWGQPGSQTAGVQIWGHPGYPMWHPTESWHWKPYPGVHVDAWGCPLVPPPQAPCFPYNQNTPGLHNPKAVDYRFSMPRSSFEHHPAEEVVDKVVKEAMSQPWLPLPLGLKPPSMDSVLAELSKQGIPSIPLGNKGSSTPKPRRDVRPTPPPGPT

SEQ ID NO: 12408 - protein, 224 aa, Glycine max
MKVEGLTRHNVASHLQKYRIHKRQSAPREEDRKWHNQGDAMQRNYYMQRPIMAYPPYHSHHTLSPAPIYPMWGQPGSQTAGVQIWGHPGYPMWHPTESWHWKPYPGVHVDAWGCPLVPPPQAPCFPYNQNTPGLHNPKAVDYRFSMPRSSFEHHPAEEVVDKVVKEAMSQPWLPLPLGLKPPSMDSVLAELSKQGIPSIPLGNKGSSTPKPRRDVRPTPPPGPT

SEQ ID NO: 12409 - DNA, 1353 bp, Glycine max
  misc_feature (1233)..(1233): n is a, c, g, or t
gactcaaccaattccaaattctcaactttcctaactttagcaaccatctaagaagttcagtcccttaattatctctcaccttgaattagaaaagcattcaaagctttgaacccaatttcactgtttgcacctcaaacatcttagaagtcccaattgagtctcaattccacaaccaaaaatgcaaagttcaatttcacaatctgatatttttatcactgattaccttgtaccccaagaagttccatttcaatttcaatttcaagatatgagcaagaatgacaacaacatgccaatgaaccataccaataataaccttcaaatgcctcaaatcacatctttctccaagcctccaaggtcctcatcaaatctaagcaaccgcaaaccctccttgaaaaacatcacaatcccttccataacctctggtcttgcaacagctatgtcacaaacaacagcaacaacaacaacaatagctacaaccatgtataacaacaaccaagtttcttcttcttctttttcttcagatgaaaccaacaataccaaagacgacaagcactatagaggggttagaagaaggccatgggggaagtatgctgcagaaatccgtgaccctaatagaaaaggttcaagggtgtggcttggaacctttgacacagccatagaagctgctaaggcttatgacaaagctgctttcaagatgagagggagcaaagccatattgaacttccctttggagattggatcagatcagtctaaagaagagtcatcatcatcatcatcatcagtttcaagcagcagcatcgtcatcaaggttggtgtgaagagagaaagagaggaagagagtgaaaggaagaacaactatgagaaaagtgagtttaacaacaatagtaatagtaataagcatgtgaagaaagaagagtgccctttgactccatcatgttggaaaggcttttgggacactgatgttatgggaacaatctttagtgtgcctcctttgtcaccactatctccactaatggttgtttgagattttgtggaacttttgctctttcaatgatgttttgaggtaaccaaactaaggggagagagagagatgatgctggtgattgtcctctctgatttaggttgctaatttgcctaaatcaaaatggtagtactaattaatctactaatagattaatttgcaagtgaatatatatatggatttgtataatgtaaatataggatagtactatnaagcaagatctttttgtttgttgaaaaaaaaaacaaaaaacccatgcttatcttcttcctttaggtaaaaaaatgtactgtacttgaagcaatattgaaatttgtttattcgtttattgg

SEQ ID NO: 12410 - protein, 281 aa, Glycine max
MQSSISQSDIFITDYLVPQEVPFQFQFQDMSKNDNNMPMNHTNNNLQMPQITSFSKPPRSSSNLSNRKPSLKNITIPSITSGLATAMSQTTATTTTIATTMYNNNQVSSSSFSSDETNNTKDDKHYRGVRRRPWGKYAAEIRDPNRKGSRVWLGTFDTAIEAAKAYDKAAFKMRGSKAILNFPLEIGSDQSKEESSSSSSSVSSSSIVIKVGVKREREEESERKNNYEKSEFNNNSNSNKHVKKEECPLTPSCWKGFWDTDVMGTIFSVPPLSPLSPLMVV

SEQ ID NO: 12411 - protein, 252 aa, Glycine max
MSKNDNNMPMNHTNNNLQMPQITSFSKPPRSSSNLSNRKPSLKNITIPSITSGLATAMSQTTATTTTIATTMYNNNQVSSSSFSSDETNNTKDDKHYRGVRRRPWGKYAAEIRDPNRKGSRVWLGTFDTAIEAAKAYDKAAFKMRGSKAILNFPLEIGSDQSKEESSSSSSSVSSSSIVIKVGVKREREEESERKNNYEKSEFNNNSNSNKHVKKEECPLTPSCWKGFWDTDVMGTIFSVPPLSPLSPLMVV

SEQ ID NO: 12412 - protein, 245 aa, Glycine max
MPMNHTNNNLQMPQITSFSKPPRSSSNLSNRKPSLKNITIPSITSGLATAMSQTTATTTTIATTMYNNNQVSSSSFSSDETNNTKDDKHYRGVRRRPWGKYAAEIRDPNRKGSRVWLGTFDTAIEAAKAYDKAAFKMRGSKAILNFPLEIGSDQSKEESSSSSSSVSSSSIVIKVGVKREREEESERKNNYEKSEFNNNSNSNKHVKKEECPLTPSCWKGFWDTDVMGTIFSVPPLSPLSPLMVV

SEQ ID NO: 12413 - DNA, 2317 bp, Glycine max
  misc_feature (2004)..(2004): n is a, c, g, or t
  misc_feature (2089)..(2089): n is a, c, g, or t
  misc_feature (2109)..(2109): n is a, c, g, or t
  misc_feature (2116)..(2116): n is a, c, g, or t
  misc_feature (2213)..(2213): n is a, c, g, or t
  misc_feature (2218)..(2218): n is a, c, g, or t
  misc_feature (2237)..(2237): n is a, c, g, or t
  misc_feature (2243)..(2243): n is a, c, g, or t
tgatggagtttggtgtgaatttgatttgctgattcaacgattaggatcaactgtcactggttttgtgttgagactaaaatgtcaatgtcaggatttgaagggcaatgtagtaatgatgagattagagagaggaggtctgatattgagaactcggaagatgagaggcggcagtcgagaattggaaccttgaagaagaaggcaatgaatgcgtcgtctagattcactcattctcttaagaaaagagggaaaaggaaaattgattatcgggttccatcagtgtccattgaagatgtaagagatgcacgggaggagactgccgtccatgaattgcgccagaaacttgttgagaggggatctttacctcctaggcatgatgactatcatacattgttaaggtttcttaaagccagggactttaacattgagaagacgattcagatgtgggaagaaatgcttacgtggcgaaaggaatatggaactgataccatccttgaggattttgaatttggagagctggaagaagtattgcagtattatcctcaagggtaccatggagttgataaggaaggtaggccagtttacattgagagacttgggaaagcccatccaagccgcctaatgcacatcaccacaatagatcgatatttgaattaccacgtccaggagtttgagaggaccctgcaggagaaatttccagcatgctccattgcggcaaagagacagatttcttcaacaacaacaatattggatgtacagggcttgggaatgaaaaatttctcacgtactgctgcaaatctcttgtctgctgtgacaaaaatagatagcagttactatcctgagacattacatcaaatgtatattgtcaatgctggttctggctttaagaagatgctttggcctgccacacagaagtttcttgattccaaaaccattgcgaagatacagattcttgattctaagtctttatataaattactggaagtcattgactctagtcagttgccagactttctgggtggttcttgtacatgtgctgcagaaggtggatgtcttcggtctaacaagggtccatggaatgatcctgacatcatgaagctggtacataatgaggaggcaacatttgtgaggcaaatcaccagaatgcccaatggtcaacatacatttgactcctttcaaatgcacccactgaaggaacgatgcagtgatacatcaacaacagctgaatcagggtctgatatgaacgattactcctctcccaacagacacaggagctgtccttatcctcatttagccccagttcatgaagaagttaaagcaccagatctcaatggctactacagttgtgatgatagtgctctagcagttgagaaagtgattgaaagtgatcactttcaccttaatcgagagcagccattgcaaactaataatatagggaatatttcttgtagaacagattcaggaggtacttatgtcaacagttggttcagcattgttaaggaaaaaatagagaaaataaatgtcttatatgttgcaagagtgatgacatttttcatggaaaaactagtaacactcttccgctatttaacattcgaattttggagaacacagaacaatgttcacccaccaattaccatggaacataacattaataaccattcagcagctgttgaaacagcttctgaaagagattatattcttccatgtgtacaacgtcttcagagactagaaaaagtctttgaggaacttaacaacaaacctgatggtatgcctcaggagaaggagcagatgcttatggattccatggataggattaaatctgttgagtttgaccttgaaaagaccaagagggtgctacatgctgcagtgatgaagcagcttgagattgctgaattgctggagaacttgaagaaatcaaagtgccgacaaagaaggctattctgttgagtcatctaaacgtttagcaacagaagtccttggcaccacaggaagatatttccatcaaanagaagacttattgcaaccttcactcctagattggacccaaggaagcatgaggcgacggagttttggtagagcatacatagaaacncgacgaatttggatggtacncagtccnctttgttttatatctaataataataataataatatgatatataatatagttttcctcttacatcttttgttttctttcatagtaaataagtgtaaanaaggngtaattatgcatggacganatgttntatcaagttttagacagttttgagaacagaaagaaaatagataagtttatagtgcagaaagtttaagaaatccc

SEQ ID NO: 12414 - protein, 621 aa, Glycine max
MSMSGFEGQCSNDEIRERRSDIENSEDERRQSRIGTLKKKAMNASSRFTHSLKKRGKRKIDYRVPSVSIEDVRDAREETAVHELRQKLVERGSLPPRHDDYHTLLRFLKARDFNIEKTIQMWEEMLTWRKEYGTDTILEDFEFGELEEVLQYYPQGYHGVDKEGRPVYIERLGKAHPSRLMHITTIDRYLNYHVQEFERTLQEKFPACSIAAKRQISSTTTILDVQGLGMKNFSRTAANLLSAVTKIDSSYYPETLHQMYIVNAGSGFKKMLWPATQKFLDSKTIAKIQILDSKSLYKLLEVIDSSQLPDFLGGSCTCAAEGGCLRSNKGPWNDPDIMKLVHNEEATFVRQITRMPNGQHTFDSFQMHPLKERCSDTSTTAESGSDMNDYSSPNRHRSCPYPHLAPVHEEVKAPDLNGYYSCDDSALAVEKVIESDHFHLNREQPLQTNNIGNISCRTDSGGTYVNSWFSIVKEKIEKINVLYVARVMTFFMEKLVTLFRYLTFEFWRTQNNVHPPITMEHNINNHSAAVETASERDYILPCVQRLQRLEKVFEELNNKPDGMPQEKEQMLMDSMDRIKSVEFDLEKTKRVLHAAVMKQLEIAELLENLKKSKCRQRRLFC

SEQ ID NO: 12415 - protein, 619 aa, Glycine max
MSGFEGQCSNDEIRERRSDIENSEDERRQSRIGTLKKKAMNASSRFTHSLKKRGKRKIDYRVPSVSIEDVRDAREETAVHELRQKLVERGSLPPRHDDYHTLLRFLKARDFNIEKTIQMWEEMLTWRKEYGTDTILEDFEFGELEEVLQYYPQGYHGVDKEGRPVYIERLGKAHPSRLMHITTIDRYLNYHVQEFERTLQEKFPACSIAAKRQISSTTTILDVQGLGMKNFSRTAANLLSAVTKIDSSYYPETLHQMYIVNAGSGFKKMLWPATQKFLDSKTIAKIQILDSKSLYKLLEVIDSSQLPDFLGGSCTCAAEGGCLRSNKGPWNDPDIMKLVHNEEATFVRQITRMPNGQHTFDSFQMHPLKERCSDTSTTAESGSDMNDYSSPNRHRSCPYPHLAPVHEEVKAPDLNGYYSCDDSALAVEKVIESDHFHLNREQPLQTNNIGNISCRTDSGGTYVNSWFSIVKEKIEKINVLYVARVMTFFMEKLVTLFRYLTFEFWRTQNNVHPPITMEHNINNHSAAVETASERDYILPCVQRLQRLEKVFEELNNKPDGMPQEKEQMLMDSMDRIKSVEFDLEKTKRVLHAAVMKQLEIAELLENLKKSKCRQRRLFC

SEQ ID NO: 12416 - protein, 580 aa, Glycine max
MNASSRFTHSLKKRGKRKIDYRVPSVSIEDVRDAREETAVHELRQKLVERGSLPPRHDDYHTLLRFLKARDFNIEKTIQMWEEMLTWRKEYGTDTILEDFEFGELEEVLQYYPQGYHGVDKEGRPVYIERLGKAHPSRLMHITTIDRYLNYHVQEFERTLQEKFPACSIAAKRQISSTTTILDVQGLGMKNFSRTAANLLSAVTKIDSSYYPETLHQMYIVNAGSGFKKMLWPATQKFLDSKTIAKIQILDSKSLYKLLEVIDSSQLPDFLGGSCTCAAEGGCLRSNKGPWNDPDIMKLVHNEEATFVRQITRMPNGQHTFDSFQMHPLKERCSDTSTTAESGSDMNDYSSPNRHRSCPYPHLAPVHEEVKAPDLNGYYSCDDSALAVEKVIESDHFHLNREQPLQTNNIGNISCRTDSGGTYVNSWFSIVKEKIEKINVLYVARVMTFFMEKLVTLFRYLTFEFWRTQNNVHPPITMEHNINNHSAAVETASERDYILPCVQRLQRLEKVFEELNNKPDGMPQEKEQMLMDSMDRIKSVEFDLEKTKRVLHAAVMKQLEIAELLENLKKSKCRQRRLFC

SEQ ID NO: 12417 - DNA, 1315 bp, Glycine max
aaaattgagaaaaatttaaagaaatcaacacacacaaacacaacaacatatggaggtgctaagggtgcaaaccatagcttccaaatccaaagatgctgccatcccagccatgtttgttagggcagagacagagcaaccaggcatcacaaccgttcaaggggtgaaccttgaggtgccaattattgattttagtgacccagatgaagggaaagtggtgcatgagattttggaggcaagtagggactggggcatgttccaaattgtgaaccatgacatacctagtgatgttataagaaagttgcaaagtgttgggaaaatgttctttgagttgccacaagaggaaaaagagttgattgctaagcctgctgggtctgattctattgaagggtatggcacaaagcttcagaaagaggtgaatggcaagaaagggtgggtggatcatttgttccacattgtgtggcctccttcctccatcaactacagtttctggccccaaaaccccccttcttacagggaagttaatgaggaatattgcaagcacctaagaggagtggtagacaaattgttcaaaagtatgtcggtagggttggggcttgaagagaatgagctaaaggagggtgcaaatgaagatgacatgcattatcttttaaaaatcaattattacccaccttgtccatgtcctgatctggtcttgggtgtgccaccacacacagacatgtcctacctcacaattctggtgcctaacgaggtgcagggccttcaagcatgtagggatggccattggtacgatgttaagtatgtccccaatgccctcgttattcacattggcgaccaaatggagatactgagcaatggaaaatataaggcagtttttcacagaacaacagtgaacaaagatgagacaagaatgtcgtggcccgtgttcatagaacccaaaaaggaacaagaagttggtcctcacccaaagttggttaaccaagacaatccaccaaaatacaaaaccaagaaatacaaggattatgcttattgtaagctcaataagatccctcaatgaatgaagtgggcactacgagataattatagctcatggtttctctgttttgttatttaatttatggaatgaaagtgtgacttgtgggaagtagattaaataagatctgtgactaatgttggtttctctgttttgttatttaatttatggaatgaaagtgtgacttgtgggaagtagattaaataagatctgtgactaatgttggattaatcttatgcttttgaagtaaataaagatgacaagaaacagtttgtctgttctgtt

SEQ ID NO: 12418 - protein, 334 aa, Glycine max
MEVLRVQTIASKSKDAAIPAMFVRAETEQPGITTVQGVNLEVPIIDFSDPDEGKVVHEILEASRDWGMFQIVNHDIPSDVIRKLQSVGKMFFELPQEEKELIAKPAGSDSIEGYGTKLQKEVNGKKGWVDHLFHIVWPPSSINYSFWPQNPPSYREVNEEYCKHLRGVVDKLFKSMSVGLGLEENELKEGANEDDMHYLLKINYYPPCPCPDLVLGVPPHTDMSYLTILVPNEVQGLQACRDGHWYDVKYVPNALVIHIGDQMEILSNGKYKAVFHRTTVNKDETRMSWPVFIEPKKEQEVGPHPKLVNQDNPPKYKTKKYKDYAYCKLNKIPQ

SEQ ID NO: 12419 - protein, 314 aa, Glycine max
MFVRAETEQPGITTVQGVNLEVPIIDFSDPDEGKVVHEILEASRDWGMFQIVNHDIPSDVIRKLQSVGKMFFELPQEEKELIAKPAGSDSIEGYGTKLQKEVNGKKGWVDHLFHIVWPPSSINYSFWPQNPPSYREVNEEYCKHLRGVVDKLFKSMSVGLGLEENELKEGANEDDMHYLLKINYYPPCPCPDLVLGVPPHTDMSYLTILVPNEVQGLQACRDGHWYDVKYVPNALVIHIGDQMEILSNGKYKAVFHRTTVNKDETRMSWPVFIEPKKEQEVGPHPKLVNQDNPPKYKTKKYKDYAYCKLNKIPQ

SEQ ID NO: 12420 - protein, 267 aa, Glycine max
MFQIVNHDIPSDVIRKLQSVGKMFFELPQEEKELIAKPAGSDSIEGYGTKLQKEVNGKKGWVDHLFHIVWPPSSINYSFWPQNPPSYREVNEEYCKHLRGVVDKLFKSMSVGLGLEENELKEGANEDDMHYLLKINYYPPCPCPDLVLGVPPHTDMSYLTILVPNEVQGLQACRDGHWYDVKYVPNALVIHIGDQMEILSNGKYKAVFHRTTVNKDETRMSWPVFIEPKKEQEVGPHPKLVNQDNPPKYKTKKYKDYAYCKLNKIPQ

SEQ ID NO: 12421 - DNA, 1397 bp, Glycine max
atcatcaagtacgtggtctcttgaaaacgacaccatttcctctgtggcacggatccacctgaaatttgagattccttcgaattgttaactctctcaatttcaagttggaaactttttcgattttcgctttctggaggtgtgaattgttatttgaaagtcacaagcaatggtgaaggacactgcatattatgacatattaggtgtcaattttgatgcatctgctgcagagatcaagaaggcttattatgtcaaggctagaattgttcaccccgataaaaatcctggggatcctaaggccgcagaaaattttcagaaacttggtgaggcttaccaggttttaagtgatcctgggaagcgtgcagcatatgatgagcatggaaaggagggagtaccacaagattccatgatggaccctacaactgtatttggaatgatttttggaagtgaatattttgaagaatatattggaaaacttgcacttgcttctttatcatctatagaaatcgaggaagactcacaggatcctgaagttctgaggcagagaattcaagaaaagatgaaagcatggcagaaggaaagggagcagaagctttcaacaattctgaaagatcgcctgcaaccatttgttgatgatcgagaagatgaatttacagcatgggcacaatcagaagcacgtagtctttctaaagctgcttttggagaagccatgctacatacaattggttacatctacacgcgaaaatctgcaagagaacttggaaaggatatgcggtatatgaatgttccctttttggcagagtgggtgcgagacaaaggacaccgtataaaatcacaagtaacagcagcctcaggagctgtgtccctcattcaaatacaagaagaactcaagaagctaaaccaaggagaaaacaaagaagaaagcatagtcaaagctattgaagataagaaggatgccatgattaattctctatggcagatcaatgttattgatattgaatcaactctgtcacgtgtttgccaagctgttcttaaagatccaagtgcctccaaagatgttctgaagtctcgagccaaagcattgaaaaagttaggaactatctttcaaggtgctaagtctgcttataacagagaaaacagcctacgcaaggaaagtgacaaaacatcagatgctgcttcctcatcatagtcatcttgttcagtttgtcatgagcggtattcttatggccttctgactcagtggattttgaacattgtttcttacagtgctgttaataggcatggtatgtaatttcacttggacttatggattggattaagctgccataattacacacacttgtatttaattattatcatctattgataattgatttcgtttcattttttttaccatatct

SEQ ID NO: 12422 - protein, 339 aa, Glycine max
MVKDTAYYDILGVNFDASAAEIKKAYYVKARIVHPDKNPGDPKAAENFQKLGEAYQVLSDPGKRAAYDEHGKEGVPQDSMMDPTTVFGMIFGSEYFEEYIGKLALASLSSIEIEEDSQDPEVLRQRIQEKMKAWQKEREQKLSTILKDRLQPFVDDREDEFTAWAQSEARSLSKAAFGEAMLHTIGYIYTRKSARELGKDMRYMNVPFLAEWVRDKGHRIKSQVTAASGAVSLIQIQEELKKLNQGENKEESIVKAIEDKKDAMINSLWQINVIDIESTLSRVCQAVLKDPSASKDVLKSRAKALKKLGTIFQGAKSAYNRENSLRKESDKTSDAASSS

SEQ ID NO: 12423 - protein, 260 aa, Glycine max
MMDPTTVFGMIFGSEYFEEYIGKLALASLSSIEIEEDSQDPEVLRQRIQEKMKAWQKEREQKLSTILKDRLQPFVDDREDEFTAWAQSEARSLSKAAFGEAMLHTIGYIYTRKSARELGKDMRYMNVPFLAEWVRDKGHRIKSQVTAASGAVSLIQIQEELKKLNQGENKEESIVKAIEDKKDAMINSLWQINVIDIESTLSRVCQAVLKDPSASKDVLKSRAKALKKLGTIFQGAKSAYNRENSLRKESDKTSDAASSS

SEQ ID NO: 12424 - protein, 259 aa, Glycine max
MDPTTVFGMIFGSEYFEEYIGKLALASLSSIEIEEDSQDPEVLRQRIQEKMKAWQKEREQKLSTILKDRLQPFVDDREDEFTAWAQSEARSLSKAAFGEAMLHTIGYIYTRKSARELGKDMRYMNVPFLAEWVRDKGHRIKSQVTAASGAVSLIQIQEELKKLNQGENKEESIVKAIEDKKDAMINSLWQINVIDIESTLSRVCQAVLKDPSASKDVLKSRAKALKKLGTIFQGAKSAYNRENSLRKESDKTSDAASSS

SEQ ID NO: 12425 - DNA, 1287 bp, Glycine max
tttttattaatataatttatccgttaaactttaatcgatagatttattatcattttaagtttagttaaaaaataatattatcttttgtaggaaagataataaattattattgtttttaaaatattattgtttattgaatcttactaacgagtgtctttaggagaaatttacatattctaaggtcgtgacattacatgacttgatagaagatatgggtaaagaaattgtcagaagagaatcaccgaaagagcctggggagcgtagcaggttatggtcccatgaggatataaatcaagttttacaagaaaacaaggggactagaaagattgaaatcatatgtatgaatttttcctcatctggagaagaagtagaatgggatggagatgccttcaaggagatgaaaaatctgaaaacacttattatcaagagtgattgtttttccaaaggtcccaaacatcttccaaatactttaagagtattggaatggtggagatgtccttcacaggaatggccacgtaattttaacccaaagcaacttgctatatgcaagttacccgagagtagctttacgtcactcgggttggccccattatttgaaaagaggctcgtgaatttgacaaggttaactttggacgagtgtgatagtttaacagagataccagatgtatcttgtctctcaaatttggaaaatttgtcatttggagagtgtcggaatttatttacaattcaccattcagttggtttattggaaaagcttaaaatcttggatgctcaagattgcccaaagcttaagagttttccaccgttgaagttgacctctcttgaaaggcttgaactttggtattgttggagtctcgagagtttttctgaaatattaggaaagatggaaaatataacagaacttttcttgactgattgtcccataacaaaactcccaccttcatttcgaaatcttactcggcttcgatccttatgtcttggaccccatcaccgaactgagcagttaattgactttgatgctgccaccctcattccgaacatctgcatgatgccagaactaagtcaaattgagtttggcggtttgcaattgaggctattgcctgacgatgttttgaaattgacctcagttgtgtgtccaagcattcgatttgtttgtttctattactgcgacctgtcagatgagcttcttcggctatttctctcatgttttgtaaatgtgataaatttaaagctaacaagttgtaaattcacagttattcccgaatgcatcaaagaatgccgcttttc

SEQ ID NO: 12426 - protein, 358 aa, Glycine max
MGKEIVRRESPKEPGERSRLWSHEDINQVLQENKGTRKIEIICMNFSSSGEEVEWDGDAFKEMKNLKTLIIKSDCFSKGPKHLPNTLRVLEWWRCPSQEWPRNFNPKQLAICKLPESSFTSLGLAPLFEKRLVNLTRLTLDECDSLTEIPDVSCLSNLENLSFGECRNLFTIHHSVGLLEKLKILDAQDCPKLKSFPPLKLTSLERLELWYCWSLESFSEILGKMENITELFLTDCPITKLPPSFRNLTRLRSLCLGPHHRTEQLIDFDAATLIPNICMMPELSQIEFGGLQLRLLPDDVLKLTSVVCPSIRFVCFYYCDLSDELLRLFLSCFVNVINLKLTSCKFTVIPECIKECRF

SEQ ID NO: 12427 - protein, 315 aa, Glycine max
MNFSSSGEEVEWDGDAFKEMKNLKTLIIKSDCFSKGPKHLPNTLRVLEWWRCPSQEWPRNFNPKQLAICKLPESSFTSLGLAPLFEKRLVNLTRLTLDECDSLTEIPDVSCLSNLENLSFGECRNLFTIHHSVGLLEKLKILDAQDCPKLKSFPPLKLTSLERLELWYCWSLESFSEILGKMENITELFLTDCPITKLPPSFRNLTRLRSLCLGPHHRTEQLIDFDAATLIPNICMMPELSQIEFGGLQLRLLPDDVLKLTSVVCPSIRFVCFYYCDLSDELLRLFLSCFVNVINLKLTSCKFTVIPECIKECRF

SEQ ID NO: 12428 - protein, 296 aa, Glycine max
MKNLKTLIIKSDCFSKGPKHLPNTLRVLEWWRCPSQEWPRNFNPKQLAICKLPESSFTSLGLAPLFEKRLVNLTRLTLDECDSLTEIPDVSCLSNLENLSFGECRNLFTIHHSVGLLEKLKILDAQDCPKLKSFPPLKLTSLERLELWYCWSLESFSEILGKMENITELFLTDCPITKLPPSFRNLTRLRSLCLGPHHRTEQLIDFDAATLIPNICMMPELSQIEFGGLQLRLLPDDVLKLTSVVCPSIRFVCFYYCDLSDELLRLFLSCFVNVINLKLTSCKFTVIPECIKECRF

SEQ ID NO: 12429 - DNA, 1529 bp, Glycine max
ggcacgaggcaaaattaatcatcttacttatttattctccgaaaatggttgatttacattggaaatcaaagatgccaagttccgacatgccttccaaaactctaaaactctctctctccgacaacaagtccttaccctctttgcaactacccttccgcaccacagatatctctcacgccgcaccttctgtttgcgccacttacgactactatctccgtcttcctcaactcagaaagctttggaactcctcagattttcctaattggaacaacgaaccaatcttaaaacctatcttgcaagctctcgaaatcaccttccgctttctctccattgttctctccgatccaagaccttactccaaccacagagaatggactcgcaggatagagtctcttatcacacatcaaattgaaatcattgccatactttgtgaagatgaggaacaaaattccgacacacgtggcactgcaccaaccgctgatctcagcaggaacaatagcagcgagagcagaagctacagcgaggcaagcctgcttccgcggcttgccacgtggtacaaatccaaggacgtagcgcagaggatccttctctcagttgaatgccaaatgaggaggtgttcctacacgctgggtttgggtgagccgaacctagcgggcaaaccgagcctgctctacgacctcgtgtgtaagccgaacgagatccacgcgctgaagacgacgccgtacgatgagcgcgtagagaatcacgagaaccacgcgttgcacgcgacgcaccagatcgccgagtcgtggatccacgcgtcgcggaaggttctagaggggatcgcagacgcggtgctctccagaaccttcgagaaggcggctgaggactgctacgccgtggaaaggatctggaagcttctcgcggaggtggaggacctccacctgatgatggatccggacgatttcttgagactgaagaatcagctctcggtgaaatcctccggcggcgaaacggcttcgttctgcttcaggtcgaaggagttggttgaactgacgaagatgtgcagagatctgaggcacaaggtgccggagatattggaggtggaggtggatccgaagggaggaccgaggattcaagaggcggcgatgaagctctacgtttcgaagagcgcgttcgagaaggttcacttgttgcaggcgatgcaggcgattgaggcggcgatgaagagattcttctacgcgtataagcaggtgttggcggtggtgatgggaagctccgaggctaacggtaaccgagttgggttgagttgcgactcggctgactcgttgactcagattttccttgaaccgacgtattttccaagcttggatgccgccaagacttttcttggatacttgtgggataataacgataataacaaatggatatgataagggaaaaaaaaaaacggcacaaaaacgatggccaaagtgaaattttcggtttgggcattttatggataatgttattcagtttagtttggtagtgttacacctcaataaagaggg

SEQ ID NO: 12430 - protein, 469 aa, Glycine max
HEAKLIILLIYSPKMVDLHWKSKMPSSDMPSKTLKLSLSDNKSLPSLQLPFRTTDISHAAPSVCATYDYYLRLPQLRKLWNSSDFPNWNNEPILKPILQALEITFRFLSIVLSDPRPYSNHREWTRRIESLITHQIEIIAILCEDEEQNSDTRGTAPTADLSRNNSSESRSYSEASLLPRLATWYKSKDVAQRILLSVECQMRRCSYTLGLGEPNLAGKPSLLYDLVCKPNEIHALKTTPYDERVENHENHALHATHQIAESWIHASRKVLEGIADAVLSRTFEKAAEDCYAVERIWKLLAEVEDLHLMMDPDDFLRLKNQLSVKSSGGETASFCFRSKELVELTKMCRDLRHKVPEILEVEVDPKGGPRIQEAAMKLYVSKSAFEKVHLLQAMQAIEAAMKRFFYAYKQVLAVVMGSSEANGNRVGLSCDSADSLTQIFLEPTYFPSLDAAKTFLGYLWDNNDNNKWI

SEQ ID NO: 12431 - protein, 455 aa, Glycine max
MVDLHWKSKMPSSDMPSKTLKLSLSDNKSLPSLQLPFRTTDISHAAPSVCATYDYYLRLPQLRKLWNSSDFPNWNNEPILKPILQALEITFRFLSIVLSDPRPYSNHREWTRRIESLITHQIEIIAILCEDEEQNSDTRGTAPTADLSRNNSSESRSYSEASLLPRLATWYKSKDVAQRILLSVECQMRRCSYTLGLGEPNLAGKPSLLYDLVCKPNEIHALKTTPYDERVENHENHALHATHQIAESWIHASRKVLEGIADAVLSRTFEKAAEDCYAVERIWKLLAEVEDLHLMMDPDDFLRLKNQLSVKSSGGETASFCFRSKELVELTKMCRDLRHKVPEILEVEVDPKGGPRIQEAAMKLYVSKSAFEKVHLLQAMQAIEAAMKRFFYAYKQVLAVVMGSSEANGNRVGLSCDSADSLTQIFLEPTYFPSLDAAKTFLGYLWDNNDNNKWI

SEQ ID NO: 12432 - protein, 446 aa, Glycine max
MPSSDMPSKTLKLSLSDNKSLPSLQLPFRTTDISHAAPSVCATYDYYLRLPQLRKLWNSSDFPNWNNEPILKPILQALEITFRFLSIVLSDPRPYSNHREWTRRIESLITHQIEIIAILCEDEEQNSDTRGTAPTADLSRNNSSESRSYSEASLLPRLATWYKSKDVAQRILLSVECQMRRCSYTLGLGEPNLAGKPSLLYDLVCKPNEIHALKTTPYDERVENHENHALHATHQIAESWIHASRKVLEGIADAVLSRTFEKAAEDCYAVERIWKLLAEVEDLHLMMDPDDFLRLKNQLSVKSSGGETASFCFRSKELVELTKMCRDLRHKVPEILEVEVDPKGGPRIQEAAMKLYVSKSAFEKVHLLQAMQAIEAAMKRFFYAYKQVLAVVMGSSEANGNRVGLSCDSADSLTQIFLEPTYFPSLDAAKTFLGYLWDNNDNNKWI

SEQ ID NO: 12433 - DNA, 1072 bp, Glycine max
  misc_feature (887)..(887): n is a, c, g, or t
ggagaattcagagtgtagaatccatttacatcagaagaattcgtcagtgaaagaatcgttttcttcagatctcacaattagagagcgatggaatatctagggattgatctaagctgcgccgttggatctctccgccacggccagttcccggagaaggattgcttgctccctctcatttccaaactcctcggctacgccatcgtcgccgcttccaccaccgtcaaacttccccagattatgaaaattctgaagcatcagagtgtgagaggccttagcatgatatccttcgagcttgaagttattggatataccattgccttggcttactgtctccacaaaggccttccattttcggcttacggagagttgttgtttcttttgatccaagctttagtattggttgccataatctactactattctcgacctttgcatgcaataacatggatccgggcattgctatattgtgctgtagcacccactatcttagctggtcaaattgatcctctactctttgaagctctgtatgcatcacagcatgcaatctttctctttgcaaggatcccacaaatatggcaaaacttttctaacaaaagtacaggtgaactcagcttcataacttcttttatgaattttggaggttcaatggttagagtattcaccaccatccaagaaagtgcaccaaaaagtgttctattgggctatgcaattggtgtcgcaacaaattttaccatcttgagtcagattatagcataccaaaagcctcaggttggaaaggagaagaaaacaaagtaatagaaccgtatcaggttgtgtatatctcatcatccgggccaaccctctgcaggtgccacggcatccagtccatacacagaattttgtcagtnttcaatcgaacattaccttatttcagatttcaactgctgctaggtgattattatcatttttattttggactgtaggcagcagtgtaaaagtaacaggtgattattatcatttttattttggtacctgagatacttgagcttcatgattttatcgttatttatcaaagctaaaatttaaaggatgc

SEQ ID NO: 12434 - protein, 235 aa, Glycine max
MEYLGIDLSCAVGSLRHGQFPEKDCLLPLISKLLGYAIVAASTTVKLPQIMKILKHQSVRGLSMISFELEVIGYTIALAYCLHKGLPFSAYGELLFLLIQALVLVAIIYYYSRPLHAITWIRALLYCAVAPTILAGQIDPLLFEALYASQHAIFLFARIPQIWQNFSNKSTGELSFITSFMNFGGSMVRVFTTIQESAPKSVLLGYAIGVATNFTILSQIIAYQKPQVGKEKKTK

SEQ ID NO: 12435 - protein, 185 aa, Glycine max
MKILKHQSVRGLSMISFELEVIGYTIALAYCLHKGLPFSAYGELLFLLIQALVLVAIIYYYSRPLHAITWIRALLYCAVAPTILAGQIDPLLFEALYASQHAIFLFARIPQIWQNFSNKSTGELSFITSFMNFGGSMVRVFTTIQESAPKSVLLGYAIGVATNFTILSQIIAYQKPQVGKEKKTK

SEQ ID NO: 12436 - protein, 172 aa, Glycine max
MISFELEVIGYTIALAYCLHKGLPFSAYGELLFLLIQALVLVAIIYYYSRPLHAITWIRALLYCAVAPTILAGQIDPLLFEALYASQHAIFLFARIPQIWQNFSNKSTGELSFITSFMNFGGSMVRVFTTIQESAPKSVLLGYAIGVATNFTILSQIIAYQKPQVGKEKKTK

SEQ ID NO: 12437 - DNA, 1466 bp, Glycine max
aaatgcttttgcttgcagaggtttatgagcataaaatttatcgatatctagagaatccgatggaaccattgaattcaataaaggacgatgagcatattgtggcctatcgagtcaaaagtggagccaggaaaacaaaagttgaaataatgcatcgatggctggataatatgaaggctggagacaggaagctctttgggaccccgttggttacttatttggtagaagatcctcaatttggagccaacattgaggcatctgtacataaaatgttggaacctttaagaaaagcatattcctcaagtaagtctcatgatgggaaggaaaatggtttcatctcagctggcagtgatgagcaatcaaacatctccaatactcaaagtgaatctcagagtttaacaactggcaacaaagaacaagagggaacatcctgtggggagtcatctttccaacttgttttaactaacgaatgctgtttgagttgtgaacccattgagaaggcttcttttataaaacccaaccaagttgtaagagtctttcttgactggactgacaaagaacatgaattatatgatgctagctacctgagggatctcccggaagttcacaaaactggattcactgtgaaaaaaacccggcaagaagctatttctttgttttcttgcttggaggcattcttgactgaagaacctcttggaccagatgacatgtggtactgccctagatgcaaggaacacagacaagctacaaagaagcttgacttgtggaaattgccggagattcttgtttttcacttgaaacggttctcatacagtagatacctgaaaaacaaacttgacacttttgtgaattttcccattcacaatctggatttaactaaatatgtgaaaagcaaggatggaccgtcttatgtgtatgacctttatgcaatcagcaaccattatggtggtctaggtggtgggcattacactgcgtattgtaagttgatcgatgaaaataaatggttccatttcgacgatagtcatgtctcttctgttactgaagctgaaattaaatcttcagctgcatatgtgttattttatcagagaaatagaattaaaggccagatggaaggggagacatctcaggttcatacagtatagatcctgatggggcattttgttgcttgatgcctattttacatgcttagcagttagcacaaagcggagcttttgtcctggatagttattttacttcgcagtgcaagactgccaggtaaaatatgagacaaaatgttccggtagtgaaaagagcaattaaacaaaaatgtttaggtgaggctctggtagttttcagttcttaatcactacatgaatgatatcattttttgatagagaaattttggcagtctatgaacttgagatatttctgttatttcatttcattggaggttaaaacagatcatcatgaattcaccataattgctgttt

SEQ ID NO: 12438 - protein, 378 aa, Glycine max
MLLLAEVYEHKIYRYLENPMEPLNSIKDDEHIVAYRVKSGARKTKVEIMHRWLDNMKAGDRKLFGTPLVTYLVEDPQFGANIEASVHKMLEPLRKAYSSSKSHDGKENGFISAGSDEQSNISNTQSESQSLTTGNKEQEGTSCGESSFQLVLTNECCLSCEPIEKASFIKPNQVVRVFLDWTDKEHELYDASYLRDLPEVHKTGFTVKKTRQEAISLFSCLEAFLTEEPLGPDDMWYCPRCKEHRQATKKLDLWKLPEILVFHLKRFSYSRYLKNKLDTFVNFPIHNLDLTKYVKSKDGPSYVYDLYAISNHYGGLGGGHYTAYCKLIDENKWFHFDDSHVSSVTEAEIKSSAAYVLFYQRNRIKGQMEGETSQVHTV

SEQ ID NO: 12439 - protein, 359 aa, Glycine max
MEPLNSIKDDEHIVAYRVKSGARKTKVEIMHRWLDNMKAGDRKLFGTPLVTYLVEDPQFGANIEASVHKMLEPLRKAYSSSKSHDGKENGFISAGSDEQSNISNTQSESQSLTTGNKEQEGTSCGESSFQLVLTNECCLSCEPIEKASFIKPNQVVRVFLDWTDKEHELYDASYLRDLPEVHKTGFTVKKTRQEAISLFSCLEAFLTEEPLGPDDMWYCPRCKEHRQATKKLDLWKLPEILVFHLKRFSYSRYLKNKLDTFVNFPIHNLDLTKYVKSKDGPSYVYDLYAISNHYGGLGGGHYTAYCKLIDENKWFHFDDSHVSSVTEAEIKSSAAYVLFYQRNRIKGQMEGETSQVHTV

SEQ ID NO: 12440 - protein, 330 aa, Glycine max
MHRWLDNMKAGDRKLFGTPLVTYLVEDPQFGANIEASVHKMLEPLRKAYSSSKSHDGKENGFISAGSDEQSNISNTQSESQSLTTGNKEQEGTSCGESSFQLVLTNECCLSCEPIEKASFIKPNQVVRVFLDWTDKEHELYDASYLRDLPEVHKTGFTVKKTRQEAISLFSCLEAFLTEEPLGPDDMWYCPRCKEHRQATKKLDLWKLPEILVFHLKRFSYSRYLKNKLDTFVNFPIHNLDLTKYVKSKDGPSYVYDLYAISNHYGGLGGGHYTAYCKLIDENKWFHFDDSHVSSVTEAEIKSSAAYVLFYQRNRIKGQMEGETSQVHTV

SEQ ID NO: 12441 - DNA, 1053 bp, Glycine max
  misc_feature (127)..(127): n is a, c, g, or t
  misc_feature (898)..(898): n is a, c, g, or t
  misc_feature (959)..(959): n is a, c, g, or t
acagtgaaatcaatgagcagatttggagattacaggttgcaatattgtacacttgaattccagagagaaatacttgaatctgtgaaacaatgaaaagtttgctcattctatagttaattttgtgtanaaaagtatatattattctctcaaatgattaagcagatgctgatcaatctagaccaaacaaaatggatatacttgactgtttcttatggtgtataaaaaagaaggtttgagtaatggtataaattacctgccaggctaaatatgtttgggctgtaagatttccttcttgtctctagaataaaagtaacattttatttgaatttccattgattagtaattgattatgtgtcattgcattatttcttcatttcttcagttcttcttctgcaccagggaacttcttaaaggaccactgtattatgccgcaactattactttggcagccataatatactggagaacttcacctatttccattgctgcaatatgtaatctgtgtgcaggagatggtaatgttgccacagccaatttccctggaattaggcaatgttttagctgcactaggaattcttttaaaaatattaaaattagaaagaaaaaagcccatctctacatcactgttacaagaaggaaaccttatggtgttactccctagaatgattgtttcagattcttattcttaatttgttgtttcaggcatggctgacattgttggaaggcgacttggcggtgaaaagataccttacaacaaaaacaagtccttcgctggttcaattgcaatggcaactgctggattcttaacttccattgggtatatgtggtatttttcctcatttggatttattgagggaagctggaaattggttctaggttttctgttagtgtctattgngacagcatttgtcgagtccctgcctatcagcacagagcttgatgacaacctcacagttccnctcacttccatattggtgggcagtatcattctttgatatgaagcatattgcagtaaaacaaatcagacactaggaatcagttctctacatcttt

SEQ ID NO: 12442 - protein, 103 aa, Glycine max
MCHCIISSFLQFFFCTRELLKGPLYYAATITLAAIIYWRTSPISIAAICNLCAGDGNVATANFPGIRQCFSCTRNSFKNIKIRKKKAHLYITVTRRKPYGVTP

SEQ ID NO: 12443 - protein, 96 aa, Glycine max
  misc_feature (65)..(65): Xaa can be any naturally occurring amino acid
  misc_feature (85)..(85): Xaa can be any naturally occurring amino acid
MADIVGRRLGGEKIPYNKNKSFAGSIAMATAGFLTSIGYMWYFSSFGFIEGSWKLVLGFLLVSIXTAFVESLPISTELDDNLTVXLTSILVGSIIL

SEQ ID NO: 12444 - protein, 69 aa, Glycine max
  misc_feature (38)..(38): Xaa can be any naturally occurring amino acid
  misc_feature (58)..(58): Xaa can be any naturally occurring amino acid
MATAGFLTSIGYMWYFSSFGFIEGSWKLVLGFLLVSIXTAFVESLPISTELDDNLTVXLTSILVGSIIL

SEQ ID NO: 12445 - DNA, 1869 bp, Glycine max
  misc_feature (532)..(532): n is a, c, g, or t
tttcatcgcgggtgatattggtggagagatatagcaatgatatgtattaggtgatgattcacagttgcaagcctttcttgttgaggaggataggtctacgccaaacaggttccaggatttgcattcctctgatgaaagcctatcctggcttccagagataataaaagattttgttctaccagcaggctttcctggatcagtttcagatgattacttggattacatgttattacagttccctaccaatgtgactggatggatctgtcacaccctagtcacttcaagtcttctaaaggtgggtctcaaaggatggcattggagctgttggacgcttattcattggtgggagatttggaagcctttttgatgatgatcccaagcaatggagaatgtatgcggacttcattggcagtgctggaagcatttttgatctgacaacccaactatatcctgcctatttccttcctttggcatctcttggaaatcttaccaaggctgtagcaagagggctaaaagatccttcttttcgtgngattcaaaaccactttgcaatttcaggaaatctaggagaggtagctgcaaaggaagaagtttgggaagtggttgctcaactggttggcctttctttaggcatattgattctggatcacctggccttgtaaaatcatatggtgtaatttcgttaacttggttgagtatgcgactactgcatctttggctacgttatgaatcactttcagttctccagtttaacacaataaatataaagcgtgctcgcatactggtaaaatcacatgtgttacactccactgttccaggatgcaccgattgcaacagagaagaaaatatattagcctggtctcaattcatgaagccaaaaataatttttggcttgcccttggagaaaatggatggtgtggagagatcttattttatggtggaggcacttataaaattatatgcaagtgagaaatatattcttatggtgaatcaacagacagaagatttgagattttatgtttctttcaaggttggagctacaaatgtatcggtattgcgaagtgtgtggcagagtttctggctaagtgagaactgggatagcgatgataatgttcgtgatcaaattgctactagcctaatggaattggaagaaaagtttgaggatttcattcaaaagttgaaagatgcagaatgggatacccagcaattaaatttgaaggttcccaaagaaatcttcattgatgacaataccaattctctctaaattctaaaatggtgaagctgagaatgttgggtagtgcaaaatgatatgacctcataaaatgtgatctaccaaattgtaaattctgtaagcagttttgcaagcattcagagcaagatatctattttcacgtgtagatattcaacaaagggagacacaaaatttatggtggccaattggcttatagtcctaactcattaattaccaaatatgtgctttgatactgctttcttactttcttagggaggatcctattgtaaaaaaattgttctcaattttgtttaaagtctttcttgtatgtaattttgtggggggaaattttttcatgcttggtattcaggacttttgtgggtgtacaatttgttaatcctgctatctgtaatgttaaagcggttcattattctgtcttgatcataaaaatgttcatttctttaccttttaagagagacattaatgctgttttaatcaaattaattgccctatagtgttaaagtctagcttcgtggttggcttgtgcatgtggtaccatttaaccatatatgtgatgcctttaattatgtaggttcttgtggagctgtcgtactttagaggtaaagaactagagtttc

SEQ ID NO: 12446 - protein, 188 aa, Glycine max
MRLLHLWLRYESLSVLQFNTINIKRARILVKSHVLHSTVPGCTDCNREENILAWSQFMKPKIIFGLPLEKMDGVERSYFMVEALIKLYASEKYILMVNQQTEDLRFYVSFKVGATNVSVLRSVWQSFWLSENWDSDDNVRDQIATSLMELEEKFEDFIQKLKDAEWDTQQLNLKVPKEIFIDDNTNSL

SEQ ID NO: 12447 - protein, 131 aa, Glycine max
MKPKIIFGLPLEKMDGVERSYFMVEALIKLYASEKYILMVNQQTEDLRFYVSFKVGATNVSVLRSVWQSFWLSENWDSDDNVRDQIATSLMELEEKFEDFIQKLKDAEWDTQQLNLKVPKEIFIDDNTNSL

SEQ ID NO: 12448 - protein, 118 aa, Glycine max
MDGVERSYFMVEALIKLYASEKYILMVNQQTEDLRFYVSFKVGATNVSVLRSVWQSFWLSENWDSDDNVRDQIATSLMELEEKFEDFIQKLKDAEWDTQQLNLKVPKEIFIDDNTNSL

SEQ ID NO: 12449 - DNA, 1778 bp, Glycine max
gattcataaccttaaaccggagcaaagagacaagcgagaatagcagtgtggtctctctctcactccaactctaaccacagagacaacaattcaacaacgttgcttcgacgacaatggaatctgcgcttacagcttctaactggaaccgttctttgattcggattcgccacactaggccacgcttcgttgccactcgccccacagcaatacggtgctccatcaactcgtatcgcttgtccaacctcactccctctgagcttcagagcctcaagagccgacctcgtatcgatttctcttccattttcagtgttgttaaccccattgtcgatgatgttcacaaaagaggggatgctgcagttaaagaatatacttcaaagtttgataaagttgaattggataaagtagttgaggttgtctcggagctccctgaccctgtgcttgatccacctattaaggaagctttcgatgttgcctacgacaatatttatgcatttcatgctgctcagaagtcacccgagaaaagtgttgagaacatgaaaggagtccaatgcaagagagttgcaagaagtattaactccgtgggtctttatgttccagggggaactgctgtattaccttcaacagctttgatgcttgcagttcctgcacaaattgcaggatgtaaaactattgttcttgcaaatcctccaactcgggatggcactacatgcaaggaggtactgtattgtgcaaaaaaggctggggtgactcacattctcaaagctggaggagcacaggccatatctgctatggcttggggaacagaaacttgtccaaaggttgaaaagatttttggccctggaaaccaatatgtcactgctgcaaaaatgatacttcaaaacagtgaagccatgatttcaattgacatgccggctggtccatctgaagttttggtcattgcagacaagcatgcaattccttctcatgtagcagctgatttgctttcccaggctgagcatggtccagatagtcaggttgttcttgtgattgttggagatggtgtggatctgaatgcaatacaggaggaactcagcaagcagtgcgagagtcttccaagaggcgagtttgcctccaaagctctgagccacagtttttttgtgtatgcacgtgatatgcttgaggctatcaatttctcaaacttatatgcacctgagcatctaattatcaatgtgaaagatgcagagaagtgggagagtttcattgagaatgcaggttctgtgtttttagggccttggacacctgagagtgttggtgattatgcaagcgggacaaaccatgtccttcctacttatggctatgcaagaatgtatggtggtgtgtcattggactccttcctgaagtacataactgtgcagtctctttcggaggaaggtctaagaaggcttgggccatatgtagcaaccatggctgaagttgaaggccttgaagcccacaagagagcagttaccttgagacttcaggacatagaagccaggcaggtttcaagatgagatgatgcctcaattcattgttctctttatctcttgtaagctactatagctcttagtttttgccaagtctagggccattttcttgatgagattacctagatttaggtggcattagtagctagaagttgccatttcaagttcatgtaacaatagctggataacaaacatatactagtgcctaatatgttggtgatctttggttttgatcaatcaataatgcatccatttttttggttgcataattcatct

SEQ ID NO: 12450 - protein, 471 aa, Glycine max
MESALTASNWNRSLIRIRHTRPRFVATRPTAIRCSINSYRLSNLTPSELQSLKSRPRIDFSSIFSVVNPIVDDVHKRGDAAVKEYTSKFDKVELDKVVEVVSELPDPVLDPPIKEAFDVAYDNIYAFHAAQKSPEKSVENMKGVQCKRVARSINSVGLYVPGGTAVLPSTALMLAVPAQIAGCKTIVLANPPTRDGTTCKEVLYCAKKAGVTHILKAGGAQAISAMAWGTETCPKVEKIFGPGNQYVTAAKMILQNSEAMISIDMPAGPSEVLVIADKHAIPSHVAADLLSQAEHGPDSQVVLVIVGDGVDLNAIQEELSKQCESLPRGEFASKALSHSFFVYARDMLEAINFSNLYAPEHLIINVKDAEKWESFIENAGSVFLGPWTPESVGDYASGTNHVLPTYGYARMYGGVSLDSFLKYITVQSLSEEGLRRLGPYVATMAEVEGLEAHKRAVTLRLQDIEARQVSR

SEQ ID NO: 12451 - protein, 331 aa, Glycine max
MKGVQCKRVARSINSVGLYVPGGTAVLPSTALMLAVPAQIAGCKTIVLANPPTRDGTTCKEVLYCAKKAGVTHILKAGGAQAISAMAWGTETCPKVEKIFGPGNQYVTAAKMILQNSEAMISIDMPAGPSEVLVIADKHAIPSHVAADLLSQAEHGPDSQVVLVIVGDGVDLNAIQEELSKQCESLPRGEFASKALSHSFFVYARDMLEAINFSNLYAPEHLIINVKDAEKWESFIENAGSVFLGPWTPESVGDYASGTNHVLPTYGYARMYGGVSLDSFLKYITVQSLSEEGLRRLGPYVATMAEVEGLEAHKRAVTLRLQDIEARQVSR

SEQ ID NO: 12452 - protein, 299 aa, Glycine max
MLAVPAQIAGCKTIVLANPPTRDGTTCKEVLYCAKKAGVTHILKAGGAQAISAMAWGTETCPKVEKIFGPGNQYVTAAKMILQNSEAMISIDMPAGPSEVLVIADKHAIPSHVAADLLSQAEHGPDSQVVLVIVGDGVDLNAIQEELSKQCESLPRGEFASKALSHSFFVYARDMLEAINFSNLYAPEHLIINVKDAEKWESFIENAGSVFLGPWTPESVGDYASGTNHVLPTYGYARMYGGVSLDSFLKYITVQSLSEEGLRRLGPYVATMAEVEGLEAHKRAVTLRLQDIEARQVSR

SEQ ID NO: 12453 - DNA, 1206 bp, Glycine max
gaaaaggaagaaaatcttcatccgctcaatcgaagaataataatagtagtaataatgctcaagggaagagaaaagtcaaggtagctagatagtttgtattttgaacttgtggattggaccccagaattgcacaggcgattcgtgcaagctgtggaacagctaggagtggataaggcggtgccttcaaggattttggagattatgggaattgattgtctaactcgccataacattgctagtcaccttcaaaaatatagatctcataggaaacatttgctagcacgtgaagctgaagcagcaagctggagtcaaaggaggcaattgtatgctggtggagggaagagagaggggaatccatggttagcaccaatcatgggtttcccaccaatgaccaccccaatgcaccattttagacctctacatgtatgggggcacccttctatgtccttggtgcacatgtggcctaagcatctttcaaattcaccaccactcttatggccgctatcgccaccagctgtaccaccacaagacccttcattttggcaacaactggctcctaacgcactaatcccaggaacagcttgttttccacaacctctgacaccaacgagatttggaagcccccctgtccccggcatcccaccccatgccatgtacaaagcagatcacggcattggcgtccttggtcccagttccctcttggactttcatccgtcaaaggagtgcatagatgcagctattggagatgttttatcaaagccttggctgccgctacctattggacttaaggctccagctcttgatagtgtgatgagtgaattacaaaaacaaggaattccaaacattccaccctctagtgcttgaaaccaacccttcatggaagaggttcttccctttcatgtggtgtcctttgaaggccacttaaccctaattcgacgacttctcatccattagatgttgcattgcgtatatgttgcatctaagctacagtgtcagtgattcatatatttcttcatttgcttttaacagcaaaaggaatttaaagaagaaaagacttttaagacatttctaattttcatgtgctataatacatgagtcaaatggtttcaagtagtggtcattatagccattttgtatatgtacggttgtaaaggcagttattttgtaatagctgtataagctgaggaaatcctaataaaggacttt

SEQ ID NO: 12454 - protein, 220 aa, Glycine max
MGIDCLTRHNIASHLQKYRSHRKHLLAREAEAASWSQRRQLYAGGGKREGNPWLAPIMGFPPMTTPMHHFRPLHVWGHPSMSLVHMWPKHLSNSPPLLWPLSPPAVPPQDPSFWQQLAPNALIPGTACFPQPLTPTRFGSPPVPGIPPHAMYKADHGIGVLGPSSLLDFHPSKECIDAAIGDVLSKPWLPLPIGLKAPALDSVMSELQKQGIPNIPPSSA

SEQ ID NO: 12455 - protein, 163 aa, Glycine max
MGFPPMTTPMHHFRPLHVWGHPSMSLVHMWPKHLSNSPPLLWPLSPPAVPPQDPSFWQQLAPNALIPGTACFPQPLTPTRFGSPPVPGIPPHAMYKADHGIGVLGPSSLLDFHPSKECIDAAIGDVLSKPWLPLPIGLKAPALDSVMSELQKQGIPNIPPSSA

SEQ ID NO: 12456 - protein, 158 aa, Glycine max
MTTPMHHFRPLHVWGHPSMSLVHMWPKHLSNSPPLLWPLSPPAVPPQDPSFWQQLAPNALIPGTACFPQPLTPTRFGSPPVPGIPPHAMYKADHGIGVLGPSSLLDFHPSKECIDAAIGDVLSKPWLPLPIGLKAPALDSVMSELQKQGIPNIPPSSA

SEQ ID NO: 12457 - DNA, 1103 bp, Glycine max
accgcacgtccacaagaaaaacaaccacgattccaaagacaactttgccgtgttctctagttgaaaatacaacacccctttcttctcagtactttgctcaagtcaatggaagacgagactctgagttttgtcctctccactccctcaagaagctaccaatccaggctcaagtcacacttcgagctcttcatcgatcttgatgaggtcaatggggacgaggagttgaggacagcttatccatgccctttttgcgctgagaattttgatcttcttgagctatgttgccatgttgacttggaccatccaatagaagccaagtctgggatttgtcctgtttgtaccctgtggatagggacaaatatggttcatcatatagccgcacaacatggaaacctgcttaagatatcctttctggtttactgtctgatagaaatgtttttgtttattcaaaataaatagtagcatcagtttgctgcttttgtctcctctttaccagagtcttttttctgttctttgcccttcattttcattccactatgcacttcctttactggagattacagtcacctcaaatcaaaatgctacaaagatgaaccctaccctgctctttccttttcaagtaagggtgaacgagatggacactggcaatctttttctactgggttatctcccacaacctctaaggcagcaagcgatccatggctgtcattcttatgtggtccatctgctgttgatgaatgtgaaaatgtgcagccagattcttcaagtgaagtaagcattgaagaaatacactcaaatgataatgtgttagaaagagatgttcaaccgtctttatctgacaaagaccaaatagagaaagcacagcacagtaaatttgtacagggacttttgatgtctactatccttgatcctgacttttgattgagacgattaaggacacctgtcgctacttgctagtttcaattcgatgggtaaaaacaaaggagaaaaatagtagtttcaaccttgaaaatgattcatagtcataggatcaatgtttctgactaatctacatttaggaattaaatgtaatatatattcaagacaatgctatttattagttc

SEQ ID NO: 12458 - protein, 117 aa, Glycine max
MEDETLSFVLSTPSRSYQSRLKSHFELFIDLDEVNGDEELRTAYPCPFCAENFDLLELCCHVDLDHPIEAKSGICPVCTLWIGTNMVHHIAAQHGNLLKISFLVYCLIEMFLFIQNK

SEQ ID NO: 12459 - protein, 65 aa, Glycine max
RTSTRKTTTIPKTTLPCSLVENTTPLSSQYFAQVNGRRDSEFCPLHSLKKLPIQAQVTLRALHRS

SEQ ID NO: 12460 - protein, 61 aa, Glycine max
MNPTLLFPFQVRVNEMDTGNLFLLGYLPQPLRQQAIHGCHSYVVHLLLMNVKMCSQILQVK

SEQ ID NO: 12461 - DNA, 2098 bp, Glycine max
gaggaaaatactaaatcccaattcccatttcccacaacaacctctctctgtctctctctcttttcggcgcaggtccccttgttgtgtgtgacgctctcgcttgcatcagaacctactatataaacacagcgcgcgctcgaaaccttcttcaactcaaaaaaaaaaaaaaccaaaatcactcaataagaagaaggaacgaacactcgctctgcaaaagtgtgtgaacgaaccctaattaataaaaatggagaagaaggagaacggaccgagcgagaaggcttccaatggcggaatagatggacccacaaaccctatggtcacgcctctgctcaatgatctctaccaattcaccatggcttacgcttactggaaagctggcaagcagcaagaacgtgctgtgttcgatttgtattttcggaagaatccgtttggtggggaatatactgtcttcgctggcttggaagagtgcataaggttcatagctaatttcaagctcactgaggaggagatcgattttgttaggcaatgtttatcttcctcttgtgaggatggattccttgactacctaagaggactcgactgctctgatgttgaggtgtatgctattcctgagggaacagttgtttttcccaaggttcccctgatgagagttgaaggcccagttgctgttgttcaattgctggaaacaccttttgtgaatctaattaattatgcatctttagtttctactaatgctgcaaggcatcgtaatgttgctggaaaatccaaaactctacttgagtttggattacgaagggctcaggggcctgatggtggagtaggagcatccaagtactgctatattggtggatttgatgcaacaagcaatgttgcagcaggaaagttattcgggataccccttcgtggtactcattcccatgcctttgttagttcatacatgagccttgatgagattacagacaggtcacttaacagaaaagatggttcaagtacgtgtgatgattttgtcagtctcgttcaaacatggttgaacaaaattcagttatcaaatggtgtttttggtgagaccaatcaaagtgagttggctgcattcacatcatatgctttggcatttcctgatggttttcttgccctcgtagatacatatgatgttatgagaagtggaatccctaatttctgtgcagttgcattagctctcagtgatttaggatacaaagcagttggcattagattggactctggtgaccttgcatacttgtcttgtgaggtcaggaagttcttttactctattgagaatgaatttggagtgcctggatttgggaagttgcaaatcactgctagtaatgatcttaatgaggaaacattagatgctttaaacaaacagggacatgaggttgatgcctttggaattggtacatatctagttacatgttatgctcaagctgctttaggtgttgtcttcaagctggttgaaataaataatcagcctcgtatcaaactttctgaagatgtatcaaaggtctctattccatgtaaaaagtgctgctatagattgtatgggaaagaaggttatcccctggtggacataatgactggagaaaatgagccctctccaaaggtgggagaaagaatcctgtgccgtcatcccttccaagaatccaagagagcatatgtggtgccacagcgtgttgaggagcttctgaggtgttactggtctgggagtacagatattaagaaagatactttaccagctctaagagatattagagagcgatgcatcaatcaacttgagcaaatgcgacctgaccacatgaggagacttaacccaactccatataaggttagtgttagtgcaaaattatacgacttcattcatttcctgtggctcaatgaggcaccagttggggagctacagtaaggcaaatgtgctttcggagttcagaacccaatgggttgggaaaaaaaaagttcagttcagcggaaatttttccatacagtatttttttatcagcatttctccatacagtatagatgcattcaatgtgttttgattgtttttcaaaataaatgattctgtatattggtgttggtggaacct

SEQ ID NO: 12462 - protein, 557 aa, Glycine max
MEKKENGPSEKASNGGIDGPTNPMVTPLLNDLYQFTMAYAYWKAGKQQERAVFDLYFRKNPFGGEYTVFAGLEECIRFIANFKLTEEEIDFVRQCLSSSCEDGFLDYLRGLDCSDVEVYAIPEGTVVFPKVPLMRVEGPVAVVQLLETPFVNLINYASLVSTNAARHRNVAGKSKTLLEFGLRRAQGPDGGVGASKYCYIGGFDATSNVAAGKLFGIPLRGTHSHAFVSSYMSLDEITDRSLNRKDGSSTCDDFVSLVQTWLNKIQLSNGVFGETNQSELAAFTSYALAFPDGFLALVDTYDVMRSGIPNFCAVALALSDLGYKAVGIRLDSGDLAYLSCEVRKFFYSIENEFGVPGFGKLQITASNDLNEETLDALNKQGHEVDAFGIGTYLVTCYAQAALGVVFKLVEINNQPRIKLSEDVSKVSIPCKKCCYRLYGKEGYPLVDIMTGENEPSPKVGERILCRHPFQESKRAYVVPQRVEELLRCYWSGSTDIKKDTLPALRDIRERCINQLEQMRPDHMRRLNPTPYKVSVSAKLYDFIHFLWLNEAPVGELQ

SEQ ID NO: 12463 - protein, 534 aa, Glycine max
MVTPLLNDLYQFTMAYAYWKAGKQQERAVFDLYFRKNPFGGEYTVFAGLEECIRFIANFKLTEEEIDFVRQCLSSSCEDGFLDYLRGLDCSDVEVYAIPEGTVVFPKVPLMRVEGPVAVVQLLETPFVNLINYASLVSTNAARHRNVAGKSKTLLEFGLRRAQGPDGGVGASKYCYIGGFDATSNVAAGKLFGIPLRGTHSHAFVSSYMSLDEITDRSLNRKDGSSTCDDFVSLVQTWLNKIQLSNGVFGETNQSELAAFTSYALAFPDGFLALVDTYDVMRSGIPNFCAVALALSDLGYKAVGIRLDSGDLAYLSCEVRKFFYSIENEFGVPGFGKLQITASNDLNEETLDALNKQGHEVDAFGIGTYLVTCYAQAALGVVFKLVEINNQPRIKLSEDVSKVSIPCKKCCYRLYGKEGYPLVDIMTGENEPSPKVGERILCRHPFQESKRAYVVPQRVEELLRCYWSGSTDIKKDTLPALRDIRERCINQLEQMRPDHMRRLNPTPYKVSVSAKLYDFIHFLWLNEAPVGELQ

SEQ ID NO: 12464 - protein, 521 aa, Glycine max
MAYAYWKAGKQQERAVFDLYFRKNPFGGEYTVFAGLEECIRFIANFKLTEEEIDFVRQCLSSSCEDGFLDYLRGLDCSDVEVYAIPEGTVVFPKVPLMRVEGPVAVVQLLETPFVNLINYASLVSTNAARHRNVAGKSKTLLEFGLRRAQGPDGGVGASKYCYIGGFDATSNVAAGKLFGIPLRGTHSHAFVSSYMSLDEITDRSLNRKDGSSTCDDFVSLVQTWLNKIQLSNGVFGETNQSELAAFTSYALAFPDGFLALVDTYDVMRSGIPNFCAVALALSDLGYKAVGIRLDSGDLAYLSCEVRKFFYSIENEFGVPGFGKLQITASNDLNEETLDALNKQGHEVDAFGIGTYLVTCYAQAALGVVFKLVEINNQPRIKLSEDVSKVSIPCKKCCYRLYGKEGYPLVDIMTGENEPSPKVGERILCRHPFQESKRAYVVPQRVEELLRCYWSGSTDIKKDTLPALRDIRERCINQLEQMRPDHMRRLNPTPYKVSVSAKLYDFIHFLWLNEAPVGELQ

SEQ ID NO: 12465 - DNA, 825 bp, Glycine max
gatccagcagcaacaaacaagaggggtttgcctctgtgccgtttgtgttgttttcgggacgaagaagaagatggtgtcaggttctggaatctgcgcaaagcgggtggtggtggacgcgcgccaccacatgctgggtcgtctagcctccatcgtggcgaaggagcttctgaacggccagaaagtggtggtcgttcgctgtgaagagatttgcatctcgggcgggctggtgaggcagaagatgaaatacttgaggttccttcgcaaacgcatgaacaccaaaccctcccatggccccatccacttccgtgccccctccaagatcttctggcgcaccgttcgtggaatgataccacacaagacaaagcgtggggaagctgctcttgctcgtttgaaggtttatgaaggaatccctcctccatatgacaagaccaagagaatggttgttcctgatgcactcaaggtgttgaggcttcagaagggacacaagtattgtgtgctgggcaggttgtcatctgaagttggatggagctactatgataccattagggagctggagaagaagagaaaggagaaggcagcggtggtttacgagagaaagaagcaactcaacaaattaagggtgaaagctgagaaggttgctgaagagaagctcggttcccaacttgatgttcttgctcctgttaagtattgagtagtttttgttagtgtttgaaattttttatgccacttataccaaattgaactacctttcaattttgcttgaggttgctttgttattggatcatagatttgatatctgatcatcttggaagctgttttttattc

SEQ ID NO: 12466 - protein, 229 aa, Glycine max
IQQQQTRGVCLCAVCVVFGTKKKMVSGSGICAKRVVVDARHHMLGRLASIVAKELLNGQKVVVVRCEEICISGGLVRQKMKYLRFLRKRMNTKPSHGPIHFRAPSKIFWRTVRGMIPHKTKRGEAALARLKVYEGIPPPYDKTKRMVVPDALKVLRLQKGHKYCVLGRLSSEVGWSYYDTIRELEKKRKEKAAVVYERKKQLNKLRVKAEKVAEEKLGSQLDVLAPVKY

SEQ ID NO: 12467 - protein, 206 aa, Glycine max
MVSGSGICAKRVVVDARHHMLGRLASIVAKELLNGQKVVVVRCEEICISGGLVRQKMKYLRFLRKRMNTKPSHGPIHFRAPSKIFWRTVRGMIPHKTKRGEAALARLKVYEGIPPPYDKTKRMVVPDALKVLRLQKGHKYCVLGRLSSEVGWSYYDTIRELEKKRKEKAAVVYERKKQLNKLRVKAEKVAEEKLGSQLDVLAPVKY

SEQ ID NO: 12468 - protein, 187 aa, Glycine max
MLGRLASIVAKELLNGQKVVVVRCEEICISGGLVRQKMKYLRFLRKRMNTKPSHGPIHFRAPSKIFWRTVRGMIPHKTKRGEAALARLKVYEGIPPPYDKTKRMVVPDALKVLRLQKGHKYCVLGRLSSEVGWSYYDTIRELEKKRKEKAAVVYERKKQLNKLRVKAEKVAEEKLGSQLDVLAPVKY

SEQ ID NO: 12469 - DNA, 1315 bp, Glycine max
aaaacaaacccaagagaggaagaaagaaagaaaagagtataaacacacaatatctctttaaactcttgacccttctcttggaggcatggctttcccaattctcttccttctcttcatttcccttcccttctcctccgcaaagctcaacgtcgattactacaaaaacacatgcccagacttcgaaaaaatcgttagggaaaacgtcttcaccaaacaaagcgctagcgtggccacagcaccgggtctccttcgcctcttcttccacgattgcatcaccgatggctgcgacgcttccctcctcataacttccaatgcatacaaccctcatgcagaacgtgatgcggacctcaacctttctctctccggtgatgccttcgacatcatagttaaaatcaaaaacgcattagaacttgcatgccctggtgttgtgtcgtgttccgacatcgtggcacaggccacaagagaccttgttaagatggtcggtggtcctttttaccccgtgaggctggggagaaaggatagcactgaatcagatgctgcgagagtgagtgcaagccttccaacaccaagcatgaccatggaccagatcattgagaagtttacctcaaagggtttcactgttaaggagatggtggctttgactggggcacacaccattgggttcacacactgcaaggagttcatccacaggatctacaacttcagcaagacctctgatgctgaccctatgatgcaccctaagctggtccaagggttgaggtccgtgtgccagaactacaccaaggactcctcaatggctgcattcaatgatgttaggtcaccagggaagtttgacaatgcctactaccagaatgtcatcaagggtttggggttgttgacctctgattccattcttgctgttgaccctaggacaaagcctcttgtggagctctatgcaaatgaccagcaagctttcttcaaggactttgctgatgccatggagaaactttctgtgtttagagtcaaaactggcgacaaaggagaggtgaggaacaggtgtgaccaattcaacagtattcctgcctaaatgaccgaagttactgaggttgaaattattagataattcgaaactatttcctattcttgcatttatatatgacacgtgcatacttaaaagtattgacaattgatgatatatatatacatgtcatatataaagattaattaagatggtatagtctcggattatctgataatttctagagattttgtgtatctagagagtcactatggatatacattgtcatttgtgtccttgtcaaaagaaaattgtgag

SEQ ID NO: 12470 - protein, 326 aa, Glycine max
MAFPILFLLFISLPFSSAKLNVDYYKNTCPDFEKIVRENVFTKQSASVATAPGLLRLFFHDCITDGCDASLLITSNAYNPHAERDADLNLSLSGDAFDIIVKIKNALELACPGVVSCSDIVAQATRDLVKMVGGPFYPVRLGRKDSTESDAARVSASLPTPSMTMDQIIEKFTSKGFTVKEMVALTGAHTIGFTHCKEFIHRIYNFSKTSDADPMMHPKLVQGLRSVCQNYTKDSSMAAFNDVRSPGKFDNAYYQNVIKGLGLLTSDSILAVDPRTKPLVELYANDQQAFFKDFADAMEKLSVFRVKTGDKGEVRNRCDQFNSIPA

SEQ ID NO: 12471 - protein, 196 aa, Glycine max
MVGGPFYPVRLGRKDSTESDAARVSASLPTPSMTMDQIIEKFTSKGFTVKEMVALTGAHTIGFTHCKEFIHRIYNFSKTSDADPMMHPKLVQGLRSVCQNYTKDSSMAAFNDVRSPGKFDNAYYQNVIKGLGLLTSDSILAVDPRTKPLVELYANDQQAFFKDFADAMEKLSVFRVKTGDKGEVRNRCDQFNSIPA

SEQ ID NO: 12472 - protein, 164 aa, Glycine max
MTMDQIIEKFTSKGFTVKEMVALTGAHTIGFTHCKEFIHRIYNFSKTSDADPMMHPKLVQGLRSVCQNYTKDSSMAAFNDVRSPGKFDNAYYQNVIKGLGLLTSDSILAVDPRTKPLVELYANDQQAFFKDFADAMEKLSVFRVKTGDKGEVRNRCDQFNSIPA

SEQ ID NO: 12473 - DNA, 1011 bp, Glycine max
  misc_feature (95)..(95): n is a, c, g, or t
  misc_feature (791)..(791): n is a, c, g, or t
cgttgatagctgatgtgtacttgcgtggtcttactgtgtatgatgttaatgaaaattgttcggtgaaaattgtgcatttggaaaatctatgtttngtgttttctgatctgtattgggtgttggttgttatagtaagctttagagtgatgcttttagagaagctatctcaggaatcatgactgattccaaggaaaagaacaggaaatttgtggagaccattgaactccaaattaggctgaaaaactatgatcctcagaaggacaagcgttttagtggctctgttaagttgcgtcacattccttgccccaagatgaagatttgtatgcttggagatgcctaacacgttgaagaggtaataagctgatctaattatcaaacccttgtgtgagattttcaattgggtgcaataatatattgctttgctgactgtgtttgcttctttttcatttataacataatttataatttactggtgtggtacttgatatgattgtaagagttactgattgcttgtaatggctatttttcttgaattactttgaaataagagacaaatttgttaattttgtaaccacaatacaagatgagtggtgccattcttttaggtttgttggcagttattttagtgtgttttagaattttaatatatttttcaacagttatcactcaattgttgatagcctaatttgttgtgttaatgtctattattcgaatctgcaggctgagaaggtaggattggactacatggatgttgaggccttgaagaagcttaacaaaaacaagaaattggntgaaaaaactagccaaaaaatatcttgttactcaacttcttcaacaagtgattattagtgtcaaacaatatcatgtacgaaattaaaagtgtactgtagggactaagtaattataccttactaatttatcaccggttaaaaacaagtcattatctcttattgtgggattttgtgacttattttattttcattttcctttgtgaatagttattctcttggt

SEQ ID NO: 12474 - protein, 58 aa, Glycine max
  misc_feature (31)..(31): Xaa can be any naturally occurring amino acid
LIADVYLRGLTVYDVNENCSVKIVHLENLCXVFSDLYWVLVVIVSFRVMLLEKLSQES

SEQ ID NO: 12475 - protein, 54 aa, Glycine max
MTDSKEKNRKFVETIELQIRLKNYDPQKDKRFSGSVKLRHIPCPKMKICMLGDA

SEQ ID NO: 12476 - protein, 34 aa, Glycine max
  misc_feature (16)..(16): Xaa can be any naturally occurring amino acid
MDVEALKKLNKNKKLXEKTSQKISCYSTSSTSDY

SEQ ID NO: 12477 - DNA, 967 bp, Glycine max
aagactaagaaccacacaaaaccagagtcgttaactttctttctctgcttcgactagctaattagaaacatgaccctaaacttcttagggttgattttctttcccttgctagtgcctgccttgcttatcatcaacaatgctctggcaagtgatccagatatcatatatgactatgtttcaccacagaatagcagtgtcaatggaagcttctttacttacactggattaagaggagtccttcatcaaattcctcaatctttcaaggcaacaaaagtaaccctggttgaatttcctgctctcaatggacaaagtatatcatatgcactatttcagtaccctgctggtagcatcaaccctcctcacatccacccccgtgccgccgagtttctgttccttgtaagtggctccctgcaagtaggatttgttgacactactcgcacactttacacacaaaaccttcaatcaggtgatatgttcatatttcctaaagggttgatacattatcagtataatccacaatcagttccagccactgctatatctgcttttggaagtgcaaatgcaggaacggtttcaatacctcattctatttttagtacgggaattgatgatgtaatccttgccaaggctttcaagactgatacttatacagtgaagaagattagatctggcctaaacaaaccttagaattgcaagctaagctttcatgtactacttccttctagtctctaaataaagttcctgtagcttctgcatgtgtgaatattagcaagaaatctaaaaaccttcatgttttcataattaacttaacttggtcaagtaggggctgtgaattgtattatgccactgaattttcacaccctgtccccaagtgtgcttaaacagcgaaaatttcaagcatttccttgtatgaatacacaaataaaatagaaataaacaagccaaaggtggtgaagatccacgtatt

SEQ ID NO: 12478 - protein, 205 aa, Glycine max
MTLNFLGLIFFPLLVPALLIINNALASDPDIIYDYVSPQNSSVNGSFFTYTGLRGVLHQIPQSFKATKVTLVEFPALNGQSISYALFQYPAGSINPPHIHPRAAEFLFLVSGSLQVGFVDTTRTLYTQNLQSGDMFIFPKGLIHYQYNPQSVPATAISAFGSANAGTVSIPHSIFSTGIDDVILAKAFKTDTYTVKKIRSGLNKP

SEQ ID NO: 12479 - DNA, 820 bp, Glycine max
  misc_feature (677)..(677): n is a, c, g, or t
aataaatccctattccaattccaaattttcagtttcttcctcgcttttctgcaaaatcatctaaatccgtttctgatcctgaatcatcagtttttcccttgaaagatgggaggtggcaaggacaaacacaatgaagaagagaaaggagttttctcacatctggctcatggagtagctcaagctgctcatggcttaccctccaggggcataccctccacctcctggggcataccctccttaccaagggtacccacctgctcatggctaccctccacaaggtggctatcctccggctggttatccccctgctggctatcctcctgctgctggtggttacccccctgctggttaccctccacatggttatcctggatcatctgctccacatggatctcatgcgcctgggcacggcggtatgggggcattgcttgctggtggtgctgctgcggcagcagctgcgtatggggctcaccatgtttcccatgggcatcatggatatggtgcatatggaggatatggacacatgccccatgggaaattcaaacatcatggcaagttcaagcatggaaagttcggcaagcatgggaaatttaagcatgggaagtttggcaagggtatgttcaagaagtggaagtgatgatattatattaattttctgtacatacaaaccgcgattntggatgctgctgcacattgcttttataataaactctactttgtttgatgtccatctatattttggtggaactctagtattttttttatagtcaaagatgtatcatcccgttcatattctattattctagaaagtgcttattcc

SEQ ID NO: 12480 - protein, 168 aa, Glycine max
  misc_feature (139)..(139): Xaa can be any naturally occurring amino acid
MATLHKVAILRLVIPLLAILLLLVVTPLLVTLHMVILDHLLHMDLMRLGTAVWGHCLLVVLLRQQLRMGLTMFPMGIMDMVHMEDMDTCPMGNSNIMASSSMESSASMGNLSMGSLARVCSRSGSDDIILIFCTYKPRXWMLLHIAFIINSTLFDVHLYFGGTLVFFL

SEQ ID NO: 12481 - protein, 162 aa, Glycine max
MGGGKDKHNEEEKGVFSHLAHGVAQAAHGLPSRGIPSTSWGIPSLPRVPTCSWLPSTRWLSSGWLSPCWLSSCCWWLPPCWLPSTWLSWIICSTWISCAWARRYGGIACWWCCCGSSCVWGSPCFPWASWIWCIWRIWTHAPWEIQTSWQVQAWKVRQAWEI

SEQ ID NO: 12482 - protein, 149 aa, Glycine max
MAYPPGAYPPPPGAYPPYQGYPPAHGYPPQGGYPPAGYPPAGYPPAAGGYPPAGYPPHGYPGSSAPHGSHAPGHGGMGALLAGGAAAAAAAYGAHHVSHGHHGYGAYGGYGHMPHGKFKHHGKFKHGKFGKHGKFKHGKFGKGMFKKWK

SEQ ID NO: 12483 - DNA, 1614 bp, Glycine max
tctatcgtctcttcttttttcttcttcttcttcttcttcagagtttagccagttgaattgaactagtagctttcttttaaaattaaaattagaatcattatcgtttatcacactccaacaacgcctttcgctcttaccaccctcgcgggtcattttcttgggaaaactcgtttccaccaagaaaatcgatttccctggaaacaaacactcgcgaatctccgatgcgactcgtttcactttaattcgatgatgatcgccactatatgccgccctgtgcgttccccgtgggaggaaccaatggatcgctgcttccgattttttccatgcctcgccgatcctggtcgaaggtcttcgttgtgcttgaagttgtgcttagtgacgattcacctgatttatgctggcgtgctcttcttgttcgatggggatttgatagaaaggactaagaaggagccgtggtacactgctttatacttgctgctgttcgttgttactttgatacaatactttgctacctctctttcttctccaggctatgtacttgaagccatgctgactgttaacgagagaagtgcagcgaacagaaaggcaccagaaacatcgaaaaatgggagctacgtaatttccacagagggaaatctgattgcaagaaatggttcaggaagctattcatcatcttggtcgaagttggtggctgacttgtatcctttctcgatcagaacatggacatgcacctactgcaatatggagcagcctccacgagcaaaacattgtcatgattgtgacaagtgtgttcttcagtttgatcatcattgtgtttggcttggtaactgcattggccagggtaatcactgtaaattttggtggtacctttttgaagagacagcattgtgcctttggactggtgtcttgtatatttcatacctgaaggctcacattacaagggtttggtggcaggatgcgatcatgataattctcttgatcactctgttagtttgtctcgtctttcttctcctcctactgctattccatagttatcttattttaacaaatcagactacctttgaacttgtaaggagaagacggattcattatctaaggggaattccggaaagagtgcatccattcagtagaggagttcgtagaaatttatacaatttctgctgtacaaggagcaccatatacggagtcgaaccattgcctacccctgaagagatagaggaaaaatcaaggccgtacacatgcttggatgctgtaacttgtcgatgttgttgatggtttttgtacaagtagaagtctttccgtctagtagtttaatcgtgaaaactcagaagtatgtcgatgtacccttttgctttagattggtaggtgttatctttaggcaatttgcttcatgacatcttctgttcttcattttttccctaaattttggaggtagagttccaagttagatgtacagttgcagtgctattgtgttgttttgtttttactgtttagtctgtagacctggatatccagctattatcaaaccgactactgcctggaacgctagagacagagaatttattttagttagttgcatgccatggtgggcgttggcccccctcaacacttatt

SEQ ID NO: 12484 - protein, 341 aa, Glycine max
MMIATICRPVRSPWEEPMDRCFRFFPCLADPGRRSSLCLKLCLVTIHLIYAGVLFLFDGDLIERTKKEPWYTALYLLLFVVTLIQYFATSLSSPGYVLEAMLTVNERSAANRKAPETSKNGSYVISTEGNLIARNGSGSYSSSWSKLVADLYPFSIRTWTCTYCNMEQPPRAKHCHDCDKCVLQFDHHCVWLGNCIGQGNHCKFWWYLFEETALCLWTGVLYISYLKAHITRVWWQDAIMIILLITLLVCLVFLLLLLLFHSYLILTNQTTFELVRRRRIHYLRGIPERVHPFSRGVRRNLYNFCCTRSTIYGVEPLPTPEEIEEKSRPYTCLDAVTCRCC

SEQ ID NO: 12485 - protein, 340 aa, Glycine max
MIATICRPVRSPWEEPMDRCFRFFPCLADPGRRSSLCLKLCLVTIHLIYAGVLFLFDGDLIERTKKEPWYTALYLLLFVVTLIQYFATSLSSPGYVLEAMLTVNERSAANRKAPETSKNGSYVISTEGNLIARNGSGSYSSSWSKLVADLYPFSIRTWTCTYCNMEQPPRAKHCHDCDKCVLQFDHHCVWLGNCIGQGNHCKFWWYLFEETALCLWTGVLYISYLKAHITRVWWQDAIMIILLITLLVCLVFLLLLLLFHSYLILTNQTTFELVRRRRIHYLRGIPERVHPFSRGVRRNLYNFCCTRSTIYGVEPLPTPEEIEEKSRPYTCLDAVTCRCC

SEQ ID NO: 12486 - protein, 324 aa, Glycine max
MDRCFRFFPCLADPGRRSSLCLKLCLVTIHLIYAGVLFLFDGDLIERTKKEPWYTALYLLLFVVTLIQYFATSLSSPGYVLEAMLTVNERSAANRKAPETSKNGSYVISTEGNLIARNGSGSYSSSWSKLVADLYPFSIRTWTCTYCNMEQPPRAKHCHDCDKCVLQFDHHCVWLGNCIGQGNHCKFWWYLFEETALCLWTGVLYISYLKAHITRVWWQDAIMIILLITLLVCLVFLLLLLLFHSYLILTNQTTFELVRRRRIHYLRGIPERVHPFSRGVRRNLYNFCCTRSTIYGVEPLPTPEEIEEKSRPYTCLDAVTCRCC

SEQ ID NO: 12487 - DNA, 1026 bp, Glycine max
  misc_feature (544)..(544): n is a, c, g, or t
atactgaaacgagacttttcagttttcactgcatttccgttggcttcgttatgcgactgtgagctcagattatgactaaggataattatttattggactaggaggagttcacaaggtgcgccaaactgaactgattttccattgagatattgctgcactacaagccaagaatgagcttacttttaagaataagacattatttacccaagggtttatgtagacaacctcttcatccaacagtagtgcggcttaacgctagtaacttaaatgtattttcaagacattttggtcaacctgcgaggaaagaggaggaggatgatgtagaggaagtggaaattgatcaaaaatgtctcccagctgattttgatcctgctacatttgatcccaatgatcatcgaggccctccatcagagagagttttcaggcttattgatgagattgcttctcttacggtagctgaagctggagaattgggtctcattctcatgaagaaaatgggagtgaaggagatgcctaatgtgggatttatgaaagcaggagctgnaaatttggctggaatggcagcaaaagcaccaacagcagccaaggaggagcaaaagctagaaaaaactgtgtttgaattgaaactggagtcctatgaagcggcttccaaaattaaaatcatcaaggaggtccggggctttactgatttaggtttgaaggaagcaaaggatttagtggaaaaaacaccttctgttataaagaaaggtatttcaaaggaagaaggggagcagataatagagaaattgaaagctcttggtgcaaaggttgttatggaatgaagtgatgtatgttgtttcttccagctttcaatattttagttgtctgaaatttaaaaaatttcagatcgttggcaagtatactgcaaattttgctagtgcttacattgtgtgttaattttttagcataaactggaatttgattttatgcaggtttgcaacattattcattatttccctctcaatggaataaaagtattattcctac

SEQ ID NO: 12488 - protein, 216 aa, Glycine max
  misc_feature (125)..(125): Xaa can be any naturally occurring amino acid
MSLLLRIRHYLPKGLCRQPLHPTVVRLNASNLNVFSRHFGQPARKEEEDDVEEVEIDQKCLPADFDPATFDPNDHRGPPSERVFRLIDEIASLTVAEAGELGLILMKKMGVKEMPNVGFMKAGAXNLAGMAAKAPTAAKEEQKLEKTVFELKLESYEAASKIKIIKEVRGFTDLGLKEAKDLVEKTPSVIKKGISKEEGEQIIEKLKALGAKVVME

SEQ ID NO: 12489 - protein, 111 aa, Glycine max
  misc_feature (20)..(20): Xaa can be any naturally occurring amino acid
MKKMGVKEMPNVGFMKAGAXNLAGMAAKAPTAAKEEQKLEKTVFELKLESYEAASKIKIIKEVRGFTDLGLKEAKDLVEKTPSVIKKGISKEEGEQIIEKLKALGAKVVME

SEQ ID NO: 12490 - protein, 108 aa, Glycine max
  misc_feature (17)..(17): Xaa can be any naturally occurring amino acid
MGVKEMPNVGFMKAGAXNLAGMAAKAPTAAKEEQKLEKTVFELKLESYEAASKIKIIKEVRGFTDLGLKEAKDLVEKTPSVIKKGISKEEGEQIIEKLKALGAKVVME

SEQ ID NO: 12491 - DNA, 1007 bp, Glycine max
gaggattccttcgtctctgtctctgtctttcttactctctctctctctcccctttctctctcttctctttttctatcctcgaagcaagaaatggactctaacagcgtcgtttcttggccgaggttgccggaaaacatcgacggtttcggtatcaaacagaaacaatccgaagaggttcatgttttagccgttgatgacagtatcgttgatcgcaaagtcatcgaacacttgctcaaagtcttagcttgtaaagttactgctgtggatagtgggctgagagcactgcaattgcttggactattggacgagcagaaaatcccctctgaaactaatggttttgggggtttaaaggtggatctaatcatcacagactattgtatgcccggaatgaccggttatgaattactcaagaaaattaaggaatcctccagtttcaaggaaactcctgtggtgattatgtcctccgaaaatgttttgccacgcatagacagatgtttggaggagggtgcagaggatttcatagtgaagccagtgaagttatcagatgtgaagcgtttgaaggatttcatgacaacaaaggaggttataaggggtgaattaagccaagaagaaagggaagggatcaacaagaggaagctattagacacctctgatgtgtcgccatcatcaccaccgtccatttcctcatcaccactcccatcgtcacccagctcagtgattgattctccaatcagacggcttaaaatgaccggcactgattgatattctctagcaattaatttgctgttttccttaattttctcattcctgtaggcactacagctgcaagcctgcaatgtctatctttataattataaatagtagtgtttttttcttcttctttggatttgttgttttactcttttagggttgaaattgcaaaccgttaattgtaacggtttttgttgcgcttccctcttcttaattatctaagttattttaattgtttatatgaaggttaattggcc

SEQ ID NO: 12492 - protein, 253 aa, Glycine max
EDSFVSVSVFLTLSLSPLSLSSLFLSSKQEMDSNSVVSWPRLPENIDGFGIKQKQSEEVHVLAVDDSIVDRKVIEHLLKVLACKVTAVDSGLRALQLLGLLDEQKIPSETNGFGGLKVDLIITDYCMPGMTGYELLKKIKESSSFKETPVVIMSSENVLPRIDRCLEEGAEDFIVKPVKLSDVKRLKDFMTTKEVIRGELSQEEREGINKRKLLDTSDVSPSSPPSISSSPLPSSPSSVIDSPIRRLKMTGTD

SEQ ID NO: 12493 - protein, 223 aa, Glycine max
MDSNSVVSWPRLPENIDGFGIKQKQSEEVHVLAVDDSIVDRKVIEHLLKVLACKVTAVDSGLRALQLLGLLDEQKIPSETNGFGGLKVDLIITDYCMPGMTGYELLKKIKESSSFKETPVVIMSSENVLPRIDRCLEEGAEDFIVKPVKLSDVKRLKDFMTTKEVIRGELSQEEREGINKRKLLDTSDVSPSSPPSISSSPLPSSPSSVIDSPIRRLKMTGTD

SEQ ID NO: 12494 - protein, 127 aa, Glycine max
MPGMTGYELLKKIKESSSFKETPVVIMSSENVLPRIDRCLEEGAEDFIVKPVKLSDVKRLKDFMTTKEVIRGELSQEEREGINKRKLLDTSDVSPSSPPSISSSPLPSSPSSVIDSPIRRLKMTGTD

SEQ ID NO: 12495 - DNA, 2141 bp, Glycine max
aattgttcaataaagacaagtgcgagagtttgagtggttaattagttgtgaactactaagattcgtttagttggttgagagtgttgttgttagttgtgaattacttcaaagattcgtttggttggttgcgagtgtttgttctttataggcaagtgtaggagtgtcgttgttagttgtgaactagtactaagattcgtttggttggttgcgagtgttgtaagttcgtggagttgatggcatctaaaaggacctttgacgacgaggaagatcatcaaggtaatgatgacagagatcttggacgtctcgctaagaggagacatggcgacccacaagaagccgaggccatgttcattgcttctcttattgcctcgcacttgagacctgcaattcaaaaagagattaaagaggggctccgatctatgttccggggttgcgcatgcctgtgttccccccgatcatccattaaccaacagggtggcgcttctacttctggaggcagagccatgcaattgctgcttcgtgaataaactccctatagaatttttcaccacgttcaatatcacagctgaggacggtggtccagttcaaattgagctgcgttatgctggatcgcaacaacgcgtagtgacggaacaagtttctaacatgaaggttcagatctgtgtcctagatggtgatttcggtaaggacggaaacgaggactggagtgcagatgaatttaatgcccaaattgtgaaaccaagagaggggaaggggcaattactgaaaggagagactgttattaaacttgaaaaggggtttgcttgtatcaataacaagatcgagtttactgataactctatcggcacaagaaacaaaaagtttcggttaggagttaaatttctgcaatctacttccgttagcgttagcgttagggaaggcagaagtgaagccttcagggttaaggataaacgaggagagccgtacaagaaacgcgaccgtccctcgttgaatgatgaggtatggtgtctgaagaatataagaagaaacggtgatcttcacaaggatcttttgaagaataaaataaaaactgtcaaggatcttttgcgcttgaacacaatcggttcattacgggagaaattcggcaaggttaaaaaatgggacgaaatcatcgaacatgctgaaaaatgtgcagttgacgatgatgggttctacatgtatcgctatgatgcaaccgtttcccttgtcttgaactgcatctataaggttgaggcgattttttatgggcaacactatcggtctctgcaatctctgaatttggaggagcagcgtttggtggaaagagttaagcaggaagcataccaaaatttgcagaatctggtgccaattccgacgccaccaccacatgacatagtgaagactttgacgggtacacaatacggttcaccagatcaaggtcagcaagggcaatcagaactttggatatccaccacctcaacatcaattgtgcatgaagcgccactaaacttgtctggtgggtcgcaggttgtccccgttgaaacatataatattgatgatggaaccggatgggacattggtcaatttgaaagttacattcttcctaaccaattattggagccagttaatccttgctcttttccctatggcgatggagcaacatctagcaatcattcgtttttcctcaaccctgctgtgtatacatcaagcaaagggaaaagcaaaacagtttggcagaagactcgaaacattctcaaatgggtcatacctcatgtcaccaaatggaaggtgttccgacctcaaatccttcaacattattaggtggactgttaagaaaagtatttcagttggttgagaagaaataatatttataaaccgactcttaatcttgatttctaagctatcgaaaaaggagacaaaactttttctgtattgaataatagtactcgattctttaagtttgggatttgtatttattccctcaatatgtgtttttccaacgccaggtgtcaatttctttaatttagtatttattagtttataaattacttgtgtcaatttatctgtacccattgccattaggccatgttaattcttttctgtaaaataaaaaatagcattaaaaaagtgtgaaaagggaattt

SEQ ID NO: 12496 - protein, 390 aa, Glycine max
MKVQICVLDGDFGKDGNEDWSADEFNAQIVKPREGKGQLLKGETVIKLEKGFACINNKIEFTDNSIGTRNKKFRLGVKFLQSTSVSVSVREGRSEAFRVKDKRGEPYKKRDRPSLNDEVWCLKNIRRNGDLHKDLLKNKIKTVKDLLRLNTIGSLREKFGKVKKWDEIIEHAEKCAVDDDGFYMYRYDATVSLVLNCIYKVEAIFYGQHYRSLQSLNLEEQRLVERVKQEAYQNLQNLVPIPTPPPHDIVKTLTGTQYGSPDQGQQGQSELWISTTSTSIVHEAPLNLSGGSQVVPVETYNIDDGTGWDIGQFESYILPNQLLEPVNPCSFPYGDGATSSNHSFFLNPAVYTSSKGKSKTVWQKTRNILKWVIPHVTKWKVFRPQILQHY

SEQ ID NO: 12497 - protein, 207 aa, Glycine max
MYRYDATVSLVLNCIYKVEAIFYGQHYRSLQSLNLEEQRLVERVKQEAYQNLQNLVPIPTPPPHDIVKTLTGTQYGSPDQGQQGQSELWISTTSTSIVHEAPLNLSGGSQVVPVETYNIDDGTGWDIGQFESYILPNQLLEPVNPCSFPYGDGATSSNHSFFLNPAVYTSSKGKSKTVWQKTRNILKWVIPHVTKWKVFRPQILQHY

SEQ ID NO: 12498 - DNA, 849 bp, Glycine max
aatctatttgtgttgttgttggaatactgagctgagagtggtggagtcaggatatcatatcatgtgcactctctcactgccatgcctctcttattctcttcacactcacacttaccagtctggacgcttctctcccccttgttcttttatcttcacacctcatagacgctctcacagtcacttcctgactccatgctcctccctcagacagagagaaagagagagcaaaaagcaactaggcaagatcaacactgccccgtctgagtctggcttgaagcgcttgtttagtcccaataacaacaagaccgaagtcgaaggtgacgccgacgccgacgccgacgctgacctcgacttccaggatggaaccgccttgaagggcaccctcttggccggtctcttgctcctcggtgttgttggcggttttgcctccgttggctatatctacaaggaccaagtcaattccttcttgaaccacctctccgtcttcattgaaggttatggtcctgctggatatgcattattcgttgccgtttatgctggattggagatccttgcaattcctgccattcctttaaccatgtcagctggacttctatttggatctgttgtcggcactatcatagtctctatcagcggaacagtggcagccagtgttgcttttctaattgcaagatattttgctcgtgagcgaattgtaaaactagtggaaggaaataagaagtttgttgctattgacaaagcaattggagaaaatgggttcagggttgtgaccctgcttcgtttgagccctctgctgccattttctttggggaattatttatatggattaacatctgttaagtttattcc

SEQ ID NO: 12499 - protein, 282 aa, Glycine max
IYLCCCWNTELRVVESGYHIMCTLSLPCLSYSLHTHTYQSGRFSPPCSFIFTPHRRSHSHFLTPCSSLRQRERESKKQLGKINTAPSESGLKRLFSPNNNKTEVEGDADADADADLDFQDGTALKGTLLAGLLLLGVVGGFASVGYIYKDQVNSFLNHLSVFIEGYGPAGYALFVAVYAGLEILAIPAIPLTMSAGLLFGSVVGTIIVSISGTVAASVAFLIARYFARERIVKLVEGNKKFVAIDKAIGENGFRVVTLLRLSPLLPFSLGNYLYGLTSVKFI

SEQ ID NO: 12500 - protein, 262 aa, Glycine max
MCTLSLPCLSYSLHTHTYQSGRFSPPCSFIFTPHRRSHSHFLTPCSSLRQRERESKKQLGKINTAPSESGLKRLFSPNNNKTEVEGDADADADADLDFQDGTALKGTLLAGLLLLGVVGGFASVGYIYKDQVNSFLNHLSVFIEGYGPAGYALFVAVYAGLEILAIPAIPLTMSAGLLFGSVVGTIIVSISGTVAASVAFLIARYFARERIVKLVEGNKKFVAIDKAIGENGFRVVTLLRLSPLLPFSLGNYLYGLTSVKFI

SEQ ID NO: 12501 - DNA, 647 bp, Glycine max
taatatccttcttgacgatgacatggaggcaagaattgctgattttggactcgccaaggctatgcccgattacaagactcacataacaacctccaatgtggctggcactgtgggctatattgctcctgagtatcatcagatactcaagttcactgactgaagagatgagtttggtcaagtggatgaggaagactttaagctccgagaatcccaaggaggcaattaattcaaagctgctggggaatgggtatgaggagcagatgcttcttgttttgaagattgcatgcttttgcactatggatgatcccaaggagaggcctaacagtaaggatgttaggtgcatgctgtcacagatcaaacactgaatctgctgtatgtttaagtatgtgaaatattgtgtaccatatttgtgccaaagtgtgcttgtttaagaatatagttgataactagaggatcaatgttggttcatagggtaaataatgaaccgatgtaatcttgtttcctttatcacggattgctgaatttctttggaaaaagaaaaattcagcactgcgatgatctatgtataatctagtctgtcacaactagtttccactttacatgtttatggatacaccctgaaaataaaatagttttacgttgtttcc

SEQ ID NO: 12502 - protein, 89 aa, Glycine max
MWLALWAILLLSIIRYSSSLTEEMSLVKWMRKTLSSENPKEAINSKLLGNGYEEQMLLVLKIACFCTMDDPKERPNSKDVRCMLSQIKH

SEQ ID NO: 12503 - protein, 66 aa, Glycine max
MSLVKWMRKTLSSENPKEAINSKLLGNGYEEQMLLVLKIACFCTMDDPKERPNSKDVRCMLSQIKH

SEQ ID NO: 12504 - protein, 60 aa, Glycine max
MRKTLSSENPKEAINSKLLGNGYEEQMLLVLKIACFCTMDDPKERPNSKDVRCMLSQIKH

SEQ ID NO: 12505 - DNA, 1433 bp, Glycine max
agtttgtcacataccaaaggaaggtataaaagatactatgaatactgagtcaactgtattagatgaaacaaatagtgataaacaaccccgtagagagaaaagaaaaagaaaaaaattagttcgtcgcataccaaaggaaggtataaaaaatactatgaatactgagtcatctgtattagatgaaacaaatagtgataagcaagtttctcgtagtaatgaattgaggaaattatataggcaaaaaactttgcaaatttctacagttagaccatcaattgtgtgtttgaagaaaaagcttattattcttgatctaaatgggctgcttgtggacatagtttctccccctccaaagtaccgtaaaccagatgcaatggtaggaaagaaagcaatgttcaagaggcctttttatcttgagtttctgaacttctgctttgagaaatttgaagtggctgtatggtcttcaagaaccaagaaaaatattaacaatgtcattaatcgtttgatgggaaacatgaaagaaaggttgcttttttgttgggatctttcttattgtaccaaaacaagtttcaaaactcttgaaaacaagcagaagccactggtttttaaggatttgaggaaaatttgggagaaacatgattctaatcttccatgggagaagggatacttcaatcaatcaaatacattgctgttggatgattctccatacaagccatacaactcagtgttcccgcgcacgttcagatttcagaatgaaagtgacaattcactagctgttggaggtgatctgcgacaatatttggatggattagcaaatgctgaaaatatggtgaagtatgttgagcagcacccatttggtcaagaagctatcaatgaaagaagtcaaagttggaacttctacctcaaggttattgatagtctttctacctgttaacctgaagagtgaaaaccgtgttcgtcaacttggatatcaatgtttactttgctagctaaacaagtcacagtggttttccaaagaaatggaactataaaagtctttttattttttgttaaattattcaattggtctctaaattatttggaaaatttcaaacaagtccctaaagttctttttttggatccatagactaaaatagcaggtccctaggattagtttataccagctaagaaaatggcaatttatggaagtttataagttttaggaattcaactaaaaaaaacttaatttagggacttgaaaattatcaaacacttaaccaactgagtaatttaacccttatttttctcatcaatagtgcagcatttttttttcttttcatttttgaacatcttgtaaaacatctgtaagaaaagctgtaacagcaagctggctattggaaggaatacaggagggtgagacctcaacagtcaaaactgaagtaatgtttatcattttt

SEQ ID NO: 12506 - protein, 309 aa, Glycine max
VCHIPKEGIKDTMNTESTVLDETNSDKQPRREKRKRKKLVRRIPKEGIKNTMNTESSVLDETNSDKQVSRSNELRKLYRQKTLQISTVRPSIVCLKKKLIILDLNGLLVDIVSPPPKYRKPDAMVGKKAMFKRPFYLEFLNFCFEKFEVAVWSSRTKKNINNVINRLMGNMKERLLFCWDLSYCTKTSFKTLENKQKPLVFKDLRKIWEKHDSNLPWEKGYFNQSNTLLLDDSPYKPYNSVFPRTFRFQNESDNSLAVGGDLRQYLDGLANAENMVKYVEQHPFGQEAINERSQSWNFYLKVIDSLSTC

SEQ ID NO: 12507 - protein, 297 aa, Glycine max
MNTESTVLDETNSDKQPRREKRKRKKLVRRIPKEGIKNTMNTESSVLDETNSDKQVSRSNELRKLYRQKTLQISTVRPSIVCLKKKLIILDLNGLLVDIVSPPPKYRKPDAMVGKKAMFKRPFYLEFLNFCFEKFEVAVWSSRTKKNINNVINRLMGNMKERLLFCWDLSYCTKTSFKTLENKQKPLVFKDLRKIWEKHDSNLPWEKGYFNQSNTLLLDDSPYKPYNSVFPRTFRFQNESDNSLAVGGDLRQYLDGLANAENMVKYVEQHPFGQEAINERSQSWNFYLKVIDSLSTC

SEQ ID NO: 12508 - protein, 258 aa, Glycine max
MNTESSVLDETNSDKQVSRSNELRKLYRQKTLQISTVRPSIVCLKKKLIILDLNGLLVDIVSPPPKYRKPDAMVGKKAMFKRPFYLEFLNFCFEKFEVAVWSSRTKKNINNVINRLMGNMKERLLFCWDLSYCTKTSFKTLENKQKPLVFKDLRKIWEKHDSNLPWEKGYFNQSNTLLLDDSPYKPYNSVFPRTFRFQNESDNSLAVGGDLRQYLDGLANAENMVKYVEQHPFGQEAINERSQSWNFYLKVIDSLSTC

SEQ ID NO: 12509 - DNA, 1727 bp, Glycine max
  misc_feature (562)..(563): n is a, c, g, or t
  misc_feature (1481)..(1481): n is a, c, g, or t
  misc_feature (1484)..(1484): n is a, c, g, or t
  misc_feature (1506)..(1506): n is a, c, g, or t
actttggaagcaaagacagacactagctatccgaatttgagttctcccaaataactaggatgatttggatagcactttttttagtttcactggcttttctgcggttatggagaagcaataagaatgcaaagaaattaccacctggtccaaaagggttgccaattttgggaagccttcacaagttgggaccaaatcctcatcgtgacctgcacaaactagcccaaaaatatggacctgtcatgcacttacgtttaggttttgtgccgaccatagttgtttcttcacccaaatctgctgaattgttcctcaagacccatgaccttgtctttgctagtagaccacgtttcgtggcggatcaatacatctcttgggggcagaggaacttaggctttgctgaatatggttcttattggcgcaacatgcgcaagatgtgcacattggaattgctaagccaatccaaaattaactccttcagacgcatgagggaagaggagcttgaccttttgatcaagcttgtaagagaggcagccaatgatggagctgctgttgatctcagtgtcanngttgcaacactcattgcagacatgtcttgtagaatgattttaggaaagaagtacatggaccaggacatgtgtgggagagggttcaaggctgtgattcaagaagcaatgcgtttattagcaactcctaacgtaggagattacattccttacattggtgcaattgaccttcaaggcctaacgaagcgcttcaaggtactttacgaaatcttcgatgacttcttcgagaaagttattgatgagcacatggaatcagagaagggagaagacaagaccaaggattttgtggatgtcatgttgggctttttaggtactgaagaatctgaataccgcattgaacggtccaatatcaaagctatattgctggataggttggctggttcaatggatacttcagctacagcaattgagtggacactttcagagctactaaaaaatccaagggtgatgaagaaactccaaatggaattggaaactgtggtgggtatgaagaggaaggtgggggaatcggacctggacaagttgaagtatttggagatggttgtaaaggaaagcatgaggctccatccagtggtaccattgctaataccacaccaatccacggaagattgcatagtcggagattttttcatacccaaaaaatcaagggtcataataaatgcatgggcaattatgagagacccaagtgcatgggttgaggcagagaagttctggccagagagatttgaaggaagcaacatagatgtgagagggcgtgacttcgagctgataccatttgggtctggcagaagggcctgtccaggattgcaattgggcctaataacggttcgtcaaacagtggcccaacttgtgcattgctttgattggaagctgcccaataacatgtttccagatgatttggacatgacagaggcgttcggnctnacaatgcccagggccaatcatnctgcatgccattcctacgtatcggctttccaattaaagggattattagggaaaggaaaattatgcatgtacaacatgtagacattcagataacgagttttaatggagtatttgtgtactttaagtgttgtccaaatataatttggtgaaacagtttcatggtatgtgtttaggttgatttcagtaagatttattagaaaataaattacctttttccttcct

SEQ ID NO: 12510 - protein, 508 aa, Glycine max
  misc_feature (168)..(168): Xaa can be any naturally occurring amino acid
  misc_feature (474)..(475): Xaa can be any naturally occurring amino acid
  misc_feature (483)..(483): Xaa can be any naturally occurring amino acid
MIWIALFLVSLAFLRLWRSNKNAKKLPPGPKGLPILGSLHKLGPNPHRDLHKLAQKYGPVMHLRLGFVPTIVVSSPKSAELFLKTHDLVFASRPRFVADQYISWGQRNLGFAEYGSYWRNMRKMCTLELLSQSKINSFRRMREEELDLLIKLVREAANDGAAVDLSVXVATLIADMSCRMILGKKYMDQDMCGRGFKAVIQEAMRLLATPNVGDYIPYIGAIDLQGLTKRFKVLYEIFDDFFEKVIDEHMESEKGEDKTKDFVDVMLGFLGTEESEYRIERSNIKAILLDRLAGSMDTSATAIEWTLSELLKNPRVMKKLQMELETVVGMKRKVGESDLDKLKYLEMVVKESMRLHPVVPLLIPHQSTEDCIVGDFFIPKKSRVIINAWAIMRDPSAWVEAEKFWPERFEGSNIDVRGRDFELIPFGSGRRACPGLQLGLITVRQTVAQLVHCFDWKLPNNMFPDDLDMTEAFXXTMPRANHXACHSYVSAFQLKGLLGKGKLCMYNM

SEQ ID NO: 12511 - protein, 448 aa, Glycine max
  misc_feature (108)..(108): Xaa can be any naturally occurring amino acid
  misc_feature (414)..(415): Xaa can be any naturally occurring amino acid
  misc_feature (423)..(423): Xaa can be any naturally occurring amino acid
MHLRLGFVPTIVVSSPKSAELFLKTHDLVFASRPRFVADQYISWGQRNLGFAEYGSYWRNMRKMCTLELLSQSKINSFRRMREEELDLLIKLVREAANDGAAVDLSVXVATLIADMSCRMILGKKYMDQDMCGRGFKAVIQEAMRLLATPNVGDYIPYIGAIDLQGLTKRFKVLYEIFDDFFEKVIDEHMESEKGEDKTKDFVDVMLGFLGTEESEYRIERSNIKAILLDRLAGSMDTSATAIEWTLSELLKNPRVMKKLQMELETVVGMKRKVGESDLDKLKYLEMVVKESMRLHPVVPLLIPHQSTEDCIVGDFFIPKKSRVIINAWAIMRDPSAWVEAEKFWPERFEGSNIDVRGRDFELIPFGSGRRACPGLQLGLITVRQTVAQLVHCFDWKLPNNMFPDDLDMTEAFXXTMPRANHXACHSYVSAFQLKGLLGKGKLCMYNM

SEQ ID NO: 12512 - protein, 388 aa, Glycine max
  misc_feature (48)..(48): Xaa can be any naturally occurring amino acid
  misc_feature (354)..(355): Xaa can be any naturally occurring amino acid
  misc_feature (363)..(363): Xaa can be any naturally occurring amino acid
MRKMCTLELLSQSKINSFRRMREEELDLLIKLVREAANDGAAVDLSVXVATLIADMSCRMILGKKYMDQDMCGRGFKAVIQEAMRLLATPNVGDYIPYIGAIDLQGLTKRFKVLYEIFDDFFEKVIDEHMESEKGEDKTKDFVDVMLGFLGTEESEYRIERSNIKAILLDRLAGSMDTSATAIEWTLSELLKNPRVMKKLQMELETVVGMKRKVGESDLDKLKYLEMVVKESMRLHPVVPLLIPHQSTEDCIVGDFFIPKKSRVIINAWAIMRDPSAWVEAEKFWPERFEGSNIDVRGRDFELIPFGSGRRACPGLQLGLITVRQTVAQLVHCFDWKLPNNMFPDDLDMTEAFXXTMPRANHXACHSYVSAFQLKGLLGKGKLCMYNM

SEQ ID NO: 12513 - DNA, 1569 bp, Glycine max
gtagacactattgttgctagccttagatccagtctatgaatggcaaagccaagatcttggactcagatatggtttctattgtcggagtgtgtgttctgaattttgttctgaacttcaagatcgtggcagtagcagatgacactggaagcaacagtattgtatcagaaggtgactgcaagaacacaaattatcagattttcctccctccaccttatcagaatatatcctctaccatatgcaaacctgtttggcattcatacgaattgaggtacaccaagacgggtgacaccacaactatcatattatctgctccatacactgtggggtgggtgggaattggattttcaagggatgggatgatggctggttccagtgcaatggtgggatggattaacaaacatggccatgcaaaagtcaagcagttttatctaaggggtaggaggcaatcagaagtaattatagacaaaggtgaactgcctctaaatactgtgcctgctgcggtggcaacaaatggggctgaaatttacatagcttttcagctgcaaaccacaattccatttgggaagcaaccaattttattggctttcagtactaaacatccactgaaccaccatctatcaaaacatgttgacaaagcagcaattatatttgatttctcttcaggttctacgggcccggtatcgaatgggttgattcacatgagaaagagccatggaatagtgggtataattgggtggggcctaatcctgcctgtgggggcaattattgctaggtacttcaggcataaggatcccctatggttttatctccattcagtcattcaatttgtgggattttcatttgggcttggcacagtccttcttggattacaactctatagaaacatgcatgtccacataccagctcacagaggcataggcatctttgtccttgtcctaagtattcttcagatattggcattcttcttgaggccagacaaggattccaagtatcgaaacatttggaatttgtatcacagttggtttggaagaatggcacttttctttgcagcattgaatatagtcctggggatgcgagctgcgggagcagggaatgattggaaggcaggctatgggttccttcttagcattgtacttgtcgcagttatcgttctggaagtcttggcgtatttgaaaaggtcagaaaagcgttctcttcctcagactttccaaatggacccagttggagatgctaacttcccaaccaatctagctaaagggtgaatgtgttggctcctagttttgtttgcacttgtacaagctgtgtcaattgtctcattcagccacttcagactaaacctcattcatcctacactactgcatgtgaactgagttgtggagctttcttgatgtagatagatatgtagccacctagaagtttgccaagatggacaatcctgacgtttggcttcctcacctgaacttgagattgaaccttttttgctttcttcattggttgtttttttgcatccgcatggtcagaaatggaatgctactacatttacatctatatatattttgttattcttcc

SEQ ID NO: 12514 - protein, 408 aa, Glycine max
MNGKAKILDSDMVSIVGVCVLNFVLNFKIVAVADDTGSNSIVSEGDCKNTNYQIFLPPPYQNISSTICKPVWHSYELRYTKTGDTTTIILSAPYTVGWVGIGFSRDGMMAGSSAMVGWINKHGHAKVKQFYLRGRRQSEVIIDKGELPLNTVPAAVATNGAEIYIAFQLQTTIPFGKQPILLAFSTKHPLNHHLSKHVDKAAIIFDFSSGSTGPVSNGLIHMRKSHGIVGIIGWGLILPVGAIIARYFRHKDPLWFYLHSVIQFVGFSFGLGTVLLGLQLYRNMHVHIPAHRGIGIFVLVLSILQILAFFLRPDKDSKYRNIWNLYHSWFGRMALFFAALNIVLGMRAAGAGNDWKAGYGFLLSIVLVAVIVLEVLAYLKRSEKRSLPQTFQMDPVGDANFPTNLAKG

SEQ ID NO: 12515 - protein, 397 aa, Glycine max
MVSIVGVCVLNFVLNFKIVAVADDTGSNSIVSEGDCKNTNYQIFLPPPYQNISSTICKPVWHSYELRYTKTGDTTTIILSAPYTVGWVGIGFSRDGMMAGSSAMVGWINKHGHAKVKQFYLRGRRQSEVIIDKGELPLNTVPAAVATNGAEIYIAFQLQTTIPFGKQPILLAFSTKHPLNHHLSKHVDKAAIIFDFSSGSTGPVSNGLIHMRKSHGIVGIIGWGLILPVGAIIARYFRHKDPLWFYLHSVIQFVGFSFGLGTVLLGLQLYRNMHVHIPAHRGIGIFVLVLSILQILAFFLRPDKDSKYRNIWNLYHSWFGRMALFFAALNIVLGMRAAGAGNDWKAGYGFLLSIVLVAVIVLEVLAYLKRSEKRSLPQTFQMDPVGDANFPTNLAKG

SEQ ID NO: 12516 - protein, 301 aa, Glycine max
MMAGSSAMVGWINKHGHAKVKQFYLRGRRQSEVIIDKGELPLNTVPAAVATNGAEIYIAFQLQTTIPFGKQPILLAFSTKHPLNHHLSKHVDKAAIIFDFSSGSTGPVSNGLIHMRKSHGIVGIIGWGLILPVGAIIARYFRHKDPLWFYLHSVIQFVGFSFGLGTVLLGLQLYRNMHVHIPAHRGIGIFVLVLSILQILAFFLRPDKDSKYRNIWNLYHSWFGRMALFFAALNIVLGMRAAGAGNDWKAGYGFLLSIVLVAVIVLEVLAYLKRSEKRSLPQTFQMDPVGDANFPTNLAKG

SEQ ID NO: 12517 - DNA, 974 bp, Glycine max
aagtttataatctaatttttctcgtaatcatttcttcatttgttggaatcttctgtactttgaaattggaacttcctataatatacgttatgtataatgcgttaaaggttagaagtcgtttttttttccttgctttgagtaattttattactcaaatcttgtaattactccaactttttcacagaatcactgttgacccaaatcattcattagatcttattctcttatggtgtaagtgtaactgatgctgttcactttgttgagcattataatggacaaaacttagatgcacttttataggtgtatttggtgttgttctctaatcaaaattgaagtacctcaaaaaatcacttgataaaaaaatccattaaatatcaattcagatatcaaagtaaaactccaaccctaattagagaatagcaccaaaagtatatatgaaattgcatctaagttttgtactattatatgtattaggttcttgaaaccctttcttagagtgtttaaagaccttgaatgcacgcaattgtatcctgtaaagatgttaacagtgtgcagttttgtgctggtttaatatcttttactttatcaactatattgaagttttgaagagcataattgcaacagttgtcaggtgatataaatgaggaagtggatagtcataaccggatgctggatcgtatgggaaacgatatggattcttcgagaggagtcctctcaggcactatggataaattcaaaatggtatttgagacaaaatccagccgaagaatgttttcacttgtagcatcctttgtcgtgctttttcttataatatactatctgactaggtaattggtctttcacgcacttgtcagctttatgttagatcgaaaaggaggctactcgcactattcctgtaattagcgttacttgtaagattttccttatgtttgtataaagactttgctgtttcgtttaatccaacgagtaatgtc

SEQ ID NO: 12518 - protein, 54 aa, Glycine max
MLDRMGNDMDSSRGVLSGTMDKFKMVFETKSSRRMFSLVASFVVLFLIIYYLTR

SEQ ID NO: 12519 - protein, 53 aa, Glycine max
VYNLIFLVIISSFVGIFCTLKLELPIIYVMYNALKVRSRFFFLALSNFITQIL

SEQ ID NO: 12520 - protein, 50 aa, Glycine max
MGNDMDSSRGVLSGTMDKFKMVFETKSSRRMFSLVASFVVLFLIIYYLTR

SEQ ID NO: 12521 - DNA, 1613 bp, Glycine max
gctttccattaaaaaaaaaaaaacgaaatggaagcgcatccaaacgcggccatgctgagaacccgaactataataccttctcctccaccatcactcgccctgagtaagaggctgccgtcaccgtcaccgtcaccatcaccgttaccgttactgtcaccgtccgttatcctctccgaacccgtgaaaccctcgttccaccggtttcctctgttctcgaatcctcacactcttcgaaccatgacgctctccaagtgtttctctcactccgggcccaaacccgaatccgaacccgaaccggaacccgattcacctcacactctcgttgtggtttcattctacaagttcgcggatttccccgaccacgccctcttgcgaaatcccttgaagcaactgtgccaacgcctgcgtgtttcaggtggaattattcttgcaccggaagggatcaatggcagcatatgtgggactcgggagtcagtggaggaagttcttacgtttgtggagagcgatgatcgattaaaggggctaaggcgagtggaatcacctgttagtcctgaggaggaggccatccatcatgggcacagtgccacttctcctcttgctgcaggggaagatgcgcccttccgatgggatcatgtgagggtcaagttgaagaaagagattgtcactcttgggatgcctactgtgtcgcctattgaaagggttggaaagtatattggcccagaagagtggaatgctttgattagcaatccagatacagtggtaattgatgtgcggaataactatgaaaccagaataggaaaatttaaaggagcagttgatccttgtaccacatcatttcgtgaattcccatcttgggtggatgagcatttccagcttactgaaacagatgatagggagcatccaaaagttgaggtaaactcagtccaacctgctgaaaaagaaatggataataaaagacaacatatgccacgtgttgcaatgtattgcactggaggtattcgatgtgagaaagctacaagtctacttctcagcaaaggtttcaaagaggtttttcacctagaaggtggaattctaaaatatcttgaggaggttccagagacagagagcctctgggaaggggagtgctttgtttttgacaaacgagtctctgtggagcatggtttggtgcccggaaatttcaagctctgctatggttgcaaacaacctgtgagtgatgctgacatggaagccccggaatatgaatatggagtctcttgtcctcactgttttgcacagaaatcagatgaagagaaggaaagggctcgagctcgacaaagacaatttgagagatggggaatcataggaggtccagataagggtcgccggccaacttgtgaacaggaaagtactaataggaaaccaaaccagctttcacgttctatttaactagtcagatatggaatgatgagataacatcttccatgtttgttttgaacaaatgtttgtcctcttgtgctaaaatacttgaatgtgttagtctcttctcttgaatgtgttcggagtgcacaaaaactatagatgtacgtttgtttcttacatatgatttccagtcttacgatccatttttggtttct

SEQ ID NO: 12522 - protein, 465 aa, Glycine max
MEAHPNAAMLRTRTIIPSPPPSLALSKRLPSPSPSPSPLPLLSPSVILSEPVKPSFHRFPLFSNPHTLRTMTLSKCFSHSGPKPESEPEPEPDSPHTLVVVSFYKFADFPDHALLRNPLKQLCQRLRVSGGIILAPEGINGSICGTRESVEEVLTFVESDDRLKGLRRVESPVSPEEEAIHHGHSATSPLAAGEDAPFRWDHVRVKLKKEIVTLGMPTVSPIERVGKYIGPEEWNALISNPDTVVIDVRNNYETRIGKFKGAVDPCTTSFREFPSWVDEHFQLTETDDREHPKVEVNSVQPAEKEMDNKRQHMPRVAMYCTGGIRCEKATSLLLSKGFKEVFHLEGGILKYLEEVPETESLWEGECFVFDKRVSVEHGLVPGNFKLCYGCKQPVSDADMEAPEYEYGVSCPHCFAQKSDEEKERARARQRQFERWGIIGGPDKGRRPTCEQESTNRKPNQLSRSI

SEQ ID NO: 12523 - protein, 457 aa, Glycine max
MLRTRTIIPSPPPSLALSKRLPSPSPSPSPLPLLSPSVILSEPVKPSFHRFPLFSNPHTLRTMTLSKCFSHSGPKPESEPEPEPDSPHTLVVVSFYKFADFPDHALLRNPLKQLCQRLRVSGGIILAPEGINGSICGTRESVEEVLTFVESDDRLKGLRRVESPVSPEEEAIHHGHSATSPLAAGEDAPFRWDHVRVKLKKEIVTLGMPTVSPIERVGKYIGPEEWNALISNPDTVVIDVRNNYETRIGKFKGAVDPCTTSFREFPSWVDEHFQLTETDDREHPKVEVNSVQPAEKEMDNKRQHMPRVAMYCTGGIRCEKATSLLLSKGFKEVFHLEGGILKYLEEVPETESLWEGECFVFDKRVSVEHGLVPGNFKLCYGCKQPVSDADMEAPEYEYGVSCPHCFAQKSDEEKERARARQRQFERWGIIGGPDKGRRPTCEQESTNRKPNQLSRSI

SEQ ID NO: 12524 - protein, 395 aa, Glycine max
MTLSKCFSHSGPKPESEPEPEPDSPHTLVVVSFYKFADFPDHALLRNPLKQLCQRLRVSGGIILAPEGINGSICGTRESVEEVLTFVESDDRLKGLRRVESPVSPEEEAIHHGHSATSPLAAGEDAPFRWDHVRVKLKKEIVTLGMPTVSPIERVGKYIGPEEWNALISNPDTVVIDVRNNYETRIGKFKGAVDPCTTSFREFPSWVDEHFQLTETDDREHPKVEVNSVQPAEKEMDNKRQHMPRVAMYCTGGIRCEKATSLLLSKGFKEVFHLEGGILKYLEEVPETESLWEGECFVFDKRVSVEHGLVPGNFKLCYGCKQPVSDADMEAPEYEYGVSCPHCFAQKSDEEKERARARQRQFERWGIIGGPDKGRRPTCEQESTNRKPNQLSRSI

SEQ ID NO: 12525 - DNA, 747 bp, Glycine max
agcaattaagacattcagatcttaacccctaagaaaagtatcgaaaaaagactcatagtccatcacccagcaagaaaaaagaaaatcgaagaggaagagcaaggacacaacacaaagaagcaaaagaagacatggcgttgcagtggctgattctcacttacgtggtcgcagctgaggctgccgtggccattctgctaacccttcccacgcccaaactcctaagggaccgtttcgcctctctcgtttccctcattcttcaacccgcgcttttcattgtcccctttgcggggttccaactccttgatatatactggaaaaatgagcatcggttgatgtgtacctctgaagtttgtactgctgcggagagagatcgatatgagaaatctatatacaaagctcagaggaatgtaatactgtgtgttacagcatgtcttctctactggtctatcagccgcatttgcaagtatcagaaggaaatccagagtctggaggaaggggagaagagaatcaagtcccactagattcttttagtcatgattagtggaggatatccttgaggctactttagttgagtctagtatggacatgccaacatgatgtaccaaattatacagtgtgatatactcatgtgattcagttttatattttcaaattccaatttttctttgttatgctgtttggacgtgctcttgacttctatcttgtttaatggcttttagcctatatcagtgaaatattttttctttt

SEQ ID NO: 12526 - protein, 129 aa, Glycine max
MALQWLILTYVVAAEAAVAILLTLPTPKLLRDRFASLVSLILQPALFIVPFAGFQLLDIYWKNEHRLMCTSEVCTAAERDRYEKSIYKAQRNVILCVTACLLYWSISRICKYQKEIQSLEEGEKRIKSH

SEQ ID NO: 12527 - DNA, 895 bp, Glycine max
ttcttcacttgacaaagttatagattgacacttgtggaccacgagccaccacataaggaaacctgacaccaggagaagtcattatcatccacgagtatagccattctggccacctgtggtacttgcaccgccgccatcttacttgtctgaatcggtcaccaagtcgaaccttcggttctgataccaattgttggggagattcgagaggtacacctgtggaccatgagccaccacataaggaaacctgacatcacactctaacccaaaaccttaaggctcagacatgggaactttatcagaaaagagaattggtagggctgatagacatgtcactagacggccatttcgatgtcgaggaggcatgtaagtttctgaaaattggacttctttgcactcaggacacgtcgaagctccggccaaccatgtcatctgtggtgaagatgctcactggagaaaacgatattgatgaaagtaagataacaaagccaagctttatttcagattttatgaatcttaaaatcagaggagaaaaaggtggtgatattgataccaaggtttcatcttcctacaatgcatcctctgcctcagacagccacagcaataccatgtcatatgctgcaagtacaactacaaccacaaccttcaccgggaaatatgatcaaagtttgtaaacattagtagtcaatgattttccttttgatttgaaattgttttatttcatttttaagagatgtcccttgcccaacgtaaatgtgctacgttattatgttaatattttattttgggtacgatgtcacgtgactaggaagttttgccggatgtgcactgtcttgtaaatatggaccatggttataatcaaatgatgaatctgaagatctttgtttttttataagcc

SEQ ID NO: 12528 - protein, 114 aa, Glycine max
MSLDGHFDVEEACKFLKIGLLCTQDTSKLRPTMSSVVKMLTGENDIDESKITKPSFISDFMNLKIRGEKGGDIDTKVSSSYNASSASDSHSNTMSYAASTTTTTTFTGKYDQSL

SEQ ID NO: 12529 - protein, 82 aa, Glycine max
MSSVVKMLTGENDIDESKITKPSFISDFMNLKIRGEKGGDIDTKVSSSYNASSASDSHSNTMSYAASTTTTTTFTGKYDQSL

SEQ ID NO: 12530 - protein, 76 aa, Glycine max
MLTGENDIDESKITKPSFISDFMNLKIRGEKGGDIDTKVSSSYNASSASDSHSNTMSYAASTTTTTTFTGKYDQSL

SEQ ID NO: 12531 - DNA, 1658 bp, Glycine max
tgatagaagcacaagtgtcatcatgttatgtgtaaaaatgtcttcttcttcttcttctcctgctgttctctcaaaatgcaccgttttccctcaccggaactccactctgggggacctcaagctctctatctccgaccttaacatgtttttatctcactacatccaaaaaggctgtctcttcaccactccttcacttccctctcactctcacactctcatccctcacctcaaaaacgcgctttcccaaaccctctctctcttccctcccctcgccggccgtctcaaaaccgacaccgacggcttcgtttacatcacatgcaacgacgccggcgtcgacttcatccacgccaccgccgccgatatctccgtcgcagacctcctctccccgtcgtcttcgtctgatgtccctccaatctccaagcaactcttccccttccaccacaaaatcagttacactgctcattcttcccctatcatggccttccaggtcaccgatctcgccgacgccgtcttccttggctgcgccgtctgccactccgtcaccgacggcgcctccttctggaacttcttcaacaccttcgccggaatctcaagaggagccaccatctctccctccagcctccccgatttccgccgcgagtccatcctcagctccaacgtcgtgctccgcctgccagaagatatcaaggtgacctttaatgtggaggaaccttttcgcgagagaatcttcagcttcagccgcgaatcaattcagaaactgaaagctactgtgaacaaaagcttgacattgtttcctccgccagagaacggtgacgcggttgagttgatggcgaagatgagcagcgacacgcaactgagaacggttacagagatttcgtcgtttcagtcgctgtgcgcgctggtgtggcgctgcgtgacgaaggcgcgaaatctcgaggggtcgaaaacgacgacgtttcgaatggcagttaatgttcgccaacgcttggagcccaagttgggggacagttacttcgggaacgcgattcagagcattgccacgtgcgcagaagctggtgatgtggcgtctaaggagcttcgctggtgcgcggagcagctgaacaaaagcgtgaaggccttcgatggtgctacggtgcgccgtaacttggagaattgggagcgcgagcctaagtgcttcgagttgggaaaccacgacggcgccaccgtgcagatgggaagctcgccgaggtttccgatgtacgacaatgattttggatgggggcggcccttagccgtgcgcagcggcggagcgaacaagtttgacggcaagatgtcggcgtttcccgggaggaatggcggcggcgccatcgatttggaggtggttttggcgccggaaaccatggcgcgactcgagtctgattctgagttcatgttttacgtgtctggttggtagggacgcatgttttaatctgaatagcttagctttcaccgtgatgttgttgttgccgttagattgtgtttatttattttaccgtgtttataaaaaacttgagtaacgccgtaacggcacgcttagaatggggctgattttgctgtgctaacagcatctctgcgactgcgccattgtgcgttatttgccttattagtatttattgtattgttattgattccagttcctg

SEQ ID NO: 12532 - protein, 476 aa, Glycine max
DRSTSVIMLCVKMSSSSSSPAVLSKCTVFPHRNSTLGDLKLSISDLNMFLSHYIQKGCLFTTPSLPSHSHTLIPHLKNALSQTLSLFPPLAGRLKTDTDGFVYITCNDAGVDFIHATAADISVADLLSPSSSSDVPPISKQLFPFHHKISYTAHSSPIMAFQVTDLADAVFLGCAVCHSVTDGASFWNFFNTFAGISRGATISPSSLPDFRRESILSSNVVLRLPEDIKVTFNVEEPFRERIFSFSRESIQKLKATVNKSLTLFPPPENGDAVELMAKMSSDTQLRTVTEISSFQSLCALVWRCVTKARNLEGSKTTTFRMAVNVRQRLEPKLGDSYFGNAIQSIATCAEAGDVASKELRWCAEQLNKSVKAFDGATVRRNLENWEREPKCFELGNHDGATVQMGSSPRFPMYDNDFGWGRPLAVRSGGANKFDGKMSAFPGRNGGGAIDLEVVLAPETMARLESDSEFMFYVSGW

SEQ ID NO: 12533 - protein, 469 aa, Glycine max
MLCVKMSSSSSSPAVLSKCTVFPHRNSTLGDLKLSISDLNMFLSHYIQKGCLFTTPSLPSHSHTLIPHLKNALSQTLSLFPPLAGRLKTDTDGFVYITCNDAGVDFIHATAADISVADLLSPSSSSDVPPISKQLFPFHHKISYTAHSSPIMAFQVTDLADAVFLGCAVCHSVTDGASFWNFFNTFAGISRGATISPSSLPDFRRESILSSNVVLRLPEDIKVTFNVEEPFRERIFSFSRESIQKLKATVNKSLTLFPPPENGDAVELMAKMSSDTQLRTVTEISSFQSLCALVWRCVTKARNLEGSKTTTFRMAVNVRQRLEPKLGDSYFGNAIQSIATCAEAGDVASKELRWCAEQLNKSVKAFDGATVRRNLENWEREPKCFELGNHDGATVQMGSSPRFPMYDNDFGWGRPLAVRSGGANKFDGKMSAFPGRNGGGAIDLEVVLAPETMARLESDSEFMFYVSGW

SEQ ID NO: 12534 - protein, 464 aa, Glycine max
MSSSSSSPAVLSKCTVFPHRNSTLGDLKLSISDLNMFLSHYIQKGCLFTTPSLPSHSHTLIPHLKNALSQTLSLFPPLAGRLKTDTDGFVYITCNDAGVDFIHATAADISVADLLSPSSSSDVPPISKQLFPFHHKISYTAHSSPIMAFQVTDLADAVFLGCAVCHSVTDGASFWNFFNTFAGISRGATISPSSLPDFRRESILSSNVVLRLPEDIKVTFNVEEPFRERIFSFSRESIQKLKATVNKSLTLFPPPENGDAVELMAKMSSDTQLRTVTEISSFQSLCALVWRCVTKARNLEGSKTTTFRMAVNVRQRLEPKLGDSYFGNAIQSIATCAEAGDVASKELRWCAEQLNKSVKAFDGATVRRNLENWEREPKCFELGNHDGATVQMGSSPRFPMYDNDFGWGRPLAVRSGGANKFDGKMSAFPGRNGGGAIDLEVVLAPETMARLESDSEFMFYVSGW

SEQ ID NO: 12535 - DNA, 1285 bp, Glycine max
aaatggagtggctttagttagttcaattaaacccatctctagtttgggaaatcttggcttcaacaccttgaagaagctctcaagtgattagagagagttcacagtcctctggcatcacaatgatgacaccagaatcagcagaggacttagaaaaacatgcaatctcaggtcatcatgtgagggggaatagtgaatatgttagacttgccatatctgatgaactgagggttgtcgaaaccgaaatgctacagcctctagcagagtcaagaatgaaatctttcaggtggtggataaaagcccttttatggtgctttgtcattgttgtacttggtcttgttatattgaaatggggagtgccatttacttttgaaaaggttctttacccaatcatggagtgggaagcaactgcctttggccgtccagttcttgcccttgtacttgttgcttctctggctttattcccagtattttttatcccttctggcccttccatgtggttggctgggatgatttttggttatggccttggctttgttattataatggttggaacaaccattggaatggtcctcccttacttaattggactaattttccgtgaccgcattcatcaatggttaaagagatggcccaagaatgccgcaatgattaggcttgctggggaaggaagctggttccatcaatttcaagtagttgctctgtttagagtttctccttttccgtataccatattcaactatgctgtagtagtgacaaatatgaggttttggccgtacttatgtgggtcaatagcaggaatggtgccagaagctttcatttacatctacagtggtcgattaataaggaccttggcagacgcacagtatggaaagcaccaattgaccactgtggaaatcatatacaacattatttcattcattgttgctgttgttaccaccattgccttcactgtttatgcaaaaaggaccttaaatgaactcaagattgcagaggccaatgaggaagctgcctctgtatctgggagtagtaatcttgagatggggaaaggttcccattgaaaggcttctcatcaaatttcccacgatactgtacatttatgtatctaaaatttgtgttaggactacatgtaccatagtgtttttctccctcccacttgggccatttattgattattggaatgagtatgtagggtagaacagtctgcaaatgcaccaatcgggtaaacataataaacggctgtttgtaataaattggaaagagcttttactaacgtgttttatttttt

SEQ ID NO: 12536 - protein, 312 aa, Glycine max
MMTPESAEDLEKHAISGHHVRGNSEYVRLAISDELRVVETEMLQPLAESRMKSFRWWIKALLWCFVIVVLGLVILKWGVPFTFEKVLYPIMEWEATAFGRPVLALVLVASLALFPVFFIPSGPSMWLAGMIFGYGLGFVIIMVGTTIGMVLPYLIGLIFRDRIHQWLKRWPKNAAMIRLAGEGSWFHQFQVVALFRVSPFPYTIFNYAVVVTNMRFWPYLCGSIAGMVPEAFIYIYSGRLIRTLADAQYGKHQLTTVEIIYNIISFIVAVVTTIAFTVYAKRTLNELKIAEANEEAASVSGSSNLEMGKGSH

SEQ ID NO: 12537 - protein, 311 aa, Glycine max
MTPESAEDLEKHAISGHHVRGNSEYVRLAISDELRVVETEMLQPLAESRMKSFRWWIKALLWCFVIVVLGLVILKWGVPFTFEKVLYPIMEWEATAFGRPVLALVLVASLALFPVFFIPSGPSMWLAGMIFGYGLGFVIIMVGTTIGMVLPYLIGLIFRDRIHQWLKRWPKNAAMIRLAGEGSWFHQFQVVALFRVSPFPYTIFNYAVVVTNMRFWPYLCGSIAGMVPEAFIYIYSGRLIRTLADAQYGKHQLTTVEIIYNIISFIVAVVTTIAFTVYAKRTLNELKIAEANEEAASVSGSSNLEMGKGSH

SEQ ID NO: 12538 - protein, 271 aa, Glycine max
MLQPLAESRMKSFRWWIKALLWCFVIVVLGLVILKWGVPFTFEKVLYPIMEWEATAFGRPVLALVLVASLALFPVFFIPSGPSMWLAGMIFGYGLGFVIIMVGTTIGMVLPYLIGLIFRDRIHQWLKRWPKNAAMIRLAGEGSWFHQFQVVALFRVSPFPYTIFNYAVVVTNMRFWPYLCGSIAGMVPEAFIYIYSGRLIRTLADAQYGKHQLTTVEIIYNIISFIVAVVTTIAFTVYAKRTLNELKIAEANEEAASVSGSSNLEMGKGSH

SEQ ID NO: 12539 - DNA, 1336 bp, Glycine max
gaacaacaactgacacattcaaaacacgtgtaaactgtttctattaccttgagatttgttgtcactgaaaaactcacctagactgtctcagggaaaatggcttcattgaaactgccagaggttgttccttctcccacacaagacagtgaacgactcagaaaggctttccaaggatttgggacagatgagaaagcggtgatattggtattgggacacaggaatgctcaacaaaggaagaaaattggagaaacttatcagcagctttacaatgaatcgcttgtcgatcgtcttcattctgaattgtctggtgattttagaaatgctgtaattctctggacctacgatcctccagaaaggcatgcgagactagcaaaggatgcattgaaggctaagaaggggattaaacaccttcaggttctggttgaaatagcatgtgcatcaactcctaaccatttggtggctgtgaggcaggcttactgctctctctttgattgctcacttgaggaggacatcatagcctctgttgctccagccctcagaaagcttttagtgagcctagtaagctcattcaggtatgataaagtggctgtaaatttggaggtagccaaggaagaggcatcaaaactacatgaagctatcaacagcaagcaattagacaatgatcatattatttggatacttagcaccaggaatcttttccagctccgggaaacttttgcatgctacaataacctctatgggaatacattggaacaggacataaaaaaatgtggtaatggtgatttggaatctctcttacatacggtgatatggtgtatagactgccccgagaaacattttgcaaaggttgtaagagattctatagttgggtttggaaccgatgaagattccctcaacagagctattgtaactcgagccgaaattgatctgttgaacgtcagatttgaatatgctaacgtgtacaagtctagtcttgatgatgatgttattggggatacttcagggtactacaaagattttttgatgactttgctagggaaaggtccagatggagagtgatacattataaccaacaagcacagctcatggtattctaggattgcttgtaatctgcatttgatggtctagactctgtaatatatatgttgctcctttttatttcaaaagaatcagaattcaagattgaaaccaaaaccatttatttgttattctgcattgactttgtgtagattaattgtagcttgatgtcttggtgtatagtaaataacaagggatttatgatgtgaaacacagaatttgtatcttggttgcaattataatattattttacacatgt

SEQ ID NO: 12540 - protein, 320 aa, Glycine max
MASLKLPEVVPSPTQDSERLRKAFQGFGTDEKAVILVLGHRNAQQRKKIGETYQQLYNESLVDRLHSELSGDFRNAVILWTYDPPERHARLAKDALKAKKGIKHLQVLVEIACASTPNHLVAVRQAYCSLFDCSLEEDIIASVAPALRKLLVSLVSSFRYDKVAVNLEVAKEEASKLHEAINSKQLDNDHIIWILSTRNLFQLRETFACYNNLYGNTLEQDIKKCGNGDLESLLHTVIWCIDCPEKHFAKVVRDSIVGFGTDEDSLNRAIVTRAEIDLLNVRFEYANVYKSSLDDDVIGDTSGYYKDFLMTLLGKGPDGE

SEQ ID NO: 12541 - DNA, 703 bp, Glycine max
gaggttaggttccaatattcgcaacgagaacgagaggaggggttcgggtgtgagagcgagaatcagaagatgaagaaggaagacacagtgaagctgatcagtgccgaaggttttgaatttgtggtcgacaaagaagctgcaatggtttcacagaccatacataacatgcttacttctccagggagtttcgctgagaggcagcacggcgaagttacctttcctgagatcagcaccaccattctcgagaagatttgccagtacttttattggcatctccaattcgccagtgggaaggagacggaatttcccattgaacctgaattaactctggagctaatgatggctgccaattacctccatacatagcattttgacttccccaagggtgatagttcttcggccacataatggaactattgcctagttgggcattcaaagggaaatcagcgtattagtgttgccactgaaactatgtccttgctggaactaagtatatatgtaatttgtataatttagtgactgttagactcagcttgcaagactctgatgccgtcgattgatgttgctgtataaatcaactggttttaaaattctaatttaatgggaacattaccatctcccgataaggtaaatcataatgctcttgtaatgtccattaacaatatagacattgttatccaaacaaggaaaggaaattcgctct

SEQ ID NO: 12542 - protein, 121 aa, Glycine max
EVRFQYSQREREEGFGCESENQKMKKEDTVKLISAEGFEFVVDKEAAMVSQTIHNMLTSPGSFAERQHGEVTFPEISTTILEKICQYFYWHLQFASGKETEFPIEPELTLELMMAANYLHT

SEQ ID NO: 12543 - protein, 98 aa, Glycine max
MKKEDTVKLISAEGFEFVVDKEAAMVSQTIHNMLTSPGSFAERQHGEVTFPEISTTILEKICQYFYWHLQFASGKETEFPIEPELTLELMMAANYLHT

SEQ ID NO: 12544 - protein, 74 aa, Glycine max
MVSQTIHNMLTSPGSFAERQHGEVTFPEISTTILEKICQYFYWHLQFASGKETEFPIEPELTLELMMAANYLHT

SEQ ID NO: 12545 - DNA, 1368 bp, Glycine max
gggcaatgaatgatttgtgtggaatgggtgagtaaataagtcgataagtgataagtgagtgaaacgccgcattcagaactcagaactcagaagaccgtgtaacgcactccactgcactgttgttctctctcgaacttatcagatgagcagagaaaatacgccagcaatggcaaaggaagaagtctgtgatgatggttcctccagtgttgagaatgtggatttagaatctcatgctcgaattagtctcgacaaggataatggcttgggaacctgtcgtgtgtgccaatgtaccgaatctgataaaaaggcagatgccgcactagaattttagggcatcattccaggttcagaaatgtgtaaaaccaagggggaagtgggatctgatggtggtggcgatggaattcccgaaaatacgtctcttgacagaaataatgagaaaaatgctggtatggtggaatttgtaagccctaatggggaggttttcatttgtaaaagcgatttggaacttggtttgtgtcatcaagataaattagttgaacttggatgttcttgtaaaaacgaccttgctttagtacattatgcttgtgcacttaagtggtttgtcaaccatggatctaccatttgtgaaatatgtggacatatagcaaataatatcagaatttctgacttcaataaggttgttggtgctttgaaggagtatgaagtattgagggaaagaactgctagtggggatcctggtgccgcacatgttcatgcaaatgctgttgtggatcctgatgctgtggctgctatccggaggcaacggctaagtgagattgcactatggttttgtccttataataacagtcacaataacaacatcagcagtgtggacacagtttcacagattgtttctgagcagcctttaagtattgttactgaagatgctgcccccacacagaatcctgcaaccaagtgggccgtggagggtacagggatcctgcttgctacggggctgcttaccatcacccttgcatggcttatagctcctcgtgttggaaagaaaactgctagaagtggtcttcatatcttacttggaggagtttgtgctttagccgtggtggttttcttccgcttttttgtgcttaccagaatcaagtatggacctgcacgttattgggcaatcttgttcgttttctggtttcttgtctttggaatatgggcttcaaggacccatggtgcccacacaacatgatcccatagtgcagttgttatactattgacaagtgtaccaattgttgtcacagtttacaaaatttgtagttaagatcgtcttctcgggaacttgggttactcagttccttggtaatattaaatagtttaatagtt

SEQ ID NO: 12546 - protein, 293 aa, Glycine max
MCKTKGEVGSDGGGDGIPENTSLDRNNEKNAGMVEFVSPNGEVFICKSDLELGLCHQDKLVELGCSCKNDLALVHYACALKWFVNHGSTICEICGHIANNIRISDFNKVVGALKEYEVLRERTASGDPGAAHVHANAVVDPDAVAAIRRQRLSEIALWFCPYNNSHNNNISSVDTVSQIVSEQPLSIVTEDAAPTQNPATKWAVEGTGILLATGLLTITLAWLIAPRVGKKTARSGLHILLGGVCALAVVVFFRFFVLTRIKYGPARYWAILFVFWFLVFGIWASRTHGAHTT

SEQ ID NO: 12547 - protein, 261 aa, Glycine max
MVEFVSPNGEVFICKSDLELGLCHQDKLVELGCSCKNDLALVHYACALKWFVNHGSTICEICGHIANNIRISDFNKVVGALKEYEVLRERTASGDPGAAHVHANAVVDPDAVAAIRRQRLSEIALWFCPYNNSHNNNISSVDTVSQIVSEQPLSIVTEDAAPTQNPATKWAVEGTGILLATGLLTITLAWLIAPRVGKKTARSGLHILLGGVCALAVVVFFRFFVLTRIKYGPARYWAILFVFWFLVFGIWASRTHGAHTT

SEQ ID NO: 12548 - DNA, 1373 bp, Glycine max
atgtgagctaggcccaatagtcgtttcggttggtggttgagctgagcgcgagtgtctgagacttagccacgcatccccgaaaggccaccaaacaccgcttcaatttcaatttatacgtcaacgaagcaatttcagaagcagaagcataagcataagcgttcagttattaagtgtcggtgttgaacgttaaaacctaaaatggccggtaaagggacccattcagattcaaaagcagcaacaattgtgattaaggatctgagattcacataccccggcatcgacggccaccctccgccgggttccactcccctcattcaggatttcaatctcactctttcttccggccatcgctgcctcctcgtcggttccaacggcgccggaaagaccactctcctcaagatattaggagggaaacacttggtggagcctgacatggttcgcgtgctcggaagatcagcttttcacgacaccactctaatatcttctggtgatctctgttaccttggtggcgagtggaggcgagatgttgcttttgcgggttttgaggttccaatacaaatggacatatctgctcaaaaaatgatatttggtgtgcctgggattgatcctcaaagaagagccgagctaatcaaggtattagatatcgatctttcctggagattgcataaagtatctgatggtcaaagaagaagggtgcagatttgtatgggtctcctcaaaccattcaaggttcttcttctcgatgagataacagttgaccttgatgttctagcaagagctgaccttatgagatttctaagaaaggaatgtgacgagaggggtgccactattatctatgcaacacatatatttgacggcctcgaggattggccaacaaatattgtttatgtagcccatgggaagctgcaactagcaatgcctatggacaaagtcaaagaaattagcaaattatcactaatgagaacagtagaaagttggctgcggaaagaacgagatgaagatagaaagaaaaggaaagagagaaaagcagctggtcttcctgaatttggaaagcgagttgaggaaagccgtgtaacaggggatccagcgcgtgctgcagttcgagtaattaataatggttgggctgcaggacgattaacttccaccgttgctgtgaggaaaactttctcctgagctcaaaccgagtattgaggcagtagataaatttcaaatgctattgcctatgagcattttttctgtgtatttttataaacttcaaaacaaaatttgttctccaatgctttctggcatatgtaattcgttgtgatatagaaatgatcacaacaggttatacacaaaatgtgagctaatgtatctgagtatctctactattg

SEQ ID NO: 12549 - protein, 324 aa, Glycine max
MAGKGTHSDSKAATIVIKDLRFTYPGIDGHPPPGSTPLIQDFNLTLSSGHRCLLVGSNGAGKTTLLKILGGKHLVEPDMVRVLGRSAFHDTTLISSGDLCYLGGEWRRDVAFAGFEVPIQMDISAQKMIFGVPGIDPQRRAELIKVLDIDLSWRLHKVSDGQRRRVQICMGLLKPFKVLLLDEITVDLDVLARADLMRFLRKECDERGATIIYATHIFDGLEDWPTNIVYVAHGKLQLAMPMDKVKEISKLSLMRTVESWLRKERDEDRKKRKERKAAGLPEFGKRVEESRVTGDPARAAVRVINNGWAAGRLTSTVAVRKTFS

SEQ ID NO: 12550 - protein, 246 aa, Glycine max
MVRVLGRSAFHDTTLISSGDLCYLGGEWRRDVAFAGFEVPIQMDISAQKMIFGVPGIDPQRRAELIKVLDIDLSWRLHKVSDGQRRRVQICMGLLKPFKVLLLDEITVDLDVLARADLMRFLRKECDERGATIIYATHIFDGLEDWPTNIVYVAHGKLQLAMPMDKVKEISKLSLMRTVESWLRKERDEDRKKRKERKAAGLPEFGKRVEESRVTGDPARAAVRVINNGWAAGRLTSTVAVRKTFS

SEQ ID NO: 12551 - protein, 204 aa, Glycine max
MDISAQKMIFGVPGIDPQRRAELIKVLDIDLSWRLHKVSDGQRRRVQICMGLLKPFKVLLLDEITVDLDVLARADLMRFLRKECDERGATIIYATHIFDGLEDWPTNIVYVAHGKLQLAMPMDKVKEISKLSLMRTVESWLRKERDEDRKKRKERKAAGLPEFGKRVEESRVTGDPARAAVRVINNGWAAGRLTSTVAVRKTFS

SEQ ID NO: 12552 - DNA, 947 bp, Glycine max
atattttttttacataaacaacgacacataattatattattattattattgttgtggtaaatcaaagctataatgtaagtatataacgataatctgcacattgtttacgtttagacataatttagtctcgtgtcacaaattattgatagttaatcttcttaattacagtattaatttagaacttatatgtgtaaatgtatttctaatttattatctgtaagtacagcgcattcaattaagaattaagaatgcacaggttttacttgaatataatgtgtgaatattataaattatatgatattttattcaattcttacaaataaaacaataattattaagaatccaatacataataaaaattaaataagaatgtgtaagggggtttatagttggcatgaccataagaattaaattgataatatttgcacggagactaatttaataaatttttatgtataagagttcaattgaaaatttatgacacatattaacatattgagattaaattatttgtttaatctttacatttacaatagacgatgttgatattcatacatgtttttactttctattatagcttttattcaattctttttttaactgccataatttttactttctattatagcttttattacattttttttatttctcgcttttgttttgacaggatctttttgtttcatcatatatacacaatttttactattatatttctttggtacataaaatacatgaaaaactttttactattatatgatctactatgtctcttactttttttttatttctctcttattttactttctgtatttttctttgttgtttcatcttatacactatttgtttatcacatgacattgtatctcttttctttccctctcgtttttctcttttgtttcaatttgtacactaagaaagtaggttgacaaaaataaaatatattt

SEQ ID NO: 12553 - protein, 129 aa, Glycine max
MLIFIHVFTFYYSFYSILFLTAIIFTFYYSFYYIFFISRFCFDRIFLFHHIYTIFTIIFLWYIKYMKNFLLLYDLLCLLLFFYFSLILLSVFFFVVSSYTLFVYHMTLYLFSFPLVFLFCFNLYTKKVG

SEQ ID NO: 12554 - protein, 64 aa, Glycine max
MKNFLLLYDLLCLLLFFYFSLILLSVFFFVVSSYTLFVYHMTLYLFSFPLVFLFCFNLYTKKVG

SEQ ID NO: 12555 - DNA, 1718 bp, Glycine max
attttgactctttgaacatgaatatctactcttttctgtttctcttattcttccgaaaatgcttctttttctttgcgggtattaaagaagcacgtttgtcaacttctttcaccaataaattaagcacggcaagttgtgtacgtagactatagagatcacgccgatggaagatgaagtgatgagtgaagtggctgctccacctcgtcgtgttcttcttgtatcggctggtgccagccacagtgtggcacttctgagtggaaatgttgtttgttcgtggggacgaggagaggatggacagttaggccatggtgacactgatgatcgactatttcctacaaaactgagtgcattggatggccaagacataatatgtgttacttgtggagctgatcatactatggcacgttctgagtctggcagggatgtatatagttggggatggggtgactttggaaggttgggtcatggtgatcatagtgacttgctcattcctcatcccataaaagcattacagggtctaatgatacaacaaattgcctgtggggacagtcattgtttggcagttaccatggacagccaggtgctgagttggggacgcaatcaaaatggtgaacttggacttggaaccgcagaggactctcttctgccacaaaaaattcaaatttttgaggaaatacctatcaaaatggttgctgctggtgctgaacatagtgtagcaatcactaaagatgggaatttgtatggatggggctggggccgatatggaaacttgggattgggtgacagaaacgatcgattgctgcctgagaaagtgactgttgatggtgacaagatggccatggttgcttgtggctggcggcacacaatatgtgtttcatcttctggtggattatacacaaatggatggggcaaatacggccagctaggacatggggattttgaggatcatcttgtgcctcgcaaggttcaagccttgagtgataagttcattttgcaggtatcaggtgggtggaggcatagtatggcactcacgtctagtggacaacttttgggctggggatggaataagttcggacagattggagttggtaacaattttgattgttgctctcccatgcaagtgaactttccccatgatcagaaagtacaaatgatctcatgcgggtggagacacacgattgctgttactgaacgtgagaatgtatattcttggggaagaggagcaaatggacaacttgggaatggagaaaccatagaccgcaatgttccaacaattattgaggccttcagtgttgatggatcttccggacagcacatagaatcctcaaaaccttatccatcatcagggaaatcctcgtcctccatatcagagagatatgcaattgttccagatgaaactgcctcgggatcacaacctacaacttcagaagagggaaataggcatgataccagtgtccctgaaagtgatgtcaattgatagcacatcaataataagttaatgagaatggtgttccaattagggagagcagcatgcataataaggagctgaggataaggataaatatgtgcataagcagtagcgttgcatgggaggctgttatgtgtgagtgttaattatgaactagtgcatgtatcagttgttatgatgagtcagtatgtttgttgcgtgtattggttacaatatggttttttaaaatatggcttggaacattctctgt

SEQ ID NO: 12556 - protein, 437 aa, Glycine max
MEDEVMSEVAAPPRRVLLVSAGASHSVALLSGNVVCSWGRGEDGQLGHGDTDDRLFPTKLSALDGQDIICVTCGADHTMARSESGRDVYSWGWGDFGRLGHGDHSDLLIPHPIKALQGLMIQQIACGDSHCLAVTMDSQVLSWGRNQNGELGLGTAEDSLLPQKIQIFEEIPIKMVAAGAEHSVAITKDGNLYGWGWGRYGNLGLGDRNDRLLPEKVTVDGDKMAMVACGWRHTICVSSSGGLYTNGWGKYGQLGHGDFEDHLVPRKVQALSDKFILQVSGGWRHSMALTSSGQLLGWGWNKFGQIGVGNNFDCCSPMQVNFPHDQKVQMISCGWRHTIAVTERENVYSWGRGANGQLGNGETIDRNVPTIIEAFSVDGSSGQHIESSKPYPSSGKSSSSISERYAIVPDETASGSQPTTSEEGNRHDTSVPESDVN

SEQ ID NO: 12557 - protein, 432 aa, Glycine max
MSEVAAPPRRVLLVSAGASHSVALLSGNVVCSWGRGEDGQLGHGDTDDRLFPTKLSALDGQDIICVTCGADHTMARSESGRDVYSWGWGDFGRLGHGDHSDLLIPHPIKALQGLMIQQIACGDSHCLAVTMDSQVLSWGRNQNGELGLGTAEDSLLPQKIQIFEEIPIKMVAAGAEHSVAITKDGNLYGWGWGRYGNLGLGDRNDRLLPEKVTVDGDKMAMVACGWRHTICVSSSGGLYTNGWGKYGQLGHGDFEDHLVPRKVQALSDKFILQVSGGWRHSMALTSSGQLLGWGWNKFGQIGVGNNFDCCSPMQVNFPHDQKVQMISCGWRHTIAVTERENVYSWGRGANGQLGNGETIDRNVPTIIEAFSVDGSSGQHIESSKPYPSSGKSSSSISERYAIVPDETASGSQPTTSEEGNRHDTSVPESDVN

SEQ ID NO: 12558 - protein, 359 aa, Glycine max
MARSESGRDVYSWGWGDFGRLGHGDHSDLLIPHPIKALQGLMIQQIACGDSHCLAVTMDSQVLSWGRNQNGELGLGTAEDSLLPQKIQIFEEIPIKMVAAGAEHSVAITKDGNLYGWGWGRYGNLGLGDRNDRLLPEKVTVDGDKMAMVACGWRHTICVSSSGGLYTNGWGKYGQLGHGDFEDHLVPRKVQALSDKFILQVSGGWRHSMALTSSGQLLGWGWNKFGQIGVGNNFDCCSPMQVNFPHDQKVQMISCGWRHTIAVTERENVYSWGRGANGQLGNGETIDRNVPTIIEAFSVDGSSGQHIESSKPYPSSGKSSSSISERYAIVPDETASGSQPTTSEEGNRHDTSVPESDVN

SEQ ID NO: 12559 - DNA, 1631 bp, Glycine max
gtcaggttgtctcaggccggttctatattgatccacctggccttgttgaccgccttaattcaaaccttccttctcagataaggatctttggttacaaacgtgtgacagcttcttttaatgccaagaagttttgcgaccggaggaggtatgtctacctcattcctgtgtttgctcttgatcctagctgtcatcgtgatagagagaccgtcatggctagtttgggatctggaaatgagcttgttaagtgtttggagtgttctgagaggggccgaaaggtgataggattagttggtaatcgtaagaagaatctggaactagaagctgtggatgtcgaggctggtatttcatcaaacagagactctggagttacagaggatgtggaggtttctttgagcaaaggtgatgataatcataaatgaggaatatgggaatgataataagggtggcatgaactctaaaactggccttgagactatggttccggttcaggaagagggtactccttttaatggtgaatctgtgaataattcagacattcttgaggatgaaaaagttaatggtgaggataagctaaccaatggaagtgggttttgttatggtgagaaggagagagagagatttaataagattttgaagtatttcgtcgggactcataatttccataacttcaccaccagaacaaaagctgaggaccccgctgctcgacgttacattatttcattgaatgcaaacaccactcttgtagttgaaggcatggaatttgtaaagtgtgaggtcgtgggacagagcttcatgcttcatcagatacggaagatgattgggatggcagtggcaatcatgagaaattgtgcaccggagtcacttatcgataaagctttgcagcaggatgttaacattaatgtgcctactgcccctgaggttggattatatttggatgagtgcttctttacttcatataaccagaagtggaaagatcatgaagagttgtccatgaaagcatatgaaaaagatgctgaggagttcaaaatgaagtacatatactctcatattgcttccacagaacagaaggaaggaactgtcgctctttggttgcattctttgaaccatagaaattatccagatctgcatgttatcaatgaggaagccatccccgataacaagagtgctgatcccaaagaagccatcactgataacaagagtgctgatcccaaagatgccatcaccgataacaagggtgctgatctcgaagaacacatcaccgataacaatcctgtagttgtgactcagtgaactgtgttccagttgttcaatatgaactctttctttctaatggatttgtgcctcacttttcactacttctggttgattactatttgcctagcatccctgcttcgctacatatacatacaatcaatatacaaaagatgtgatctgtttctgtgtccaacactcacccactcggtaaagacactaaaagaaattaaataatatttttgttatattttgtgggtgttttattgttcagtatgatttttacttatctaaaccatggctgagcaatggtcatttatttgtgctgtaaattgaaatccattgcaaaagagaaatgcctatatagcacttgcaaatcc

SEQ ID NO: 12560 - protein, 295 aa, Glycine max
MIIINEEYGNDNKGGMNSKTGLETMVPVQEEGTPFNGESVNNSDILEDEKVNGEDKLTNGSGFCYGEKERERFNKILKYFVGTHNFHNFTTRTKAEDPAARRYIISLNANTTLVVEGMEFVKCEVVGQSFMLHQIRKMIGMAVAIMRNCAPESLIDKALQQDVNINVPTAPEVGLYLDECFFTSYNQKWKDHEELSMKAYEKDAEEFKMKYIYSHIASTEQKEGTVALWLHSLNHRNYPDLHVINEEAIPDNKSADPKEAITDNKSADPKDAITDNKGADLEEHITDNNPVVVTQ

SEQ ID NO: 12561 - protein, 280 aa, Glycine max
MNSKTGLETMVPVQEEGTPFNGESVNNSDILEDEKVNGEDKLTNGSGFCYGEKERERFNKILKYFVGTHNFHNFTTRTKAEDPAARRYIISLNANTTLVVEGMEFVKCEVVGQSFMLHQIRKMIGMAVAIMRNCAPESLIDKALQQDVNINVPTAPEVGLYLDECFFTSYNQKWKDHEELSMKAYEKDAEEFKMKYIYSHIASTEQKEGTVALWLHSLNHRNYPDLHVINEEAIPDNKSADPKEAITDNKSADPKDAITDNKGADLEEHITDNNPVVVTQ

SEQ ID NO: 12562 - protein, 271 aa, Glycine max
MVPVQEEGTPFNGESVNNSDILEDEKVNGEDKLTNGSGFCYGEKERERFNKILKYFVGTHNFHNFTTRTKAEDPAARRYIISLNANTTLVVEGMEFVKCEVVGQSFMLHQIRKMIGMAVAIMRNCAPESLIDKALQQDVNINVPTAPEVGLYLDECFFTSYNQKWKDHEELSMKAYEKDAEEFKMKYIYSHIASTEQKEGTVALWLHSLNHRNYPDLHVINEEAIPDNKSADPKEAITDNKSADPKDAITDNKGADLEEHITDNNPVVVTQ

SEQ ID NO: 12563 - DNA, 1548 bp, Glycine max
aacctccagcttcaccttctcataggccaagtaactgagcctcaggattacaactcgtttctagttgtgtaaaagaaaagaagacacaacatggacttttggaagcttttcattgttgcattattgccagttttgaaggtattgttgattactgctgtggggacaatcctcgcaattaatcgcttgaacatactcggggaaactgccaggaaaaacctcaatactatggtattttatgtcttttctccaactctagtttgtagcagcctagctgaaacaataactttagagaacgtgcttatattgtggttcatgcccgtgaatattcttctcacatttgtcattgggtcagttcttggattgctagttgttaaactaactagagttcctcatcatcttcaaggccttgtgttggggtgctgtgcagcaggaaatctgggaaacttgcctataattttagttccagctgtctgcaaacaaagtggcagtccttttggagatgtgaatgtttgctacaaaaatgcactagcatatgcttctctatcaatggcactaggatccgtttacatttggtcttatgcatacaaccttgttcgattatattcaccgaagatttctaatgaagtcaaagttgatgacaattccgtagtagaaaatccagtgtccacaacaaaatctgatccagaaaacccttcaacattttccacagaattaccatttgttagtgctgatgatagatcacaaaccgaagatcatgtgaagcactttgaaattcaatgtacagggcataatgggcaagtggaggaggtatcaaaaaacagaacgattatgaaccatttgataatattagtccaaaaggtcaacctgaaggtactattcactccttcaacgattggagcgattattggtttaataattggtgtagtccctcaatttcggaaactattagttggtgataatgctactctccgtgtggttgaggactcggtaatcatggtggggtatgcatgcattccagtaatgactttgttggttggagcaaatcttatcaaaggtttgaatggactaggaaagcaacttccactcattattggggttacgatggttagatgtattgtcttgccagcaattggtataggtgtagtgaaaggtgttgttcgtcttggattgatccatcctgatccattatatgagtttcttttgctgcttcaatttgcccttcctcctgcagtagccatgagtacgatcactcaattatttggagctggtgaaggtgaatgctcagttatcatgcttgcaacttattcctgtgcagcagtttcagtaacactttggagcacattttatatgtggcttgtactataattatttgacagtggaagatctctattaacgcttcacaaatgcctcactctttaaaaaaatgcattttagtggatatatagctaaaaatatacgttttactaaattaggaactgtttaagataaatcaagcatatttgttgtaattgacttgtaattttatgctatagtacttgtttgtagccg

SEQ ID NO: 12564 - protein, 424 aa, Glycine max
MDFWKLFIVALLPVLKVLLITAVGTILAINRLNILGETARKNLNTMVFYVFSPTLVCSSLAETITLENVLILWFMPVNILLTFVIGSVLGLLVVKLTRVPHHLQGLVLGCCAAGNLGNLPIILVPAVCKQSGSPFGDVNVCYKNALAYASLSMALGSVYIWSYAYNLVRLYSPKISNEVKVDDNSVVENPVSTTKSDPENPSTFSTELPFVSADDRSQTEDHVKHFEIQCTGHNGQVEEVSKNRTIMNHLIILVQKVNLKVLFTPSTIGAIIGLIIGVVPQFRKLLVGDNATLRVVEDSVIMVGYACIPVMTLLVGANLIKGLNGLGKQLPLIIGVTMVRCIVLPAIGIGVVKGVVRLGLIHPDPLYEFLLLLQFALPPAVAMSTITQLFGAGEGECSVIMLATYSCAAVSVTLWSTFYMWLVL

SEQ ID NO: 12565 - protein, 379 aa, Glycine max
MVFYVFSPTLVCSSLAETITLENVLILWFMPVNILLTFVIGSVLGLLVVKLTRVPHHLQGLVLGCCAAGNLGNLPIILVPAVCKQSGSPFGDVNVCYKNALAYASLSMALGSVYIWSYAYNLVRLYSPKISNEVKVDDNSVVENPVSTTKSDPENPSTFSTELPFVSADDRSQTEDHVKHFEIQCTGHNGQVEEVSKNRTIMNHLIILVQKVNLKVLFTPSTIGAIIGLIIGVVPQFRKLLVGDNATLRVVEDSVIMVGYACIPVMTLLVGANLIKGLNGLGKQLPLIIGVTMVRCIVLPAIGIGVVKGVVRLGLIHPDPLYEFLLLLQFALPPAVAMSTITQLFGAGEGECSVIMLATYSCAAVSVTLWSTFYMWLVL

SEQ ID NO: 12566 - protein, 350 aa, Glycine max
MPVNILLTFVIGSVLGLLVVKLTRVPHHLQGLVLGCCAAGNLGNLPIILVPAVCKQSGSPFGDVNVCYKNALAYASLSMALGSVYIWSYAYNLVRLYSPKISNEVKVDDNSVVENPVSTTKSDPENPSTFSTELPFVSADDRSQTEDHVKHFEIQCTGHNGQVEEVSKNRTIMNHLIILVQKVNLKVLFTPSTIGAIIGLIIGVVPQFRKLLVGDNATLRVVEDSVIMVGYACIPVMTLLVGANLIKGLNGLGKQLPLIIGVTMVRCIVLPAIGIGVVKGVVRLGLIHPDPLYEFLLLLQFALPPAVAMSTITQLFGAGEGECSVIMLATYSCAAVSVTLWSTFYMWLVL

SEQ ID NO: 12567 - DNA, 685 bp, Glycine max
gaatcaaaccaaacttaccaaaccaatttaggttctcttaaaacaaaggcccctcaaaccactttccccacactcttttagtgtgtcgtattttttcctctctttctccacaattaggtcttggaccgacccttttgtgtaagtgcaatggccatggctaagcttgtatgtgttctgcttctggcattccttggcatttccatgatcacaactcaagttatggcaacagattctgcctatcacttggatggaaggagttatggacctgggagtctaaagacctcacagtgcccttctgaatgcacaagaagatgtagccagacacagtaccacaagccgtgcatgtttttctgccaagaatgctgcaaagtgtgcctttgtgttcctcctggctactatggcaacaagtctgtgtgcccctgctacaacaactggaagaacaagcgtggaggacccaaatgcccttgaaaattgaaattataaacatgatttcacctacaattttatattactcaaagtggaactataaactatatatggccattgctatatgtttaggtatcacctactacaatagggtataccatcttgttctctatcatgaaattaattcaattattaatttaatgaaaaaacctatatgttattccctttcctaaacaaatatgagaggggtgttctcctg

SEQ ID NO: 12568 - protein, 106 aa, Glycine max
MAMAKLVCVLLLAFLGISMITTQVMATDSAYHLDGRSYGPGSLKTSQCPSECTRRCSQTQYHKPCMFFCQECCKVCLCVPPGYYGNKSVCPCYNNWKNKRGGPKCP

SEQ ID NO: 12569 - protein, 104 aa, Glycine max
MAKLVCVLLLAFLGISMITTQVMATDSAYHLDGRSYGPGSLKTSQCPSECTRRCSQTQYHKPCMFFCQECCKVCLCVPPGYYGNKSVCPCYNNWKNKRGGPKCP

SEQ ID NO: 12570 - protein, 99 aa, Glycine max
MLQSVPLCSSWLLWQQVCVPLLQQLEEQAWRTQMPLKIEIINMISPTILYYSKWNYKLYMAIAICLGITYYNRVYHLVLYHEINSIINLMKKPICYSLS

SEQ ID NO: 12571 - DNA, 564 bp, Glycine max
attgacttcccgagtgctaaactttgttccatagagaaaggaatggattcccccaaggatcatcaaaatgttgtaaccatagatgtccatgctgccaaagatctgctcaattcatctggttatcgttatctggatgttaggtcagttgaggaattcaacaaaagccatgttgagaatgctcataatgtcccctatgtcttcatcacagaagcaggacgggtgaaaaatccagattttgttgaccaggtggcagcaatatgcaagactgaggatcatttgattgtggcttgcaatagtggaggaagatcactccgagcctccgttgatctgcttgattcaggatttaagaatattgttaacatggggggaggctactctgcgtgggtggatgctggatttgccgggaacaagccaggagaagacctcaaaactagctgcaagttccgtcctaacatcgcaaaacccactgcacaaccatagtagcattctttccttctccaattttatgaataaagctcaatgcttttttttattattttaataagaaaatgttgaaacgatttg

SEQ ID NO: 12572 - protein, 159 aa, Glycine max
IDFPSAKLCSIEKGMDSPKDHQNVVTIDVHAAKDLLNSSGYRYLDVRSVEEFNKSHVENAHNVPYVFITEAGRVKNPDFVDQVAAICKTEDHLIVACNSGGRSLRASVDLLDSGFKNIVNMGGGYSAWVDAGFAGNKPGEDLKTSCKFRPNIAKPTAQP

SEQ ID NO: 12573 - protein, 145 aa, Glycine max
MDSPKDHQNVVTIDVHAAKDLLNSSGYRYLDVRSVEEFNKSHVENAHNVPYVFITEAGRVKNPDFVDQVAAICKTEDHLIVACNSGGRSLRASVDLLDSGFKNIVNMGGGYSAWVDAGFAGNKPGEDLKTSCKFRPNIAKPTAQP

SEQ ID NO: 12574 - DNA, 797 bp, Glycine max
  misc_feature (197)..(197): n is a, c, g, or t
  misc_feature (547)..(547): n is a, c, g, or t
  misc_feature (588)..(589): n is a, c, g, or t
  misc_feature (594)..(594): n is a, c, g, or t
atcttctcacttccaaatatatttcatttgagtatatctgttatagtttatttactactgaaagatggattcgaagaggaagatagcattacttatcttcggtctgctggccatgctccttttcatctcctcagaggtggcagccagagaactgaaagaggtcactggtgctggcttgtctggtggccgtggcgtanactttggtggctttggtggcattggtggtggccctggcttccgctttggcttcaataatggcttccccttcttcttccctggattccccagcttccgtggattccccggcttccctggattctccggcggccctggattccccggcactggattccccggcactggattccccggcatcttccctggctttggtggtggcgtcggcggcggcttctcaaacactggctttggtggtgttggtggcgttggtggcatcccaggaggatttccgtaaaggctgttgagatggggatgatgtagtgagtgaagttgcttgattaaggtgctgatgccctagctatcagagganacatagttgagacgacagtgtaattctacgtacttaaaatnncatanttcatgaataaaatctcttgcgtgttatgagaggcacatgtggatagacggcaagtcctgtcttttcttcccacctttcttaccacctgagatactactagaattagttagtgttgaatatatattacgtcgttgctcatttgtgcctgtgtcattaagtttatgagtaaactcaattatctattgtacaaataatttgtcat

SEQ ID NO: 12575 - protein, 135 aa, Glycine max
  misc_feature (45)..(45): Xaa can be any naturally occurring amino acid
MDSKRKIALLIFGLLAMLLFISSEVAARELKEVTGAGLSGGRGVXFGGFGGIGGGPGFRFGFNNGFPFFFPGFPSFRGFPGFPGFSGGPGFPGTGFPGTGFPGIFPGFGGGVGGGFSNTGFGGVGGVGGIPGGFP

SEQ ID NO: 12576 - protein, 119 aa, Glycine max
  misc_feature (29)..(29): Xaa can be any naturally occurring amino acid
MLLFISSEVAARELKEVTGAGLSGGRGVXFGGFGGIGGGPGFRFGFNNGFPFFFPGFPSFRGFPGFPGFSGGPGFPGTGFPGTGFPGIFPGFGGGVGGGFSNTGFGGVGGVGGIPGGFP

SEQ ID NO: 12577 - protein, 84 aa, Glycine max
  misc_feature (66)..(66): Xaa can be any naturally occurring amino acid
IFSLPNIFHLSISVIVYLLLKDGFEEEDSITYLRSAGHAPFHLLRGGSQRTERGHWCWLVWWPWRXLWWLWWHWWWPWLPLWLQ

SEQ ID NO: 12578 - DNA, 497 bp, Glycine max
ttggtgaatataggatggaattgcctggctataacaccttggatccatatgccaatatgaacgagcactgtccttcccttcctccaacttatgataggccattgaaatgttagatacgtctcttctccggcattaccattttctgatttgtctgttatccgtgatctcatggcacctaatagtttgctgttgtggaattgtctacaaaccgagggagaaagtgcagtacggaacttcaccttagccttctcaagttgactaaggggcattgtatataagaaatttatattggtgggatagtgtgatgttttattgacttaaattatcaattataagaggataattacctatgcttcgtgatgatttatgttctactatctcaatgaaggaaacatgtcagtaaagatcattgtaattatggcttgaaatcttcgttctgaattggagttggagagaccttttgtattcactgtttggaaataaaatttgattatcgc

SEQ ID NO: 12579 - protein, 45 aa, Glycine max
MLDTSLLRHYHFLICLLSVISWHLIVCCCGIVYKPREKVQYGTSP

SEQ ID NO: 12580 - protein, 36 aa, Glycine max
GEYRMELPGYNTLDPYANMNEHCPSLPPTYDRPLKC

SEQ ID NO: 12581 - protein, 32 aa, Glycine max
MELPGYNTLDPYANMNEHCPSLPPTYDRPLKC

SEQ ID NO: 12582 - DNA, 1291 bp, Glycine max
  misc_feature (867)..(867): n is a, c, g, or t
  misc_feature (1094)..(1094): n is a, c, g, or t
  misc_feature (1135)..(1135): n is a, c, g, or t
  misc_feature (1216)..(1216): n is a, c, g, or t
atagttgtctctgtgccctgtgcgctcttgctctttgcttattcttcactgtcaaccgaaaaaattataaaaaaaaaaaaagcagagaagaataaggaaatgggtgtgttcagtgcagtgctgtgccttatgtccctaatgtggatggtggaagctcgaattccaggcgtttacacgggcggcgcctggcaaagtgctcacgctacattctacggaggatccgatgcatccggcaccatgggaggagcatgcgggtacgggaacctgtacagccaagggtacggagtgaacactgcagcgttgagcacggcactcttcaacagcggcctcagctgcggtgcgtgctttgagatcaaatgcgcaaacgacaagcagtggtgtcactccggcagcccttccatcttcatcaccgccaccaacttctgtcccccaaattacgctcttccaaacgacaatggcggctggtgcaacccccctcgccctcacttcgacctcgccatgcccatgttccttaaaatcgccgaataccgcgccggcatcgtccctgtcgcctaccgcagggtggcatgtaggaagcatggggggatcaggttcacaataaacggtttccgttactttaacctggttttgatcagcaacgtggcgggtgcaggggatatcgtgcacgcctacgttaaggggtcacgaaccgggtggatagcaatgagcagaaactggggtcagaactggcagtcaaacgccgttttggtgggccaggctttgtccttcagagttaccgccagtgaccgtcgctcttctacctcttggaacattgttccaccaaattggcaatttgctcaaactttcactggaaagaacttccgtgtntgaacactggcttcatccctttactttctttttcattttcttaatataatgaaatacaagtttatttctctttccagttttgcccttagaccctgatcttttggagaaaaaaagagtgagtgacagcttgttgtgacaagttctttgattttggtttctcgttggtgggtttcatatttttaatgtataattgagggtgcgcgtgtgaagttgtacgttccgatttntgtaggaaatgctgaagcggctaacaaaaaagggtagcccncggcaaattgatagtagtattttttattttatacaatgatactattgtaattgctattaatatattgttccatcatggatntaaggaagcgtgttgtgattgtgcttgactttacgtaaaagctcagatgagaatagtatttggtttgtttccttc

SEQ ID NO: 12583 - protein, 289 aa, Glycine max
  misc_feature (289)..(289): Xaa can be any naturally occurring amino acid
IVVSVPCALLLFAYSSLSTEKIIKKKKAEKNKEMGVFSAVLCLMSLMWMVEARIPGVYTGGAWQSAHATFYGGSDASGTMGGACGYGNLYSQGYGVNTAALSTALFNSGLSCGACFEIKCANDKQWCHSGSPSIFITATNFCPPNYALPNDNGGWCNPPRPHFDLAMPMFLKIAEYRAGIVPVAYRRVACRKHGGIRFTINGFRYFNLVLISNVAGAGDIVHAYVKGSRTGWIAMSRNWGQNWQSNAVLVGQALSFRVTASDRRSSTSWNIVPPNWQFAQTFTGKNFRX

SEQ ID NO: 12584 - protein, 256 aa, Glycine max
  misc_feature (256)..(256): Xaa can be any naturally occurring amino acid
MGVFSAVLCLMSLMWMVEARIPGVYTGGAWQSAHATFYGGSDASGTMGGACGYGNLYSQGYGVNTAALSTALFNSGLSCGACFEIKCANDKQWCHSGSPSIFITATNFCPPNYALPNDNGGWCNPPRPHFDLAMPMFLKIAEYRAGIVPVAYRRVACRKHGGIRFTINGFRYFNLVLISNVAGAGDIVHAYVKGSRTGWIAMSRNWGQNWQSNAVLVGQALSFRVTASDRRSSTSWNIVPPNWQFAQTFTGKNFRX

SEQ ID NO: 12585 - protein, 246 aa, Glycine max
  misc_feature (246)..(246): Xaa can be any naturally occurring amino acid
MSLMWMVEARIPGVYTGGAWQSAHATFYGGSDASGTMGGACGYGNLYSQGYGVNTAALSTALFNSGLSCGACFEIKCANDKQWCHSGSPSIFITATNFCPPNYALPNDNGGWCNPPRPHFDLAMPMFLKIAEYRAGIVPVAYRRVACRKHGGIRFTINGFRYFNLVLISNVAGAGDIVHAYVKGSRTGWIAMSRNWGQNWQSNAVLVGQALSFRVTASDRRSSTSWNIVPPNWQFAQTFTGKNFRX

SEQ ID NO: 12586 - DNA, 518 bp, Glycine max
accgtttctagagcaatgtgagaaggacaaggagcgtgttctggttcattgcatgtcaggaaagagtaggtctccagctattgtgattgcatacttgatgaagttcaaagggtggagacttgcacagagttatcagtgggtaaaagaacggagaccttctgttgaattaactcaaggtgtgtaccagcaactgcaggagtttgagcaaaagatctatggaccgattgatagtggcagctctgtgccgcctggtttcttgcctacagcaccttcaattagctttggtttcccaaagatcaatgatccagctcagcttccttccttcagcactgctggaactccttcaatctttgcgcgagcacccctagatattgctccaaccgagtttacattcggtgccggtcagactcagaagaatgtggctggaaacccctataatgcaaatccagcaaatccaaatggcactgatatccaaatggatggttcttgatccttcaccagccacatgtgtgattaaa

SEQ ID NO: 12587 - protein, 162 aa, Glycine max
PFLEQCEKDKERVLVHCMSGKSRSPAIVIAYLMKFKGWRLAQSYQWVKERRPSVELTQGVYQQLQEFEQKIYGPIDSGSSVPPGFLPTAPSISFGFPKINDPAQLPSFSTAGTPSIFARAPLDIAPTEFTFGAGQTQKNVAGNPYNANPANPNGTDIQMDGS

SEQ ID NO: 12588 - protein, 145 aa, Glycine max
MSGKSRSPAIVIAYLMKFKGWRLAQSYQWVKERRPSVELTQGVYQQLQEFEQKIYGPIDSGSSVPPGFLPTAPSISFGFPKINDPAQLPSFSTAGTPSIFARAPLDIAPTEFTFGAGQTQKNVAGNPYNANPANPNGTDIQMDGS

SEQ ID NO: 12589 - protein, 130 aa, Glycine max
MKFKGWRLAQSYQWVKERRPSVELTQGVYQQLQEFEQKIYGPIDSGSSVPPGFLPTAPSISFGFPKINDPAQLPSFSTAGTPSIFARAPLDIAPTEFTFGAGQTQKNVAGNPYNANPANPNGTDIQMDGS

SEQ ID NO: 12590 - DNA, 826 bp, Glycine max
ataagaagtgcatcaatctggttcttctgggtagggcttgtgttgtgatagagtcttacagagaagagtgtgtgtgtgtgataattgggataagctctaatcaatcaatttcaatggcatcatccaattcgactcagcaagaagggaacaaacccgcaaagagaaaacccgtgttcaccaaagtggatcagctcaaacctggaaccaacggtcacacgttggtggctaaggtcttgtcctccgacaccgtcgtacacaaaccgagaccctcttccgcacacaacctcaaacccactgtcatcgccgagtgcctcatcggcgacgacaccggaaccatcgtcttcaccgctcgcaacgaacaagttgatatgatgaaggctggagctacagtaattcttcgcaatgcaaagattgacatgttcaagggatcaatgaggatggctgttgacaaatggggccgtgttgaggtaactgatcctgcagattttgaagttaaagaggacaacaacctatctctggttgaatatgaattggtgaacgtggttgaagaataatcccacagaagagtgcaaaaatagctttatgatttgtttatggtgcaatggataccctaaaggtaaacttaacgggtgatggatggttggtatacattctcactttaattagcctgtatttcccctttaacatgcttgacattttgagttaagtttatgtcacttgaacaatcttgtgtcaagcaatcaatatttgctattatcttcatcagcaactgtattcaatgaacttaagaaaagtataatattttgataatataattatccttatc

SEQ ID NO: 12591 - protein, 183 aa, Glycine max
KKCINLVLLGRACVVIESYREECVCVIIGISSNQSISMASSNSTQQEGNKPAKRKPVFTKVDQLKPGTNGHTLVAKVLSSDTVVHKPRPSSAHNLKPTVIAECLIGDDTGTIVFTARNEQVDMMKAGATVILRNAKIDMFKGSMRMAVDKWGRVEVTDPADFEVKEDNNLSLVEYELVNVVEE

SEQ ID NO: 12592 - protein, 146 aa, Glycine max
MASSNSTQQEGNKPAKRKPVFTKVDQLKPGTNGHTLVAKVLSSDTVVHKPRPSSAHNLKPTVIAECLIGDDTGTIVFTARNEQVDMMKAGATVILRNAKIDMFKGSMRMAVDKWGRVEVTDPADFEVKEDNNLSLVEYELVNVVEE

SEQ ID NO: 12593 - DNA, 559 bp, Glycine max
  misc_feature (65)..(65): n is a, c, g, or t
  misc_feature (99)..(99): n is a, c, g, or t
acacgcacactcactcacaaacactcttcccaaaaccctaaaccctcacttttttttttttttcngacgagaatggccggcggcatcgacatgtccctngacgacattaagaagcgttcagccgccgccgtggcttctcgccgccgattcacggttgttcacaacccggccagaacgacgccgtacccgattccgcaggtgagttagggtttcatgctttcctatttttcccttattattattattactaagacgaagaaaagagaatgttagtgtttgattggttgtcaggtaaggcaacagagcatggttgcattatttccagaaatggttttggaggagtcaggcgcggctaagattgaaagtggcaccaagctctatttatctaacttggatcatggagttaccaacgatgatatcaagctgctgttctcggaagagggtgaattgaaaagctacactattcattatgatcagagtggaagatcaaagggaactgcagaagttgtgttcgtgaggcattctgatgctttattagccatcaagaaatacaacaata

SEQ ID NO: 12594 - protein, 84 aa, Glycine max
MVALFPEMVLEESGAAKIESGTKLYLSNLDHGVTNDDIKLLFSEEGELKSYTIHYDQSGRSKGTAEVVFVRHSDALLAIKKYNN

SEQ ID NO: 12595 - protein, 77 aa, Glycine max
MVLEESGAAKIESGTKLYLSNLDHGVTNDDIKLLFSEEGELKSYTIHYDQSGRSKGTAEVVFVRHSDALLAIKKYNN

SEQ ID NO: 12596 - protein, 68 aa, Glycine max
  misc_feature (22)..(22): Xaa can be any naturally occurring amino acid
  misc_feature (33)..(33): Xaa can be any naturally occurring amino acid
TRTLTHKHSSQNPKPSLFFFFXTRMAGGIDMSXDDIKKRSAAAVASRRRFTVVHNPARTTPYPIPQVS

SEQ ID NO: 12597 - DNA, 1852 bp, Glycine max
aacatatcaactaaagatactacacataactacatcatctcaaaacctagtctgaaaccatagcacaaaatcaaccatgtctccattgattgttgccttggctacaatcgcagcagcaatcctcatatatcgtataataaagttcataacacgcccatccctccccctcccaccgggccctaaaccatggcccatagtgggaaacttgccacacatgggcccggtgccgcaccactccctcgcggcgttggcccgcatccacggcccgttgatgcacctccgcctcggcttcgtcgatgtcgtggttgccgcgtcggcctcggtggcggaacagttcttgaagattcatgactctaatttcagcagccggccaccgaacgccggcgcgaaatatatagcttataactaccaagatctggtgtttgccccctacggcccacgctggcgattgctccggaaactcacctccgttcacctcttctccggcaaggccatgaatgaatttagacacttgcgtcaggaagaggtagctagattgacatgcaacttggcaagttcagacacaaaagcagtgaatttgggacaattattgaatgtatgcaccaccaacgcattagcgagggcaatgattggacgaagagtgtttaacgatggcaatggagggtgtgatcctagggctgatgagtttaaggctatggtgatggaggtgatggtgttggctggagttttcaacattggtgactttattccttccttggagtggctagaccttcaaggggtgcaagctaagatgaaaaaattacacaaaagatttgatgcatttttaaccagcattattgaggagcacaataacagttcttccaagaatgagaatcataagaatttcttgagtatcttattgtcacttaaagatgtgagggatgatcatggaaaccatctcactgataccgagattaaagcactacttctgaacatgtttacggcaggaactgacacatcatcaagcaccacagaatgggccattgcggaactaataaaaaacccacaaattttggccaaactccaacaagagttggacaccgttgtgggtcgagataggagtgtcaaagaagaggacttggcccacctcccatacttacaagctgttatcaaggaaaccttcagactccacccatcaacccctctttctgtgccacgtgctgctgccgagagttgtgagatatttggctaccacatccccaagggtgctacactcttggtgaacatttgggccatagcccgagacccaaaagagtggaatgacccattggagtttaggcccgaaaggtttcttctaggtggtgagaaggccgatgttgatgttaggggcaatgactttgaggtgataccttttggtgctggacgaagaatttgtgctggacttagtcttgggcttcaaatggttcaacttctcactgcagccttggcccattcatttgattgggaactagaagattgcatgaacccagaaaagttgaacatggatgaagcgtatgggctaaccctacaacgggccgtgcctctttcagtgcaccctaggcccaggctcgcaccacatgtgtactcaatgtcttcctaatttttaagttctacattttggagtttttcttccttataattgttgtcttttcttttggttaacaaggatcctagtaacaataaaaacatacatggtgatatagtatgttagtgtgtgaagatccaaaaacatgaaaaggtgtcatttcatatgtttttggtagtgcctttaaaatttacttgtatatgtatatgaataattgaatatatgctatatggatgggattcaatgatt

SEQ ID NO: 12598 - protein, 513 aa, Glycine max
MSPLIVALATIAAAILIYRIIKFITRPSLPLPPGPKPWPIVGNLPHMGPVPHHSLAALARIHGPLMHLRLGFVDVVVAASASVAEQFLKIHDSNFSSRPPNAGAKYIAYNYQDLVFAPYGPRWRLLRKLTSVHLFSGKAMNEFRHLRQEEVARLTCNLASSDTKAVNLGQLLNVCTTNALARAMIGRRVFNDGNGGCDPRADEFKAMVMEVMVLAGVFNIGDFIPSLEWLDLQGVQAKMKKLHKRFDAFLTSIIEEHNNSSSKNENHKNFLSILLSLKDVRDDHGNHLTDTEIKALLLNMFTAGTDTSSSTTEWAIAELIKNPQILAKLQQELDTVVGRDRSVKEEDLAHLPYLQAVIKETFRLHPSTPLSVPRAAAESCEIFGYHIPKGATLLVNIWAIARDPKEWNDPLEFRPERFLLGGEKADVDVRGNDFEVIPFGAGRRICAGLSLGLQMVQLLTAALAHSFDWELEDCMNPEKLNMDEAYGLTLQRAVPLSVHPRPRLAPHVYSMSS

SEQ ID NO: 12599 - protein, 467 aa, Glycine max
MGPVPHHSLAALARIHGPLMHLRLGFVDVVVAASASVAEQFLKIHDSNFSSRPPNAGAKYIAYNYQDLVFAPYGPRWRLLRKLTSVHLFSGKAMNEFRHLRQEEVARLTCNLASSDTKAVNLGQLLNVCTTNALARAMIGRRVFNDGNGGCDPRADEFKAMVMEVMVLAGVFNIGDFIPSLEWLDLQGVQAKMKKLHKRFDAFLTSIIEEHNNSSSKNENHKNFLSILLSLKDVRDDHGNHLTDTEIKALLLNMFTAGTDTSSSTTEWAIAELIKNPQILAKLQQELDTVVGRDRSVKEEDLAHLPYLQAVIKETFRLHPSTPLSVPRAAAESCEIFGYHIPKGATLLVNIWAIARDPKEWNDPLEFRPERFLLGGEKADVDVRGNDFEVIPFGAGRRICAGLSLGLQMVQLLTAALAHSFDWELEDCMNPEKLNMDEAYGLTLQRAVPLSVHPRPRLAPHVYSMSS

SEQ ID NO: 12600 - protein, 448 aa, Glycine max
MHLRLGFVDVVVAASASVAEQFLKIHDSNFSSRPPNAGAKYIAYNYQDLVFAPYGPRWRLLRKLTSVHLFSGKAMNEFRHLRQEEVARLTCNLASSDTKAVNLGQLLNVCTTNALARAMIGRRVFNDGNGGCDPRADEFKAMVMEVMVLAGVFNIGDFIPSLEWLDLQGVQAKMKKLHKRFDAFLTSIIEEHNNSSSKNENHKNFLSILLSLKDVRDDHGNHLTDTEIKALLLNMFTAGTDTSSSTTEWAIAELIKNPQILAKLQQELDTVVGRDRSVKEEDLAHLPYLQAVIKETFRLHPSTPLSVPRAAAESCEIFGYHIPKGATLLVNIWAIARDPKEWNDPLEFRPERFLLGGEKADVDVRGNDFEVIPFGAGRRICAGLSLGLQMVQLLTAALAHSFDWELEDCMNPEKLNMDEAYGLTLQRAVPLSVHPRPRLAPHVYSMSS

SEQ ID NO: 12601 - DNA, 942 bp, Glycine max
aaacaacaacaacgtaggagaaagaaaagaaaagaaaaccatcgaggacgaaattacaacctagcacacagagatatatagcggaagcaaccaacagaagaaccttcaacagttcctccacacgtacaacaacgttgttataaaatcaccacttgcatgcttacaataatgtcgagcagaaagaaccacttcagttcacgaagccatcgttttctccctgtggcctcagacatagacgactctgcatccctaaccatggattcggaatccgcgttcgagttcgacgagtcagagctttacaactcggtccaagccaactcgttcgagttccagagatcgcttcacagccgaggctctaataattcctcggccaagaaaaaaccctcttcctcctccggcgcgccggctttaatgccggtcaacatccccgactggtcgaagatcctcggggatgagtaccggaggaggaacagctttgacgacgacgacaacgacgacaacaacgagggttacgacgatgagaggagtggaagggtgccaccgcacgagtttcttgcgaggaatagggtagcttcgttctccgtgcacgagggtgttgggagaaccctaaagggaagggatctcagcacgctccgaaacgccatttgggccaaaaccggttttcaagactaaaaaaaaaaccccacaaccctcactcacccaaccgaatcgaatcgaatctttattattttttttttcttaaccctttttggttctacttctgttactgttgtgattggtatgtatttttagttgagttttccttttgttaatttttggtggtggttacgttgacgtatatgaggtaattataagaggtttcggttattaattccgaaacctgaggctcgtgattttgtatctacgtacgtagtaccctcaaggaatatatatctttttttc

SEQ ID NO: 12602 - protein, 171 aa, Glycine max
MLTIMSSRKNHFSSRSHRFLPVASDIDDSASLTMDSESAFEFDESELYNSVQANSFEFQRSLHSRGSNNSSAKKKPSSSSGAPALMPVNIPDWSKILGDEYRRRNSFDDDDNDDNNEGYDDERSGRVPPHEFLARNRVASFSVHEGVGRTLKGRDLSTLRNAIWAKTGFQD

SEQ ID NO: 12603 - protein, 167 aa, Glycine max
MSSRKNHFSSRSHRFLPVASDIDDSASLTMDSESAFEFDESELYNSVQANSFEFQRSLHSRGSNNSSAKKKPSSSSGAPALMPVNIPDWSKILGDEYRRRNSFDDDDNDDNNEGYDDERSGRVPPHEFLARNRVASFSVHEGVGRTLKGRDLSTLRNAIWAKTGFQD

SEQ ID NO: 12604 - protein, 138 aa, Glycine max
MDSESAFEFDESELYNSVQANSFEFQRSLHSRGSNNSSAKKKPSSSSGAPALMPVNIPDWSKILGDEYRRRNSFDDDDNDDNNEGYDDERSGRVPPHEFLARNRVASFSVHEGVGRTLKGRDLSTLRNAIWAKTGFQD

SEQ ID NO: 12605 - DNA, 1437 bp, Glycine max
gcaggaattcgcacgagaccattacctagaacatcctaataccaaaactcaacacaacaacatcactcttacagcttccgaaccctccatcatggccttgtcaagtccacacatacaaagattcctcttatgcaagcttcatagccgctccaccgccaagaacagacacagaaacagcttcaccgccacaaccaccaccaggagcagttgctgctctgccatagccattgatgctccgtcgtctttgaccgaagtgcccggcataagatgggggtccatagccttgcagggtctccgtgaagagatggaggatgatattattgttcgacctgagggccttcagggcttcacttttgcagctgtgtttgatggccatggagggttttcttctgtcgagttcctcagtgccaactacagggatgagctgtacaaggagtgtgttgaagctttacaaggtgggttactattagtcgagaaagatttcaaagccattaaaagggcattacaggaggcatttctcaaggctgacgcgaggttattaaaacggcttgaaatgaatggagaggaggatgaatcaggtgctacatcaactgccgtgttcattggagatgatgagctgctaatttcacatattggtgactcatcagcggttctatgtagatctggaaaagcagaagttctgactagtcctcaccgtccaattgggagcagcaagacttctcttcatgaaattagaagagtcagagaagcaggtggatggattaacaatggtagaatttgtggagacattgctgtatctcgtgcatttggggacgtgcgattcaaaacaaagaagaatgagatgctgcaaaaaggagttcaggaaggaagatggtcagcaaagttcatttctcgtgtacaactcaacaacgacttggttgttgcataccctgatatttatcaagtaactcttggctcagatgcagaatttgtagtattagcatccgatggcttatgggattacatgagcagctcagaagcagtttctttagtgagggatcaactacgaaaacacggaaacattcagcaagcatgtgaagcgcttgcagaagccgctttggaccgacgtacacaggataatgtcagcattataattgctgattttgggaggacagactggcagaatgcgccattggagcgacaaaatactatacttgagctggtccaagctcttgcaaccattggaattgtgtccattggaatctggttttcatcacagctttctttatagattcaaaaaataccagtcatgtacataaaaaagacatatacttctgaacttctagcctgtataatcttaattgtacatgcctcacatcttagaatctacttggtttagggcacaaagaattgttaacaataaatattttttgaagtattaatcttattctgattctg

SEQ ID NO: 12606 - protein, 422 aa, Glycine max
QEFARDHYLEHPNTKTQHNNITLTASEPSIMALSSPHIQRFLLCKLHSRSTAKNRHRNSFTATTTTRSSCCSAIAIDAPSSLTEVPGIRWGSIALQGLREEMEDDIIVRPEGLQGFTFAAVFDGHGGFSSVEFLSANYRDELYKECVEALQGGLLLVEKDFKAIKRALQEAFLKADARLLKRLEMNGEEDESGATSTAVFIGDDELLISHIGDSSAVLCRSGKAEVLTSPHRPIGSSKTSLHEIRRVREAGGWINNGRICGDIAVSRAFGDVRFKTKKNEMLQKGVQEGRWSAKFISRVQLNNDLVVAYPDIYQVTLGSDAEFVVLASDGLWDYMSSSEAVSLVRDQLRKHGNIQQACEALAEAALDRRTQDNVSIIIADFGRTDWQNAPLERQNTILELVQALATIGIVSIGIWFSSQLSL

SEQ ID NO: 12607 - protein, 392 aa, Glycine max
MALSSPHIQRFLLCKLHSRSTAKNRHRNSFTATTTTRSSCCSAIAIDAPSSLTEVPGIRWGSIALQGLREEMEDDIIVRPEGLQGFTFAAVFDGHGGFSSVEFLSANYRDELYKECVEALQGGLLLVEKDFKAIKRALQEAFLKADARLLKRLEMNGEEDESGATSTAVFIGDDELLISHIGDSSAVLCRSGKAEVLTSPHRPIGSSKTSLHEIRRVREAGGWINNGRICGDIAVSRAFGDVRFKTKKNEMLQKGVQEGRWSAKFISRVQLNNDLVVAYPDIYQVTLGSDAEFVVLASDGLWDYMSSSEAVSLVRDQLRKHGNIQQACEALAEAALDRRTQDNVSIIIADFGRTDWQNAPLERQNTILELVQALATIGIVSIGIWFSSQLSL

SEQ ID NO: 12608 - protein, 321 aa, Glycine max
MEDDIIVRPEGLQGFTFAAVFDGHGGFSSVEFLSANYRDELYKECVEALQGGLLLVEKDFKAIKRALQEAFLKADARLLKRLEMNGEEDESGATSTAVFIGDDELLISHIGDSSAVLCRSGKAEVLTSPHRPIGSSKTSLHEIRRVREAGGWINNGRICGDIAVSRAFGDVRFKTKKNEMLQKGVQEGRWSAKFISRVQLNNDLVVAYPDIYQVTLGSDAEFVVLASDGLWDYMSSSEAVSLVRDQLRKHGNIQQACEALAEAALDRRTQDNVSIIIADFGRTDWQNAPLERQNTILELVQALATIGIVSIGIWFSSQLSL

SEQ ID NO: 12609 - DNA, 1067 bp, Glycine max
  misc_feature (827)..(827): n is a, c, g, or t
gaagggagaaggagaaagaaaaggccgtggtttccgacgagaaatgctaaatcctcctacaggtgaagaccttacagcgttcacagtacacacaccttacagatgcctgtggcggtaacaatacccagttatcagcaccgcatctacgcttcactcatctacatcgccaaggctaagaaaaccaccatggccagcaccagcagcagcaatcctggtggggccttcaccaccctccaagagagggtcactttcgagaaggagataaaaaagagcaagttcatcgccattgctggccccatccccgatgaaaaatccgccatgtctttcctttcccaggtacgggatccacgtgccacccacaattgctgggcttataaggtgggggatcaatatcggtccaatgatgatggtgagccttcaggaacagctgggaaaccaatacaaactgctattgattcttcaggaatagatagagtaatggtggttgtgatcaggtattttgggggtatcaaattaggcactggaggattggtcagggcttatggaggagttgcatcagaatgcttgagaaatgccccaacttgccttgtaaaaactaaggtgccaatgggtgtagaggttccctttgagctagttggagttctcaaccatcagctgcagtcttttcacgtggaagacatcaagcaggattatgatactggtaaagatggcatatctatggttacttttaaagttgattttgatcaagctgagaaattggaggatgcaatcaaagccaattgtagcagagaattgcagttttataggcgttgagacgtgattacaanagatgtgacttttggatttagtttatatttttcttatatatggtagatgcttcttcatctgaagattggatgaattagacatctccaggatttttttactaatttgcagatatgagattaacttgtttacagaattgttttgaaaactaaaatgtatttgtttgtaatttactaatgatgttacataatttgtaaattcagtagaaattataacagattatgaatttaatttgatagtgc

SEQ ID NO: 12610 - protein, 236 aa, Glycine max
MPVAVTIPSYQHRIYASLIYIAKAKKTTMASTSSSNPGGAFTTLQERVTFEKEIKKSKFIAIAGPIPDEKSAMSFLSQVRDPRATHNCWAYKVGDQYRSNDDGEPSGTAGKPIQTAIDSSGIDRVMVVVIRYFGGIKLGTGGLVRAYGGVASECLRNAPTCLVKTKVPMGVEVPFELVGVLNHQLQSFHVEDIKQDYDTGKDGISMVTFKVDFDQAEKLEDAIKANCSRELQFYRR

SEQ ID NO: 12611 - protein, 208 aa, Glycine max
MASTSSSNPGGAFTTLQERVTFEKEIKKSKFIAIAGPIPDEKSAMSFLSQVRDPRATHNCWAYKVGDQYRSNDDGEPSGTAGKPIQTAIDSSGIDRVMVVVIRYFGGIKLGTGGLVRAYGGVASECLRNAPTCLVKTKVPMGVEVPFELVGVLNHQLQSFHVEDIKQDYDTGKDGISMVTFKVDFDQAEKLEDAIKANCSRELQFYRR

SEQ ID NO: 12612 - protein, 164 aa, Glycine max
MSFLSQVRDPRATHNCWAYKVGDQYRSNDDGEPSGTAGKPIQTAIDSSGIDRVMVVVIRYFGGIKLGTGGLVRAYGGVASECLRNAPTCLVKTKVPMGVEVPFELVGVLNHQLQSFHVEDIKQDYDTGKDGISMVTFKVDFDQAEKLEDAIKANCSRELQFYRR

SEQ ID NO: 12613 - DNA, 983 bp, Glycine max
  misc_feature (707)..(707): n is a, c, g, or t
  misc_feature (727)..(727): n is a, c, g, or t
  misc_feature (775)..(775): n is a, c, g, or t
  misc_feature (792)..(792): n is a, c, g, or t
  misc_feature (858)..(858): n is a, c, g, or t
aaaccaccacactcttattgttttcttcatatcttccttgtcactgcccgtgtgtcgccgccatggccaccgtcaccacccaagcctccgccgcaattttccggccatgtacctcgaaatcgaggtttttgaccggctcttccggtaaacttaaccgggaagtgactatgcggccaatggggtgccctccttctgcctctttcaaggttgaagccaagaagggagagtggttacctggcttggcctccccaacttacctcaatggcactcttcctggtgacaatggatttgaccctctggggctagctgaggacccagagaacttgaggtggtacgttcaagccgagcttgtgaatggacgttgggccatgttgggtgttgcaggaatgttgcttcctgaggttttcaccaagtttggaatcatcaatgcccctcaatggtatgatgctgggaaatcagagtactttgcatcttcctcaaccctcttcgtgatcgagttcatcttgttccactacgtcgagatccgaagatggcaggacatcaagaaccctggctgtgtcaaccaagaccccatcttcaagcaatacagcttgcccccacatgagtgtggataccctggtagtgtgttcaaccccttgaactttgcacctactttggaggccaaggagaaggaacttgccaatgggagattggctatgttggcattnttgggattcatagttcaacncaacgtgacaggcaaaggaccatttgagaacctcttgcagcacctctntgacccgtggcacaacnccatcatcaatacaattcgtggctactaagtttgtatccaatgacatggataagcctgtgtccttntcgtgtaatcctgaatggatgaattttgagagtgatttgggcgtgattgttgtgatccatctattttcatgtacagaggaactacgatggttttatattgttatttagactgtccatcaatcagt

SEQ ID NO: 12614 - protein, 272 aa, Glycine max
  misc_feature (235)..(235): Xaa can be any naturally occurring amino acid
  misc_feature (242)..(242): Xaa can be any naturally occurring amino acid
  misc_feature (258)..(258): Xaa can be any naturally occurring amino acid
  misc_feature (264)..(264): Xaa can be any naturally occurring amino acid
TTTLLLFSSYLPCHCPCVAAMATVTTQASAAIFRPCTSKSRFLTGSSGKLNREVTMRPMGCPPSASFKVEAKKGEWLPGLASPTYLNGTLPGDNGFDPLGLAEDPENLRWYVQAELVNGRWAMLGVAGMLLPEVFTKFGIINAPQWYDAGKSEYFASSSTLFVIEFILFHYVEIRRWQDIKNPGCVNQDPIFKQYSLPPHECGYPGSVFNPLNFAPTLEAKEKELANGRLAMLAXLGFIVQXNVTGKGPFENLLQHLXDPWHNXIINTIRGY

SEQ ID NO: 12615 - protein, 252 aa, Glycine max
  misc_feature (215)..(215): Xaa can be any naturally occurring amino acid
  misc_feature (222)..(222): Xaa can be any naturally occurring amino acid
  misc_feature (238)..(238): Xaa can be any naturally occurring amino acid
  misc_feature (244)..(244): Xaa can be any naturally occurring amino acid
MATVTTQASAAIFRPCTSKSRFLTGSSGKLNREVTMRPMGCPPSASFKVEAKKGEWLPGLASPTYLNGTLPGDNGFDPLGLAEDPENLRWYVQAELVNGRWAMLGVAGMLLPEVFTKFGIINAPQWYDAGKSEYFASSSTLFVIEFILFHYVEIRRWQDIKNPGCVNQDPIFKQYSLPPHECGYPGSVFNPLNFAPTLEAKEKELANGRLAMLAXLGFIVQXNVTGKGPFENLLQHLXDPWHNXIINTIRGY

SEQ ID NO: 12616 - protein, 217 aa, Glycine max
  misc_feature (180)..(180): Xaa can be any naturally occurring amino acid
  misc_feature (187)..(187): Xaa can be any naturally occurring amino acid
  misc_feature (203)..(203): Xaa can be any naturally occurring amino acid
  misc_feature (209)..(209): Xaa can be any naturally occurring amino acid
MRPMGCPPSASFKVEAKKGEWLPGLASPTYLNGTLPGDNGFDPLGLAEDPENLRWYVQAELVNGRWAMLGVAGMLLPEVFTKFGIINAPQWYDAGKSEYFASSSTLFVIEFILFHYVEIRRWQDIKNPGCVNQDPIFKQYSLPPHECGYPGSVFNPLNFAPTLEAKEKELANGRLAMLAXLGFIVQXNVTGKGPFENLLQHLXDPWHNXIINTIRGY

SEQ ID NO: 12617 - DNA, 1832 bp, Glycine max
  misc_feature (1723)..(1723): n is a, c, g, or t
  misc_feature (1774)..(1774): n is a, c, g, or t
gaagttccagtagatatttttaaggtctactttttatagaatttaatttacatagctaacaagaagttgtagtgaactatgcaaataacagggtactctatggtggactttgatattctgtaattgatttgatggaatcttccaaccaattcaatgaatcatttaggcaaggtcttacagctggatatgtctttgctgcaacttttgtcatagtactttatatgtcctcttgtctccctgcacaacttatcaagaacaggaagaatagaacgggtggatttaagaaagcaacacagaagcgtaagttgccgcttcaggagttgaaacaagaaaaaaacaaagaggttgtctttccctttgcatctctcttaggcactttctttttattctatatggattgtagacagtttacagaaatgttagtttgctagttcattaactgttacaatcattctttttgttttgcaaattgttttgataatattgaaagttgttttagaatatgattgatatagtgatgaccgatgagcatgtctacttacaatcaaggtttttaaaaatgatctgtgaccgtgtttcaactaggacatcaaggtttttggagtgtttgtgactgtaattatgatcacatttatttgtaatttttcgcaatatcaagaaaggtgacacaactccagccgtgaccacgacctcaatttaaaatcatataatatacaacaatacggattttcactttatgttgagttagaaaaattgtaagtgtccaccttgtgattttgaatttaatttgaatgcactgtgttccaattatagatgactatgaatataagattctttccttttcataataattttaatggaatatccacggtaattgacagaataattatttttatacaaataatgtatgaaaattaaaatacataaatttacatgagatttcatttaaaaaattgtttacgacataactgtcattaatggtaatctgttgtcgcatgcattttcatgaacagaaacgaaagagagcaagacagatagacagagatcttcctgtggagttgctagagagaagaataaaggttaccatgaatccttgatctttgaaaaaacttattgttattagaaataacaatcctaccaagttaaatacattttattttctaggatatatataattccattgaaactcatttatactactttgtcttcaatagtttagattattaattttctatgataaattacaactacagatcaatgacattggatggttgacatgtagaacgagcttcgcagaactgtatgaagcaaccgaacacttcagtgaggacagtgtcattggtgagggaaggactgggacaatgtacaaggcaacacttcccaacggttggttcttgctggcagttaagaaactctatgattctgagttgtgtatcagaagtttcgatttagaaataatgatggggaggtacagtcacagaaacataatggtccccatcagtttctgcatagaagaagaaaaaaatgaaagaattttggtgtatcattacatgtcaaatggaagagtttctgattggttgaatgataccaccacattaggatggcctgcagttataaggattgcattaggtgttgcaagagggttatgctgccttcatcatagcttgcatatggttcatctcagtattggtcccgagagtatcttgttaggaaacaattttgngccaagaatatccaattttggaatggccatttttcatagactatgatctanacaaaaacattggatttgataagaaggatgtgtatgactttggaacttgctttttgag

SEQ ID NO: 12618 - protein, 135 aa, Glycine max
  misc_feature (121)..(121): Xaa can be any naturally occurring amino acid
MYKATLPNGWFLLAVKKLYDSELCIRSFDLEIMMGRYSHRNIMVPISFCIEEEKNERILVYHYMSNGRVSDWLNDTTTLGWPAVIRIALGVARGLCCLHHSLHMVHLSIGPESILLGNNFXPRISNFGMAIFHRL

SEQ ID NO: 12619 - protein, 103 aa, Glycine max
  misc_feature (89)..(89): Xaa can be any naturally occurring amino acid
MMGRYSHRNIMVPISFCIEEEKNERILVYHYMSNGRVSDWLNDTTTLGWPAVIRIALGVARGLCCLHHSLHMVHLSIGPESILLGNNFXPRISNFGMAIFHRL

SEQ ID NO: 12620 - protein, 102 aa, Glycine max
  misc_feature (88)..(88): Xaa can be any naturally occurring amino acid
MGRYSHRNIMVPISFCIEEEKNERILVYHYMSNGRVSDWLNDTTTLGWPAVIRIALGVARGLCCLHHSLHMVHLSIGPESILLGNNFXPRISNFGMAIFHRL

SEQ ID NO: 12621 - DNA, 2818 bp, Glycine max
gtatgtatgtgtgtggatcatcaccaatctcttcttgctaaagcaacttcctttcatctcttcttgttagctttcaacacaatccatgaccccacaacattagtctctctctttctctttctctctctatatctctttagtgcagttagtagagtggtgagcttcataatggagaccatgaactagaacttgtctcaaaccatcactcacactcataccttcaaccccttcaaggttcaaagtttgtgggtgatgagctcctcatagacaaagactaacaagctggggcagagagaagaagagatggtgggaactccaattaacggaagaacaaggctatcttttggtgctgttaatggtggccatgatcttggccccagtagtgctccaccaagcaatgctggctcagattatggcattatagagttcacaagagaggatgtggaggccttgctgaatgaaaaggccaaaaggaaggacagatttaattacaaggaaagatgtgaaaacatgatggactatataaaaaggctgaaggtttgtatcaggtggttccaagaccttgagattagctactcactagagcaagaaaagttgaagagttcattggaattggcccagcaaaaatgcacggaaatagagctgctgctaaaaatcaaggaagaagagctaaattcaattattgtggaaatgagaagaaattgcacttctttacaagagaaattggtgaaggaagaatccgaaaaaacagcagcagcagaatctcatcttaaagagagagaagctaggcttaactttgagaggtcacagagtacactgcaggaggatcttggacgagcacaacgagagctccaaagtgcaaatcagaagatatcatctctcaatgacatgtataagcggttacaggattacataacaagcttgcagcagtacaatggaaaactgcattcagagctttctacagttgaaaatgaacttaagcgtgtagagaaagagaaagctactgtactggagtcccttaccatgttaaagggtcagcttactttgtctatggcttctcaagaagaggccacgaaacagaaggatgccttggctagtgaagttacatctctccgagtagagttgcaacatgcgagggatgatcgagaccaccaattatctcaagcgcaaactttaacatctgaattagagaaatctaaagattctacagaaaagtcctgctctgaactgaacaaattgactttaagaacaaatgaacttgaggcaaaatgtgctttgcaagatgagcggataaaggtactacaagagcagctaactactgctgaggagaaacttcaggtttgtgacatatctgcaagtgagacaagaatagaatatgaagggcaacaaaaacttgtacacgagttgcaaagacgtttggcagatgcagaaaataaagttatagaaggggagaagctgaggaaagaattgcacaataacattttggaactaaaagggaacatccgcgtgttctgtagagtgcggcctttgttacctgatgaaggttctagcacagaaggaaagattatatcttatcccacatcgatggaagcttctggacggggcattgaattgacacaaaatggccaaaaacattctttcacatatgataaagtttttgcacctgatgcatcacaagaagaagtttttatcgaaatttcacagcttgtgcaaagtgctcttgatggttataaggtttgcatttttgcgtatggtcagacagggtcagggaaaacctatacaatgatgggaaggcctggacatccagaagaaaagggcttgattcctcgttcacttgaacaaatatttcaaacaaaacaatctcagcaaccccaaggctggaaatatgaaatgcaggtgtcaatgttggaaatatacaatgaaaccattcgtgatctgttatctacaaataagtcatcatcagaaggaacaccaacacgagtggaaaatggtactcccgggaagcaatacacaatcaaacatgatgccaacggaaatacacatgtttctgatctcacagtagtggatgttcagagtgtaaaagaggttgcatttcttttaaatcaagctgcaaatagcagatctgtgggaaaaactcagatgaatgaacaatcttctagaagtcattttgtattcactcttcgattatatggtgtaaatgagagcactgaccaacaagcacaaggtattctaaatctcattgatcttgctgggagtgagcgtctttcaaggagcgggtcaactggggaccgattgaaagaaacccaagcaataaataaaagtctgtcatcattaagtgatgttatatttgccttggccaagaaggaggatcatatcccattcaggaactcaaagcttacataccttcttcagccttgtctaggtggtgactcaaagacattaatgtttgtgaacatctctcctgaccaagcttcagctggagagtcactatgctcactacggtttgcgtcaagagtcaatgcttgtgaaattgggacacctcgctgtcacaccagtggacgccctgtagaatctcgcttgacctatttctaatctttccacacatgaatatggttatattgtttaacctatttgtgccatctctactacaaccaaaataactccaattctaacatcatgcgtatagattgtaatgtatagtaaacaagttaccaagtatgcattagttttaaaaaatatctcccattattatagttccatttacaattctgctccatgttattttcataacttcatattattctactttattatcagt

SEQ ID NO: 12622 - protein, 762 aa, Glycine max
MVGTPINGRTRLSFGAVNGGHDLGPSSAPPSNAGSDYGIIEFTREDVEALLNEKAKRKDRFNYKERCENMMDYIKRLKVCIRWFQDLEISYSLEQEKLKSSLELAQQKCTEIELLLKIKEEELNSIIVEMRRNCTSLQEKLVKEESEKTAAAESHLKEREARLNFERSQSTLQEDLGRAQRELQSANQKISSLNDMYKRLQDYITSLQQYNGKLHSELSTVENELKRVEKEKATVLESLTMLKGQLTLSMASQEEATKQKDALASEVTSLRVELQHARDDRDHQLSQAQTLTSELEKSKDSTEKSCSELNKLTLRTNELEAKCALQDERIKVLQEQLTTAEEKLQVCDISASETRIEYEGQQKLVHELQRRLADAENKVIEGEKLRKELHNNILELKGNIRVFCRVRPLLPDEGSSTEGKIISYPTSMEASGRGIELTQNGQKHSFTYDKVFAPDASQEEVFIEISQLVQSALDGYKVCIFAYGQTGSGKTYTMMGRPGHPEEKGLIPRSLEQIFQTKQSQQPQGWKYEMQVSMLEIYNETIRDLLSTNKSSSEGTPTRVENGTPGKQYTIKHDANGNTHVSDLTVVDVQSVKEVAFLLNQAANSRSVGKTQMNEQSSRSHFVFTLRLYGVNESTDQQAQGILNLIDLAGSERLSRSGSTGDRLKETQAINKSLSSLSDVIFALAKKEDHIPFRNSKLTYLLQPCLGGDSKTLMFVNISPDQASAGESLCSLRFASRVNACEIGTPRCHTSGRPVESRLTYF

SEQ ID NO: 12623 - protein, 693 aa, Glycine max
MMDYIKRLKVCIRWFQDLEISYSLEQEKLKSSLELAQQKCTEIELLLKIKEEELNSIIVEMRRNCTSLQEKLVKEESEKTAAAESHLKEREARLNFERSQSTLQEDLGRAQRELQSANQKISSLNDMYKRLQDYITSLQQYNGKLHSELSTVENELKRVEKEKATVLESLTMLKGQLTLSMASQEEATKQKDALASEVTSLRVELQHARDDRDHQLSQAQTLTSELEKSKDSTEKSCSELNKLTLRTNELEAKCALQDERIKVLQEQLTTAEEKLQVCDISASETRIEYEGQQKLVHELQRRLADAENKVIEGEKLRKELHNNILELKGNIRVFCRVRPLLPDEGSSTEGKIISYPTSMEASGRGIELTQNGQKHSFTYDKVFAPDASQEEVFIEISQLVQSALDGYKVCIFAYGQTGSGKTYTMMGRPGHPEEKGLIPRSLEQIFQTKQSQQPQGWKYEMQVSMLEIYNETIRDLLSTNKSSSEGTPTRVENGTPGKQYTIKHDANGNTHVSDLTVVDVQSVKEVAFLLNQAANSRSVGKTQMNEQSSRSHFVFTLRLYGVNESTDQQAQGILNLIDLAGSERLSRSGSTGDRLKETQAINKSLSSLSDVIFALAKKEDHIPFRNSKLTYLLQPCLGGDSKTLMFVNISPDQASAGESLCSLRFASRVNACEIGTPRCHTSGRPVESRLTYF

SEQ ID NO: 12624 - protein, 692 aa, Glycine max
MDYIKRLKVCIRWFQDLEISYSLEQEKLKSSLELAQQKCTEIELLLKIKEEELNSIIVEMRRNCTSLQEKLVKEESEKTAAAESHLKEREARLNFERSQSTLQEDLGRAQRELQSANQKISSLNDMYKRLQDYITSLQQYNGKLHSELSTVENELKRVEKEKATVLESLTMLKGQLTLSMASQEEATKQKDALASEVTSLRVELQHARDDRDHQLSQAQTLTSELEKSKDSTEKSCSELNKLTLRTNELEAKCALQDERIKVLQEQLTTAEEKLQVCDISASETRIEYEGQQKLVHELQRRLADAENKVIEGEKLRKELHNNILELKGNIRVFCRVRPLLPDEGSSTEGKIISYPTSMEASGRGIELTQNGQKHSFTYDKVFAPDASQEEVFIEISQLVQSALDGYKVCIFAYGQTGSGKTYTMMGRPGHPEEKGLIPRSLEQIFQTKQSQQPQGWKYEMQVSMLEIYNETIRDLLSTNKSSSEGTPTRVENGTPGKQYTIKHDANGNTHVSDLTVVDVQSVKEVAFLLNQAANSRSVGKTQMNEQSSRSHFVFTLRLYGVNESTDQQAQGILNLIDLAGSERLSRSGSTGDRLKETQAINKSLSSLSDVIFALAKKEDHIPFRNSKLTYLLQPCLGGDSKTLMFVNISPDQASAGESLCSLRFASRVNACEIGTPRCHTSGRPVESRLTYF

SEQ ID NO: 12625 - DNA, 1233 bp, Glycine max
attccattcatggaggtgattattaagtcggtaaacctttgtagggcatgattacattgcttgttgctgttattaattttgggagtagactcttgcaacattatgtgctatgtgcattctgcattctgggtgtgcagaattcagtgtggggaaagctacatgttttaatgtgttacacttgtactgcaatctgcaaaccgtctatccatgatgctgattctatacttgataactgatatgctttttggctttggctattataggtcccttctggttatgcagggtaaatccagtgattttgctaagcatgctcttccttccacacgcaaacaacgcatactggttaccttcacaaagtcccaaccaagaaagtcactatcaagtgatgctcaacagcttgcctcggcagtagcatcttctcattggggtccaccgccaagccgatctcccaatcatgttcgtcatcacgtaggccccaagcattacgctacacttccaacaactggggtactgccagctccacccattcgaccacaaatggcagctcccgttggcatgcaaccattgtttgttgctgctccagttgtacctcccatgccattttctgcacctgtgccaatcccagctggttctaccggatggacagctgcacctcctccaaggcatcctcctcctcgagtccctgctcctggaacaggagtcttcctacctccatcgggctcaggtaattcatctcaacagttaccagcaagtactttggctgaagtgaacccaagcacggaaactccaaccatgccggagaaggaaaatgggaaaattaatcataatagtacaagtgcttcaccaaaaggaaaagtgcaaaagcaagaatgcaatgggcatgctgatggaactcaagttgaaccagctctagagacacggctagatagcaatgacaaagctgcaccaagtcattgagctgtaccatacttatagagagagagagagagagagaggtaaagcttatcacacgaacacgataggctgtgaacttaacttgagtttgaagcaaatgtaaagcgcggcaacaggagatatcactatatatatactgcagaggagaacaagggaaggaggtagaacttttggttctctctgtaatcctttctttgctccattccttttttgttgtcttaaaatattaactattacaggaagggaaacccattcttaattctatttttggcctttcct

SEQ ID NO: 12626 - protein, 249 aa, Glycine max
MMLILYLITDMLFGFGYYRSLLVMQGKSSDFAKHALPSTRKQRILVTFTKSQPRKSLSSDAQQLASAVASSHWGPPPSRSPNHVRHHVGPKHYATLPTTGVLPAPPIRPQMAAPVGMQPLFVAAPVVPPMPFSAPVPIPAGSTGWTAAPPPRHPPPRVPAPGTGVFLPPSGSGNSSQQLPASTLAEVNPSTETPTMPEKENGKINHNSTSASPKGKVQKQECNGHADGTQVEPALETRLDSNDKAAPSH

SEQ ID NO: 12627 - protein, 248 aa, Glycine max
MLILYLITDMLFGFGYYRSLLVMQGKSSDFAKHALPSTRKQRILVTFTKSQPRKSLSSDAQQLASAVASSHWGPPPSRSPNHVRHHVGPKHYATLPTTGVLPAPPIRPQMAAPVGMQPLFVAAPVVPPMPFSAPVPIPAGSTGWTAAPPPRHPPPRVPAPGTGVFLPPSGSGNSSQQLPASTLAEVNPSTETPTMPEKENGKINHNSTSASPKGKVQKQECNGHADGTQVEPALETRLDSNDKAAPSH

SEQ ID NO: 12628 - protein, 239 aa, Glycine max
MLFGFGYYRSLLVMQGKSSDFAKHALPSTRKQRILVTFTKSQPRKSLSSDAQQLASAVASSHWGPPPSRSPNHVRHHVGPKHYATLPTTGVLPAPPIRPQMAAPVGMQPLFVAAPVVPPMPFSAPVPIPAGSTGWTAAPPPRHPPPRVPAPGTGVFLPPSGSGNSSQQLPASTLAEVNPSTETPTMPEKENGKINHNSTSASPKGKVQKQECNGHADGTQVEPALETRLDSNDKAAPSH

SEQ ID NO: 12629 - DNA, 1367 bp, Glycine max
gtctttctctctttaacattaacactaaatcaaacccaatggcttctccgccacccttatcgctaaacgtcgtcggatcagacacggacccaaacactaacaccttcccaaccgttacaagttcgttaacgccgccgtcaccgcgtcgttcatctccgttacagaacctcagccccagcattctgatcatcgtgaccgtcctcgccgtcaccgtcatcgtctccctcgcgctctgcttcctcctccgccacctcaaccgccgctgcctccgccgcttctcctcctccgcccctccctccgctgctgcgacgccgattttcgcctccagccgccgcatctcgccggagatactccactcctcggcttccgcttccgcctccgtcatcgacacgctccctgtcttcacgttctcctccgtcacgcgccgctcctcctcggtcgccggcgactgcgccgtgtgcctctcaaagttccaccaccacgacctcctccgcctcctccctctctgctgccacgccttccacgccgagtgcatcgacacgtggctccagtcgaacctctcgtgcccgctctgccgctccgccatcgtcgcggacgattccgacctcgcgaagatcctccggccgccgtcctccggcggtagcagcgacagcttccgcctcgagttaggaaacatcagccgccgcggaaccgacggcgccgccgaaggcggctccgtcgcgcgtggcggttcgcgctcctattccattggatcgttcgagtatttagtggacgacgaatcagaggttccgttcagccacgctagccggaggagcgtcgacgatgcgaaggaatttccggcgccggcggaggctccggtgagacacaacgaggcaaatctcgctggagaagttggcggcgttagaagctggcttaaggactacgtggatagggtttcggcttctatttcgtcgcgaacggcgtcgtttcgaggctccggaaggttcttcagcggtggcggtgggagcagtggtcgccgaagcgacgttgttccggtcgctgcttcggaatacgacgtcgaagggaaccgaattggcgaagagatcagcgaaatgtttcgttggctttcaggggtatgattggtaaataaagatgaacagttaattaggatatatttttaattttgattaatttttttaaaatcattccaaatattccttgctcatttggcttccacatgaatatttccctctttaatttgttttggggtacttgcaataaagttaatgtaacttgaatccgtgtagatagtatatgaggggcataagagtttcgaattcggatcatagaattgttttagaaatatatattatgacggtcatattatg

SEQ ID NO: 12630 - protein, 371 aa, Glycine max
LSLFNINTKSNPMASPPPLSLNVVGSDTDPNTNTFPTVTSSLTPPSPRRSSPLQNLSPSILIIVTVLAVTVIVSLALCFLLRHLNRRCLRRFSSSAPPSAAATPIFASSRRISPEILHSSASASASVIDTLPVFTFSSVTRRSSSVAGDCAVCLSKFHHHDLLRLLPLCCHAFHAECIDTWLQSNLSCPLCRSAIVADDSDLAKILRPPSSGGSSDSFRLELGNISRRGTDGAAEGGSVARGGSRSYSIGSFEYLVDDESEVPFSHASRRSVDDAKEFPAPAEAPVRHNEANLAGEVGGVRSWLKDYVDRVSASISSRTASFRGSGRFFSGGGGSSGRRSDVVPVAASEYDVEGNRIGEEISEMFRWLSGV

SEQ ID NO: 12631 - protein, 359 aa, Glycine max
MASPPPLSLNVVGSDTDPNTNTFPTVTSSLTPPSPRRSSPLQNLSPSILIIVTVLAVTVIVSLALCFLLRHLNRRCLRRFSSSAPPSAAATPIFASSRRISPEILHSSASASASVIDTLPVFTFSSVTRRSSSVAGDCAVCLSKFHHHDLLRLLPLCCHAFHAECIDTWLQSNLSCPLCRSAIVADDSDLAKILRPPSSGGSSDSFRLELGNISRRGTDGAAEGGSVARGGSRSYSIGSFEYLVDDESEVPFSHASRRSVDDAKEFPAPAEAPVRHNEANLAGEVGGVRSWLKDYVDRVSASISSRTASFRGSGRFFSGGGGSSGRRSDVVPVAASEYDVEGNRIGEEISEMFRWLSGV

SEQ ID NO: 12632 - DNA, 1455 bp, Glycine max
gaaagggtcagcttataaactgcaatgtttgatttgatgtctgctgctacaaaagtctcccttccaatgatcatctgaaattacataggattatatttatagggtcatcaagaactcttcagcatcacaaaaggtgatttataatcaaaaagcaagggacagacacacagaagttgttatcttgaatcagaaaacatgatgctaagaagctcttcaacaccagttcttggatccctcctctcttccttcacagatagccctaacaacaatattcactcagaaacctgtcatgcactgaaacactttccaccaaccactgtcccacaacattatcacaaacttactttccaccaaactgggtcctctgcatgtggttcttctccaatctctccctcaattggtgagcttgaaaggcaaaacaaaggcttgatcagaagagtccaatctgatgggaacttgcaagacttggccttcttttcttgcaacaatgaagaaaggtttgagttttcagacccttccaagaggttttcagctagacacaggagcttggtgctggagaccattccttctttctctactgccaagcacaatggcttgagtgaagaagaggaagatgaagaaatggaaagtgagagtgaagatgggttcagtgtgctgaatggtgggaagggtgtaatattcagtgaagaagtgagggtgaaggatggagtttgtagggtgagttttggtgaccaggaagaggttagtagtggtaaagaaatgtatcttgcaaagggacttggtgtagagtgctgtggtgatggcataggtggttgtagaggtggtggtggaggtggtggtgatcataatcccttgggttctggaggaaatgatggagaaaggcatggagtggaagaatattacaagaaaatggttagggaaaatcctggggatcctttgtttctgaggaattatgccaattttttgtatcagtgcaaacaagaccgtgaaggagcagaggagtattattcccgtgccatacttgcagacccaaatgatggagaggttctatcacagtatgggaagttagtttgggaactacatcacaaccaagaacgtgcctccagctattttgaaagagcagtccaagcctctcctgaagacagccatgtacaagcagcatatgctagtttcctttgggacacagaggaagacgaggatggtatcaatgaaccacaaagtttaccgccacattctcatcaaggagctgtggctactgcaggtgcttgaattggtgatgaagtttttatacgtacaaatacaagcgagtgtcttgtgatgtaatgaagttcttatgttgaagccaatgtttataaataactgaattcacaaactcattacccatgtgtagtagcactaagacaagcgacgagtttgtgtgcaacccttttaattaatcaacgtctactgattgat

SEQ ID NO: 12633 - protein, 357 aa, Glycine max
MMLRSSSTPVLGSLLSSFTDSPNNNIHSETCHALKHFPPTTVPQHYHKLTFHQTGSSACGSSPISPSIGELERQNKGLIRRVQSDGNLQDLAFFSCNNEERFEFSDPSKRFSARHRSLVLETIPSFSTAKHNGLSEEEEDEEMESESEDGFSVLNGGKGVIFSEEVRVKDGVCRVSFGDQEEVSSGKEMYLAKGLGVECCGDGIGGCRGGGGGGGDHNPLGSGGNDGERHGVEEYYKKMVRENPGDPLFLRNYANFLYQCKQDREGAEEYYSRAILADPNDGEVLSQYGKLVWELHHNQERASSYFERAVQASPEDSHVQAAYASFLWDTEEDEDGINEPQSLPPHSHQGAVATAGA

SEQ ID NO: 12634 - protein, 356 aa, Glycine max
MLRSSSTPVLGSLLSSFTDSPNNNIHSETCHALKHFPPTTVPQHYHKLTFHQTGSSACGSSPISPSIGELERQNKGLIRRVQSDGNLQDLAFFSCNNEERFEFSDPSKRFSARHRSLVLETIPSFSTAKHNGLSEEEEDEEMESESEDGFSVLNGGKGVIFSEEVRVKDGVCRVSFGDQEEVSSGKEMYLAKGLGVECCGDGIGGCRGGGGGGGDHNPLGSGGNDGERHGVEEYYKKMVRENPGDPLFLRNYANFLYQCKQDREGAEEYYSRAILADPNDGEVLSQYGKLVWELHHNQERASSYFERAVQASPEDSHVQAAYASFLWDTEEDEDGINEPQSLPPHSHQGAVATAGA

SEQ ID NO: 12635 - protein, 215 aa, Glycine max
MESESEDGFSVLNGGKGVIFSEEVRVKDGVCRVSFGDQEEVSSGKEMYLAKGLGVECCGDGIGGCRGGGGGGGDHNPLGSGGNDGERHGVEEYYKKMVRENPGDPLFLRNYANFLYQCKQDREGAEEYYSRAILADPNDGEVLSQYGKLVWELHHNQERASSYFERAVQASPEDSHVQAAYASFLWDTEEDEDGINEPQSLPPHSHQGAVATAGA

SEQ ID NO: 12636 - DNA, 932 bp, Glycine max
aatttgtaattgccactcatacttgaaccagaaaaccaagcttaaaccttctcctcctatcttcttctctgcaaattcaatcagtcagtgacaacaacctagtacggttccaatcaaccaaagatggttaatacaaaaaccgaggtaccccagaagagtgtccttagtatcaagcaagatgacaagttcttctgcaggcttctttcaaaggaaagttcaatgtccaacccttctttcagaatagcccttgctgtgccatttgtgtgggaatctgagcctggcaccccaaaacacaggttctcagaggacacactccctcctctaactcctccaccttcttaccattttagcactatcaatagctacaaaaagaaagagaagaagcactcatcaaagtccagtctcttgctcacaatgctaccaaagctgaacctcatcaagaaaatgattctctcgtcctcatcatcatacccttcttcatggccctcatcatcttcaagctcctccaaagttgtccctatggctaagtttggcaagaagaagctcttaagctatggatcatcatgtaatgatttcaagggagattgtgaaggagttggtggtgctagttcaccctcttccaaattgtgctttagcattcctcgtgccacctgcagttaagacagtgagttctaaggttttcttaagctaattcaattaagacttgtctttatagtttggatctggagtggacaatgtgattcttatatagtatttctttgtaaattttctagctaatattcttcttcatgtttagaggacaatctattttctatgctagaatttgtcttgggagttttgtcctctcaaataattaacaagcttgcttccaaagcgtgtgagtgtatcttaaaaacgttttgtgtagtttgaaacgatcatagtttttcctt

SEQ ID NO: 12637 - protein, 178 aa, Glycine max
MVNTKTEVPQKSVLSIKQDDKFFCRLLSKESSMSNPSFRIALAVPFVWESEPGTPKHRFSEDTLPPLTPPPSYHFSTINSYKKKEKKHSSKSSLLLTMLPKLNLIKKMILSSSSSYPSSWPSSSSSSSKVVPMAKFGKKKLLSYGSSCNDFKGDCEGVGGASSPSSKLCFSIPRATCS

SEQ ID NO: 12638 - protein, 146 aa, Glycine max
MSNPSFRIALAVPFVWESEPGTPKHRFSEDTLPPLTPPPSYHFSTINSYKKKEKKHSSKSSLLLTMLPKLNLIKKMILSSSSSYPSSWPSSSSSSSKVVPMAKFGKKKLLSYGSSCNDFKGDCEGVGGASSPSSKLCFSIPRATCS

SEQ ID NO: 12639 - DNA, 712 bp, Glycine max
  misc_feature (440)..(440): n is a, c, g, or t
  misc_feature (523)..(523): n is a, c, g, or t
  misc_feature (648)..(648): n is a, c, g, or t
  misc_feature (672)..(672): n is a, c, g, or t
tcctttgtggtgtcgagctgagaataccagttgctccagtagccggcactaaacaacatggcggacaaggcagtcaccatccgaaccaggaagtttatgacaaacaggcttctctccagaaagcagttcgtcgttgatgtccttcatccagggagggctaatgtttccaaggctgaactgaaggagaagctgggaagaatgtatgacgtgaaagacaccaacactgtatttgtcttcaagttccgaactcattttggtggtggcaagtccactgggtttggtttgatctatgattcagttgagaatgctaagaagtatgagcctaaatacaggcttatcaggaatggacttgataccaaagtagagaaatcaaggaagcaaatgaaggagagaaagaatagagctaagaagattcggggagttaagaagaccaaggcatntgatgctgcaaaggcgggaaaaaagaaatgagttttcaaacatcctgtcctgattttaaggttcttttgctatcggtattttntaatagcttcctagaatgagatattttgctgtaagtgttacgttaattgatgttcagttataactagagattgggtactggcatgatcaattttgacaattcagttgaacactttgttttcaaanatttagtattttgataatgaattntggtgtttcttgatttgggatgaaccagccgattattgtc

SEQ ID NO: 12640 - protein, 137 aa, Glycine max
  misc_feature (128)..(128): Xaa can be any naturally occurring amino acid
MADKAVTIRTRKFMTNRLLSRKQFVVDVLHPGRANVSKAELKEKLGRMYDVKDTNTVFVFKFRTHFGGGKSTGFGLIYDSVENAKKYEPKYRLIRNGLDTKVEKSRKQMKERKNRAKKIRGVKKTKAXDAAKAGKKK

SEQ ID NO: 12641 - protein, 124 aa, Glycine max
  misc_feature (115)..(115): Xaa can be any naturally occurring amino acid
MTNRLLSRKQFVVDVLHPGRANVSKAELKEKLGRMYDVKDTNTVFVFKFRTHFGGGKSTGFGLIYDSVENAKKYEPKYRLIRNGLDTKVEKSRKQMKERKNRAKKIRGVKKTKAXDAAKAGKKK

SEQ ID NO: 12642 - protein, 90 aa, Glycine max
  misc_feature (81)..(81): Xaa can be any naturally occurring amino acid
MYDVKDTNTVFVFKFRTHFGGGKSTGFGLIYDSVENAKKYEPKYRLIRNGLDTKVEKSRKQMKERKNRAKKIRGVKKTKAXDAAKAGKKK

SEQ ID NO: 12643 - DNA, 728 bp, Glycine max
aaaaatttctagagtctctttcttcactttcttcctccacatggcagagacaccaaccctcagaatccacgaagtctgccccatctcgccgccacaagaaaccccatcaaccactattcccttcaccttcttcgacgtcctatggctacgcctccccccagtggagcgtctgttcttctattccttcccaaacccaacaacaacctcttcattcttcgacaccaccattctcccaaatctcaaacactccctctccctcactctccaccacttccctcctccaccaccagtgtattctccgccgccaccacctccggtggggctcccccgaggaggaggcggaggaggaggagatgacgccgccgcacgagatcgtgaagagaagggtggccgcaaaaatggcgttttcggtgtgcacggggaatgggagaacgttgaagggacgcgatttgagtcaggtcaggaattcgatcctcaggttaactgggtttctggaagcatgacaacagtttcgtacaatggaagatacaaaaaatggaaaattaaaaaaaaaaaattgtctccatttcttcattttcttgctttgttatttaattgattgattaatcggggtagcttgagatcgtttttggagtctcgttgattgtaaaagggaacatttgaagattagaaatggaatagaatgaaataaaattaatttattgattttcatatatactatacgcttt

SEQ ID NO: 12644 - protein, 198 aa, Glycine max
KISRVSFFTFFLHMAETPTLRIHEVCPISPPQETPSTTIPFTFFDVLWLRLPPVERLFFYSFPNPTTTSSFFDTTILPNLKHSLSLTLHHFPPPPPVYSPPPPPPVGLPRGGGGGGGDDAAARDREEKGGRKNGVFGVHGEWENVEGTRFESGQEFDPQVNWVSGSMTTVSYNGRYKKWKIKKKKLSPFLHFLALLFN

SEQ ID NO: 12645 - protein, 185 aa, Glycine max
MAETPTLRIHEVCPISPPQETPSTTIPFTFFDVLWLRLPPVERLFFYSFPNPTTTSSFFDTTILPNLKHSLSLTLHHFPPPPPVYSPPPPPPVGLPRGGGGGGGDDAAARDREEKGGRKNGVFGVHGEWENVEGTRFESGQEFDPQVNWVSGSMTTVSYNGRYKKWKIKKKKLSPFLHFLALLFN

SEQ ID NO: 12646 - protein, 166 aa, Glycine max
KFLESLSSLSSSTWQRHQPSESTKSAPSRRHKKPHQPLFPSPSSTSYGYASPQWSVCSSIPSQTQQQPLHSSTPPFSQISNTPSPSLSTTSLLHHQCILRRHHLRWGSPEEEAEEEEMTPPHEIVKRRVAAKMAFSVCTGNGRTLKGRDLSQVRNSILRLTGFLEA

SEQ ID NO: 12647 - DNA, 1560 bp, Glycine max
accaaattgtgttctttaatttctccgcccattgcattttgcatttccgctcctataaataaattcccattctttccgtctgtatcttcattttcatttccatctttcttgggtgatacgatccaatggctgcgacccttttccagggattgggagttgtgaccccatcattctcttcttcccactccaacaagttcatgctttcttccctctcagagaggaaagatggcatatttgtggtcagatctgatgctgatgcaaggattctgaagactggagctcgtaagcatgaattgttggttactaatgcagttgcaacaaagggagccagttctgcggcctctacatcaaaatctggatctgggcatgaacttctcctttttgaggccctacgcgaaggtttggaggaagaaatggagagggatccttgtgtatgtgtcatgggtgaagatgtaggtcattatggaggatcttataaggtgactaaaggccttgccccaaagtttggggaccttagagttttggacacccctattgctgagaacgcctttatggggatgggcattggagctgccatgactggtctgaggccagttgttgagggcatgaacatgggatttctacttctggcatttaaccagatctctaacaattgtggcatgctgcattacacatcaggagggcagttcaaaataccaattgtcattcgtggacctggtggagttgggcggcaacttggagcagagcactcgcagcgattggagtcttattttcagtcaatccccggaatccagatggtggcttgctcaaccccttacaacgccaagggcttgatgaaagctgcaatccgaagtgagaaccccgtgattctctttgagcatgttttgctttataacctcaaggagagaattccagatgaagagtatgtattgtcacttgaagaagccgagatggttaggcctggggaacatgtcacgatattaacctattccaggatgaggtatcatgtcatgcaagctgccaagacactggtgaacaaggggtacgaccccgaagtaatcgatatcaggtctttgaaaccgtttgatcttcacacaatcgggaattcggtgaagaagacacaccgtgtgctaattgtggaagagtgcatgcggacgggtggaattggtgctagtttgacggctgccattaccgaaaatttccatgaccatttggatgctcctatagtatgcttatcctctcaggatgtgccgactccttatgctggaacattggaggaatggacagtagttcaacctgctcagattgtgactgcagttgagcaactctgccagtaattgctacaaaacactaccaattgtgcttgttaaattaagctagaaatttttatcatggttttctctttaccttttatttctgaagtctaaagcccataaatttcaattgttatttaacttctgttaaactttgcaaaaaaaaataaattattaaaagaagaatatagtagctatggaattgcactgctgctaaatattcacctgcacaagacaaaccagctgt

SEQ ID NO: 12648 - protein, 403 aa, Glycine max
MAATLFQGLGVVTPSFSSSHSNKFMLSSLSERKDGIFVVRSDADARILKTGARKHELLVTNAVATKGASSAASTSKSGSGHELLLFEALREGLEEEMERDPCVCVMGEDVGHYGGSYKVTKGLAPKFGDLRVLDTPIAENAFMGMGIGAAMTGLRPVVEGMNMGFLLLAFNQISNNCGMLHYTSGGQFKIPIVIRGPGGVGRQLGAEHSQRLESYFQSIPGIQMVACSTPYNAKGLMKAAIRSENPVILFEHVLLYNLKERIPDEEYVLSLEEAEMVRPGEHVTILTYSRMRYHVMQAAKTLVNKGYDPEVIDIRSLKPFDLHTIGNSVKKTHRVLIVEECMRTGGIGASLTAAITENFHDHLDAPIVCLSSQDVPTPYAGTLEEWTVVQPAQIVTAVEQLCQ

SEQ ID NO: 12649 - protein, 379 aa, Glycine max
MLSSLSERKDGIFVVRSDADARILKTGARKHELLVTNAVATKGASSAASTSKSGSGHELLLFEALREGLEEEMERDPCVCVMGEDVGHYGGSYKVTKGLAPKFGDLRVLDTPIAENAFMGMGIGAAMTGLRPVVEGMNMGFLLLAFNQISNNCGMLHYTSGGQFKIPIVIRGPGGVGRQLGAEHSQRLESYFQSIPGIQMVACSTPYNAKGLMKAAIRSENPVILFEHVLLYNLKERIPDEEYVLSLEEAEMVRPGEHVTILTYSRMRYHVMQAAKTLVNKGYDPEVIDIRSLKPFDLHTIGNSVKKTHRVLIVEECMRTGGIGASLTAAITENFHDHLDAPIVCLSSQDVPTPYAGTLEEWTVVQPAQIVTAVEQLCQ

SEQ ID NO: 12650 - protein, 307 aa, Glycine max
MERDPCVCVMGEDVGHYGGSYKVTKGLAPKFGDLRVLDTPIAENAFMGMGIGAAMTGLRPVVEGMNMGFLLLAFNQISNNCGMLHYTSGGQFKIPIVIRGPGGVGRQLGAEHSQRLESYFQSIPGIQMVACSTPYNAKGLMKAAIRSENPVILFEHVLLYNLKERIPDEEYVLSLEEAEMVRPGEHVTILTYSRMRYHVMQAAKTLVNKGYDPEVIDIRSLKPFDLHTIGNSVKKTHRVLIVEECMRTGGIGASLTAAITENFHDHLDAPIVCLSSQDVPTPYAGTLEEWTVVQPAQIVTAVEQLCQ

SEQ ID NO: 12651 - DNA, 455 bp, Glycine max
atcgctcaaccgatctaaggcttcagtctgtaatcatgtcaggcaagtatatcatttctgctattcttggatcatttggagttgcatgggtttgtgattattatgtttcagacaaaaagctatttggaggttctacccctggaactattacaaacaatgagtgggcagaagagactgacaaaaaattgcaggcatggcctcgtactgccggtccaccagtggtcatgaatcccataagtcgccaaaatttcattgtcaagtctcgcgctgagtaataatttttgttgattgattttgagttaattggtgcttggtcatgccatatgtttccataaatgatgataatgcttgaggtaaaactcttacagttcaattagtgttttgaagtttaaacatgtgaatgtgtttacttgctaaataaaatgttacttaagcaatcatggattgattaatgc

SEQ ID NO: 12652 - protein, 90 aa, Glycine max
RSTDLRLQSVIMSGKYIISAILGSFGVAWVCDYYVSDKKLFGGSTPGTITNNEWAEETDKKLQAWPRTAGPPVVMNPISRQNFIVKSRAE

SEQ ID NO: 12653 - protein, 79 aa, Glycine max
MSGKYIISAILGSFGVAWVCDYYVSDKKLFGGSTPGTITNNEWAEETDKKLQAWPRTAGPPVVMNPISRQNFIVKSRAE

SEQ ID NO: 12654 - DNA, 651 bp, Glycine max
acttatcatcaaattgatgaactagtgtgacattagagaagaaccaatttaaaagaagagcagcggagctaaagaggggagaggagagaggagaagagaagctaaagaaagaaaggagatgggagtggagaagcagttgttgaggtctggcaccggtccgaagccaattcccggtcagaacgtaaccgttcactgcactggtttcgggaagaacggtgacctttctcagaaattctggagcacaaaggatcctggccagaacccattcactttcaaaatcggccaaggttctgttatcaaaggatgggatgaaggtgtgcttggcatgcaaattggtgaagttgctcgtctccggtgctctccggattatgcttatggtgctggtggctttcctgcttggggaatacggcccaactctgtcttggaatttgaaatcgaagtcttaagtgcgcaatgaaaaccttggtagtctgtctctgtcctaaagaataaaattcttccattttcatggacttgtacaatggtatccccacattgtgacttgtgggtgatatctacagtggttgagttgtccaagtgaaatactaaataactttctgaatgatctcaaactctctaatattatattgggtagcctttactttcttcccc

SEQ ID NO: 12655 - protein, 112 aa, Glycine max
MGVEKQLLRSGTGPKPIPGQNVTVHCTGFGKNGDLSQKFWSTKDPGQNPFTFKIGQGSVIKGWDEGVLGMQIGEVARLRCSPDYAYGAGGFPAWGIRPNSVLEFEIEVLSAQ

SEQ ID NO: 12656 - DNA, 1302 bp, Glycine max
gaaaaggctgagatggacaaggttaatgctgaagatgagatatgtggcaatatagctgtaacatcaataaatgaaggtacctgccaaagttccataactaatacagtttctcagaatgatgaaacagaggaaactcatgaaattgaacctcaacaagaaagttctggatcggaacttgagaaggtttgtgcttctgatcaggaaaaacctacagaaacaaatggcagtaagctttcggctgctgccaaacctttcaatccaggaatgttgtccatgtctcaccatctaaattcagcttccttcacaagcatgtatgatacagatgttagtcaaggcatgcacgtggagcctgtgcttccccctgctgttgctagggtcccttgtgggcctagatcacctctgtattatagaaccaactatacttttcgcatgaaacatggttctactaaaggtcaaacctctatcaaagaaagaagtggatttgggtctccaagaataatgaatccgcatgcgccagagtttattcccagaagtgcttctcaaatagaagccaaggatgccaattcaaatgtttccaatgagcataaccctttgtctgacgaaggcatgccagaaaaaaacaagctagatgaaaattttgttgaaatcaaggggagctccacaaaaaacagtatttctgaatctgagaagtccgagatagcaaggcagatattgctcagttttctagtgaaatctgtcaaggaaaatattgattatgtggatgagtctaaggatgatgaaggaaaaattgagaacttggaaagttgttctgatgaaattaccaaagaccgtgctgtcataaacattatgtatggaaatgaagaaaagaataagacagtgcctcattccagtgatagcgttgagccagagaaattaggagttactgaaaataagaatggggatggtgaagggtttatagttgtctcaaagaggaggaaaaacaggcagaagatcacaaatggagtcacagaattgtacaaccaacagtccatttgtgcttcagttcgttgaatagagttaggaaataaataaccgatattgtctctccatctgagtgtttgtctagccaaagctctggacaatggacatcatattgttaatagtttataacttcattgcctagaattttggtcattcaaatcattttgttttttgccaatataataagtgcattcgggatttgtttattctctgttatagtaggttttgttctgatacttggaaattttgttttatcaataaaaagctgattggcaacttttt

SEQ ID NO: 12657 - protein, 349 aa, Glycine max
EKAEMDKVNAEDEICGNIAVTSINEGTCQSSITNTVSQNDETEETHEIEPQQESSGSELEKVCASDQEKPTETNGSKLSAAAKPFNPGMLSMSHHLNSASFTSMYDTDVSQGMHVEPVLPPAVARVPCGPRSPLYYRTNYTFRMKHGSTKGQTSIKERSGFGSPRIMNPHAPEFIPRSASQIEAKDANSNVSNEHNPLSDEGMPEKNKLDENFVEIKGSSTKNSISESEKSEIARQILLSFLVKSVKENIDYVDESKDDEGKIENLESCSDEITKDRAVINIMYGNEEKNKTVPHSSDSVEPEKLGVTENKNGDGEGFIVVSKRRKNRQKITNGVTELYNQQSICASVR

SEQ ID NO: 12658 - protein, 345 aa, Glycine max
MDKVNAEDEICGNIAVTSINEGTCQSSITNTVSQNDETEETHEIEPQQESSGSELEKVCASDQEKPTETNGSKLSAAAKPFNPGMLSMSHHLNSASFTSMYDTDVSQGMHVEPVLPPAVARVPCGPRSPLYYRTNYTFRMKHGSTKGQTSIKERSGFGSPRIMNPHAPEFIPRSASQIEAKDANSNVSNEHNPLSDEGMPEKNKLDENFVEIKGSSTKNSISESEKSEIARQILLSFLVKSVKENIDYVDESKDDEGKIENLESCSDEITKDRAVINIMYGNEEKNKTVPHSSDSVEPEKLGVTENKNGDGEGFIVVSKRRKNRQKITNGVTELYNQQSICASVR

SEQ ID NO: 12659 - protein, 261 aa, Glycine max
MLSMSHHLNSASFTSMYDTDVSQGMHVEPVLPPAVARVPCGPRSPLYYRTNYTFRMKHGSTKGQTSIKERSGFGSPRIMNPHAPEFIPRSASQIEAKDANSNVSNEHNPLSDEGMPEKNKLDENFVEIKGSSTKNSISESEKSEIARQILLSFLVKSVKENIDYVDESKDDEGKIENLESCSDEITKDRAVINIMYGNEEKNKTVPHSSDSVEPEKLGVTENKNGDGEGFIVVSKRRKNRQKITNGVTELYNQQSICASVR

SEQ ID NO: 12660 - DNA, 774 bp, Glycine max
gagtagtttctcaaaacacatcacaccttcaaacccgaaccctaaccctagaagaaagaaaaaaacccacaacacacaatcagtactaccaactatggtttttgtcatggctagtttgcaaactagggttttcttgatggcccttctgtgcctgctggctcttggtgcaaccattattccaatggcacaaggggaagtgtcatgtggccaagttgtgagtaacctgaccccatgcatctcctatgtgctatatggtggagccacggttcctgcacagtgctgcaatgggatcaggaacctctatggcatggctcagaccaaaccagatcgccaagctgtttgcaactgcatcaagaacgctgttaggaacagtggcttcacctactctcacttcaatctcaaccttgctgctaaccttcccaagaactgtggggttaacattccctaccagatcagccccgacacagactgcaccagggtgcagtgaggttggtgcatgatgtttatgttagcagtgttagaataagaggccacgtgacacgaaaagggaatggctagaaattgcttttttaaggctcttgtactagtgctcttgtattatgtctgtggttatatatatatatattatatagtgtgtaactgaggtcatggtgctgcttgtgtagcatgcttaattatgtaggctttagtataagatcatatgaagttatgggaagaaacatatggttgtgtaagctgtagttgtcacttatttaatgatatgagcaatttggg

SEQ ID NO: 12661 - protein, 161 aa, Glycine max
SSFSKHITPSNPNPNPRRKKKTHNTQSVLPTMVFVMASLQTRVFLMALLCLLALGATIIPMAQGEVSCGQVVSNLTPCISYVLYGGATVPAQCCNGIRNLYGMAQTKPDRQAVCNCIKNAVRNSGFTYSHFNLNLAANLPKNCGVNIPYQISPDTDCTRVQ

SEQ ID NO: 12662 - protein, 130 aa, Glycine max
MVFVMASLQTRVFLMALLCLLALGATIIPMAQGEVSCGQVVSNLTPCISYVLYGGATVPAQCCNGIRNLYGMAQTKPDRQAVCNCIKNAVRNSGFTYSHFNLNLAANLPKNCGVNIPYQISPDTDCTRVQ

SEQ ID NO: 12663 - protein, 126 aa, Glycine max
MASLQTRVFLMALLCLLALGATIIPMAQGEVSCGQVVSNLTPCISYVLYGGATVPAQCCNGIRNLYGMAQTKPDRQAVCNCIKNAVRNSGFTYSHFNLNLAANLPKNCGVNIPYQISPDTDCTRVQ

SEQ ID NO: 12664 - DNA, 1081 bp, Glycine max
aatgttcatttctcttgcaacaagtaactcgttcagattttggtttttgcttccctatccgctctctcttcttcacttcagtatggcggtggtaccttacaccaccggttctgcacctcttctttctcctccttctacttctagtgttgccacaaagctctactccggattgaaacttcaagctgcgagtcctttcggagctgcaaaacctaacgtaaccgctgagttttatggaaaagttcacaacactcttcactgtcggtatgctaaccacaatacatcaatggcacgtattcgaatgatgccaatagggactcctaaagtcccctataggacacctggtgaaggaacttggcaatgggttgatgtatggaacgccctttatcgagaacgtgttatcttcattggacaagagatagatgaagaatttagtaaccaaatattggcgactatgctttatcttgacagtatagaaaactccaagaagctttatatgtacatcaatggccctggtggtgatcttacaccaagcatggctatctatgacaccatgcagagcttgcaaagtcctgtagccacccactgtgttgggctatgcttatagtcttgcagcatttctccttgcagctggagaaaagggtaatcgttctgcaatgcctctatcaagagttgcccttacatcaccagctggagccgcccgtggacaggctgatgacattcagaatgaagcaaatgaacttcttagaatcagagattaccttttcaatgagttggcacagaaaacgggtcaacctgttgagaagattactaaagacttgagtaggatgaaacgcttcaacgcacaggaagcccttgaatatggactcattgatcgaattgtcaggccaccccgcattaaggctgatgcaccacgcaaggaagcaggcacaggtcttggttaagaatatttggaatccgcattatgtgtttgaagagcagagaataacatgttttgtatcattgaataatgcatgaatattatattagtcatgacattaaaaatgagaaatgttacaacacatttttattttctgatacactt

SEQ ID NO: 12665 - protein, 200 aa, Glycine max
MFISLATSNSFRFWFLLPYPLSLLHFSMAVVPYTTGSAPLLSPPSTSSVATKLYSGLKLQAASPFGAAKPNVTAEFYGKVHNTLHCRYANHNTSMARIRMMPIGTPKVPYRTPGEGTWQWVDVWNALYRERVIFIGQEIDEEFSNQILATMLYLDSIENSKKLYMYINGPGGDLTPSMAIYDTMQSLQSPVATHCVGLCL

SEQ ID NO: 12666 - protein, 173 aa, Glycine max
MAVVPYTTGSAPLLSPPSTSSVATKLYSGLKLQAASPFGAAKPNVTAEFYGKVHNTLHCRYANHNTSMARIRMMPIGTPKVPYRTPGEGTWQWVDVWNALYRERVIFIGQEIDEEFSNQILATMLYLDSIENSKKLYMYINGPGGDLTPSMAIYDTMQSLQSPVATHCVGLCL

SEQ ID NO: 12667 - protein, 106 aa, Glycine max
MARIRMMPIGTPKVPYRTPGEGTWQWVDVWNALYRERVIFIGQEIDEEFSNQILATMLYLDSIENSKKLYMYINGPGGDLTPSMAIYDTMQSLQSPVATHCVGLCL

SEQ ID NO: 12668 - DNA, 1097 bp, Glycine max
aacgagaaaagtatggcaaacattctcctaaatccatggcaacccttcttgtccagcaccagtttcaagccaccgaagaaggacaagatgagtgatcatggtcgtgcaaaggcagcatctggttcaaggaatcgtttggaatccaagaatattgtcaatagaacttcctcctttaattacagaagcagctctgctgttccccttcatgagttgccatgggcttcctttgatcaatatatagaggacaagggaagagtaatccgatctatatttccagaaaaatcagcaagtcagctcctcaacagggaagagtggagagttaagatgactcccatccaagtcttgttcttaacatgtcaaccagtagctcacattacagctaaatgtatatctgaagcagatgattacccacccgagattcctggtcatatcaccaaattcttcgagattcaaattacaaagtgtgagttcccagatctcaatcctgattacatgccaccaaatttcagcatcaatggaaaaggagccttgtatctggaaagacaaggaaggcatatttggatgaagaatcttctagacattactttaaacattacttttcctccattgctctcatgggttcctgaatacgtgttgcaaaacattgtacaatcggtcctcgaaaattacgcggaggatatcaataatggatttgctgttggactgttagcagattataactcgttcaagaggaacaaggccagatattcggtgtaattttgcttgtagatatccattattcatgcatgaatcaatttgcggattctaaatttcataaggtaattcctatgttctcccatcaaaagcaaactcaaatatggcatctttatttggttcgtgattttggcttctatcctagtgtgacctcgccatcatcgccaatggcttcacatgcttgaggctcctcaattaatttgcatatttgtaatttataaaggtctatttgtcttatttcttcttgtgtttctcttatttggatttcaaatattgactttctgaactccgattgtgattgacggtacattctactaatcgaaaactaagtgctgatttattgc

SEQ ID NO: 12669 - protein, 251 aa, Glycine max
NEKSMANILLNPWQPFLSSTSFKPPKKDKMSDHGRAKAASGSRNRLESKNIVNRTSSFNYRSSSAVPLHELPWASFDQYIEDKGRVIRSIFPEKSASQLLNREEWRVKMTPIQVLFLTCQPVAHITAKCISEADDYPPEIPGHITKFFEIQITKCEFPDLNPDYMPPNFSINGKGALYLERQGRHIWMKNLLDITLNITFPPLLSWVPEYVLQNIVQSVLENYAEDINNGFAVGLLADYNSFKRNKARYSV

SEQ ID NO: 12670 - protein, 247 aa, Glycine max
MANILLNPWQPFLSSTSFKPPKKDKMSDHGRAKAASGSRNRLESKNIVNRTSSFNYRSSSAVPLHELPWASFDQYIEDKGRVIRSIFPEKSASQLLNREEWRVKMTPIQVLFLTCQPVAHITAKCISEADDYPPEIPGHITKFFEIQITKCEFPDLNPDYMPPNFSINGKGALYLERQGRHIWMKNLLDITLNITFPPLLSWVPEYVLQNIVQSVLENYAEDINNGFAVGLLADYNSFKRNKARYSV

SEQ ID NO: 12671 - protein, 222 aa, Glycine max
MSDHGRAKAASGSRNRLESKNIVNRTSSFNYRSSSAVPLHELPWASFDQYIEDKGRVIRSIFPEKSASQLLNREEWRVKMTPIQVLFLTCQPVAHITAKCISEADDYPPEIPGHITKFFEIQITKCEFPDLNPDYMPPNFSINGKGALYLERQGRHIWMKNLLDITLNITFPPLLSWVPEYVLQNIVQSVLENYAEDINNGFAVGLLADYNSFKRNKARYSV

SEQ ID NO: 12672 - DNA, 1101 bp, Glycine max
ggtacactccttgtctccttcgctttggcacactggacacgtccaccacgtgaacacgtcaacagaagtgacccatcaaggggcccacaggtccacgagcccgagtgacgactgacgacagatcgcttgtgcgtcgctaacccgccgctagtcggctagtgggtgggaaatccgcagattcccgtcgctacttcggccacatggctgcagcggcggcgtggaccggcgccgcatcccccaactcgctgctgctctcgcgctcgcctccccacgccgccgcgctcgcgccttcgccgggaagctccatgcggaggcggctcctcctcggcgtcggcaccccggccgtggcggcgctggcggccgcggcgccgccagcggtgctgcaggacggagcggtcactgtgctcatcaccgccggcgcctactctcttgtgcgcgtcttcgacgagctcaccgagcggcggctcatcgaaaagagcttgagcaggaaggttgtgcacgtgctatccggcgtcctgttcatgtcatcttggcccctgttcagcaattcgacagaagcacggtatttcgccgcggttgtcccgttcctgaactccatgaggcttctgatatatggactccgtctctacactgatgaagctctgggaattgctgagaggtccactctattatgtcctggtgctgctgttcagcgttttagtcttctggcgtgagtcccccatcgggatcgtctccttgtcgatgatgagcggtggcgatggttttgctgacattgttgggaggaggtatggctcagcgaagctgccattcaatcggaagaagagctgggccgggagcatctcgatgttcatttctggtttcctgctgtccgcgatgatgatgctctacttctcaagcctgggttacattgatgttatctgggaagaggcacttggtaagctggcgcttgttgcactagcagcgacagtagtggagtgcgttcctgtgaccgaagttgtagatgacaacatatctgttcctttggccaccatgctggtagcttttctcttgtttagctccaaccgcacaatagttaattaaaatactactagtgcattattt

SEQ ID NO: 12673 - protein, 170 aa, Glycine max
MAAAAAWTGAASPNSLLLSRSPPHAAALAPSPGSSMRRRLLLGVGTPAVAALAAAAPPAVLQDGAVTVLITAGAYSLVRVFDELTERRLIEKSLSRKVVHVLSGVLFMSSWPLFSNSTEARYFAAVVPFLNSMRLLIYGLRLYTDEALGIAERSTLLCPGAAVQRFSLLA

SEQ ID NO: 12674 - protein, 155 aa, Glycine max
MDSVSTLMKLWELLRGPLYYVLVLLFSVLVFWRESPIGIVSLSMMSGGDGFADIVGRRYGSAKLPFNRKKSWAGSISMFISGFLLSAMMMLYFSSLGYIDVIWEEALGKLALVALAATVVECVPVTEVVDDNISVPLATMLVAFLLFSSNRTIVN

SEQ ID NO: 12675 - protein, 148 aa, Glycine max
MKLWELLRGPLYYVLVLLFSVLVFWRESPIGIVSLSMMSGGDGFADIVGRRYGSAKLPFNRKKSWAGSISMFISGFLLSAMMMLYFSSLGYIDVIWEEALGKLALVALAATVVECVPVTEVVDDNISVPLATMLVAFLLFSSNRTIVN

SEQ ID NO: 12676 - DNA, 1169 bp, Glycine max
atattatcatcattgagttacttgtgctggttgttgattgtagctcattttgaatgttaaaatatatcgacttcattctttttaatttcatctaaaatgagattaacttaatgtagttttgtttattgacctttttattgtttttcaatagaacaataaacctagaccatatcttctaggatagagtactcctcaaactgggtttataattttaaaactagttgcccaatttatatcgtctttgttattttctcttatattttgaacttttattactcatttatggttgcagattcctgggcccccacctaaaggagaaataatagaacaccagaagaaaattggcctttggggagtaacactaccttcagcggatgcaactcttgttggaagaacactttctactctaactgaatccccccatggtcttcctgggttgaatgagaatgctgagatggttgaaaaaaggaaagcctactggacatccgtgaagccggctcattttggtgtgaagataggctcaaaatctttgttgcacgtgttcggatttattcttattggaataatcattggtgttttaggaagaacctcttttggaagatggcttcttttgaagtatccttccatcttcacctttggcgggttcagtaagaatggtccttctgaagaggagattgcaagtgcttcattcaagatgtggtttgttggacatggtttcagcaatgagagtcttgctgcacagggaaacacaaaacctgacatggagattataacaagagtaatgggacctgaaatgggttatgtaaccaccccaataattatggttcagtgcgctctcgttcttcacggccaaagaaagaatctaccaaagggaggtgtttacactccagggattgtatttggtccaactgatctccaggaaagacttcaacaaaatggaatatcttttgatgtcatctcgaaaagctctatttcttcttgactctaagcagttcatccatttttggttggaagtgaaaaaactgactggtcggagtgcagaagttataataaagtattgagagaatcttttttgttttatatgtctatattattattttgtaagaatactacagttatattgacatttgacttgaaccaagatggtgtgacatagttgatacttagat

SEQ ID NO: 12677 - protein, 175 aa, Glycine max
MVEKRKAYWTSVKPAHFGVKIGSKSLLHVFGFILIGIIIGVLGRTSFGRWLLLKYPSIFTFGGFSKNGPSEEEIASASFKMWFVGHGFSNESLAAQGNTKPDMEIITRVMGPEMGYVTTPIIMVQCALVLHGQRKNLPKGGVYTPGIVFGPTDLQERLQQNGISFDVISKSSISS

SEQ ID NO: 12678 - protein, 95 aa, Glycine max
MWFVGHGFSNESLAAQGNTKPDMEIITRVMGPEMGYVTTPIIMVQCALVLHGQRKNLPKGGVYTPGIVFGPTDLQERLQQNGISFDVISKSSISS

SEQ ID NO: 12679 - DNA, 1470 bp, Glycine max
gatatacttgttaattcatatttcactgtgtagaggcaacaaaaggagagtgtgatagtgaagagagtagaagagcggtctggtccaagtgctgcaatatgcaaggcaaagaaatggaagggttgtcgtcttcatcggcgatcgcgcagaaaacatgggaactcgagaacaacatcatcccgatggacactccgggcggcgccgctacctcctccaccgctaccaccacgaccaacgccgacgactcgatcttctactacgacgaggcggggcagaacgagttccagcgcgacaagccctgggccaacgacccccactacttcaagcgcgtgaagatctccgcactcgcgctcctcaagatggtcgtccacgcgcgctccggcggcaccatcgaggtcatgggcctcatgcagggcaagaccgacgccgacgccatcatcgtcatggacgccttcgccctcccagtcgaaggcaccgagactcgcgtcaatgcccaggccgatgcctacgagtacatggtcgattattcccagaccaacaaacaggctgggcggttggagaatgttgtgggatggtatcactctcatcctggttacggttgctggctgtcggggatcgatgtttcgacgcagatgctgaatcagcagtttcaagagccgtttctagcggttgtgattgacccgacgaggactgtttcggcggggaaggttgagattggggctttcaggacttatcctgaagggtataagcctccggatgagcctatttctgagtaccagactattcctctcaataagattgaggattttggtgttcactgtaaacagtattatgccttggatattacttactttaagtcctctcttgattcacacctcttggacctgctgtggaacaagtattgggtgaatacactgtcgtcttctcctctgttgggcaatggagattatgttgctggacaaatctctgatttagctgagaagctagaacaggcagagaatcagttggcacactcacgctttgggccactaatagcacccacgcctagaaagaaagaggaggaatctccacttgctaagattactcgtgacagcgcaaaaataactgtggagcaagtgcatggtctaatgtcgcaggtcatcaaggacattctgtttaactccgttcatcaagcaaacagaactcgcacagaaccatctggtcccgaaccaatgattgaaagttgattctggctcagctagacatgcgtttatatattctttcctttttttggatatgtcctcattatcggccaactcttaacagtaaatctagccttgtattttgcctctttttttccctcgcgctgtgcatattcttgttttatttcacaagagtatgcatgtactgtcaaccatgcagtggaattcatctaacagaaacaaaaccgttggcaaatactaagttaacaaatacaattgtctgtgcttc

SEQ ID NO: 12680 - protein, 375 aa, Glycine max
MQGKEMEGLSSSSAIAQKTWELENNIIPMDTPGGAATSSTATTTTNADDSIFYYDEAGQNEFQRDKPWANDPHYFKRVKISALALLKMVVHARSGGTIEVMGLMQGKTDADAIIVMDAFALPVEGTETRVNAQADAYEYMVDYSQTNKQAGRLENVVGWYHSHPGYGCWLSGIDVSTQMLNQQFQEPFLAVVIDPTRTVSAGKVEIGAFRTYPEGYKPPDEPISEYQTIPLNKIEDFGVHCKQYYALDITYFKSSLDSHLLDLLWNKYWVNTLSSSPLLGNGDYVAGQISDLAEKLEQAENQLAHSRFGPLIAPTPRKKEEESPLAKITRDSAKITVEQVHGLMSQVIKDILFNSVHQANRTRTEPSGPEPMIES

SEQ ID NO: 12681 - protein, 370 aa, Glycine max
MEGLSSSSAIAQKTWELENNIIPMDTPGGAATSSTATTTTNADDSIFYYDEAGQNEFQRDKPWANDPHYFKRVKISALALLKMVVHARSGGTIEVMGLMQGKTDADAIIVMDAFALPVEGTETRVNAQADAYEYMVDYSQTNKQAGRLENVVGWYHSHPGYGCWLSGIDVSTQMLNQQFQEPFLAVVIDPTRTVSAGKVEIGAFRTYPEGYKPPDEPISEYQTIPLNKIEDFGVHCKQYYALDITYFKSSLDSHLLDLLWNKYWVNTLSSSPLLGNGDYVAGQISDLAEKLEQAENQLAHSRFGPLIAPTPRKKEEESPLAKITRDSAKITVEQVHGLMSQVIKDILFNSVHQANRTRTEPSGPEPMIES

SEQ ID NO: 12682 - protein, 347 aa, Glycine max
MDTPGGAATSSTATTTTNADDSIFYYDEAGQNEFQRDKPWANDPHYFKRVKISALALLKMVVHARSGGTIEVMGLMQGKTDADAIIVMDAFALPVEGTETRVNAQADAYEYMVDYSQTNKQAGRLENVVGWYHSHPGYGCWLSGIDVSTQMLNQQFQEPFLAVVIDPTRTVSAGKVEIGAFRTYPEGYKPPDEPISEYQTIPLNKIEDFGVHCKQYYALDITYFKSSLDSHLLDLLWNKYWVNTLSSSPLLGNGDYVAGQISDLAEKLEQAENQLAHSRFGPLIAPTPRKKEEESPLAKITRDSAKITVEQVHGLMSQVIKDILFNSVHQANRTRTEPSGPEPMIES

SEQ ID NO: 12683 - DNA, 1383 bp, Glycine max
agtagtagtggcagagagacagagagagaaagaagcggtgcatggacacacaacaaaacccaaccaaattcatcatcaccatcaccaccacgcaatgactctcccttcacacgatgcttggattcacacttcccacaccctcctccccagatggaaatctctttccctcctctctcatcagtcaactcttccaatttctatatcaagagttaaccaagttgatgcagcaagattggacgttgaaatgtcagccatgttgaaagagcagttggttaaagtgttcttattaatgaagccaggaatgttatttcagtatgaagccgagcttgatgctttccttgagtttcttatttggcggttctcaatttgggtggacaagccaaccccaggcattgctctcatgaacctgaggtacagagatgaacgtgcagtagaaccaagagataaagtcagaactggtctggagggacctggactcactgttgctcagaagctttggtattgtgttgccactgttggtggccagtatatatgggctcgcttacaatccttctctgcttttcgtagatggggtgatactgagcagagaccgttggctcgacgtttatggatcttgatacagcggatagaaggaatatatagagctgcttcgtttggaaacctgttgatatttctttgcacgggaagatatcgaaatcttattgaaagagcattacgagctaggcttgtatatggaagcccaaatatgaatcgtgctgttagctttgaatatatgaaccggcaattagtttggaatgaattttcggaaatgttattgttgcttctccccctacttaattcatcatctgtgaaaaatcttcttcgacctttctctaaagataaatcatcgggttcagccgaggatggcacagcatgtcccatttgccaggctactccaacaatttcttatgttgctctaccttgtcagcacagatattgttactactgtcttaggacacgatgtgctgctgctccatcatttaggtgttccaggtgcagtgagcctgttgttgctatgcaacggcttggtggtgtccccacagaatgattgattgttactaagaaacgatcttttagcgttagggagcattttatctacttacagaattagcatataaaatactacctgaaattgtggtggtattcttttccccttactttctctttagttggtttctcccttattattattattattatttaattgggaaaacaaatcaaatttcttcatagcatcacttactttggttcagtgggaagcattctttcccttgtagcaatgtatcattcagttatccctcatacatttctttccgttatttttaagttaaacttcatacttgt

SEQ ID NO: 12684 - protein, 361 aa, Glycine max
VVVAERQREKEAVHGHTTKPNQIHHHHHHHAMTLPSHDAWIHTSHTLLPRWKSLSLLSHQSTLPISISRVNQVDAARLDVEMSAMLKEQLVKVFLLMKPGMLFQYEAELDAFLEFLIWRFSIWVDKPTPGIALMNLRYRDERAVEPRDKVRTGLEGPGLTVAQKLWYCVATVGGQYIWARLQSFSAFRRWGDTEQRPLARRLWILIQRIEGIYRAASFGNLLIFLCTGRYRNLIERALRARLVYGSPNMNRAVSFEYMNRQLVWNEFSEMLLLLLPLLNSSSVKNLLRPFSKDKSSGSAEDGTACPICQATPTISYVALPCQHRYCYYCLRTRCAAAPSFRCSRCSEPVVAMQRLGGVPTE

SEQ ID NO: 12685 - protein, 330 aa, Glycine max
MTLPSHDAWIHTSHTLLPRWKSLSLLSHQSTLPISISRVNQVDAARLDVEMSAMLKEQLVKVFLLMKPGMLFQYEAELDAFLEFLIWRFSIWVDKPTPGIALMNLRYRDERAVEPRDKVRTGLEGPGLTVAQKLWYCVATVGGQYIWARLQSFSAFRRWGDTEQRPLARRLWILIQRIEGIYRAASFGNLLIFLCTGRYRNLIERALRARLVYGSPNMNRAVSFEYMNRQLVWNEFSEMLLLLLPLLNSSSVKNLLRPFSKDKSSGSAEDGTACPICQATPTISYVALPCQHRYCYYCLRTRCAAAPSFRCSRCSEPVVAMQRLGGVPTE

SEQ ID NO: 12686 - protein, 280 aa, Glycine max
MSAMLKEQLVKVFLLMKPGMLFQYEAELDAFLEFLIWRFSIWVDKPTPGIALMNLRYRDERAVEPRDKVRTGLEGPGLTVAQKLWYCVATVGGQYIWARLQSFSAFRRWGDTEQRPLARRLWILIQRIEGIYRAASFGNLLIFLCTGRYRNLIERALRARLVYGSPNMNRAVSFEYMNRQLVWNEFSEMLLLLLPLLNSSSVKNLLRPFSKDKSSGSAEDGTACPICQATPTISYVALPCQHRYCYYCLRTRCAAAPSFRCSRCSEPVVAMQRLGGVPTE

SEQ ID NO: 12687 - DNA, 1097 bp, Glycine max
tacttttcctttcatcctgagacctccttgacactttcatttcgtcgcataacccttaaggcgccgcacacaccggcacggcctccctccctcgcgagtctcaccgccatcgttaatcacggttgtcgtcggagctctcgtagttgctcctcacagtcccagattgtcaaaaattgtggcaaatcatggaaaatactgcgggccataacgatgatagcaagcaaaaagaagcgcctaagcttgcggcgttgttgaaagaaatgaaggaaggacttgatactgtaaggcgtaaaattcaatctttaactgccacggtgaaagaaggccaatatcctacagcagatggatttagttatcttgaagctaaaaatttgctgcttttgaattattgtcaatcccttgtttattatttattgcggaaggctaagggattatcaatagaagatcatcctgttgttcgaagtgttgtagagataagattgtttttggaaaagattcggccaattgacaagaaacaacaataccagatccagaaactaatacaagctagtgaaaatgcaaccagaagtgatattcaaaacaaggagccagttgcatccaataagagcgaggacgtgtcaaagtatcgtcccaatcctgacatgcttgttagcaaagtagacctaaccttgcaggatggcaatgagtattatcaacctgtaaaatttgcgcctacttctatggatctagagagatcttcaaagtatgaaagaaatgccttgcgaagagaaaaagaaattctgaaacaagctaagcagagtgattatattaggacattgatgaatgatatggaggaaaaacctgaagagataagagattttgagggagctagcagagaagttgatagatatattgccaagatggacgaacgtgctcggcaagaggaggagctgttcacgcgtgttcctcttacgaaacaggagaggaaacgagaaaagtacttgaagaaatcaagaaatgggttgcaaggtctaacagaaagtttctatgatgaaatcaaaacattaccctttggtgataaaactggagagcaagtaatgggctctagtaatggtggt

SEQ ID NO: 12688 - protein, 304 aa, Glycine max
MENTAGHNDDSKQKEAPKLAALLKEMKEGLDTVRRKIQSLTATVKEGQYPTADGFSYLEAKNLLLLNYCQSLVYYLLRKAKGLSIEDHPVVRSVVEIRLFLEKIRPIDKKQQYQIQKLIQASENATRSDIQNKEPVASNKSEDVSKYRPNPDMLVSKVDLTLQDGNEYYQPVKFAPTSMDLERSSKYERNALRREKEILKQAKQSDYIRTLMNDMEEKPEEIRDFEGASREVDRYIAKMDERARQEEELFTRVPLTKQERKREKYLKKSRNGLQGLTESFYDEIKTLPFGDKTGEQVMGSSNGG

SEQ ID NO: 12689 - protein, 279 aa, Glycine max
MKEGLDTVRRKIQSLTATVKEGQYPTADGFSYLEAKNLLLLNYCQSLVYYLLRKAKGLSIEDHPVVRSVVEIRLFLEKIRPIDKKQQYQIQKLIQASENATRSDIQNKEPVASNKSEDVSKYRPNPDMLVSKVDLTLQDGNEYYQPVKFAPTSMDLERSSKYERNALRREKEILKQAKQSDYIRTLMNDMEEKPEEIRDFEGASREVDRYIAKMDERARQEEELFTRVPLTKQERKREKYLKKSRNGLQGLTESFYDEIKTLPFGDKTGEQVMGSSNGG

SEQ ID NO: 12690 - protein, 152 aa, Glycine max
MLVSKVDLTLQDGNEYYQPVKFAPTSMDLERSSKYERNALRREKEILKQAKQSDYIRTLMNDMEEKPEEIRDFEGASREVDRYIAKMDERARQEEELFTRVPLTKQERKREKYLKKSRNGLQGLTESFYDEIKTLPFGDKTGEQVMGSSNGG

SEQ ID NO: 12691 - DNA, 724 bp, Glycine max
atcgaaattctagacacacaacacataaaagatttccttgttctttttactgcttaaccgttcggctatctcatatatgaacaacaacatgttaggaatgaagagacggagagatgataatgaagggtccttggatttggcaaaatgtcttatgctgttttcttgtccaatagaaagcaacaagacacaacagaaaagttttggttctgtggaatttgagtgcaagacgtgcaaccgcaagttctcttcttttcaagcactgggagggcacagggcaagccacaagaggcagaagctggagggggaagaactgaaagaacaggccaaaagtcttagcttgtggaacaaacccaaaatgcacgagtgctccatttgtggccttgaattctctctgggccaggctctgcggtggccacatgagaaaacacagagcttccctcaacgaagggtttcctattattccttctatcgaccaagttattgcgaaaatcccggttttgaaaaggtcgaatagcaccagggttatgtgcttggacttggagttacacctgtagataatgactctgtgcttggaatcaactatgaaatcaccacctcagcttctttttctttgttctgactaactcttttttacctctttctggacacatgtagtattctttcatttttgtgtaaaaatttcattgacttttcccttataaagatcattgattctttatttgtt

SEQ ID NO: 12692 - protein, 145 aa, Glycine max
MNNNMLGMKRRRDDNEGSLDLAKCLMLFSCPIESNKTQQKSFGSVEFECKTCNRKFSSFQALGGHRASHKRQKLEGEELKEQAKSLSLWNKPKMHECSICGLEFSLGQALRWPHEKTQSFPQRRVSYYSFYRPSYCENPGFEKVE

SEQ ID NO: 12693 - protein, 141 aa, Glycine max
MLGMKRRRDDNEGSLDLAKCLMLFSCPIESNKTQQKSFGSVEFECKTCNRKFSSFQALGGHRASHKRQKLEGEELKEQAKSLSLWNKPKMHECSICGLEFSLGQALRWPHEKTQSFPQRRVSYYSFYRPSYCENPGFEKVE

SEQ ID NO: 12694 - protein, 138 aa, Glycine max
MKRRRDDNEGSLDLAKCLMLFSCPIESNKTQQKSFGSVEFECKTCNRKFSSFQALGGHRASHKRQKLEGEELKEQAKSLSLWNKPKMHECSICGLEFSLGQALRWPHEKTQSFPQRRVSYYSFYRPSYCENPGFEKVE

SEQ ID NO: 12695 - DNA, 2198 bp, Glycine max
  misc_feature (585)..(585): n is a, c, g, or t
atgtagatggggaaaaagattcagaggcggttactgtggatgctgaaatggttgattcaactgacagggacaatgccaaaacatttgagactgctgaaaagggcaagagcggtgtagttgatcctgttgaaatagaaaatgtggaaaagattccggaggttgtggatcacgacagcaataagaatgacaagcaggatggtgttaccaaccaagttgacattaataatagtgtgtcagccatagatcaagaggttgaacctaagggcttgccagctggtggagattctgcaaatgtgggacaggaggcaattgcccatggttctactgtggagaagactaccattacagttaatgagagtgtagtaacagaagtagtggccagtgctgaggattcttatcgtgcagaaaagaataatgaggattcagcagcaaagctggagaatgaggagtcaaaggcgcagctggatggtgaggactcaaagccccagctggattgtgacatcaagcccttgcatgaggatcctgtgcccgactcttctgttccagaaaaccaggtatctgaggtcaaccctagtttagggtctnaagtaaaatctgattctatttctactgattctctgtcaattaattaaaagaatgaactaaaggatactataattactgataatgtcaaattagaacaagatattgttaagccggagatggtggaagaaccatcatccagaaatgatgttcctgtttcttatgatgaatcacattcaatggatgttggagggctgcatgagaaaaaggcatctgttgaagaaaatatcaataatgtttcaagtccagacttgaacaagaccaatagcagtgatgatgtagggtattcagaaaagttgaacttggacagaagttctggtgatgattctatggaagaggatttgcctgagactaagcaaattgattctaagtttaatgttgatgaacttaaagacaaagtagagattgaaaagcctattgtgaaggaggaaagtagtactatagctgttggagatagtctatctgcaggaaaagatgatacccaccaagatattgacattagtcctgctgccctgactgagaaacggaaatttaatgaagttgggaacagtgagcctgccaaaaggcaacgcaggtggaacactgaaacagttaaaggtccagatgcacaaagcactactcccaggcctgctactacacctagagatgagccaattactttgaaacgcagcttctctaggtctgattcctctgcaactgatgatacacctaaagaacacattgttccaccatcacaaaggtccccaactaattccctcagaattgaccgtttcctccgtccatttaccctaaaagcagtgcaagaacttcttggtaagactgggaatgtcagcagcttctggatggaccaaataaagacccattgctatgttacttactcatctgtggaagaagctattgagacacggaatgctgtatataatttgcaatggccaccaaatggtgggcgtctcttagttgcagagtatgttgatcctgaagaagtgaaaatgaagttagaacctcctcctactcaggctgcatcggacagcactgatcgagcagttcctcctgctccccccttctcacagccagagccttccccccatctgcacagggagcagcatccagttccagtcattctcccacctccaccaccattgtcaaaacccccaccagtagcaagagaacggcttccatctccaccacccctccctgagaaagttgacccacctattgtcactctggatgatctcttccgcaaaaccacagcaactcctcggatctactatctacctttgtctgaagagcaagttgccgcaaaactttcaacacagggtaaaagcgggaggcagtagataggccattagcctgcaaatcttcccttgcagccctttaactgatttggatatttttattagtgctatgggattattttgaatgcgtcttgttggcagatctggtggtgttttgtctcgggaagaaattgtcattgctaatgtatcttgagacttaaatttatttagttttagaagtcgtgaactaagagctactggggttggatagattttccccactgtttgaactaggcttgagcaaacctttacctgaaattttatggaaaaatttggcgttag

SEQ ID NO: 12696 - protein, 405 aa, Glycine max
MVEEPSSRNDVPVSYDESHSMDVGGLHEKKASVEENINNVSSPDLNKTNSSDDVGYSEKLNLDRSSGDDSMEEDLPETKQIDSKFNVDELKDKVEIEKPIVKEESSTIAVGDSLSAGKDDTHQDIDISPAALTEKRKFNEVGNSEPAKRQRRWNTETVKGPDAQSTTPRPATTPRDEPITLKRSFSRSDSSATDDTPKEHIVPPSQRSPTNSLRIDRFLRPFTLKAVQELLGKTGNVSSFWMDQIKTHCYVTYSSVEEAIETRNAVYNLQWPPNGGRLLVAEYVDPEEVKMKLEPPPTQAASDSTDRAVPPAPPFSQPEPSPHLHREQHPVPVILPPPPPLSKPPPVARERLPSPPPLPEKVDPPIVTLDDLFRKTTATPRIYYLPLSEEQVAAKLSTQGKSGRQ

SEQ ID NO: 12697 - protein, 385 aa, Glycine max
MDVGGLHEKKASVEENINNVSSPDLNKTNSSDDVGYSEKLNLDRSSGDDSMEEDLPETKQIDSKFNVDELKDKVEIEKPIVKEESSTIAVGDSLSAGKDDTHQDIDISPAALTEKRKFNEVGNSEPAKRQRRWNTETVKGPDAQSTTPRPATTPRDEPITLKRSFSRSDSSATDDTPKEHIVPPSQRSPTNSLRIDRFLRPFTLKAVQELLGKTGNVSSFWMDQIKTHCYVTYSSVEEAIETRNAVYNLQWPPNGGRLLVAEYVDPEEVKMKLEPPPTQAASDSTDRAVPPAPPFSQPEPSPHLHREQHPVPVILPPPPPLSKPPPVARERLPSPPPLPEKVDPPIVTLDDLFRKTTATPRIYYLPLSEEQVAAKLSTQGKSGRQ

SEQ ID NO: 12698 - protein, 335 aa, Glycine max
MEEDLPETKQIDSKFNVDELKDKVEIEKPIVKEESSTIAVGDSLSAGKDDTHQDIDISPAALTEKRKFNEVGNSEPAKRQRRWNTETVKGPDAQSTTPRPATTPRDEPITLKRSFSRSDSSATDDTPKEHIVPPSQRSPTNSLRIDRFLRPFTLKAVQELLGKTGNVSSFWMDQIKTHCYVTYSSVEEAIETRNAVYNLQWPPNGGRLLVAEYVDPEEVKMKLEPPPTQAASDSTDRAVPPAPPFSQPEPSPHLHREQHPVPVILPPPPPLSKPPPVARERLPSPPPLPEKVDPPIVTLDDLFRKTTATPRIYYLPLSEEQVAAKLSTQGKSGRQ

SEQ ID NO: 12699 - DNA, 1330 bp, Glycine max
atttgttattttcgtcggatccggttgggaacgctcatgacgcggcgttgctcgcattgcagccacaatgggcacaactccagaacctgccctaaccgcggggttaagctcttcggggtccgattaaccgacgggtcgatccggaagagcgccagcatgggcaacctaacccactacgctggttccgggtcggccccgctccatgtcgggttgaataacccgggttcacccggggagacgcccgatcacgccgccgccgccgccgacggctacgcctccgaggacttcgttcccgggtcttcttctagctcccgtgaaagaaagaagggtgttccatggactgaggaggaacatagaatgtttttgctcggattgcagaagctgggcaaaggtgattggcgtggaattgcaaggaactatgttatatcaaggacgcctactcaagtggccagccatgctcagaaatatttcatcaggcaaagcaatgtgtccaggcgaaaaagacggtccagcttgtttgatattgttgcagatgaagcagctgacactgcaatggtacagcaagacttcttgtctgctaatgagttaccaactgaaacagaaggcaataaccccttgcctgctcctcctcccctcgatgaagagtgtgaatcaatggattccacaaactcaaatgatggagagcctgccccatcaaagccagaaaacacacatccatcttatcctatgttatatcctgcgtattattctccagtgttcccgtttcctctgccctattggtcaggatacagtccagagcccaccaagaaggaggaaacacatgaagtgctgaaaccaactgcagtacattctaaaagccctatcaatgttgatgaactggttggcatatcaaaactgagtttaggggagtctattggtgactcgggtccctccaccctgtctcgaaaacttattgaagaaggaccctctagacaatcagcttttcatgcaacaccaacatgtggtgatatgaatggcagtgccatccatgcagtttaagcgtgtgcctcgtgttccgaggaagggattgttatgtgagcattatggatcaacttggggcctgcatgaatgtggtcttgtgttcatcatacatctgtttgtggggtaacctaaataatttttttctttgcccattcacagtgattaacctagtttgtttatttgctggtagcagtagcgtctaggagttactttgggtctctaaactaaaactttatgtttgtccagtgattttatttgtcagggttatgtaaagttaatgttgattgtgcagtttgacaatctacctagt

SEQ ID NO: 12700 - protein, 345 aa, Glycine max
ICYFRRIRLGTLMTRRCSHCSHNGHNSRTCPNRGVKLFGVRLTDGSIRKSASMGNLTHYAGSGSAPLHVGLNNPGSPGETPDHAAAAADGYASEDFVPGSSSSSRERKKGVPWTEEEHRMFLLGLQKLGKGDWRGIARNYVISRTPTQVASHAQKYFIRQSNVSRRKRRSSLFDIVADEAADTAMVQQDFLSANELPTETEGNNPLPAPPPLDEECESMDSTNSNDGEPAPSKPENTHPSYPMLYPAYYSPVFPFPLPYWSGYSPEPTKKEETHEVLKPTAVHSKSPINVDELVGISKLSLGESIGDSGPSTLSRKLIEEGPSRQSAFHATPTCGDMNGSAIHAV

SEQ ID NO: 12701 - protein, 333 aa, Glycine max
MTRRCSHCSHNGHNSRTCPNRGVKLFGVRLTDGSIRKSASMGNLTHYAGSGSAPLHVGLNNPGSPGETPDHAAAAADGYASEDFVPGSSSSSRERKKGVPWTEEEHRMFLLGLQKLGKGDWRGIARNYVISRTPTQVASHAQKYFIRQSNVSRRKRRSSLFDIVADEAADTAMVQQDFLSANELPTETEGNNPLPAPPPLDEECESMDSTNSNDGEPAPSKPENTHPSYPMLYPAYYSPVFPFPLPYWSGYSPEPTKKEETHEVLKPTAVHSKSPINVDELVGISKLSLGESIGDSGPSTLSRKLIEEGPSRQSAFHATPTCGDMNGSAIHAV

SEQ ID NO: 12702 - protein, 293 aa, Glycine max
MGNLTHYAGSGSAPLHVGLNNPGSPGETPDHAAAAADGYASEDFVPGSSSSSRERKKGVPWTEEEHRMFLLGLQKLGKGDWRGIARNYVISRTPTQVASHAQKYFIRQSNVSRRKRRSSLFDIVADEAADTAMVQQDFLSANELPTETEGNNPLPAPPPLDEECESMDSTNSNDGEPAPSKPENTHPSYPMLYPAYYSPVFPFPLPYWSGYSPEPTKKEETHEVLKPTAVHSKSPINVDELVGISKLSLGESIGDSGPSTLSRKLIEEGPSRQSAFHATPTCGDMNGSAIHAV

SEQ ID NO: 12703 - DNA, 684 bp, Glycine max
ttcttgcttctccatcgagttggattgggttcaaagttgggcttttggacagctgtggtgtgcacggcagctctgtgacttgtgaggaggaagggaggaagaaagcggatccatggcgtcgaagcggatcctcaaggagctcaaggacctgcagaaggatcctcccacctcttgcagcgcaggccctgttgccgaagatatgttctactggcaggcgacgattatggggccatcagatagcccatacgctggtggcgtatttttggtcactattcactttccaccggactacccattcaaaccaccgaaggttgcattcaagacgaaggtttaccatccgaatatcaacagcaacgggagcatctgtcttgatatcttgaaggagcaatggagccctgcactgacagtttctaaggtcctcctctcaatttgttcccttctgacggacccaaaccctgacgatccgttggtcccagagattgctcacttgtacaagactgatcgcgtgaagtacgaatcgactgctaggagctggactcagaaatatgcaatgggctgacaagctattggtctctcgtagacctaaagcacgtactgccttctgtaactgaaaccagatgtctaaattaatttgtccattcgtgcatcgaacttttgatatataatggaaggagaaacattgat

SEQ ID NO: 12704 - protein, 148 aa, Glycine max
MASKRILKELKDLQKDPPTSCSAGPVAEDMFYWQATIMGPSDSPYAGGVFLVTIHFPPDYPFKPPKVAFKTKVYHPNINSNGSICLDILKEQWSPALTVSKVLLSICSLLTDPNPDDPLVPEIAHLYKTDRVKYESTARSWTQKYAMG

SEQ ID NO: 12705 - protein, 125 aa, Glycine max
LASPSSWIGFKVGLLDSCGVHGSSVTCEEEGRKKADPWRRSGSSRSSRTCRRILPPLAAQALLPKICSTGRRRLWGHQIAHTLVAYFWSLFTFHRTTHSNHRRLHSRRRFTIRISTATGASVLIS

SEQ ID NO: 12706 - protein, 119 aa, Glycine max
MFYWQATIMGPSDSPYAGGVFLVTIHFPPDYPFKPPKVAFKTKVYHPNINSNGSICLDILKEQWSPALTVSKVLLSICSLLTDPNPDDPLVPEIAHLYKTDRVKYESTARSWTQKYAMG

SEQ ID NO: 12707 - DNA, 512 bp, Glycine max
aggtcattagtttggaactgtcaactggaattcccatgctttacattttcaaagagggaagattcattaggagggggagtcccataggaccttctgaagctggagtttatgcctatactaggcgtttggctctttacaagcagaagttggacaacatgttccaatgatatgttatttaggatatacattcacatttaataagaaatgttacagttaaatcacaaaggtggaagatgttttcagtgacactgtgttaggtacatagaatatgtgcacttgtcctaaagctaggttgttttctatgtgcgagtacagtgttgaatcagtatatctagagatgaattcccattttttatgtatatttatcttatccggtgagcgagcgactatttccaagaacctgttgatgcatcttataaatgtggaaacactgtagcacttgcagttcaggtccattattataattgtaaatcagttctattgtggatttttctggatattctgaaagtttt

SEQ ID NO: 12708 - protein, 55 aa, Glycine max
MCTCPKARLFSMCEYSVESVYLEMNSHFLCIFILSGERATISKNLLMHLINVETL

SEQ ID NO: 12709 - protein, 54 aa, Glycine max
VISLELSTGIPMLYIFKEGRFIRRGSPIGPSEAGVYAYTRRLALYKQKLDNMFQ

SEQ ID NO: 12710 - protein, 44 aa, Glycine max
MCEYSVESVYLEMNSHFLCIFILSGERATISKNLLMHLINVETL

SEQ ID NO: 12711 - DNA, 1817 bp, Glycine max
ggcacgagctttctgattgccttcaaatcacacactctcttcaatttctagggttttgctattgctttgcctccgttccccctttctcacaaaaacaacgccttttctcttctccttcgtatctattctttgcgtttggtttttggttgattgaaggcattcacagcgtaattcgttgctgcattttaatcgatttatctaaccaggactgaatgacctaatggagtctaaaggtgggaaaaagaagtctagtagtagtagtagtaaatcaattttttacgaagctcccctcggatacagcattgaagacgttagaccaaacggtggaatcaagaaattcagatctgctgcttactctaactgttctcgcaaaccatcctgatacacatccggattgatagttcgttgcatgcaaccatagttttattaggattttttcttctttgttttcaattaggtttttttgttgctctccttcaaactccatctttccaaatcctctctttgcgattgtgttttgatctgcttcctactgcgatagtttctctactgttacatggccatggcggtttccgcaattggttttgaaggtttcgagaaaaggttggaaatatcctttttccagccgggactttttgctgaccctgaaggaaggggtctaagggctcttacaaaatcccagttgggtgagattctaacaccagctgcttgcaccattgtttcttcgctcaaaaacgataatgtcgactcctatgttctatctgagtccagcctctttgtttatgcctacaagatcatcatcaaaacctgtggtactactaagctattgcttgcaatcccacccatattgaagttcgctgaaatgctttcccttaatgttaagtctgtgaattacaccaggggaagtttcattttccccagtgctcagccatatccccatcgcaacttttctgaggaagttgctattcttgatggctactttggcaaacttggtgcaggaagcaatgcttatattttgggtggccaagacaaagcacagaactggcatgtctactctgcttctgcagattctgtaactcaatgtgacaatgtttacactcttgagatgtgcatgactggcctggatagagagaaagcacaggttttctacaaagaacaatctgcttcagctgccatgatgactgttaattccggcattagaaaaattcttccagattccgagatttgtgactttgactttgaaccatgtggttattcaatgaactctgttgaaggcgctgctgtttctacgattcatgttaccccagaagatggtttcagttatgcaagcttcgaaactgttggttatgacttcaaagcggtgaatctgaacgaaatggttcagagggtattggcatgtttcctcccaactgagttttctgttgcagttcatgtggatggtgcaagcaagtcgtttgagcagacctgctttctggatgttaagggatactgtcgtgaagagaggagccacgaagggcttggaatgggtggttctgttgtctaccaaaaattcgggaagactagtgactgtggttcacctagatcaactctaaagtgctggaatgaggaagatgaggaagagtagtttccttaagtgtctttattattctgtccttgtgaaaataagtctggttttccagatacgttattgtttttctttgttgtcttttttagcttctgttagagaccatttgggcatttagacctttattgtttctattaccatttgaacatcgaatggattaataaatcactttgtttgcgtgcaaaatttgttt

SEQ ID NO: 12712 - protein, 355 aa, Glycine max
MAMAVSAIGFEGFEKRLEISFFQPGLFADPEGRGLRALTKSQLGEILTPAACTIVSSLKNDNVDSYVLSESSLFVYAYKIIIKTCGTTKLLLAIPPILKFAEMLSLNVKSVNYTRGSFIFPSAQPYPHRNFSEEVAILDGYFGKLGAGSNAYILGGQDKAQNWHVYSASADSVTQCDNVYTLEMCMTGLDREKAQVFYKEQSASAAMMTVNSGIRKILPDSEICDFDFEPCGYSMNSVEGAAVSTIHVTPEDGFSYASFETVGYDFKAVNLNEMVQRVLACFLPTEFSVAVHVDGASKSFEQTCFLDVKGYCREERSHEGLGMGGSVVYQKFGKTSDCGSPRSTLKCWNEEDEEE

SEQ ID NO: 12713 - protein, 353 aa, Glycine max
MAVSAIGFEGFEKRLEISFFQPGLFADPEGRGLRALTKSQLGEILTPAACTIVSSLKNDNVDSYVLSESSLFVYAYKIIIKTCGTTKLLLAIPPILKFAEMLSLNVKSVNYTRGSFIFPSAQPYPHRNFSEEVAILDGYFGKLGAGSNAYILGGQDKAQNWHVYSASADSVTQCDNVYTLEMCMTGLDREKAQVFYKEQSASAAMMTVNSGIRKILPDSEICDFDFEPCGYSMNSVEGAAVSTIHVTPEDGFSYASFETVGYDFKAVNLNEMVQRVLACFLPTEFSVAVHVDGASKSFEQTCFLDVKGYCREERSHEGLGMGGSVVYQKFGKTSDCGSPRSTLKCWNEEDEEE

SEQ ID NO: 12714 - protein, 253 aa, Glycine max
MLSLNVKSVNYTRGSFIFPSAQPYPHRNFSEEVAILDGYFGKLGAGSNAYILGGQDKAQNWHVYSASADSVTQCDNVYTLEMCMTGLDREKAQVFYKEQSASAAMMTVNSGIRKILPDSEICDFDFEPCGYSMNSVEGAAVSTIHVTPEDGFSYASFETVGYDFKAVNLNEMVQRVLACFLPTEFSVAVHVDGASKSFEQTCFLDVKGYCREERSHEGLGMGGSVVYQKFGKTSDCGSPRSTLKCWNEEDEEE

SEQ ID NO: 12715 - DNA, 1347 bp, Glycine max
gtaggaaactacattggttttacgacacgacttgaatcacaaactaattttatctgaaatatctctttcatagaacggagaaagacacgatgcaggaagcgacgaaggtgataataatcggtgccggaacttctggtatcgccaccgccggttgcttaacgaagcaatcaataccttacataatgctcgagagagaagactgtttcgcttcgctgtggcagaaatacacctacgatcgtctccaccttcatttgaggaagcaagtttgcgagttaccgcacttaccgtttcccaagtcttaccctcactacgtgcctcggaagcagttcatagactacttgggaaactacgttaaccactttgagatcaagcctctgtaccagcgtgcagtggagttggtggagtatgatggatggaaagggatttggagagtgaaggctcagaatagaagatctggtgagcttgaggaatacgctggaaagtacctggtcgtggccagtggcgaaaccgccgagcctcgtctgcctcagattcaaggcttggagagtttcaatggaaaagtgattcactcaactgcctacaaaaacgggaacgagtttaagaataaacatgttctggttgtcggatctggcaattccggcatggagattgcgctagacttgtccaattttggtgccaaaccttccatcattgttcgcagcccggttcattttctttcgagggatatgatgtattatgcgtcgcttatgctgaattacttgtcgctgagtacggtggagaaggtgttggtgatggttagcaaggttgtgtatggagatctgagtgagtatgggataccgtatccgagtgaggggcctttcaccatgaagatgaagtatgccaagttcccaatcatcgatgtaggaactgtcaagaaaattaaatctcgagagatacaggtgttgccagctgaaataaagagtataagaggtaatgaagttttgttccaggatggcaaatcgtacacattcgactcaattgttttctgtacaggcttcaagagatcaactcaaaagtggcttaaggggggtgatgatcttctaaatgaggatggctttccaaaaaacagtttcccaaatcattggaaaggtcgaaatggtttgtattgtgttgggctgtcaagaaggggtttctttggagctaacatggatgcccaattagtagcaaatgatattgcctcgttaattcctcaagaagaaagagaaggaatttgtgtcatgtaatgatctattatctattattggttgcagaaacagtatgtacatgacactttcttcttttggggatatgaattaggtatgttgtttc

SEQ ID NO: 12716 - protein, 390 aa, Glycine max
MQEATKVIIIGAGTSGIATAGCLTKQSIPYIMLEREDCFASLWQKYTYDRLHLHLRKQVCELPHLPFPKSYPHYVPRKQFIDYLGNYVNHFEIKPLYQRAVELVEYDGWKGIWRVKAQNRRSGELEEYAGKYLVVASGETAEPRLPQIQGLESFNGKVIHSTAYKNGNEFKNKHVLVVGSGNSGMEIALDLSNFGAKPSIIVRSPVHFLSRDMMYYASLMLNYLSLSTVEKVLVMVSKVVYGDLSEYGIPYPSEGPFTMKMKYAKFPIIDVGTVKKIKSREIQVLPAEIKSIRGNEVLFQDGKSYTFDSIVFCTGFKRSTQKWLKGGDDLLNEDGFPKNSFPNHWKGRNGLYCVGLSRRGFFGANMDAQLVANDIASLIPQEEREGICVM

SEQ ID NO: 12717 - protein, 359 aa, Glycine max
MLEREDCFASLWQKYTYDRLHLHLRKQVCELPHLPFPKSYPHYVPRKQFIDYLGNYVNHFEIKPLYQRAVELVEYDGWKGIWRVKAQNRRSGELEEYAGKYLVVASGETAEPRLPQIQGLESFNGKVIHSTAYKNGNEFKNKHVLVVGSGNSGMEIALDLSNFGAKPSIIVRSPVHFLSRDMMYYASLMLNYLSLSTVEKVLVMVSKVVYGDLSEYGIPYPSEGPFTMKMKYAKFPIIDVGTVKKIKSREIQVLPAEIKSIRGNEVLFQDGKSYTFDSIVFCTGFKRSTQKWLKGGDDLLNEDGFPKNSFPNHWKGRNGLYCVGLSRRGFFGANMDAQLVANDIASLIPQEEREGICVM

SEQ ID NO: 12718 - protein, 206 aa, Glycine max
MEIALDLSNFGAKPSIIVRSPVHFLSRDMMYYASLMLNYLSLSTVEKVLVMVSKVVYGDLSEYGIPYPSEGPFTMKMKYAKFPIIDVGTVKKIKSREIQVLPAEIKSIRGNEVLFQDGKSYTFDSIVFCTGFKRSTQKWLKGGDDLLNEDGFPKNSFPNHWKGRNGLYCVGLSRRGFFGANMDAQLVANDIASLIPQEEREGICVM

SEQ ID NO: 12719 - DNA, 545 bp, Glycine max
  misc_feature (128)..(128): n is a, c, g, or t
  misc_feature (145)..(145): n is a, c, g, or t
  misc_feature (147)..(147): n is a, c, g, or t
  misc_feature (204)..(204): n is a, c, g, or t
  misc_feature (249)..(249): n is a, c, g, or t
  misc_feature (290)..(290): n is a, c, g, or t
  misc_feature (301)..(301): n is a, c, g, or t
  misc_feature (311)..(311): n is a, c, g, or t
  misc_feature (383)..(383): n is a, c, g, or t
  misc_feature (466)..(466): n is a, c, g, or t
  misc_feature (511)..(511): n is a, c, g, or t
atccaaacctacttcagttgttcatctgtttactaacatttcttcaattcttagctgtttttttttttttgctcaatcatttttttaagatggccaaaagaaatgtcgctgctaattcttcttttganaggagtaccttggcttntntggatcaaaagttggccatggccaagcgctgttcccatgagggtgtgatggcagganccaaggctgcagttgttgctactattgcaactgccattccaactntggctagtgtaaggatgctaccttgggcaaaagccaatctnaatcacactgngcaagctctnataatttccacaggggcaggagctgcatatttcatagtagctgacaagaccgttttggcaactgcaagaaanaactccttcaacccacccaccaatgcatgaattccaaatggataatttgaatgttgcattcggctgcactacattgggatatnttagcattatgacccaatattggaagttatcatatatgtaaatgnatttataataatatagtagaaggctttgggtttc

SEQ ID NO: 12720 - protein, 136 aa, Glycine max
  misc_feature (42)..(42): Xaa can be any naturally occurring amino acid
  misc_feature (48)..(49): Xaa can be any naturally occurring amino acid
  misc_feature (68)..(68): Xaa can be any naturally occurring amino acid
  misc_feature (83)..(83): Xaa can be any naturally occurring amino acid
  misc_feature (96)..(96): Xaa can be any naturally occurring amino acid
  misc_feature (100)..(100): Xaa can be any naturally occurring amino acid
  misc_feature (103)..(103): Xaa can be any naturally occurring amino acid
  misc_feature (127)..(127): Xaa can be any naturally occurring amino acid
PNLLQLFICLLTFLQFLAVFFFLLNHFFKMAKRNVAANSSFXRSTLAXXDQKLAMAKRCSHEGVMAGXKAAVVATIATAIPTXASVRMLPWAKANXNHTXQAXIISTGAGAAYFIVADKTVLATARXNSFNPPTNA

SEQ ID NO: 12721 - protein, 107 aa, Glycine max
  misc_feature (13)..(13): Xaa can be any naturally occurring amino acid
  misc_feature (19)..(20): Xaa can be any naturally occurring amino acid
  misc_feature (39)..(39): Xaa can be any naturally occurring amino acid
  misc_feature (54)..(54): Xaa can be any naturally occurring amino acid
  misc_feature (67)..(67): Xaa can be any naturally occurring amino acid
  misc_feature (71)..(71): Xaa can be any naturally occurring amino acid
  misc_feature (74)..(74): Xaa can be any naturally occurring amino acid
  misc_feature (98)..(98): Xaa can be any naturally occurring amino acid
MAKRNVAANSSFXRSTLAXXDQKLAMAKRCSHEGVMAGXKAAVVATIATAIPTXASVRMLPWAKANXNHTXQAXIISTGAGAAYFIVADKTVLATARXNSFNPPTNA

SEQ ID NO: 12722 - protein, 82 aa, Glycine max
  misc_feature (14)..(14): Xaa can be any naturally occurring amino acid
  misc_feature (29)..(29): Xaa can be any naturally occurring amino acid
  misc_feature (42)..(42): Xaa can be any naturally occurring amino acid
  misc_feature (46)..(46): Xaa can be any naturally occurring amino acid
  misc_feature (49)..(49): Xaa can be any naturally occurring amino acid
  misc_feature (73)..(73): Xaa can be any naturally occurring amino acid
MAKRCSHEGVMAGXKAAVVATIATAIPTXASVRMLPWAKANXNHTXQAXIISTGAGAAYFIVADKTVLATARXNSFNPPTNA

SEQ ID NO: 12723 - DNA, 475 bp, Glycine max
aggtcactagcagatgaggaaccagagaagttccaaactcatttcagtgagtacatcaagaggggaatctcagctgatgacatggaagcagttttcaagaaggttcatgctgccatccgtgctgatcccaccatggccaaatcaaccaaggcgcctcccaagactcacaagaggtacaaccccaagaagctgacctatgagcagaggaaggccagcctcgtcgaaaggctcaacgccctcaacaactctgccggtgccgccgatgacgacgaggacgacgacgagtgaagagcgctcttgtccaccccagtgtagtcttgcaacgtgcgtttttgttaaagtccggcactctgcacaatgacctgttcctttgagttttgtttgtcttgctggagttatagattgtgttatctggattatgtgccgtgctggcatttggatcttaatcttaatccgttcgtcttgcacccttttc

SEQ ID NO: 12724 - protein, 95 aa, Glycine max
RSLADEEPEKFQTHFSEYIKRGISADDMEAVFKKVHAAIRADPTMAKSTKAPPKTHKRYNPKKLTYEQRKASLVERLNALNNSAGAADDDEDDDE

SEQ ID NO: 12725 - protein, 68 aa, Glycine max
MEAVFKKVHAAIRADPTMAKSTKAPPKTHKRYNPKKLTYEQRKASLVERLNALNNSAGAADDDEDDDE

SEQ ID NO: 12726 - protein, 59 aa, Glycine max
MRNQRSSKLISVSTSRGESQLMTWKQFSRRFMLPSVLIPPWPNQPRRLPRLTRGTTPRS

SEQ ID NO: 12727 - DNA, 436 bp, Glycine max
ttttaccatttggttctggtcgaagaggatgtcctgggattcaattgggtctgaccacatttggccttgttttggctcaattagtgcattgcttcaattgggagcttccatttggtgtgtctcctgatgacttagatatgagtgagatatttggcctttcactaccaagaagcaagcccttgctagctataccaacttatcgcctatttatcaaagcttaactaagggtcctttcgattgagtagaaaaaaataaaataaagatcaaatggttcatttatctttagaaaaattcattttagttctttatctttttaaattgcctgcttaggattggtgagcttcttattgcaggaattaggatggatctagatgtttatgtctgagtcattgtaaaatcaataatgtatttatatattgattctactcagatcttc

SEQ ID NO: 12728 - protein, 72 aa, Glycine max
LPFGSGRRGCPGIQLGLTTFGLVLAQLVHCFNWELPFGVSPDDLDMSEIFGLSLPRSKPLLAIPTYRLFIKA

SEQ ID NO: 12729 - protein, 41 aa, Glycine max
FTIWFWSKRMSWDSIGSDHIWPCFGSISALLQLGASIWCVS

SEQ ID NO: 12730 - DNA, 1577 bp, Glycine max
  misc_feature (203)..(203): n is a, c, g, or t
acaacaattaaattttttaaacaactttgtttttttttttcttaaaaagagagagagagagagagaaaagaagaaatcaagaaagttcatgattatgttgttttatgttcgtgtggctttcttacctctaacaacattcccctgtgattgctgggaacatgcatatacatatatatttataaaagggttgtgttagagcctanaggctcatttgtttccatttcttcttctctctcattgacacatccttgttgtgctgcatgccttatgcaatatatttgcacatacaataatgtgtgcatatatacatatatatgtatatatatcatttgttagggacatgttaatgtactacaacaaaaacattaacatcatctgaggttaatttgcattttgcaacaacagttactgatttggcgtgtttgaactttgaattcaaatgacgcaattacctccaaagatcccaaacatgtcaccaagttggccagatttctcttcacaccaccagaagatgcaattgccacctcttaaatccggtagcaacaacaattatcagcacaaccagaacccttcttgggtagatgagtttcttgacttctcctcggcccggcggggcgctcaccggaggtcggtgagcgattccatcacctacttggattcaccaatgaagtgtggagagaataacaacaacaatgagaacgagtttgacaagtttgatgatgaacaattcatgtccatgttcacggatgaagtagtgctctctggggtccccttgcttccaccaaccatcttgtcttcctctaacccttcaagcccttctgatcagaacttcttcaatgatgagaaggagaagaaggaggagcaccaccaccaccaattgaaaaatgaagcagatgaggttgaaagccaatgcaaacaggaaattatgcagcttccaaatgacaccaatacttgttcttccaacgagagaattactgaccccaagagagtcaaaagaatcttggctaatagacaatctgcacaaagatcgcgagtgaggaagctgcaatacatatcagagcttgagagaagtgtaacttcattacaggccgaagtttcagtgctgtctccaagggttgcatttttagatcatcaacgattgcttctaaatgtcgacaacagtgctctcaagcaacgaatcgctgcccttgctcaagacaagatctttaaagatgctcatcaagaggcactgaagagggagatagagagactaaggcaagtttatcaccaacaaagcctcaagaagatggaaaatgctgcaggatcaccattaccatcaccaaagcctatatgcgatgctcaaacagaaaaggaagcaacacttctcaacgcttgaagattaattcatcacactataacatgatatcaagtagctatatttattagctaatttacattacactgtgattctttatatatacttttatagaaagaaattgcagaattttggataagagaagggagaaactgatggaaggagattaaattttgttttgtgcttggtaatgtattgaatgatgtcacgtacgtattgttgg

SEQ ID NO: 12731 - protein, 311 aa, Glycine max
MTQLPPKIPNMSPSWPDFSSHHQKMQLPPLKSGSNNNYQHNQNPSWVDEFLDFSSARRGAHRRSVSDSITYLDSPMKCGENNNNNENEFDKFDDEQFMSMFTDEVVLSGVPLLPPTILSSSNPSSPSDQNFFNDEKEKKEEHHHHQLKNEADEVESQCKQEIMQLPNDTNTCSSNERITDPKRVKRILANRQSAQRSRVRKLQYISELERSVTSLQAEVSVLSPRVAFLDHQRLLLNVDNSALKQRIAALAQDKIFKDAHQEALKREIERLRQVYHQQSLKKMENAAGSPLPSPKPICDAQTEKEATLLNA

SEQ ID NO: 12732 - protein, 301 aa, Glycine max
MSPSWPDFSSHHQKMQLPPLKSGSNNNYQHNQNPSWVDEFLDFSSARRGAHRRSVSDSITYLDSPMKCGENNNNNENEFDKFDDEQFMSMFTDEVVLSGVPLLPPTILSSSNPSSPSDQNFFNDEKEKKEEHHHHQLKNEADEVESQCKQEIMQLPNDTNTCSSNERITDPKRVKRILANRQSAQRSRVRKLQYISELERSVTSLQAEVSVLSPRVAFLDHQRLLLNVDNSALKQRIAALAQDKIFKDAHQEALKREIERLRQVYHQQSLKKMENAAGSPLPSPKPICDAQTEKEATLLNA

SEQ ID NO: 12733 - protein, 287 aa, Glycine max
MQLPPLKSGSNNNYQHNQNPSWVDEFLDFSSARRGAHRRSVSDSITYLDSPMKCGENNNNNENEFDKFDDEQFMSMFTDEVVLSGVPLLPPTILSSSNPSSPSDQNFFNDEKEKKEEHHHHQLKNEADEVESQCKQEIMQLPNDTNTCSSNERITDPKRVKRILANRQSAQRSRVRKLQYISELERSVTSLQAEVSVLSPRVAFLDHQRLLLNVDNSALKQRIAALAQDKIFKDAHQEALKREIERLRQVYHQQSLKKMENAAGSPLPSPKPICDAQTEKEATLLNA

SEQ ID NO: 12734 - DNA, 827 bp, Glycine max
  misc_feature (179)..(179): n is a, c, g, or t
  misc_feature (219)..(219): n is a, c, g, or t
  misc_feature (322)..(322): n is a, c, g, or t
  misc_feature (361)..(361): n is a, c, g, or t
  misc_feature (372)..(372): n is a, c, g, or t
  misc_feature (388)..(388): n is a, c, g, or t
  misc_feature (462)..(462): n is a, c, g, or t
  misc_feature (486)..(486): n is a, c, g, or t
  misc_feature (513)..(513): n is a, c, g, or t
  misc_feature (540)..(540): n is a, c, g, or t
  misc_feature (556)..(556): n is a, c, g, or t
  misc_feature (579)..(579): n is a, c, g, or t
  misc_feature (724)..(724): n is a, c, g, or t
  misc_feature (823)..(823): n is a, c, g, or t
aagtcccaacacaatctcatcctccccctgcaaaaccctaattcccaccgcaaggtaaaaaaaaaaaaaaaaaccagtggtgcgcgatgccaccgaagttcgatccctcgcaggtggtggacgtgttcgtccgagtcaccggcggcgaggtcggcgcggcgagttccctcgctccaaanatcggtccattgggtctctccccaaagaagatcggagaanacattgcgaaggaaaccgcgaaggactggaagggcctccgcgtgacggtgaagctgacagtacagaaccggcaggcgaaggtgacggtggtgccctccgccgncgcgcttgtcatcaaggcgctgaaggaacctgagagggncaggaagaagncgaagaacatcaagcncagcgggaacatctccctagacgacgtcgttgagatcgccagggtcatgagtcctcgctccatggccaaggatntcagtggaaccattaaggagattntcgggacttgcgtttcggttgggtgcnccgttgatgggaaggaccccaaggatntgcagcaggagatttntgatggagatgttgaggttcctnttgaatgaagttgctgaaatttcagtggttttttgttgtttcgtttatgttgtttttttgggcaattttggtttttttttctttttataaaggaatttgagtcataggaatggtatgatagttaagactttggtaaatgatatcncattgttgggtttttgagtaattttgtaatggagttgtgatttgtattgttgccaaaaccatttgtcaaattttaaggttggatcgtaagtttgttatntgct

SEQ ID NO: 12735 - protein, 166 aa, Glycine max
  misc_feature (31)..(31): Xaa can be any naturally occurring amino acid
  misc_feature (45)..(45): Xaa can be any naturally occurring amino acid
  misc_feature (79)..(79): Xaa can be any naturally occurring amino acid
  misc_feature (92)..(92): Xaa can be any naturally occurring amino acid
  misc_feature (96)..(96): Xaa can be any naturally occurring amino acid
  misc_feature (101)..(101): Xaa can be any naturally occurring amino acid
  misc_feature (126)..(126): Xaa can be any naturally occurring amino acid
  misc_feature (134)..(134): Xaa can be any naturally occurring amino acid
  misc_feature (143)..(143): Xaa can be any naturally occurring amino acid
  misc_feature (152)..(152): Xaa can be any naturally occurring amino acid
  misc_feature (157)..(157): Xaa can be any naturally occurring amino acid
  misc_feature (165)..(165): Xaa can be any naturally occurring amino acid
MPPKFDPSQVVDVFVRVTGGEVGAASSLAPXIGPLGLSPKKIGEXIAKETAKDWKGLRVTVKLTVQNRQAKVTVVPSAXALVIKALKEPERXRKKXKNIKXSGNISLDDVVEIARVMSPRSMAKDXSGTIKEIXGTCVSVGCXVDGKDPKDXQQEIXDGDVEVPXE

SEQ ID NO: 12736 - protein, 87 aa, Glycine max
  misc_feature (60)..(60): Xaa can be any naturally occurring amino acid
  misc_feature (73)..(73): Xaa can be any naturally occurring amino acid
KSQHNLILPLQNPNSHRKVKKKKKTSGARCHRSSIPRRWWTCSSESPAARSARRVPSLQXSVHWVSPQRRSEXTLRRKPRRTGRASA

SEQ ID NO: 12737 - DNA, 523 bp, Glycine max
  misc_feature (129)..(129): n is a, c, g, or t
  misc_feature (137)..(137): n is a, c, g, or t
  misc_feature (170)..(170): n is a, c, g, or t
  misc_feature (303)..(303): n is a, c, g, or t
  misc_feature (316)..(316): n is a, c, g, or t
  misc_feature (347)..(347): n is a, c, g, or t
cctgttgagaaaccaggaggctcaatcctggaatttgagtgcaactttaatgatgatgaactggcaattgaaaatatgaggttgctgaatcgcgatgccaagtttactgagaatgcatatgaggggccncaattctntgatctggacgagagcttgcagaagtcctttcncaggtatcttgaggtgagggggatcaagcactcgctgcatgactggctgcacgagtacatgatgagcaaggatgagaaggagtacgtggtttggttgaagaacatgagagagttcatcgagaaatgagtgccnctgcccgtcattntcttttaatagaaagaacatgcctggtgctntatgtcaaacctgtctgatcataattgtgccttgctttctggcacaccaagtctcggtggacgctgagctggatttatattttgctggacctgtttagctgtagaaaagtttcggcatcttatctttcgatgtttaacctgtgatccgttcagatatgatcagttcatgtattttc

SEQ ID NO: 12738 - protein, 98 aa, Glycine max
  misc_feature (43)..(43): Xaa can be any naturally occurring amino acid
  misc_feature (46)..(46): Xaa can be any naturally occurring amino acid
  misc_feature (57)..(57): Xaa can be any naturally occurring amino acid
PVEKPGGSILEFECNFNDDELAIENMRLLNRDAKFTENAYEGXQFXDLDESLQKSFXRYLEVRGIKHSLHDWLHEYMMSKDEKEYVVWLKNMREFIEK

SEQ ID NO: 12739 - protein, 73 aa, Glycine max
  misc_feature (18)..(18): Xaa can be any naturally occurring amino acid
  misc_feature (21)..(21): Xaa can be any naturally occurring amino acid
  misc_feature (32)..(32): Xaa can be any naturally occurring amino acid
MRLLNRDAKFTENAYEGXQFXDLDESLQKSFXRYLEVRGIKHSLHDWLHEYMMSKDEKEYVVWLKNMREFIEK

SEQ ID NO: 12740 - DNA, 2228 bp, Glycine max
  misc_feature (1613)..(1613): n is a, c, g, or t
gcttccctctatcgtcttctccctccttcttcaatggtcttagggtttccggtgtccatgcgtagcagctcgcactaatgcgcttttgaaacccgtgttcatctgtatccaacgatttactagaaggaggtcgcaatttctccatcttcacatttcgctagcacgtgaaatcaaaagttatcgacactttcgcgcgacacgaaatattgggaaccaagcaaaatatctatggctgacgaaccattatatccaatagcggtgcttatagatgagttgaaaaatgatgacatccagctgcggttaaactcaattcgtaggctatcaacaattgcacgtgctcttggggaggagcgaacccgtcgagaattaattccatttttaagtgaaaataatgatgatgatgacgaagtacttcttgcaatggcagaagagttgggagtgtttattccttatgttgggggagtggaacatgctagtgtgttgctgccaccgctggagacactttgcactgttgaggaaacctgtgtgagagataaagctgtggagtcactttgtagaattggatctcaaatgagggagagtgatttggttgaatattacatcccattggtgaagagattggcagcaggtgaatggtttaccgcccgagtctctgcatgtggactatttcatattgcataccctagcgcaccagaaacatcaaagacagagttgagatcaatatacagtcagttatgtcaggatgatatgcctatggttagaaggtcggctgcatcaaatcttgggaaatttgctgcaactgttgaatatgctcatttgaaggctgatgtcatgtcaatttttgacgatcttactcaagatgatcaagattctgtcagattgttggctgtggagggctgtgctgctcttggcaagctgttggagccacaagattgtgttgcacatatactcccggttattgttaacttctcccaggataagtcttggcgtgtgcgttacatggttgcaaatcaattgtatgagctttgcgaagctgtaggccctgaacctaccagaacggaattggtacctgcttatgtgcggttgcttcgtgataatgaggctgaagtacgcatagcagctgctggaaaagtgaccaagttttgccggattttaaatccagatcttgcaattcagcatattcttccttgtgtgaaggaattgtcatcagattcttcacagcatgtccggtctgctttggcttcagtaataatgggaatggctccagtgttgggaaaggaagcaacaattgagcagcttcttcctattttcctttcccttttgaaggatgaatttcctgacgtacgcctaaacattatcagcaagcttgatcaagtgaatcaggttataggaatcgatctgttatctcagtctttgttaccagccattgttgagcttgctgaggataggcattggagggtccggcttgcaattatagaatatatacccttattggcaagtcaattgggggttaggttttttgatgacaaacttggtgctctttgcatgcagtggttacaggataaggttcattcaattcgcgaagcagctgctaacaacttgaaacgccttgntgaagaatttggacctgagtgggctatgcagcacataattcctcaggttttggagatgaacaacaatccacactatttgtatcggatgaccattcttcgtgctatctctctgcttgctcctgtgatgggccctgaaatcacttgttcaaacttgttaccggttgttcttgctgcatctaaagacagagtgcccaacataaagttcaatgtggcaaaggtattagagtccatcttccccatcgttgatcagtcggtcgtggagaagactattcgtccatgtctggttgagctcagtgaggatcctgatgttgacgtgcgatttttctccaaccaagcactacaagcaattgatcatgtcatgatgtcttgctaggcagaaatggttccacacgcatttaggttgaagacgtcagaagagatgctaatatttccaactaccataaataatactgcatagttatgtttagtgcttttcagtcattgaccattgatgtgatttagtttccattatatgctaatttccatatattatgtgttttttcctgattgtatttttcgtagatttttttttgttccttggtgtaatattctgctaggcaatgaattgcacatttc

SEQ ID NO: 12741 - protein, 585 aa, Glycine max
  misc_feature (462)..(462): Xaa can be any naturally occurring amino acid
MADEPLYPIAVLIDELKNDDIQLRLNSIRRLSTIARALGEERTRRELIPFLSENNDDDDEVLLAMAEELGVFIPYVGGVEHASVLLPPLETLCTVEETCVRDKAVESLCRIGSQMRESDLVEYYIPLVKRLAAGEWFTARVSACGLFHIAYPSAPETSKTELRSIYSQLCQDDMPMVRRSAASNLGKFAATVEYAHLKADVMSIFDDLTQDDQDSVRLLAVEGCAALGKLLEPQDCVAHILPVIVNFSQDKSWRVRYMVANQLYELCEAVGPEPTRTELVPAYVRLLRDNEAEVRIAAAGKVTKFCRILNPDLAIQHILPCVKELSSDSSQHVRSALASVIMGMAPVLGKEATIEQLLPIFLSLLKDEFPDVRLNIISKLDQVNQVIGIDLLSQSLLPAIVELAEDRHWRVRLAIIEYIPLLASQLGVRFFDDKLGALCMQWLQDKVHSIREAAANNLKRLXEEFGPEWAMQHIIPQVLEMNNNPHYLYRMTILRAISLLAPVMGPEITCSNLLPVVLAASKDRVPNIKFNVAKVLESIFPIVDQSVVEKTIRPCLVELSEDPDVDVRFFSNQALQAIDHVMMSC

SEQ ID NO: 12742 - protein, 521 aa, Glycine max
  misc_feature (398)..(398): Xaa can be any naturally occurring amino acid
MAEELGVFIPYVGGVEHASVLLPPLETLCTVEETCVRDKAVESLCRIGSQMRESDLVEYYIPLVKRLAAGEWFTARVSACGLFHIAYPSAPETSKTELRSIYSQLCQDDMPMVRRSAASNLGKFAATVEYAHLKADVMSIFDDLTQDDQDSVRLLAVEGCAALGKLLEPQDCVAHILPVIVNFSQDKSWRVRYMVANQLYELCEAVGPEPTRTELVPAYVRLLRDNEAEVRIAAAGKVTKFCRILNPDLAIQHILPCVKELSSDSSQHVRSALASVIMGMAPVLGKEATIEQLLPIFLSLLKDEFPDVRLNIISKLDQVNQVIGIDLLSQSLLPAIVELAEDRHWRVRLAIIEYIPLLASQLGVRFFDDKLGALCMQWLQDKVHSIREAAANNLKRLXEEFGPEWAMQHIIPQVLEMNNNPHYLYRMTILRAISLLAPVMGPEITCSNLLPVVLAASKDRVPNIKFNVAKVLESIFPIVDQSVVEKTIRPCLVELSEDPDVDVRFFSNQALQAIDHVMMSC

SEQ ID NO: 12743 - protein, 471 aa, Glycine max
  misc_feature (348)..(348): Xaa can be any naturally occurring amino acid
MRESDLVEYYIPLVKRLAAGEWFTARVSACGLFHIAYPSAPETSKTELRSIYSQLCQDDMPMVRRSAASNLGKFAATVEYAHLKADVMSIFDDLTQDDQDSVRLLAVEGCAALGKLLEPQDCVAHILPVIVNFSQDKSWRVRYMVANQLYELCEAVGPEPTRTELVPAYVRLLRDNEAEVRIAAAGKVTKFCRILNPDLAIQHILPCVKELSSDSSQHVRSALASVIMGMAPVLGKEATIEQLLPIFLSLLKDEFPDVRLNIISKLDQVNQVIGIDLLSQSLLPAIVELAEDRHWRVRLAIIEYIPLLASQLGVRFFDDKLGALCMQWLQDKVHSIREAAANNLKRLXEEFGPEWAMQHIIPQVLEMNNNPHYLYRMTILRAISLLAPVMGPEITCSNLLPVVLAASKDRVPNIKFNVAKVLESIFPIVDQSVVEKTIRPCLVELSEDPDVDVRFFSNQALQAIDHVMMSC

SEQ ID NO: 12744 - DNA, 1484 bp, Glycine max
  misc_feature (914)..(914): n is a, c, g, or t
atttttatacatcttgaaaatccatatgatcgatgtttcattttctgcagagcattcgcatccgtaacttaccaacgcacctgctgctaatcgctgtttgtctgttcacctcttcgtccgcttccaagatcggagaaaattgtgggtcagacaacaaatgcgacgctggactcagctgccaaacatgtcctgccaatggaaatacccgaccaagatgttcgcggacacaacctttgagccccacctccaaggtgaaaggcttagcgtttaaccggtattcatggctgacgactcataactcttatgctctggcgggggcgagatcggccaccgggtctgtcattgtggcccctatgaaccaagaagacaaagttgatgaacaactcaaaaacggagttagaggatttatgttggatatgtatgattttcaaaacgacatctggttgtgccactccttccaaagcaaatgtttcaacttcactgcatttcaacctgccataaacgtgcttaaagacatgcggacatttctagatggaaatccatcagaaattatcacgatcttcattgaggactatgtcacagctcctcagggcctaacaaaggtcttgagagattcagggctgagcaagtacatgttcccagtgtctcgcatgcccaagaatggtgaagattggccaaccgtcgatgacatggttcagaagaatcagcgcctagtcgtcttcacttccaaatcagccaaggaagcttctgagggcattgcttatcagtggacatacgtagtagaaaaccaatatggagatgatggcatgaaagctggttcttgtccaagccgtgcagaatcacccgcaatgaacacaaagtctagatcattggttctggtcaactactttcattctgctccaaatcgatctcangcctgcgctgacaattcggctccactacttgacatgatgaagacttgtcacgaagcagccggcaaccgttgggccaatttcattgctgttgattattaccagaggagtgatggcggaggagcaccactagccgttgatgaagcaaatggtcatctcacttgcgggtgtgacaacattgcctattgcaaggaaaacgctaagtctggcacatgtgatgtccctcccatttctccacctccacctgctacagaaaccccctccaccggaaaccagcagacccaaaataacaatcacacaaacaatgcttatattggtagaacggccaagttgatgcaatcggttgttggaattttggctacgacgactttcttggcatggttatagagtgtcattagtttgggggagtttataatcattgaaaatatgtatgcatgtatgttgtaaacatagagtttagatggttgggccaatttgattccgtgtattgtatggaatccgagtcatttttcatcacacggcgcactttatggctgtattgtgaattggtttgtttaatgattgaaagaactt

SEQ ID NO: 12745 - protein, 421 aa, Glycine max
  misc_feature (294)..(294): Xaa can be any naturally occurring amino acid
MFHFLQSIRIRNLPTHLLLIAVCLFTSSSASKIGENCGSDNKCDAGLSCQTCPANGNTRPRCSRTQPLSPTSKVKGLAFNRYSWLTTHNSYALAGARSATGSVIVAPMNQEDKVDEQLKNGVRGFMLDMYDFQNDIWLCHSFQSKCFNFTAFQPAINVLKDMRTFLDGNPSEIITIFIEDYVTAPQGLTKVLRDSGLSKYMFPVSRMPKNGEDWPTVDDMVQKNQRLVVFTSKSAKEASEGIAYQWTYVVENQYGDDGMKAGSCPSRAESPAMNTKSRSLVLVNYFHSAPNRSXACADNSAPLLDMMKTCHEAAGNRWANFIAVDYYQRSDGGGAPLAVDEANGHLTCGCDNIAYCKENAKSGTCDVPPISPPPPATETPSTGNQQTQNNNHTNNAYIGRTAKLMQSVVGILATTTFLAWL

SEQ ID NO: 12746 - protein, 314 aa, Glycine max
  misc_feature (187)..(187): Xaa can be any naturally occurring amino acid
MNQEDKVDEQLKNGVRGFMLDMYDFQNDIWLCHSFQSKCFNFTAFQPAINVLKDMRTFLDGNPSEIITIFIEDYVTAPQGLTKVLRDSGLSKYMFPVSRMPKNGEDWPTVDDMVQKNQRLVVFTSKSAKEASEGIAYQWTYVVENQYGDDGMKAGSCPSRAESPAMNTKSRSLVLVNYFHSAPNRSXACADNSAPLLDMMKTCHEAAGNRWANFIAVDYYQRSDGGGAPLAVDEANGHLTCGCDNIAYCKENAKSGTCDVPPISPPPPATETPSTGNQQTQNNNHTNNAYIGRTAKLMQSVVGILATTTFLAWL

SEQ ID NO: 12747 - protein, 296 aa, Glycine max
  misc_feature (169)..(169): Xaa can be any naturally occurring amino acid
MLDMYDFQNDIWLCHSFQSKCFNFTAFQPAINVLKDMRTFLDGNPSEIITIFIEDYVTAPQGLTKVLRDSGLSKYMFPVSRMPKNGEDWPTVDDMVQKNQRLVVFTSKSAKEASEGIAYQWTYVVENQYGDDGMKAGSCPSRAESPAMNTKSRSLVLVNYFHSAPNRSXACADNSAPLLDMMKTCHEAAGNRWANFIAVDYYQRSDGGGAPLAVDEANGHLTCGCDNIAYCKENAKSGTCDVPPISPPPPATETPSTGNQQTQNNNHTNNAYIGRTAKLMQSVVGILATTTFLAWL

SEQ ID NO: 12748 - DNA, 917 bp, Glycine max
gttaagtgtcatttgtaatgatcttttcgatgtctactactcctacaaagaatccaaagagatatgagactctctcatactcaaatacactaccaaaaacgtggtcagacagagattcatcatcgccaactactaccgttggacgatgaacaaagaaagagacatgaaggtacaattcaatgaatgccacaagttgttgtaagacctggagattgaaaacatttctctgcctgatgagtttgtttctgaactcctaatcgagaagttgtcaaagtcttagatagactacaaacaacagttaaagcacaggcacaaacgaatgtcactaccagactttatcacccacattatcattgaagatacaaataggaaggaaagtattgtagtaagaaccaaagcaatgcataccaaggcaaacacagtacaagacaaaccgtttcataagaggtgcagagttgtggctaacctagttgaaggaaatgatgttattgttgcggtcatttctcaagtgaatgttgtcactaatgtgaacaaatgggtggtagactctaaggctaccagacacattcgtgctaataagattatgcttacctcctacgttgctgtggggaatggagaataacaagtttatcttggtgattcgagaactactccggttcaaggaaaggaaaaagttattctcaagttcacatttggaaaaacattggcattgaatgatgtgttacatgttccctctattagatttaaccttatttttgtaacattgttggaaaaggttggggtaaaaatatcctttgagtctaattagatagttatgattaagaataatgtatttgtggggaagggttattgtgatcagtgtctctttgtactcaatgtttctgaagtgattaacgagaatgcatcttcttctgctt

SEQ ID NO: 12749 - protein, 100 aa, Glycine max
MSLPDFITHIIIEDTNRKESIVVRTKAMHTKANTVQDKPFHKRCRVVANLVEGNDVIVAVISQVNVVTNVNKWVVDSKATRHIRANKIMLTSYVAVGNGE

SEQ ID NO: 12750 - protein, 73 aa, Glycine max
MHTKANTVQDKPFHKRCRVVANLVEGNDVIVAVISQVNVVTNVNKWVVDSKATRHIRANKIMLTSYVAVGNGE

SEQ ID NO: 12751 - DNA, 1324 bp, Glycine max
tttttgtcaaataaaattgtgtataaaaccatctgtgatctgggttcttttgcgtattttagtttttaaagggaaattgaggattttggtactgattactgtggaacatggtggtttttcgatctgggttcttttaaaaatgggttcttttgcgcattttgttactttttgcaaggaaaattgagggttttggtactgattactttggaacatggtggtttttgttgatgggcagctttttgctggttttgaggcattgcattaaattggattttgattattcatggctgaacaagcattggaaggtagccaacctgtggatttaacaaagcacccttctggaattgtgcctacccttcaaaatattgtgtcaacggtcagtttggactgtaagttggagcttaaatcaattgcacttcaagctcgtaatgcagaatacaatcccaagcgttttgctgctgttattatgaggatcagggaaccaaaaactactgcactcatttttgcatctggcaagatggtctgtactggagctaagagcgagcaacagtctaaattggcggcaaggaagtatgctagaattatccaaaagcttggtttcccagctaaatttaaggattttaagattcagaatattgttggctcttgtgatgtaaagttccccattcgactggagggtcttgcctattcccatggtgctttctcaagttatgaaccagagttgtttcctggactaatctatcgcatgaagcaacccaagatagtcttgcttatatttgtctctggaaaaattgttctgacgggagccaaggttagagatgagacttacacagcctttgagaacatatatccagtgcttactgagttcaggaaaaaccaacaatgattactgtcaagagagcaggagcaaggtttcctggtagagaagattgcggaacaccggcttgaattgattgaactgtaaatatgaagacaagagatatctgtaatctggattgagttttaataagacatccctttttgttcttgtctttttctctctttaaaaaaaaaaaggatcctgctttagtaaagtggaaggaaaaaaaactgtgtattgaatttgacactgaaaaaaaaagagatttagaagaggcagaatagaaaagaaaaagtgagaaattctaagcttgtttaggtatggttaactcaagtaagcaagatctctcaccattagtgcgatgcaaatcattaatatctttcagtgtcactggaaaaattatgtgtggttcatttcaactttgagcaacttcgtttttattgctaatataaagttttaaagttc

SEQ ID NO: 12752 - protein, 200 aa, Glycine max
MAEQALEGSQPVDLTKHPSGIVPTLQNIVSTVSLDCKLELKSIALQARNAEYNPKRFAAVIMRIREPKTTALIFASGKMVCTGAKSEQQSKLAARKYARIIQKLGFPAKFKDFKIQNIVGSCDVKFPIRLEGLAYSHGAFSSYEPELFPGLIYRMKQPKIVLLIFVSGKIVLTGAKVRDETYTAFENIYPVLTEFRKNQQ

SEQ ID NO: 12753 - protein, 139 aa, Glycine max
MRIREPKTTALIFASGKMVCTGAKSEQQSKLAARKYARIIQKLGFPAKFKDFKIQNIVGSCDVKFPIRLEGLAYSHGAFSSYEPELFPGLIYRMKQPKIVLLIFVSGKIVLTGAKVRDETYTAFENIYPVLTEFRKNQQ

SEQ ID NO: 12754 - protein, 122 aa, Glycine max
MVCTGAKSEQQSKLAARKYARIIQKLGFPAKFKDFKIQNIVGSCDVKFPIRLEGLAYSHGAFSSYEPELFPGLIYRMKQPKIVLLIFVSGKIVLTGAKVRDETYTAFENIYPVLTEFRKNQQ

SEQ ID NO: 12755 - DNA, 1275 bp, Glycine max
aaaaccttttgtttttggtattgtgttctacttcttccatctcattataattgtcccggaagagaaaaaaaaaaaaaagactttgtttcataataattatcattttagtttttcatttatttattattttatcttggtatatctaaaataatctttagacgattattattttgggatggagggaataattaaaattggagttttaactaactaattcacgtaacaaaaagttcgcgttaaatgttaatgattatcactgaggtaaaactccaaaaagcatctatagaactatatctatgttttgcacttaacaattctcagcaggatggggctaactagaaagccagtgattatgcaagcataacagattaataatagttattgtcttgtcttgtaaagataaaaaaaatcaactaagtaacagatatgaagctaggttttaagaatttgtctgaggtgttgtgaaaaacaaaacaggtatggccctgaccgtcccaagtacttgggtccattctcggagcagattccatcatacctgaccggagaattccctggtgactacggatgggacactgctggattatcagctgacccggaaaccttcgccaggaaccgggagctggaggtgattcacagcagatgggcaatgcttggtgcccttggctgcaccttcccagagatccttgagaagaatggtgtcaaattcggcgaggccgtgtggttcaaggccggtgcacagatcttctcagagggaggccttgactacttgggcaacccaaacctgatccatgctcagagcatccttgctatctgggctgttcaggttgtgctcatggggtttgttgaaggttacagagttggtggaggaccacttggtgaaggacttgacccaatctaccctggtggtgcttttgaccctcttggtctggctgatgaccctgatgcattcgctgagttgaaggtcaaggaactcaagaacggtcgcttggctatgttctccatgtttggtttctttgttcaggctattgtcactggcaagggccctattcagaacctttacgaccacgttgctgatcctgttgccaacaatgcttgggcttatgccactaactttgtccctggacaatgaggatgcctacatgcaatgcaatcttctgctcccttttgcagttcccttgtgtttaactccattttcactaatgtaactacacctgtgtagcagaaaaatctgtatgagaaccattatatttttatatattagaaatttgggtcccc

SEQ ID NO: 12756 - protein, 160 aa, Glycine max
MLGALGCTFPEILEKNGVKFGEAVWFKAGAQIFSEGGLDYLGNPNLIHAQSILAIWAVQVVLMGFVEGYRVGGGPLGEGLDPIYPGGAFDPLGLADDPDAFAELKVKELKNGRLAMFSMFGFFVQAIVTGKGPIQNLYDHVADPVANNAWAYATNFVPGQ

SEQ ID NO: 12757 - protein, 98 aa, Glycine max
MGFVEGYRVGGGPLGEGLDPIYPGGAFDPLGLADDPDAFAELKVKELKNGRLAMFSMFGFFVQAIVTGKGPIQNLYDHVADPVANNAWAYATNFVPGQ

SEQ ID NO: 12758 - DNA, 1836 bp, Glycine max
aaaaaaaatgttgggctgattgaagtgtaaaaacacaacacaacgcagcctttgtgttcgcgtctttcactttctctctcttgtctctttgtatcgtgcgtgtgtgtttagcattcacaatgaacagcatctcatcactgacccttgattctcacgcaatatgcaacactcagcgccccatctccctccgccaagttcgccccactcgaaacgtcgtcgtatgctccgcgaagcccgtcgcgcctccccccaccaagctcgctgctgccgacacctccggcagccgcatcggggcgctgagccaggtctccggcgtgctaggttgccagtggggcgacgagggcaaagggaaactcgtcgacatattggcccagcacttcgaaatcgttgctcgctgccagggtggagctaatgctgggcatactatctataatgcagaagggaaaaagtttgccctacatcttgttccttctggtattctcaatgaggatactctctgtgttattgggaatggggttgtagtgcacctgccggggttgtttaaagagattgacggtcttgaatcaaatggggtctcttgcaagggaaggatattgatatctgatcgcgctcacctgttgtttgattttcatcaagtagtggatgggctaagagaagccgagcttgctaaatctttcattggcaccaccaagagaggcattggaccctgctactccagcaaggttaaccgtaatggcatccgagtgggtgatttgaggcacatggatactttccctcagaagcttgatcttatattgtcagatgcagcattgaggttcaaagattttaactatggtccagatgtgctcagggaagaagttgaaaaatacaagaggtatgccgagaggttggagccctttattgctgatactgtgcttgtcatgaatgatgccatagaacaaaagaagaagattttggttgaaggaggacaagctaccatgttggacattgatttcggaacttatccctttgttacttcttctagcccatcagcaggcgggatatgcactggtcttggtattgctccaagggtagttggtgatttaataggagtggtgaaggcgtacacaacaagagttggttctggtccttttccaactgaaattttgggttcaggaggtgatctcctcagatttgctgggcaggagtttggcacaactactggccgtcctcgacggtgtggctggctcgatatagttgctctgaaatactcatgtcagatcaatggtttctcatcgttgaatcttaccaagctggatgttttatcagatcttgaagaaatacagttgggtgtctcttacaaacttgctgatggcaccccaatcaaatcattcccttcagatctccgtcttcttgagcaactgaaggtggaatatgaagtacttcctggatggaaatatgatatttcttccataagaaactattctgaccttccaaaagctgctaggctgtatgtggaaaggatagaagaacttgtgggggtccctattcactacattggtattgggccaggacgtgatgctctcatatacaaatgagttcacattggatttgcatgcctctgtaggtaagttgaggctttttgcggtagaggtgtcgattcccgctaagtttcagtttttttgggatataaacacatttttagtgactagtgaggatcagctacatgatgtattattatgttgttagccatcatcattggcattttgggtttttatatgaatttgatacaaggtgtttgcagtctagttatgcaatacttgtcggaatgatgagtatgaattagatgtatgatgc

SEQ ID NO: 12759 - protein, 485 aa, Glycine max
MNSISSLTLDSHAICNTQRPISLRQVRPTRNVVVCSAKPVAPPPTKLAAADTSGSRIGALSQVSGVLGCQWGDEGKGKLVDILAQHFEIVARCQGGANAGHTIYNAEGKKFALHLVPSGILNEDTLCVIGNGVVVHLPGLFKEIDGLESNGVSCKGRILISDRAHLLFDFHQVVDGLREAELAKSFIGTTKRGIGPCYSSKVNRNGIRVGDLRHMDTFPQKLDLILSDAALRFKDFNYGPDVLREEVEKYKRYAERLEPFIADTVLVMNDAIEQKKKILVEGGQATMLDIDFGTYPFVTSSSPSAGGICTGLGIAPRVVGDLIGVVKAYTTRVGSGPFPTEILGSGGDLLRFAGQEFGTTTGRPRRCGWLDIVALKYSCQINGFSSLNLTKLDVLSDLEEIQLGVSYKLADGTPIKSFPSDLRLLEQLKVEYEVLPGWKYDISSIRNYSDLPKAARLYVERIEELVGVPIHYIGIGPGRDALIYK

SEQ ID NO: 12760 - protein, 271 aa, Glycine max
MDTFPQKLDLILSDAALRFKDFNYGPDVLREEVEKYKRYAERLEPFIADTVLVMNDAIEQKKKILVEGGQATMLDIDFGTYPFVTSSSPSAGGICTGLGIAPRVVGDLIGVVKAYTTRVGSGPFPTEILGSGGDLLRFAGQEFGTTTGRPRRCGWLDIVALKYSCQINGFSSLNLTKLDVLSDLEEIQLGVSYKLADGTPIKSFPSDLRLLEQLKVEYEVLPGWKYDISSIRNYSDLPKAARLYVERIEELVGVPIHYIGIGPGRDALIYK

SEQ ID NO: 12761 - DNA, 1690 bp, Glycine max
gagaagcagatcctacgataaacaatcttcacaactatccaaaatggagtttgttctaaattacctaaatgccactgccattggagttctttctctaatcctcttctgtatgttcttgtataatcctttcaaaattgcattaggtaaacaagatgctcccacagttgcaggtgcatggccaatacttggtcaccttccactattgagtggttcagagacaccccatagggttttgggtgctttggctgataagtatggacccatattcaccatcaagattggtgtcaaaaaggctttggtaattagcaactgggaaatagctaaggaatgcttcaccacaaacgacattgtcgtttcgtctcgccccaagcttgttgccattgaactcatgtgctacaaccaagccatgtttgggtttgcaccctatggtccttattggcgccaactaagaaagattgtaaacttagaaatcctctccaatcgccgagtagagcaactacagcacgttcatgtctcagaagttcaaagttcaatcaaagagctcttcaatgtttggtcaagcaaaaagaatgagtctggctatgcgttggtggagttgaatcaatggttttctcatttgacattcaacacggttcttcgagtggtcgttggaaagcgacttttcggtgctacaactatgaatgatgaggaggctcagagatgtctgaaggctgtggaagagttcatgcgtctgttgggggtgttcacggtggcagatgccattcctttcttgagatggtttgattttggcggccatgagagggctatgaaagaaactgccaaagatttggacaagatttttggtgagtggttagaggagcacaaacgaaaaagggcttttggtgagaacaacgttgatggaattcaagacttcatggacgtgatgctttccttgtttgatggaaaaacaattgatggcatacatgcggataccatcatcaaatccactttactgtcagtaatttcaggaggaactgaaacaaacactactactcttacatgggcaatatgtttgatattgagaaatcctattgtattggaaaacattaaagccgaacttaacttccaagttggaaaagagagatgtataagtgaatctgatgtagcgaagctagcataccttcaggctgtggtcaaagaaacttttagattgtacccagcaggtcctctctcagcacctcgtgaattcataggggattgcactttaggcggctataatgtcaaaaaaggaactcgtctaattacaaatctttggaagattcacacagatcctagtgtttggtcaaattcattagagttcaaaccagaaaggtttcttaccacccataaagacattgatgttaggggacatcattttgaactattaccatttggtggtggtagaagagtgtgtcctggaatatcttttagccttcaattggttcatttcactcttgccaatctttttcattcttttgaattcttaaatccatcaaatgaacccattgatatgactgaaacccttggattaaccaacactaaagccactccacttgagattcttattaaacctcgattatctcctagttgttatgtatgaaagcatgtgattcttgtgtgttagcggtgtgtttaaagtccattgttaaactatatgtgatcttctttactt

SEQ ID NO: 12762 - protein, 538 aa, Glycine max
RSRSYDKQSSQLSKMEFVLNYLNATAIGVLSLILFCMFLYNPFKIALGKQDAPTVAGAWPILGHLPLLSGSETPHRVLGALADKYGPIFTIKIGVKKALVISNWEIAKECFTTNDIVVSSRPKLVAIELMCYNQAMFGFAPYGPYWRQLRKIVNLEILSNRRVEQLQHVHVSEVQSSIKELFNVWSSKKNESGYALVELNQWFSHLTFNTVLRVVVGKRLFGATTMNDEEAQRCLKAVEEFMRLLGVFTVADAIPFLRWFDFGGHERAMKETAKDLDKIFGEWLEEHKRKRAFGENNVDGIQDFMDVMLSLFDGKTIDGIHADTIIKSTLLSVISGGTETNTTTLTWAICLILRNPIVLENIKAELNFQVGKERCISESDVAKLAYLQAVVKETFRLYPAGPLSAPREFIGDCTLGGYNVKKGTRLITNLWKIHTDPSVWSNSLEFKPERFLTTHKDIDVRGHHFELLPFGGGRRVCPGISFSLQLVHFTLANLFHSFEFLNPSNEPIDMTETLGLTNTKATPLEILIKPRLSPSCYV

SEQ ID NO: 12763 - protein, 524 aa, Glycine max
MEFVLNYLNATAIGVLSLILFCMFLYNPFKIALGKQDAPTVAGAWPILGHLPLLSGSETPHRVLGALADKYGPIFTIKIGVKKALVISNWEIAKECFTTNDIVVSSRPKLVAIELMCYNQAMFGFAPYGPYWRQLRKIVNLEILSNRRVEQLQHVHVSEVQSSIKELFNVWSSKKNESGYALVELNQWFSHLTFNTVLRVVVGKRLFGATTMNDEEAQRCLKAVEEFMRLLGVFTVADAIPFLRWFDFGGHERAMKETAKDLDKIFGEWLEEHKRKRAFGENNVDGIQDFMDVMLSLFDGKTIDGIHADTIIKSTLLSVISGGTETNTTTLTWAICLILRNPIVLENIKAELNFQVGKERCISESDVAKLAYLQAVVKETFRLYPAGPLSAPREFIGDCTLGGYNVKKGTRLITNLWKIHTDPSVWSNSLEFKPERFLTTHKDIDVRGHHFELLPFGGGRRVCPGISFSLQLVHFTLANLFHSFEFLNPSNEPIDMTETLGLTNTKATPLEILIKPRLSPSCYV

SEQ ID NO: 12764 - protein, 502 aa, Glycine max
MFLYNPFKIALGKQDAPTVAGAWPILGHLPLLSGSETPHRVLGALADKYGPIFTIKIGVKKALVISNWEIAKECFTTNDIVVSSRPKLVAIELMCYNQAMFGFAPYGPYWRQLRKIVNLEILSNRRVEQLQHVHVSEVQSSIKELFNVWSSKKNESGYALVELNQWFSHLTFNTVLRVVVGKRLFGATTMNDEEAQRCLKAVEEFMRLLGVFTVADAIPFLRWFDFGGHERAMKETAKDLDKIFGEWLEEHKRKRAFGENNVDGIQDFMDVMLSLFDGKTIDGIHADTIIKSTLLSVISGGTETNTTTLTWAICLILRNPIVLENIKAELNFQVGKERCISESDVAKLAYLQAVVKETFRLYPAGPLSAPREFIGDCTLGGYNVKKGTRLITNLWKIHTDPSVWSNSLEFKPERFLTTHKDIDVRGHHFELLPFGGGRRVCPGISFSLQLVHFTLANLFHSFEFLNPSNEPIDMTETLGLTNTKATPLEILIKPRLSPSCYV

SEQ ID NO: 12765 - DNA, 1704 bp, Glycine max
aaaaagataaagaagccaaaagtccctcgttccatttccccctttcctccgcccggcgagaaaatgagagaaatcctccacatccagggcggccaatgcggcaaccagatcggagccaagttctgggaagtaatctgcgacgagcacggcatcgaccacaccggaaagtacagcggcgactccgaactccaattggaacgcatcaatgtctactacaacgaggccagcggcggaaggtacgttcctcgcgccgtcctcatggatctggagcctggcacgatggactcggtcagatccgggcctttcgggcagatattccgccccgataattttgtgttcgggcagtccggcgccggcaacaactgggccaagggtcactacacggaaggtgccgagctcatcgattccgtcttggatgtcgtgaggaaggaggccgagaattgcgattgcttacaagggtttcaagtgtgccactctttgggaggtggaactggctcggggcatgggaacgcttctcatctctaagattcgggaagagtaccctgatcgtatgatgttgacgttttccgtttttccttcccctaaggtgtcggacactgttgtggagccgtacaatgccacgctttctgtgcaccagcttgttgaaaacgcggatgagtgcatggtcttggacaatgaggctctctatgatatctgtttccgtacattgaagcttgctacaccaacttttggggaccttaaccacctcatttctgctaccatgagtggagttacttgttgtctacgtttccctgggcagctgaactctgatcttaggaagcttgccgtgaatctgatcccattccctcgtctccatttcttcatggttggatttgcaccattgacatctagaggatcccagcagtaccgcaacctgactgtgccagaactgactcagcagatgtgggattctaagaacatgatgtgtgcggcagatcctcgccacggtcgttatttgaccgcatctgcgatgttccgtggtaagatgagcaccaaggaagtggatgagcagatgatcaatgtgcagaacaagaactcttcctactttgttgagtggattcccaacaatgtcaagtctagcgtgtgtgatatcccaccaaagggtcttaagatgtcatccactttcattgggaattcaacatcaattcaggagatgttcaggagagttagtgagcagttcacggcgatgttcaggcgcaaggctttcttgcattggtacactggtgagggaatggacgaaatggagttcacggaggccgagagtaacatgaacgatctggtggcagagtaccagcaatatcaggatgctactgctgatgaggaagagtatgaggatgaagaggaggaggcttaaggcatctgagttgccaaggttgtatcgaattgtaacgtgggtggatggctttcagcgagtttaaaatgtggagcagtcaaaaaacattgacttgttcatgtgtttgctgtatgaattgatgagggtcattgtttaacctgggttctgttgataatgcttatttttaagtcgtcgaatgttctacaggtagatgaatatatacatcgacgatggcagttctcgtatttatattccatttaccctttttctgtcgatatgttgattatgtttggtcggcattgaatcaaacaagaatgcatccgattcccatt

SEQ ID NO: 12766 - protein, 296 aa, Glycine max
MGTLLISKIREEYPDRMMLTFSVFPSPKVSDTVVEPYNATLSVHQLVENADECMVLDNEALYDICFRTLKLATPTFGDLNHLISATMSGVTCCLRFPGQLNSDLRKLAVNLIPFPRLHFFMVGFAPLTSRGSQQYRNLTVPELTQQMWDSKNMMCAADPRHGRYLTASAMFRGKMSTKEVDEQMINVQNKNSSYFVEWIPNNVKSSVCDIPPKGLKMSSTFIGNSTSIQEMFRRVSEQFTAMFRRKAFLHWYTGEGMDEMEFTEAESNMNDLVAEYQQYQDATADEEEYEDEEEEA

SEQ ID NO: 12767 - protein, 280 aa, Glycine max
MMLTFSVFPSPKVSDTVVEPYNATLSVHQLVENADECMVLDNEALYDICFRTLKLATPTFGDLNHLISATMSGVTCCLRFPGQLNSDLRKLAVNLIPFPRLHFFMVGFAPLTSRGSQQYRNLTVPELTQQMWDSKNMMCAADPRHGRYLTASAMFRGKMSTKEVDEQMINVQNKNSSYFVEWIPNNVKSSVCDIPPKGLKMSSTFIGNSTSIQEMFRRVSEQFTAMFRRKAFLHWYTGEGMDEMEFTEAESNMNDLVAEYQQYQDATADEEEYEDEEEEA

SEQ ID NO: 12768 - protein, 279 aa, Glycine max
MLTFSVFPSPKVSDTVVEPYNATLSVHQLVENADECMVLDNEALYDICFRTLKLATPTFGDLNHLISATMSGVTCCLRFPGQLNSDLRKLAVNLIPFPRLHFFMVGFAPLTSRGSQQYRNLTVPELTQQMWDSKNMMCAADPRHGRYLTASAMFRGKMSTKEVDEQMINVQNKNSSYFVEWIPNNVKSSVCDIPPKGLKMSSTFIGNSTSIQEMFRRVSEQFTAMFRRKAFLHWYTGEGMDEMEFTEAESNMNDLVAEYQQYQDATADEEEYEDEEEEA

SEQ ID NO: 12769 - DNA, 1536 bp, Glycine max
gttctgcgttctccttcaacacaaccgcgaaaaccttaactcagagctcgttcaccataccacccaaatcaattgtccaaaatcgcggctcaaaccgaacattcgaacttgaatcaggaattttggggcaaggttgctagtgttggcaggattcaggagtaactatagttcaaacctaatagtagaagaaaaggaacttcagctggttttatttgatagagaaaccactgttacagaaatatggaagaggaagaggtgaatcgatgccagattcaggaatggtatccaaagttcaaatctgtatccttcaagaccttaattcatcaacttcctgaatcatttattcagtaccttcttgatgactcagggcccttcctgttgcctgattctgtcttaaatgaagatgcattacccaatagaattcataacccagatgaggaagaagattttcaggtgtctgagggatctggtgatgaagcagaagcttctgcaccaccttcttttccagaacttgaattgaaaattaaggacttcattgagtcccttgggggtgcagtcttccctaagctgaattggagtgccccgaaagattcagcttggataagcacctctggtacccttcgatgcatcagtttcagtgagattgcacttttatttcgagcatctgactcattggtccatgatttgtgccatgcttatgattcgtgccaggataaatcttcaactagaccccagaatttctttcttgctctccgtaaatggtatccatcccttcagccagacatggaatttcgatgttttgtacggaatcagaaattaattggaatttctcaacgggaggttaccactttttatcctgttttgcttgaaaagaagaatgatctcctttttctgatacaggcatttttcatcaatcatgtgagggctaaatttgagtcagaaaactacacatttgatgtttacattacaaaggatgacagagttaagattgtggatttcaacccttggggtgcatttacattgtcattgttgtttacatgggatgaattggaccatattcatagtgaaggaaatgatgtggagttcagaattgtggaagatcgttgtgctgttaggccaggccttaaaacagcagtcccatttgactacttggataccagcccggggagtggttgggatcaatttctaagaaatgcagatgaagagttaagacgacaatctacaggagctggtgcatgataatcagatgtttttttttattatttatttttaatttcatttcgagagttttgacaaacaaggtgaagacacatctttgaaaacattaccccgtagaggatgcagttttccttttagtcgtagtctttatggtttataagtttttatattggacttctagttgccattgtaagttgtatccaaatatcaggcctcggataatttaatgctgaaacatcagaggcacatggagagctgaagtggcaattgtctatgatgaaaccaaattatcttcccttttaaattttacatatggag

SEQ ID NO: 12770 - protein, 332 aa, Glycine max
MEEEEVNRCQIQEWYPKFKSVSFKTLIHQLPESFIQYLLDDSGPFLLPDSVLNEDALPNRIHNPDEEEDFQVSEGSGDEAEASAPPSFPELELKIKDFIESLGGAVFPKLNWSAPKDSAWISTSGTLRCISFSEIALLFRASDSLVHDLCHAYDSCQDKSSTRPQNFFLALRKWYPSLQPDMEFRCFVRNQKLIGISQREVTTFYPVLLEKKNDLLFLIQAFFINHVRAKFESENYTFDVYITKDDRVKIVDFNPWGAFTLSLLFTWDELDHIHSEGNDVEFRIVEDRCAVRPGLKTAVPFDYLDTSPGSGWDQFLRNADEELRRQSTGAGA

SEQ ID NO: 12771 - DNA, 1212 bp, Glycine max
aggcacataaccaagatcgaagggaaggaaaccgtatccaagcgtgtgacagtcaaaagaaaagacgttacagcatagcatgggattgataagcaccagtgttcccacgaacatcgttcctcaattcgggtctctccgaacatccatccgggtcggaaacccaaacccttccgggttgagtttcccacggaagaggaataacagttttgtttgcttggccgtcgatgacgagctgagacagaagcagcaagacttgagtactagcgccactgggctgggctccgcccttgaagaaaggcccgaaaatgcagatctttttgagagtacagctgaagaaacgcagggaaattttgggcaagatggtgaccgaggtgctatctatgattttctttatcctgataaagagcttcttcccgatgacaaagaaatgagcatatttgatcatcttgaagagctgcgacagagaatctttgtatcagtcctggcagttggagcaagcattttgggatgctttgcattttcaaaagaactaataatgattcttgaagctcctgttaaaacacagggtgtaagatttcttcagctagctcctggtgaatttttcttcacaactttaaaggtgtctgggtactgtggccttctcttgggaagtcctgtcatcctctatgaagtcatagcttttgtacttccaggacttacaaaatctgaaagaaggtttctagggccaattgttttaggctcatcagttcttttctatgccggaataactttctcctacttagttctgacacctgcagcattaaatttctttgttacctacgctgaaggtgctgttgaatcattatggtccatcgatcaatactttgaatttgttctggtgcttatgttcagtacaggcttatctttccaggtacctgtcatacaatttctattgggacaacttggactggtgtctggagaccagatgctatcaatttggaggtatgttgtggttggtgccgtagtggcagctgctatagttacgccatctactgatcctctcactcaaattcttctagcggcacccttattgggtctttacttaggtggcgcatggatggtcaagcttactggacggtgaccctagccgcatcttaatgatgtgccagaatttcaatatgaacagatgttaatgtacattcacatagcaatctagtgtatatttttacacgt

SEQ ID NO: 12772 - protein, 346 aa, Glycine max
MGLISTSVPTNIVPQFGSLRTSIRVGNPNPSGLSFPRKRNNSFVCLAVDDELRQKQQDLSTSATGLGSALEERPENADLFESTAEETQGNFGQDGDRGAIYDFLYPDKELLPDDKEMSIFDHLEELRQRIFVSVLAVGASILGCFAFSKELIMILEAPVKTQGVRFLQLAPGEFFFTTLKVSGYCGLLLGSPVILYEVIAFVLPGLTKSERRFLGPIVLGSSVLFYAGITFSYLVLTPAALNFFVTYAEGAVESLWSIDQYFEFVLVLMFSTGLSFQVPVIQFLLGQLGLVSGDQMLSIWRYVVVGAVVAAAIVTPSTDPLTQILLAAPLLGLYLGGAWMVKLTGR

SEQ ID NO: 12773 - protein, 230 aa, Glycine max
MSIFDHLEELRQRIFVSVLAVGASILGCFAFSKELIMILEAPVKTQGVRFLQLAPGEFFFTTLKVSGYCGLLLGSPVILYEVIAFVLPGLTKSERRFLGPIVLGSSVLFYAGITFSYLVLTPAALNFFVTYAEGAVESLWSIDQYFEFVLVLMFSTGLSFQVPVIQFLLGQLGLVSGDQMLSIWRYVVVGAVVAAAIVTPSTDPLTQILLAAPLLGLYLGGAWMVKLTGR

SEQ ID NO: 12774 - protein, 194 aa, Glycine max
MILEAPVKTQGVRFLQLAPGEFFFTTLKVSGYCGLLLGSPVILYEVIAFVLPGLTKSERRFLGPIVLGSSVLFYAGITFSYLVLTPAALNFFVTYAEGAVESLWSIDQYFEFVLVLMFSTGLSFQVPVIQFLLGQLGLVSGDQMLSIWRYVVVGAVVAAAIVTPSTDPLTQILLAAPLLGLYLGGAWMVKLTGR

SEQ ID NO: 12775 - DNA, 884 bp, Glycine max
aacccatcccattccatcttctctctctccctctctaaaattcgaaaaaataacctaaaacaaatagaaatggaaagcaatacacctgtaatagcaaagaaagaattgagcataatacatgtggccttgttcatgttgaggaaaggcatctctaaggggaagctaatgatgcacctcaacaacatgatgctcaaacgccccggcaaagccatcgccaacctcatgttccaccacaaccacggtgtctccggcaacagcctccatttctccgccgccagggagtacgagttcagctgcagcaacactccaaacaacttcttcgcggccattgccagcagcaacaagcgccaccgccacattcccttcttcacgtgcgctcacgcgccgcccaccctcgacgacgacgtggctacggttaatgcagttaagggcgtgttggagatgctgaacaatgagaccgtcgtggaggcatcaccggccgcgcttcccgggttcggacgtagccctatggtgaggcagttgatcagggtgacggactctccgttcccacttgttgagtcccaggatgacaaggacaaccaagtggacaaggctgcggaagagttcataaagaggttctacaaagagttgaggaagcagacttgactttcttaattaatttatttcttcataacgttaattatgatcattatgaacgtaattaacctaatgagcagttttggatgttgtcctttgatgataatttttgtcttttgatgataatttgtgtggactaattaggacaggatgcaagttatttagttgcattcagggaattttgtaagtctactagtggttgtttctgacatatatatgaacaataaatatgaagtaaactagtacgt

SEQ ID NO: 12776 - protein, 214 aa, Glycine max
NPSHSIFSLSLSKIRKNNLKQIEMESNTPVIAKKELSIIHVALFMLRKGISKGKLMMHLNNMMLKRPGKAIANLMFHHNHGVSGNSLHFSAAREYEFSCSNTPNNFFAAIASSNKRHRHIPFFTCAHAPPTLDDDVATVNAVKGVLEMLNNETVVEASPAALPGFGRSPMVRQLIRVTDSPFPLVESQDDKDNQVDKAAEEFIKRFYKELRKQT

SEQ ID NO: 12777 - protein, 191 aa, Glycine max
MESNTPVIAKKELSIIHVALFMLRKGISKGKLMMHLNNMMLKRPGKAIANLMFHHNHGVSGNSLHFSAAREYEFSCSNTPNNFFAAIASSNKRHRHIPFFTCAHAPPTLDDDVATVNAVKGVLEMLNNETVVEASPAALPGFGRSPMVRQLIRVTDSPFPLVESQDDKDNQVDKAAEEFIKRFYKELRKQT

SEQ ID NO: 12778 - protein, 170 aa, Glycine max
MLRKGISKGKLMMHLNNMMLKRPGKAIANLMFHHNHGVSGNSLHFSAAREYEFSCSNTPNNFFAAIASSNKRHRHIPFFTCAHAPPTLDDDVATVNAVKGVLEMLNNETVVEASPAALPGFGRSPMVRQLIRVTDSPFPLVESQDDKDNQVDKAAEEFIKRFYKELRKQT

SEQ ID NO: 12779 - DNA, 979 bp, Glycine max
gcatctccactatattacaattactactttctctctctttgtaacttgtaagcatggagtcctcaaagatctatgcttacctctctcctttgcatgctcttcctctcctccgccactcccattctcggttgtggctactgtggcaaaccccccaaaaagcacaagcctggtaaaacaccaaagacacccacagtacccgttgttaagccaccagtcacaatccctcccattgttaagccaccagtcacaatccctcccattgttaatccaccagtcacaatccctcccattgttaatccaccagtcacaatccctcccattgttaatccaccagtgacagttccacccgttgtgcttccaccaatagtgaagcccccgggttttctccctccaattcttaacccaccaagtacaccaacaccgtcgccggggaagggagggaacactccatgtccaccaccaaagttctcctgcacaggctacatgccccattgacacgctcaaactaggtgcttgtgtggatcttcttggtggcttggttcacattggcttgggagaccctgttgcgaaccagtgctgccccgtgcttcaaggcctggttgagcttgaagctgcggtgtgtctttgcaccactcttaagctgaagcttctcaacctcaacatttatgtcccacttgcccttcagcttcttgtggcttgtggcaagtctcctcctcctggttacacctgctccctctaaaccagtgaaaggattgaggaaaatatggtcaaaatcgacatgagaggatgtcgagccacactatctctcttctgtcctgattggaactgctgttgtttgttttgctattatttgaaaaaccaatttgtttttaattgagattgttgcatgtatgttttaatcctaggcaagtagcagcaaagatgcttctctgtgacatgttcaattattaatttatatgaattgcgctttaatttgttg

SEQ ID NO: 12780 - protein, 140 aa, Glycine max
MLTSLLCMLFLSSATPILGCGYCGKPPKKHKPGKTPKTPTVPVVKPPVTIPPIVKPPVTIPPIVNPPVTIPPIVNPPVTIPPIVNPPVTVPPVVLPPIVKPPGFLPPILNPPSTPTPSPGKGGNTPCPPPKFSCTGYMPH

SEQ ID NO: 12781 - protein, 133 aa, Glycine max
MLFLSSATPILGCGYCGKPPKKHKPGKTPKTPTVPVVKPPVTIPPIVKPPVTIPPIVNPPVTIPPIVNPPVTIPPIVNPPVTVPPVVLPPIVKPPGFLPPILNPPSTPTPSPGKGGNTPCPPPKFSCTGYMPH

SEQ ID NO: 12782 - protein, 111 aa, Glycine max
HLHYITITTFSLFVTCKHGVLKDLCLPLSFACSSSPPPLPFSVVATVANPPKSTSLVKHQRHPQYPLLSHQSQSLPLLSHQSQSLPLLIHQSQSLPLLIHQSQSLPLLIHQ

SEQ ID NO: 12783 - DNA, 1164 bp, Glycine max
  misc_feature (1099)..(1099): n is a, c, g, or t
acttcttaaaactggtatctgatttacaaaaggttacaaacttctcttgcataaagaatggcatcagcaacaataaggaatgcagttgtcacgggagcaaacaaagggataggatttggaatatgcaagcaattggtttctaatggcatcacagtggtgctaacagcaagggatgagaaaaggggtcttgaagctgttgaaaagctgaaagagtttggtgtgtctgatcaagtggtgtttcatcagcttgatgtgactgaccctaaaagcattgaatcccttgcaaatttcatcaaaacccagtttggaaaacttgatatcttggtgaataatgcaggaattcatggagcatatgttgaccgtgatgctttagctgctgctggggaaaaagttgccaatgttgattggagaaaaatctcaactgaaaattttgaagctgccgaagcaggcattagaacaaattactatggagtcaaattaatgtgtgaagcacttattccccttctagaattgtcaggcacaccaaggattgtcaatgtttcctcctccatggggaagttggagaaaataccaaatgcatgggctagaggagccctaagtgatgctgagagcctaacagaagaaaaggtggatgaggttttgaatcagtttctaaaagattttaaagagggttcattagaaaccaaagggtggccacatgctttttctgcatatatagtctcaaaagctgctttgactgcctacacaaggattcttgctaagaagtacccatctttctgcatcaatgctgtttgccctggctttgtgaaaacagatctcaactacaatactggctatcttagtgttgatgaaggtgctgaaagtgttgtaaggttggctctgctacctaatggaggtccttctggtctattcttttctcgaagtgaagtggcaccattctgatccaaagactgttgtgtacttgaagaggataaataataagcatggtttcatgataagacatgtatcaaatttgtacctagcacaacaagaaaataagccacatgtctgatcactgatggctgcccatcattgatgagaacaaccctatagtgaattntagatattacaatgacattactaatttgagaaatctaattttggatataaagatatctgtttgtc

SEQ ID NO: 12784 - protein, 294 aa, Glycine max
MASATIRNAVVTGANKGIGFGICKQLVSNGITVVLTARDEKRGLEAVEKLKEFGVSDQVVFHQLDVTDPKSIESLANFIKTQFGKLDILVNNAGIHGAYVDRDALAAAGEKVANVDWRKISTENFEAAEAGIRTNYYGVKLMCEALIPLLELSGTPRIVNVSSSMGKLEKIPNAWARGALSDAESLTEEKVDEVLNQFLKDFKEGSLETKGWPHAFSAYIVSKAALTAYTRILAKKYPSFCINAVCPGFVKTDLNYNTGYLSVDEGAESVVRLALLPNGGPSGLFFSRSEVAPF

SEQ ID NO: 12785 - protein, 153 aa, Glycine max
MCEALIPLLELSGTPRIVNVSSSMGKLEKIPNAWARGALSDAESLTEEKVDEVLNQFLKDFKEGSLETKGWPHAFSAYIVSKAALTAYTRILAKKYPSFCINAVCPGFVKTDLNYNTGYLSVDEGAESVVRLALLPNGGPSGLFFSRSEVAPF

SEQ ID NO: 12786 - DNA, 1547 bp, Glycine max
atacttcatagcaaaaacgctttctcaaaacaagcagtgtcacgcagctgaatcatattcactccaaaaaaaaaaaaaaagctcagagagagagaatggggaaaagacaaatcccagaccctccgaactttaagaaatacggcgttcctttctactccgttgcgtggattccccaacacgttgtcaaatcgcgccaaatcgaaaccgccgatgagtcctcggactccgatcacagcacttcgccggcgaccgaggcggagaaggaacccgcgacggtcgccggtaactacctgctgttcgccggcggcggcggagcaggccacagcggtatccccaatgctttggttattgcgcacttcgatgtcgcgtcgaattctctctctgatcaaccggtgtgtaagctaggaactgattctgaattgccttataggatggcacttaactctaatggtgatggccttatttgtgcaatggaaacgcccatggtttgcagatggtttgactgggatcaaaacaagagctctgaaattcataagttgagtctgaagttgtcagagaaagtgctctcacagttggaggatgttggacagcaattagcattggcattcaacaatgatggtactgcactagctgctggtggggaggatggcaatctaagggttttcaagtggcctagcatggaaattattctcaacgagactaatgctcattcttctttgaaggacttacatttcagttctgatggtaaattacttgcctctttgggaagtggtggcccttgcaaggtttgggacgtttcttcatcaatggtcttatcttctctatcaaatgaaaatcgcgaaacttttagctcttgcagattttctcaaacaaatgacgagactctgatcctatatattgctgccatgactgataaaggtggaagcatcctgacctggaatacacaaacatgggaaaggatggcctcaaagcatattattcgtgatccaatctctgcatttaatgtctcagctgatggaaagtttcttgcgtgtggaacaccttcaggagacattgtagttgtaaattcaacaaatatgcagattcacacaatgataaaaaaggctcaccttggcatagtaactgctttagcattctcccctgattcaagggcggtggcttctgtatccatggattcaagtgcgagggtaacaataattgaagagaagaagactaatgggcttagcttgtggattgcattatttatcatcctacttgcagtagccgcttacttcctgaggcaagaaattgaaaagtgaaggttccaagattttgcttattgaaatatgaaacaattagcatccttgtgaatgctactgcttatttttgatgcattgtcattttttaaggggtttgctgatacttttatatattttggcatctttatgaacagttgttctaggacacgaccctctctctaaaatgccttgtaacatgggttgtatcgttacgttacatgtttcgtacaatgcttccaggtagaattgagctatcattcattacttgcc

SEQ ID NO: 12787 - protein, 400 aa, Glycine max
MGKRQIPDPPNFKKYGVPFYSVAWIPQHVVKSRQIETADESSDSDHSTSPATEAEKEPATVAGNYLLFAGGGGAGHSGIPNALVIAHFDVASNSLSDQPVCKLGTDSELPYRMALNSNGDGLICAMETPMVCRWFDWDQNKSSEIHKLSLKLSEKVLSQLEDVGQQLALAFNNDGTALAAGGEDGNLRVFKWPSMEIILNETNAHSSLKDLHFSSDGKLLASLGSGGPCKVWDVSSSMVLSSLSNENRETFSSCRFSQTNDETLILYIAAMTDKGGSILTWNTQTWERMASKHIIRDPISAFNVSADGKFLACGTPSGDIVVVNSTNMQIHTMIKKAHLGIVTALAFSPDSRAVASVSMDSSARVTIIEEKKTNGLSLWIALFIILLAVAAYFLRQEIEK

SEQ ID NO: 12788 - protein, 288 aa, Glycine max
MALNSNGDGLICAMETPMVCRWFDWDQNKSSEIHKLSLKLSEKVLSQLEDVGQQLALAFNNDGTALAAGGEDGNLRVFKWPSMEIILNETNAHSSLKDLHFSSDGKLLASLGSGGPCKVWDVSSSMVLSSLSNENRETFSSCRFSQTNDETLILYIAAMTDKGGSILTWNTQTWERMASKHIIRDPISAFNVSADGKFLACGTPSGDIVVVNSTNMQIHTMIKKAHLGIVTALAFSPDSRAVASVSMDSSARVTIIEEKKTNGLSLWIALFIILLAVAAYFLRQEIEK

SEQ ID NO: 12789 - protein, 275 aa, Glycine max
METPMVCRWFDWDQNKSSEIHKLSLKLSEKVLSQLEDVGQQLALAFNNDGTALAAGGEDGNLRVFKWPSMEIILNETNAHSSLKDLHFSSDGKLLASLGSGGPCKVWDVSSSMVLSSLSNENRETFSSCRFSQTNDETLILYIAAMTDKGGSILTWNTQTWERMASKHIIRDPISAFNVSADGKFLACGTPSGDIVVVNSTNMQIHTMIKKAHLGIVTALAFSPDSRAVASVSMDSSARVTIIEEKKTNGLSLWIALFIILLAVAAYFLRQEIEK

SEQ ID NO: 12790 - DNA, 1234 bp, Glycine max
atgagtgtggttccctggagagtggagattaccctccaacgtcaatacagcatagcataaaatgcgaaatctttgttcccagttgcaaaacccttaaaccccttccacgccatgaagtcccttctcaacccaaagttctcagctttatctcccaaagcttctccttttgctctgttctcacttccttcttctcgattctccttttgcagcaacccgcgtcgaatccccaatcgtcttcttcgcctcaacccaccaccctgttcgtccaataatttctgttgcaccattcaaaatcgaagtttgcaaacggagccctcgccgcctccctccggcgagattcacgtcattgtggggcccatgttcgccggaaaaaccacatcgctccttcgtcggattcagtcggaaaccaccaacggcagaaatgtagcaataattaaatcaagcaaggatacaagatatggattagactcaattgttacacacgatggtgcagaattaccatgttgggcactggcaaacttatcttcattcaagcagaagtttggaattgatgcttatgagaagctggatgtgattggtattgatgaagctcaattctttgatgacctttatgaattctgtcttcaagctgctgatcatgatggaaaaacagtaatagttgctggactagatggtaactatttgaggaggagctttggttccgtccttgatataattccccttgctgattcagtaaccaagttaactgccagatgtgaaatctgtgggaagcgtgcttgctttaccctgaggaagacacaggataagcagattgagctgattggtggtgttgatgtctacatgcctgtgtgtcgccagcactatgtcagtggacaggtagccatggaagccacaaggcatgtccttgaatctcacaaggttgaatgtgcctcccatacttaagctgctccacatttcttagcggttacgtacatgcctagtgtttattcatggttgtgccatatcttatattgaaagaaatgagtaggttatttttcaatgtcaatttagtttcaatgtttgattctaaattgaaagctagtattgatttgctccattttatggacttggattaaatagttcagagaagagacgagggcaagggagtatgtaacgcccttcttcacattgatgtatgttttgtttagattgatgtttggtgtagctctggactatatataaatgtggattaaat

SEQ ID NO: 12791 - protein, 276 aa, Glycine max
MKSLLNPKFSALSPKASPFALFSLPSSRFSFCSNPRRIPNRLLRLNPPPCSSNNFCCTIQNRSLQTEPSPPPSGEIHVIVGPMFAGKTTSLLRRIQSETTNGRNVAIIKSSKDTRYGLDSIVTHDGAELPCWALANLSSFKQKFGIDAYEKLDVIGIDEAQFFDDLYEFCLQAADHDGKTVIVAGLDGNYLRRSFGSVLDIIPLADSVTKLTARCEICGKRACFTLRKTQDKQIELIGGVDVYMPVCRQHYVSGQVAMEATRHVLESHKVECASHT

SEQ ID NO: 12792 - protein, 194 aa, Glycine max
MFAGKTTSLLRRIQSETTNGRNVAIIKSSKDTRYGLDSIVTHDGAELPCWALANLSSFKQKFGIDAYEKLDVIGIDEAQFFDDLYEFCLQAADHDGKTVIVAGLDGNYLRRSFGSVLDIIPLADSVTKLTARCEICGKRACFTLRKTQDKQIELIGGVDVYMPVCRQHYVSGQVAMEATRHVLESHKVECASHT

SEQ ID NO: 12793 - DNA, 1105 bp, Glycine max
actattgtagtgttccagagtgatgatggaagtgatgatctgtgagaatttccggtattcaccactctccatcttatcttcttctccttcacctcgttgccatctctctgttccatcttcttctttgaggattaaaccttcttcttcatcttcatcatcatcatctgtgtcttgttctctcatggagaatcaggagacccaacgcagcaaattcatggactttccgttcgtttcatctgcccagaagaacctcatggttgatctcgtttcaacacttgagaatcgctttcactctcagcttcttccttgcacactcccctctgatgttcagtattaccaaagccaaactgccactgcccaagcttcccttcatattagaccagctcataatgactcccagatagattttgtgttgggaagctgggtgcattcagagctaccaacaggagggtccttagatataacaagtctttcagcctatctcaacagctcaactgatgcgccaaattttgtgtttgaaatgatccgcagtagtccaacaatgctagttctcattcttgatttgcctcccaggaaagaccttgtgctttggcctgatgacctcaaaactttctatgaggacactcaactagacaaacatcggcaagctctggacagagttccagaggttcaaccatacttctcttcttccctttacatccgcactgtttcctctcctacagccataatggttcgcattctgacggaaaatggcggagtggaacgcatggaggagatcatcagggaccatttggaccccatttcaaagcaagtgttggggatctggttggatcattgtgcttgtgccaagcgacaagttggagaggcagaaagagcttatcttaagaaaagggatggtctcattagaaacaagaccattgagattgatcttggttcaagctttcccagattgtttggtccagaagtagcaaaccgggtactggatgctatcaaggagtattttacagtctgagatgcaaatttatttggaattgttggatattctatgtattacatacacgtacctaatttgctgtgcaatctaatgaggcctcagtatttgctg

SEQ ID NO: 12794 - protein, 329 aa, Glycine max
MMEVMICENFRYSPLSILSSSPSPRCHLSVPSSSLRIKPSSSSSSSSSVSCSLMENQETQRSKFMDFPFVSSAQKNLMVDLVSTLENRFHSQLLPCTLPSDVQYYQSQTATAQASLHIRPAHNDSQIDFVLGSWVHSELPTGGSLDITSLSAYLNSSTDAPNFVFEMIRSSPTMLVLILDLPPRKDLVLWPDDLKTFYEDTQLDKHRQALDRVPEVQPYFSSSLYIRTVSSPTAIMVRILTENGGVERMEEIIRDHLDPISKQVLGIWLDHCACAKRQVGEAERAYLKKRDGLIRNKTIEIDLGSSFPRLFGPEVANRVLDAIKEYFTV

SEQ ID NO: 12795 - protein, 328 aa, Glycine max
MEVMICENFRYSPLSILSSSPSPRCHLSVPSSSLRIKPSSSSSSSSSVSCSLMENQETQRSKFMDFPFVSSAQKNLMVDLVSTLENRFHSQLLPCTLPSDVQYYQSQTATAQASLHIRPAHNDSQIDFVLGSWVHSELPTGGSLDITSLSAYLNSSTDAPNFVFEMIRSSPTMLVLILDLPPRKDLVLWPDDLKTFYEDTQLDKHRQALDRVPEVQPYFSSSLYIRTVSSPTAIMVRILTENGGVERMEEIIRDHLDPISKQVLGIWLDHCACAKRQVGEAERAYLKKRDGLIRNKTIEIDLGSSFPRLFGPEVANRVLDAIKEYFTV

SEQ ID NO: 12796 - protein, 325 aa, Glycine max
MICENFRYSPLSILSSSPSPRCHLSVPSSSLRIKPSSSSSSSSSVSCSLMENQETQRSKFMDFPFVSSAQKNLMVDLVSTLENRFHSQLLPCTLPSDVQYYQSQTATAQASLHIRPAHNDSQIDFVLGSWVHSELPTGGSLDITSLSAYLNSSTDAPNFVFEMIRSSPTMLVLILDLPPRKDLVLWPDDLKTFYEDTQLDKHRQALDRVPEVQPYFSSSLYIRTVSSPTAIMVRILTENGGVERMEEIIRDHLDPISKQVLGIWLDHCACAKRQVGEAERAYLKKRDGLIRNKTIEIDLGSSFPRLFGPEVANRVLDAIKEYFTV

SEQ ID NO: 12797 - DNA, 858 bp, Glycine max
atctggactcatcggcgttgctgtgctcccaatcctatttacacagagagagccactgaaacaaaacaacgatctaattcaagtttaaattttcagttctgttctgcttctaatggcgagtttcagaaacgctgccatcaacgtcttcagagcgatcaatactaacaaagccaccatcgctgcttccacaaactctcttcacactctcaggccccttttttgttattctaggtctacccctttctcttcccacactgaagctgaatccctgcaaatcgatttatctaacgaggaaagcaaaagatgcttgtttaaccggctattgtatagaagcaaacaacgagggttcctggaactcgatttggtcctcgggaaatgggttgaggaaaacattcactccttggatgaaaatcggattaaggctctcattcatgttctcgatctggagaatccagacttatggaagtggatatcaggacaggagcaacccccagaatcagtcagcgcaaacctggtctttgctgcagtgcgggaaagagttaagaaaaaccttgatatccattctgctcctgaagtaagagcaacgcctggccaaccatgggtaagaggctgggatgatatcaagaaaggacaagatggtcctgtttctggaaatcagtagcttgacattcaatgatcataccatctattacaatgaatgaaatccggtccaccattttttactttgtaactataaataactaaataagggctgggtaactgcaacttaaaaggtttgtattagctgctagaaatcagtaaaggggtttaaactggatgattgtgactttcttgaaatctttactcttcatctgtttc

SEQ ID NO: 12798 - protein, 182 aa, Glycine max
MASFRNAAINVFRAINTNKATIAASTNSLHTLRPLFCYSRSTPFSSHTEAESLQIDLSNEESKRCLFNRLLYRSKQRGFLELDLVLGKWVEENIHSLDENRIKALIHVLDLENPDLWKWISGQEQPPESVSANLVFAAVRERVKKNLDIHSAPEVRATPGQPWVRGWDDIKKGQDGPVSGNQ

SEQ ID NO: 12799 - DNA, 772 bp, Glycine max
ttacagatttgacttactctccggcgctgccattctttctttctatcttcaatcaatttcaagatcgtaacactggtattatatggcctccttcagagcattctggaacagtccagttggtcccaaaacaactcacttttggggacctattgccaactggggatttgtggcagctggattggctgacttgaacaaacctccagaaatgatctctggcaacatgacaggagcaatgtgtgtctattcagcattgttcatgagatttgcatggatggtacagccacggaactatctactttttgcttgtcatgcctccaatgagactgttcaactctatcacttcacccgatgggcaaaggcacaggggcttctgtcggaaaagaaggaggaagcttcatcccagtgatttggtgatgctaaaagactttcttgagtggagcgattttaaagattttgcatttgaacttggcgatgtatgaataattgattactgattgtaagaaggggcttgtggaaactgtaaaagattgtggctgtgcaagagtattcggattagaaaggattgctcagaagtctaaactatttgttgaaggcacatgggtgggtttaatatgtctaacatctggctggcccaaaagtctttaaacttataccataggcaaaggatttgtctattatatctcatactgaaattccgctcaattactctacacagttgggcgttaagaattgtactgtgactatttattcattgaaacttggatgtcatgtt

SEQ ID NO: 12800 - protein, 107 aa, Glycine max
MASFRAFWNSPVGPKTTHFWGPIANWGFVAAGLADLNKPPEMISGNMTGAMCVYSALFMRFAWMVQPRNYLLFACHASNETVQLYHFTRWAKAQGLLSEKKEEASSQ

SEQ ID NO: 12801 - protein, 66 aa, Glycine max
MISGNMTGAMCVYSALFMRFAWMVQPRNYLLFACHASNETVQLYHFTRWAKAQGLLSEKKEEASSQ

SEQ ID NO: 12802 - protein, 62 aa, Glycine max
TDLTYSPALPFFLSIFNQFQDRNTGIIWPPSEHSGTVQLVPKQLTFGDLLPTGDLWQLDWLT

SEQ ID NO: 12803 - DNA, 1430 bp, Glycine max
aaaacttccagcttcttccttcctctgtgactcaaactgcatcaaccaagttagtgggattttctataaattgttgtcaatttggcatgtcatgtatatgagaaattcatgaaaactctggtggtgacttattagttctctcggcaagtaaggatttcaaacaaactaaagttgaagagagtataaatgactttggaaactcttcaatccaatgagttctccaacttcattatctatgacactatctctgcaactccatttagcagccatggctccccagaggctagtttcttggaaagttttgtgaactatcaggagcagcatgaccaccctacatttgataattgcgcaatgaggacccgaaagcgtgaagccagcgaaccagaaagcattggccggaggcagaattcggtggcagtgcaagggaggaagaagaggagaaggaagccaagggtttgcaaaaacacggaagaggctgagacacaaaggatcacacacattacagtggaaagaaaccgccggaagcagatgaatgagcatcttgctgtccttcgttcactcatgccggagtcctacgtccaaaggggtgaccaggcctctatagtgggtggtgccatagagtttgtaaaagagctggagcacctcttgcaatcacttgaagctagaaagctgcaacttttgcaccaagaagtggcacaaaccaatgaaaatacggccatttccaaactcatgcaacctccttttgcacattgtttttcgtatccacagtacacatggtcccagactcctaacaaatacacatccaagaccaaagctgccatagctgatatcgaggttactttaatcgagacccatgcaaatcttcgaattctcaccaggagaagcagccacgggcagctaacaaagttagtagctggttttcaaacgctgtgcctcaccgtcctacatcttaatgtcaccaccatagaccctttggtgttctattccttcagtgctaaggttgaagaaggattccaacttggttcagtagatggtattgcaacggcagtccatcatttgcttgcaagaattgaagaagaggcttccctttgctgttgatcaggttcatctggggacacgagattttagtgaaatgaccaaatcaaccatctacaccaacctcaacagagagagagggggggaaagaatatttgctaatggctttagttttttatttttgtttgtttgatgtccaactgatgtgttaatgctaaactttagtttcagtagatgatggtgttttttaaaagttgcttcaagcaagtacaactaaaaatcaaatgaaaaagaatgttgatacagtttatctcgtttgcagttagttgagctctattgtcctcttcagtggccctaatatgaaagtagtttgcaatgaggatgataatcttcat

SEQ ID NO: 12804 - protein, 303 aa, Glycine max
MTLETLQSNEFSNFIIYDTISATPFSSHGSPEASFLESFVNYQEQHDHPTFDNCAMRTRKREASEPESIGRRQNSVAVQGRKKRRRKPRVCKNTEEAETQRITHITVERNRRKQMNEHLAVLRSLMPESYVQRGDQASIVGGAIEFVKELEHLLQSLEARKLQLLHQEVAQTNENTAISKLMQPPFAHCFSYPQYTWSQTPNKYTSKTKAAIADIEVTLIETHANLRILTRRSSHGQLTKLVAGFQTLCLTVLHLNVTTIDPLVFYSFSAKVEEGFQLGSVDGIATAVHHLLARIEEEASLCC

SEQ ID NO: 12805 - protein, 248 aa, Glycine max
MRTRKREASEPESIGRRQNSVAVQGRKKRRRKPRVCKNTEEAETQRITHITVERNRRKQMNEHLAVLRSLMPESYVQRGDQASIVGGAIEFVKELEHLLQSLEARKLQLLHQEVAQTNENTAISKLMQPPFAHCFSYPQYTWSQTPNKYTSKTKAAIADIEVTLIETHANLRILTRRSSHGQLTKLVAGFQTLCLTVLHLNVTTIDPLVFYSFSAKVEEGFQLGSVDGIATAVHHLLARIEEEASLCC

SEQ ID NO: 12806 - protein, 189 aa, Glycine max
MNEHLAVLRSLMPESYVQRGDQASIVGGAIEFVKELEHLLQSLEARKLQLLHQEVAQTNENTAISKLMQPPFAHCFSYPQYTWSQTPNKYTSKTKAAIADIEVTLIETHANLRILTRRSSHGQLTKLVAGFQTLCLTVLHLNVTTIDPLVFYSFSAKVEEGFQLGSVDGIATAVHHLLARIEEEASLCC

SEQ ID NO: 12807 - DNA, 1541 bp, Glycine max
acaatgggttgatatcatttgccaaggctgcttcatcacttgagagcctacgattggaagagtgccaccgaattacccaacttgggttttttggtgtcctttttaactgtggtgcaaaattgaaggctatctctttggtgagctgctacgggatcaaagatctgaacttggtgttgccaacagtatctccatgtgaatcacttcggtctttatctatcagtaattgccctggatttggcaatgcctccctctctgtattgggaaagctgtgccctcagcttcagcatgttgaattgagtggactcgagggagtgacagatgcagggcttcttccactccttgagagttccgaggctggtttggttaaagtgaaccttagtggttgcacaaacgttaccaataaagtagtttcgtccttggccaatctgcatggttggactcttgagaatctaaaccttgatggttgcaaaaacatcagtgatgctagcttgatggcaattgctgaaaactgtgcattgctatgtgatctcgatgtctccaagtgtgctataaccgatgctgggattgaagccctggcacatgctaaacagattaatctgcaagttctttctttgtcaggttgcactttggtctcagacaggagcttgcctgcgttgagagaattgggtcacacccttttgggactaaacatccagcactgcaatgcaatcaacagcagtacggttgacacacttgtggagcttctctggaggtgtgacatcctctcctgagctgaaagaaaaactaatctcactgcaatttaggccaggatcacatcagcaggaagcttgttatgctcagtgttgcacagtagttttttaggtccttaacaggtcttcatcgtccagtgactcggttcctttttaccggagtgtgcagtcatttagccctcatttttgcaggttccttcaatgggaagcctgttctttttggcatccattttgcccccttttaaatggctgcatatctgagaacatagctaccgggttctggagtgtaggaatctttgttactggtgttggcacctgatgtttttagctcagctttgcattggttttgccaccatgtgtgtcttagttttctaagtttttacagctagctgtaccactgtatcagtctttgtttaccaaatgtttcatgtgtttgaactatgttcttcacatgatgtttgggtatcagttttactcacagggcaggttagaagttgcagtgtcatgtgctgttattagcgtggttgcagttgtcaagttcggtgttatgaagccttgtttttagggactggctgtggcagcaagttatacaggtctgccataaccacgaccttttttcccctttgggaagggttgtgtttttttaccaagtcctagtttttttaaggcttcattttttttgaacttggcactgcacctccttattgtctaatgatattcatacctgcccttgtgctgtatgttatgaaatgtaatgaaataaataaaattcagtctcattcctagttgctt

SEQ ID NO: 12808 - protein, 255 aa, Glycine max
NGLISFAKAASSLESLRLEECHRITQLGFFGVLFNCGAKLKAISLVSCYGIKDLNLVLPTVSPCESLRSLSISNCPGFGNASLSVLGKLCPQLQHVELSGLEGVTDAGLLPLLESSEAGLVKVNLSGCTNVTNKVVSSLANLHGWTLENLNLDGCKNISDASLMAIAENCALLCDLDVSKCAITDAGIEALAHAKQINLQVLSLSGCTLVSDRSLPALRELGHTLLGLNIQHCNAINSSTVDTLVELLWRCDILS

SEQ ID NO: 12809 - DNA, 1074 bp, Glycine max
  misc_feature (590)..(590): n is a, c, g, or t
  misc_feature (903)..(903): n is a, c, g, or t
attttggccaaaagtcacaaattactacacgcatctaaattctaaacactcctccgacctataatacccttttctattttcattgttgaagctcacaagcaaaggctaaagtagattagattctcctcaagcaaaacctagagctcccacactcctccactacttagaatattaaaagccccttccttcatcaaggtactactgtttcatcttccctcaaagattggaacaacaacaggaacatgggtactctaacaactgttcctgtgctcccttctaagcttaacaagccttcgctttctccgcgtcacaattctctttttccctactacggaagacgcgtcgggaagaagaacaaagcaatggttcctgttgctaggttgttcgggccagccatatttgaagcctcaaagcttaaggttttattcttaggagtggacgaaaataaacacccaggaaatctcccaaggacttatactctaacccatagtgatataaccgctaagctcaccttggcaatctctcaaaccataaataattctcagttacaggggtggtacaacagattgcaaagggacgaagtggtggcncagtggaagaaggtgaagggaaagatgtctctgcacgtacactgccacatcagtggtggtcattttctcttagatatattagcaaggttacgatacttcatcttctgcaaggagctaccagtggtgttgaaggcggtggttcacggcgacgaaaacctattcaacaactacccagaattgcaagatgccttggtttgggtttactttcactcaaacattccagaattcaacaaggtggaatgttggggcccactgaaggaagcgtcagcaccaataggtggggccaaggaagagagtgagcaagaaactcttntaagtaaggagggcttggcaattccacagccatgccaagaggaatgcgaatgttgctttccaccgctgacgttaagcccaattcagtggtctcaacaagttcccagccaccattacgaaccttgtgatgggattgagacccaacaaagtctataaacttccaaactatcat

SEQ ID NO: 12810 - protein, 271 aa, Glycine max
  misc_feature (116)..(116): Xaa can be any naturally occurring amino acid
  misc_feature (221)..(221): Xaa can be any naturally occurring amino acid
MGTLTTVPVLPSKLNKPSLSPRHNSLFPYYGRRVGKKNKAMVPVARLFGPAIFEASKLKVLFLGVDENKHPGNLPRTYTLTHSDITAKLTLAISQTINNSQLQGWYNRLQRDEVVXQWKKVKGKMSLHVHCHISGGHFLLDILARLRYFIFCKELPVVLKAVVHGDENLFNNYPELQDALVWVYFHSNIPEFNKVECWGPLKEASAPIGGAKEESEQETLXSKEGLAIPQPCQEECECCFPPLTLSPIQWSQQVPSHHYEPCDGIETQQSL

SEQ ID NO: 12811 - protein, 231 aa, Glycine max
  misc_feature (76)..(76): Xaa can be any naturally occurring amino acid
  misc_feature (181)..(181): Xaa can be any naturally occurring amino acid
MVPVARLFGPAIFEASKLKVLFLGVDENKHPGNLPRTYTLTHSDITAKLTLAISQTINNSQLQGWYNRLQRDEVVXQWKKVKGKMSLHVHCHISGGHFLLDILARLRYFIFCKELPVVLKAVVHGDENLFNNYPELQDALVWVYFHSNIPEFNKVECWGPLKEASAPIGGAKEESEQETLXSKEGLAIPQPCQEECECCFPPLTLSPIQWSQQVPSHHYEPCDGIETQQSL

SEQ ID NO: 12812 - protein, 147 aa, Glycine max
  misc_feature (97)..(97): Xaa can be any naturally occurring amino acid
MSLHVHCHISGGHFLLDILARLRYFIFCKELPVVLKAVVHGDENLFNNYPELQDALVWVYFHSNIPEFNKVECWGPLKEASAPIGGAKEESEQETLXSKEGLAIPQPCQEECECCFPPLTLSPIQWSQQVPSHHYEPCDGIETQQSL

SEQ ID NO: 12813 - DNA, 1931 bp, Glycine max
gcaaaaaaaaaaaaaccaacctttttctccctcaatcaacgcaagacgcttaaataacaatccaccctcgttctctctctctctctgacacgcactcctcctcctcctaggtggaattggaattggggatctactagatgggcctaatcagaagcatgagatcgcggtcacagcgtgtggtgcaggagcaagaagctgctgagtgtgtcggtgtcgtcgtcggcgacagcatgcgacagagttgttgggccaacatgccccaagagcttctccgagaggtcctcctccgaatcgaggcctccgaggacacgtggccgccgcggaagagcgtcgtctcctgcgccggcgtctgccgcagctggagacatatcaccaaagacattgtcaaaacgcccgaactctcctccaagatcaccttccccatttctgttaaacagcctggcccaagggagaatctcctacggtgctttataaagcgcaaccggtccacccaaacatactatttgtttctcagtttaaccagtacgctagctgaagatgggaagttccttcttgctgcacgcaaatgcagacgtccaacctgcacagattatatcatctctcttgacgcagatgatatgtcaaagggaagcaactcctatgttgggaaactaagatcaaactttcttggaacaaagttcacaatctatgatagccagctgcctcatacaggagcaaagattatgaaaagtcgctccacaaggctggtgaatctaaagcaagtttcacccaaggttcctacaggcaactatccagtggcccatatttcatatgaattgaatgtgctaggctcaaggggtcctaggagaatgcattgtgtcatggattccattcctgccactgcaattgaacctggaggtgtagcacctacacagactgagttttctcttaacaacatagacatgtttccttcattccccttttttcgatcaaaatcaaatcgtgcggaaaattccatgtctggaccattggttgatcaaaaggatgggatgctagtgttgaaaaacaaggcccctaggtggcatgagcagctgcaatgttggtgcctgaactttcatggacgggtgacaattgcctcagttaaaaactttcagctggtggcttctgcagaaaacggacctgctggaccagaacacgataagatcatcctccaatttggaaaagttgggaaggatttgtttacaatggattaccggtaccctatctcggcatttcaggcatttgcaatctgcctcagcagttttgataccaagattgcttgtgaatgacatgtttaaacagtttcaatccagattatatagctatatctcttgctgcttggagaagtatggcttgaatgtcacttgttgggaagcagaaagatgaaaaatgtttgtcaaggtaaagattggttggatgagcattgaactgaattcgaaaaaaccattcagtttctgggatcacaatttaccagctcttgggaagataacataaaattggaatgttactcgaaactcctccaccatatcccacaaaacaaaacacaaaaacgggaaaaatacatttattcagacccccgtgtacataaattctctatttctttcaacagtttggttgtttattgtaatgtagtagtggttgtttataacatgtccatgcaagacatgttttgttaatgtgactactagctttcaacttatcctttcatgagaacattttgtgttgggggggactcttgcaagaacacaagcagaagcaacttgctatgtgcaactcctttcgttccgtaatccactcttgacttggtctttccaaaacagtaacactgttctaatacagtgcatgtcacgagggataaatgccacttgctgtattattctcttgactaaggaataaaccctccttggctttgt

SEQ ID NO: 12814 - protein, 389 aa, Glycine max
MGLIRSMRSRSQRVVQEQEAAECVGVVVGDSMRQSCWANMPQELLREVLLRIEASEDTWPPRKSVVSCAGVCRSWRHITKDIVKTPELSSKITFPISVKQPGPRENLLRCFIKRNRSTQTYYLFLSLTSTLAEDGKFLLAARKCRRPTCTDYIISLDADDMSKGSNSYVGKLRSNFLGTKFTIYDSQLPHTGAKIMKSRSTRLVNLKQVSPKVPTGNYPVAHISYELNVLGSRGPRRMHCVMDSIPATAIEPGGVAPTQTEFSLNNIDMFPSFPFFRSKSNRAENSMSGPLVDQKDGMLVLKNKAPRWHEQLQCWCLNFHGRVTIASVKNFQLVASAENGPAGPEHDKIILQFGKVGKDLFTMDYRYPISAFQAFAICLSSFDTKIACE

SEQ ID NO: 12815 - protein, 383 aa, Glycine max
MRSRSQRVVQEQEAAECVGVVVGDSMRQSCWANMPQELLREVLLRIEASEDTWPPRKSVVSCAGVCRSWRHITKDIVKTPELSSKITFPISVKQPGPRENLLRCFIKRNRSTQTYYLFLSLTSTLAEDGKFLLAARKCRRPTCTDYIISLDADDMSKGSNSYVGKLRSNFLGTKFTIYDSQLPHTGAKIMKSRSTRLVNLKQVSPKVPTGNYPVAHISYELNVLGSRGPRRMHCVMDSIPATAIEPGGVAPTQTEFSLNNIDMFPSFPFFRSKSNRAENSMSGPLVDQKDGMLVLKNKAPRWHEQLQCWCLNFHGRVTIASVKNFQLVASAENGPAGPEHDKIILQFGKVGKDLFTMDYRYPISAFQAFAICLSSFDTKIACE

SEQ ID NO: 12816 - protein, 358 aa, Glycine max
MRQSCWANMPQELLREVLLRIEASEDTWPPRKSVVSCAGVCRSWRHITKDIVKTPELSSKITFPISVKQPGPRENLLRCFIKRNRSTQTYYLFLSLTSTLAEDGKFLLAARKCRRPTCTDYIISLDADDMSKGSNSYVGKLRSNFLGTKFTIYDSQLPHTGAKIMKSRSTRLVNLKQVSPKVPTGNYPVAHISYELNVLGSRGPRRMHCVMDSIPATAIEPGGVAPTQTEFSLNNIDMFPSFPFFRSKSNRAENSMSGPLVDQKDGMLVLKNKAPRWHEQLQCWCLNFHGRVTIASVKNFQLVASAENGPAGPEHDKIILQFGKVGKDLFTMDYRYPISAFQAFAICLSSFDTKIACE

SEQ ID NO: 12817 - DNA, 1550 bp, Glycine max
  misc_feature (532)..(532): n is a, c, g, or t
  misc_feature (1444)..(1444): n is a, c, g, or t
  misc_feature (1455)..(1455): n is a, c, g, or t
  misc_feature (1513)..(1513): n is a, c, g, or t
agataagtatgagcatggtgaaaactgaaaccacttctgccatgcagagttgacccctgagaataataaccacaggaatggttttcaatcagatcataaaaactaccaaccacaacaagttcagaccttgagcagaagatcagatgatgggtacaattggaggaaatatgggcaaaagcaagtgaaaggaagtgaaaatccaagaagctactacaagtgcacataccccaattgtccaacaaagaaaaaagttgagaaatccttagatggacaaattaccgagatagtttacaaaggcactcataaccatcccaagcctcaagctgccaagaggaactcattgtctgcctcatcatcacttgcaattcctcattcaaatcatggcagcaatgaactaccacatcatcaaatggattcggttgccactcctgaaaattcatcaatttcaatggatgatgatgattttgatcatactaaatcaggaggagatgagtttgataatgatgaacctgatgccaaaagatggagaatngaaggtgaaaatgagggtatatcagctgtaggaagtagaacagtgagagaacccagagttgtggttcagacaaccagtgacatcgatattctagatgatggatacaggtggaggaaatatggacagaaagtggtcaagggaaatccaaatccaaggagttactacaagtgcacattcccaggatgtccagtgaggaagcacgtagagagagcctcacaagacctaagggcagtgatcacaacctatgagggaaaacacaaccatgacgtgcctgcagcacgtggcagtggcaacaactctatcagtagatcattgccaataataaccaatacaacaaacaacaccactagtgtagcaacttctatcagcactaataacaattctcttcagagtcttagaccaccagctccaccagaaaggccatcattatcacacttcaaccctaatatgcagcacagttcaggaagctttggattctcagggtttggaaatccattaatggggtcttacatgaatcaacaatcttacaataatgttttcaccaccactagagacaaggaggagcctggagatgactcgtttcttgactctttgctatgttaaaggaatattaatttgcttttgcatagatttggatatggttggagttcttggaaggggttggtttaggattttacttgactaataagatacagttcattccatttattttaacttagatgcagttgtttaagtatttttatgtctgtttgtcggttagagttagagtttcacctcgctaatttatggacaaaaaatttgcattagaattcaacatgagttattaaggtgaaattctaattctaactaaagaacaacacggaaattactttaaaaaattgcatgcaagtttcatccatttttttattttgnattattattgnataattccacacccacacagattggtatggtatatactgtatatttcataattgttgnatgttacacaggtgtttgtaaaaatagtttttatcat

SEQ ID NO: 12818 - protein, 241 aa, Glycine max
  misc_feature (41)..(41): Xaa can be any naturally occurring amino acid
MDSVATPENSSISMDDDDFDHTKSGGDEFDNDEPDAKRWRXEGENEGISAVGSRTVREPRVVVQTTSDIDILDDGYRWRKYGQKVVKGNPNPRSYYKCTFPGCPVRKHVERASQDLRAVITTYEGKHNHDVPAARGSGNNSISRSLPIITNTTNNTTSVATSISTNNNSLQSLRPPAPPERPSLSHFNPNMQHSSGSFGFSGFGNPLMGSYMNQQSYNNVFTTTRDKEEPGDDSFLDSLLC

SEQ ID NO: 12819 - protein, 228 aa, Glycine max
  misc_feature (28)..(28): Xaa can be any naturally occurring amino acid
MDDDDFDHTKSGGDEFDNDEPDAKRWRXEGENEGISAVGSRTVREPRVVVQTTSDIDILDDGYRWRKYGQKVVKGNPNPRSYYKCTFPGCPVRKHVERASQDLRAVITTYEGKHNHDVPAARGSGNNSISRSLPIITNTTNNTTSVATSISTNNNSLQSLRPPAPPERPSLSHFNPNMQHSSGSFGFSGFGNPLMGSYMNQQSYNNVFTTTRDKEEPGDDSFLDSLLC

SEQ ID NO: 12820 - DNA, 607 bp, Glycine max
  misc_feature (44)..(44): n is a, c, g, or t
  misc_feature (102)..(102): n is a, c, g, or t
  misc_feature (122)..(122): n is a, c, g, or t
  misc_feature (302)..(302): n is a, c, g, or t
  misc_feature (506)..(506): n is a, c, g, or t
  misc_feature (522)..(522): n is a, c, g, or t
  misc_feature (534)..(534): n is a, c, g, or t
  misc_feature (548)..(548): n is a, c, g, or t
aacacaagtgttgttcttcacacttcacttccccaacacattcnttcttttttttttttttcacactcttcactcacttcaatcaccatcaattcatgtacncggcggaggttttccgcgtnttcgccgtgcgcggcggcgacgcttcgccagcagtggcccccgccaccaccaccaattgcttaaaaatagtagctttcaacacacccactttccgtaacggcttgaatgcgaggtgggcgaaggcgttgacgctctgtcgctgcagcgttgactcaaagtccgtcggcgacgaagttttntcggtgactcagtcgaacaagtccgatgtggactacctcggggagagcaccaaaggtgatttgaacgtcaagttggagcatcttgaggcttttggtaaaacttgaaacttttttttcgaaattcctggtttttggtccaaggtttcaatttctctttttgcttttgttttggggtgcgttttttgattgatcaagtggtgtttntgaatgtaaaagtttntttgtatcatanaataggacattggnccatatagttgtttgttccttaatgtactaaaaaaaaaaagccagcttttacagatttc

SEQ ID NO: 12821 - protein, 134 aa, Glycine max
  misc_feature (14)..(14): Xaa can be any naturally occurring amino acid
  misc_feature (34)..(34): Xaa can be any naturally occurring amino acid
  misc_feature (40)..(40): Xaa can be any naturally occurring amino acid
  misc_feature (100)..(100): Xaa can be any naturally occurring amino acid
HKCCSSHFTSPTHXFFFFFFTLFTHFNHHQFMYXAEVFRXFAVRGGDASPAVAPATTTNCLKIVAFNTPTFRNGLNARWAKALTLCRCSVDSKSVGDEVXSVTQSNKSDVDYLGESTKGDLNVKLEHLEAFGKT

SEQ ID NO: 12822 - protein, 103 aa, Glycine max
  misc_feature (3)..(3): Xaa can be any naturally occurring amino acid
  misc_feature (9)..(9): Xaa can be any naturally occurring amino acid
  misc_feature (69)..(69): Xaa can be any naturally occurring amino acid
MYXAEVFRXFAVRGGDASPAVAPATTTNCLKIVAFNTPTFRNGLNARWAKALTLCRCSVDSKSVGDEVXSVTQSNKSDVDYLGESTKGDLNVKLEHLEAFGKT

SEQ ID NO: 12823 - protein, 72 aa, Glycine max
  misc_feature (15)..(15): Xaa can be any naturally occurring amino acid
  misc_feature (34)..(34): Xaa can be any naturally occurring amino acid
  misc_feature (41)..(41): Xaa can be any naturally occurring amino acid
TQVLFFTLHFPNTFXLFFFFHTLHSLQSPSIHVXGGGFPRXRRARRRRFASSGPRHHHQLLKNSSFQHTHFP

SEQ ID NO: 12824 - DNA, 443 bp, Glycine max
cagtgtgtgctactttccattcgttcaccgccccaatctctgcagcgccttcgatctagaaaacatgactaagagaacaaagaaggctggcattgttggaaaatacggtacccgttatggtgccagtctgcgaaagcagattaagaagatggaagttagtcagcacagcaaatttttctgtgaattttgtgggaagtatgctgtgaagaggaaagctgtaggaatatggggatgcaaggactgtggtaaagtgaaagcaggcggtgcttatactttgaataccgcaagtgctgtgacggtacggagcaccatcaggaggttgagggagcaaactgagagttgagctttttgttgatgttatcaattactattagactttgcgtgatatgcctagtttgtgttcactgaactgcattggttgtattcaaagtaaactccttaaa

SEQ ID NO: 12825 - protein, 113 aa, Glycine max
SVCYFPFVHRPNLCSAFDLENMTKRTKKAGIVGKYGTRYGASLRKQIKKMEVSQHSKFFCEFCGKYAVKRKAVGIWGCKDCGKVKAGGAYTLNTASAVTVRSTIRRLREQTES

SEQ ID NO: 12826 - protein, 92 aa, Glycine max; identical to SEQ ID NO: 12106

SEQ ID NO: 12827 - protein, 64 aa, Glycine max; identical to SEQ ID NO: 12107

SEQ ID NO: 12828 - DNA, 649 bp, Glycine max
  misc_feature (417)..(417): n is a, c, g, or t
  misc_feature (624)..(624): n is a, c, g, or t
accaccccttttaggtcttcttctaatcctccctctctctaactttcacacgcagcggcttcttcttccgttttcctgaatcggtgtgaacaatggcgacgtacgctgcgatgaaacccaccaagccagggttggaggagtcccaggaacagatccataagataaggatcaccctttcttccaagcacgtcaaaaacctcgagaaggtttgtgcggacttggttcgtggtgcaaaggacaagcgcctcagggttaagggacctgttaggatgcccactaaggttcttcacatcactaccaggaagtccccctgtggtgaaggtaccaacacatgggatagatttgaacttcgtgtccacaagagagtgattgacctctacagttccccagatgtggttaagcagattacctctatcncaatcgaacctggtgtggaagttgaggtgaccattgcagatgcttgatctatatccaaattttaactgttatggtttcctagtttttcgtctcctcttattctgtattttataagttttgattgcgggaccgagttgaattgttttcttttgttttacggttgtagacggttgatgaatacctgagaaatgtcatttttatatattntagaatcctacatatatttgttttg

SEQ ID NO: 12829 - protein, 123 aa, Glycine max
  misc_feature (109)..(109): Xaa can be any naturally occurring amino acid
MATYAAMKPTKPGLEESQEQIHKIRITLSSKHVKNLEKVCADLVRGAKDKRLRVKGPVRMPTKVLHITTRKSPCGEGTNTWDRFELRVHKRVIDLYSSPDVVKQITSIXIEPGVEVEVTIADA

SEQ ID NO: 12830 - protein, 117 aa, Glycine max
  misc_feature (103)..(103): Xaa can be any naturally occurring amino acid
MKPTKPGLEESQEQIHKIRITLSSKHVKNLEKVCADLVRGAKDKRLRVKGPVRMPTKVLHITTRKSPCGEGTNTWDRFELRVHKRVIDLYSSPDVVKQITSIXIEPGVEVEVTIADA

SEQ ID NO: 12831 - protein, 64 aa, Glycine max
  misc_feature (50)..(50): Xaa can be any naturally occurring amino acid
MPTKVLHITTRKSPCGEGTNTWDRFELRVHKRVIDLYSSPDVVKQITSIXIEPGVEVEVTIADA

SEQ ID NO: 12832 - DNA, 939 bp, Glycine max
  misc_feature (619)..(619): n is a, c, g, or t
  misc_feature (739)..(739): n is a, c, g, or t
  misc_feature (803)..(803): n is a, c, g, or t
  misc_feature (808)..(808): n is a, c, g, or t
  misc_feature (884)..(884): n is a, c, g, or t
acaccaacacttgtagccacaaaaccaaattataatatttcatgcttctctttcactcttgtcacattccacaaaaacgaagtactactacaagggaagaaaaacttagctactaaggaaggatcaaagagaatggctcaagcaatggcatcaatggctggcttgcgtggttcctctcaggctgtgttggaaggtagccttcaggtgagtggctccacacgcttgaatgtggggagtggaagcagggtgacctcagtcacacgtgcagggttcacagttagagcacaacaacaacaagtgagtggtgaggtacaaagcagccgtagggcagtgctttcacttgttgctgctggtttggccactggctcttttgttcaagctgtgcttgctgatgccaaatctatcaaagttggaccacctcccccaccttctggtggattgcctggaacgttgaactcagatgaagcaagagaccttcagctgccattgaaagataggttcttccttcaaccattgtctcctactgaggctgcacaaagggcaaaggaatcagccaaggagattgttggtgttaagaagttgattgaaaagaaggcttggccatatgttcagaatgatntgcgtctcagggctgagtatttgcgctttgatctcaacactgtcattgctggaaagcctaaggatgagaagaaatcactcaaggaactcactggcaagctcttccaggatatcagcaatntggatcatgcagcaaaaattaagagcagcccagaagcagagaagtactatgctgctactgtatnttctntgaacgatgtccttgccaaacttggttaatgtgattaatttcttgctttcttgtgtaagctttgtgcatcattttntcagacactttgttgactgatattttaagaaaatcaaatgatgagggaaaatttt

SEQ ID NO: 12833 - protein, 278 aa, Glycine max
  misc_feature (207)..(207): Xaa can be any naturally occurring amino acid
  misc_feature (247)..(247): Xaa can be any naturally occurring amino acid
  misc_feature (268)..(268): Xaa can be any naturally occurring amino acid
  misc_feature (270)..(270): Xaa can be any naturally occurring amino acid
TPTLVATKPNYNISCFSFTLVTFHKNEVLLQGKKNLATKEGSKRMAQAMASMAGLRGSSQAVLEGSLQVSGSTRLNVGSGSRVTSVTRAGFTVRAQQQQVSGEVQSSRRAVLSLVAAGLATGSFVQAVLADAKSIKVGPPPPPSGGLPGTLNSDEARDLQLPLKDRFFLQPLSPTEAAQRAKESAKEIVGVKKLIEKKAWPYVQNDXRLRAEYLRFDLNTVIAGKPKDEKKSLKELTGKLFQDISNXDHAAKIKSSPEAEKYYAATVXSXNDVLAKLG

SEQ ID NO: 12834 - protein, 234 aa, Glycine max
  misc_feature (163)..(163): Xaa can be any naturally occurring amino acid
  misc_feature (203)..(203): Xaa can be any naturally occurring amino acid
  misc_feature (224)..(224): Xaa can be any naturally occurring amino acid
  misc_feature (226)..(226): Xaa can be any naturally occurring amino acid
MAQAMASMAGLRGSSQAVLEGSLQVSGSTRLNVGSGSRVTSVTRAGFTVRAQQQQVSGEVQSSRRAVLSLVAAGLATGSFVQAVLADAKSIKVGPPPPPSGGLPGTLNSDEARDLQLPLKDRFFLQPLSPTEAAQRAKESAKEIVGVKKLIEKKAWPYVQNDXRLRAEYLRFDLNTVIAGKPKDEKKSLKELTGKLFQDISNXDHAAKIKSSPEAEKYYAATVXSXNDVLAKLG

SEQ ID NO: 12835 - protein, 230 aa, Glycine max
  misc_feature (159)..(159): Xaa can be any naturally occurring amino acid
  misc_feature (199)..(199): Xaa can be any naturally occurring amino acid
  misc_feature (220)..(220): Xaa can be any naturally occurring amino acid
  misc_feature (222)..(222): Xaa can be any naturally occurring amino acid
MASMAGLRGSSQAVLEGSLQVSGSTRLNVGSGSRVTSVTRAGFTVRAQQQQVSGEVQSSRRAVLSLVAAGLATGSFVQAVLADAKSIKVGPPPPPSGGLPGTLNSDEARDLQLPLKDRFFLQPLSPTEAAQRAKESAKEIVGVKKLIEKKAWPYVQNDXRLRAEYLRFDLNTVIAGKPKDEKKSLKELTGKLFQDISNXDHAAKIKSSPEAEKYYAATVXSXNDVLAKLG

SEQ ID NO: 12836 - DNA, 746 bp, Glycine max
  misc_feature (261)..(261): n is a, c, g, or t
atagtgtttgtttcagatctgtatcgtattattaagcacaaccaagcaagggtgcaaggtgggggtgtttttttttttttttttttttttgctggatgagtggtagctgacactcgcttatggcgtctgaaacggcgtcgtcggcggatgaagaaaccgctgttgttgttgtttcagctgcgggtgcaggagggactgataagagaggcaagcaccggattcttgccgaattgaagcgtctcgaccaagactccatgtttnttcaggaagaattggaagagcttgagaaaacagaaaatgtgtcgaccatatgcacagaattgctacaaaacatggaaagtaggcctgatccattactcccagaagtccatggaccggtgaacctcttatgggatagatggtttgaagggcctcaagatccacaagcatgtagatgttggatactttgatttgaagctgtgtcaattgccatgcgttgcaaataggatgccacatataactgcattaaagtgactctggagctgaagaaaatgtttgatgacatcttaataccacgcacactaattctttaatggatccttgcttttattacattagattctgatctgaatgcagtttatatataatcacattcatttactgcattcaattgagaaatatcattatttgtgcttgtaatcccaatccaaatgttaatacaccttggtggtaactttcatgtgtgcatgagacattattgacatttt

SEQ ID NO: 12837 - protein, 109 aa, Glycine max
  misc_feature (48)..(48): Xaa can be any naturally occurring amino acid
MASETASSADEETAVVVVSAAGAGGTDKRGKHRILAELKRLDQDSMFXQEELEELEKTENVSTICTELLQNMESRPDPLLPEVHGPVNLLWDRWFEGPQDPQACRCWIL

SEQ ID NO: 12838 - protein, 64 aa, Glycine max
  misc_feature (3)..(3): Xaa can be any naturally occurring amino acid
MFXQEELEELEKTENVSTICTELLQNMESRPDPLLPEVHGPVNLLWDRWFEGPQDPQACRCWIL

SEQ ID NO: 12839 - DNA, 804 bp, Glycine max
  misc_feature (480)..(480): n is a, c, g, or t
  misc_feature (487)..(487): n is a, c, g, or t
  misc_feature (493)..(493): n is a, c, g, or t
  misc_feature (547)..(547): n is a, c, g, or t
  misc_feature (556)..(556): n is a, c, g, or t
  misc_feature (595)..(595): n is a, c, g, or t
  misc_feature (627)..(627): n is a, c, g, or t
acttcacgtttagtaatttttttattctcttctgcgttcttcccaccaacatcgaaaccatgtccaccgacttgcacctccacaacgacctgccccagctccgaatcgcctccgccgccgccgccgatgccgtcgtcaaaaccgacgacctcccctccgacgatgacgaccgcaacgccgtctcttccgtcatcactcaaaccgagaccgaaactgacggagccaccatcgtcgacgtcgccgtcgccgtcaacgtcaacgtcaacgtcaacgacgagaattaccgtactccgacttcgaaggagagcaaaattccagcgacgatgacgtgtccgccggcgccgaggcgattcggagctggggcaggtcgttgtcgaggtgctggtggtttgcaaaatcaactagtcaatagagcgctggaaggattatctggtggtgggagaggaggtatgaggggcagaggccggggctggggtggtngtggaanaggaanaggagggtatcggtaactttgttgcagatgtgatgtagaaaacatcagacttcnccagactgnaccagaatacaaataggacctgttaatgtattacaattntttgtcagtggaagttttgactttttgattanagcggatgatgaaattttaatttagtcgtactttttactaaggttgttcatgtagaatgctgagttattgatcattttccaatccatttgttgcaagcagcagatgggactagctgacggaacttatgttcgttggtatgtatgcatgtaattttaatgacgagtgcattttaatgg

SEQ ID NO: 12840 - protein, 168 aa, Glycine max
  misc_feature (160)..(160): Xaa can be any naturally occurring amino acid
  misc_feature (162)..(162): Xaa can be any naturally occurring amino acid
  misc_feature (164)..(164): Xaa can be any naturally occurring amino acid
FTFSNFFILFCVLPTNIETMSTDLHLHNDLPQLRIASAAAADAVVKTDDLPSDDDDRNAVSSVITQTETETDGATIVDVAVAVNVNVNVNDENYRTPTSKESKIPATMTCPPAPRRFGAGAGRCRGAGGLQNQLVNRALEGLSGGGRGGMRGRGRGWGGXGXGXGGYR

SEQ ID NO: 12841 - protein, 149 aa, Glycine max
  misc_feature (141)..(141): Xaa can be any naturally occurring amino acid
  misc_feature (143)..(143): Xaa can be any naturally occurring amino acid
  misc_feature (145)..(145): Xaa can be any naturally occurring amino acid
MSTDLHLHNDLPQLRIASAAAADAVVKTDDLPSDDDDRNAVSSVITQTETETDGATIVDVAVAVNVNVNVNDENYRTPTSKESKIPATMTCPPAPRRFGAGAGRCRGAGGLQNQLVNRALEGLSGGGRGGMRGRGRGWGGXGXGXGGYR

SEQ ID NO: 12842 - protein, 108 aa, Glycine max
TSRLVIFLFSSAFFPPTSKPCPPTCTSTTTCPSSESPPPPPPMPSSKPTTSPPTMTTATPSLPSSLKPRPKLTEPPSSTSPSPSTSTSTSTTRITVLRLRRRAKFQRR

SEQ ID NO: 12843 - DNA, 1488 bp, Glycine max
aacgaaacaacgattgagtaatcctcacttgatgatactactagtcctgagatgataacatcaaacttcgcaataacaacgaaacttccttataatttatctttctctctttctttctttcttccttccctctcttctattctcttcttgtctttacatcacaccctctttccccctttgccaaagctctgatcttttccctctccaatccccgtttctccacttttcttgatcagggtgcctcgttttctcagtttctgaatcattttttgttctgggcctctctccacttcggaaaaagatctgatttttcgcccccttttttttgtttcgaatccctcgtgaaccctcttttctcgatctggggtgtgaaggaaaccgctttttatcgtttcaattatgaggaaaagggagagggagaatccttgtggcgtgtgtggccactatcacaaatacgaagaaggggaagtgtgttcaatttgcggtcaccggattccggttggatcggagaaaacttcgatacaagtcagtgcttttccttccgttgtcctgccggaatttctttacctaggaagctacgacaatgcgtcccgctccgagcttctcaagactcaggggatttctcgtatcctcaatactgttccttcttgtcaaaatctctacaagaactcgtttacctatcactgccttccagatgacaaaactttgccatttgatgaagcaattcagtttctagagcaatgtgagaaggacaaggagcgtgttctggttcattgcatgtcaggaaagagtaggtctccagctattgtgattgcatacttgatgaagttcaaagggtggagacttgcacagagttatcagtgggtaaaagaacggagaccttctgttgaattaactcaaggtgtgtaccagcaactgcaggagtttgagcaaaagatctatggaccgattgatagtggcagctctgtgccgcctggtttcttgcctacagcaccttcaattagctttggtttcccaaagatcaatgatccagctcagcttccttccttcagcactgctggaactccttcaatctttgcgcgagcacccctagatattgctccaaccgagtttacattcggtgccggtcagactcagaagaatgtggctggaaacccctataatgcaaatccagcaaatccaaatggcactgatatccaaatggatggttcttgatccttcaccagccacatgtgtgattaagctgcttgacaatttggcttgtggtgaagcttgcaaggtaccaggctgccatatttcaagtcaagtttgcaataatcataagtgacttgtctattctacaccaacttcttttttcccttgtatttctcaaatcttttcatagttatctctggttgtagtattgagttacagcataatattcttactggcctcagtagatctgcgcgacaatatccagtttttaatattacaagcaaaatcttgtct

SEQ ID NO: 12844 - protein, 271 aa, Glycine max
MRKRERENPCGVCGHYHKYEEGEVCSICGHRIPVGSEKTSIQVSAFPSVVLPEFLYLGSYDNASRSELLKTQGISRILNTVPSCQNLYKNSFTYHCLPDDKTLPFDEAIQFLEQCEKDKERVLVHCMSGKSRSPAIVIAYLMKFKGWRLAQSYQWVKERRPSVELTQGVYQQLQEFEQKIYGPIDSGSSVPPGFLPTAPSISFGFPKINDPAQLPSFSTAGTPSIFARAPLDIAPTEFTFGAGQTQKNVAGNPYNANPANPNGTDIQMDGS

SEQ ID NO: 12845 - protein, 145 aa, Glycine max; identical to SEQ ID NO: 12588

SEQ ID NO: 12846 - DNA, 523 bp, Glycine max
  misc_feature (67)..(67): n is a, c, g, or t
tggactccaaaaccagggatgttaagatactacaaccaactattgcaactcaaacctcgcgtttttntgatgcaaattctctctatgagttggacaaagcaacacaagaggtcacaaatgctatagtagaagcacaatctcaagctcttggaggaccacttaatggagtttccatagggaaagacttgcctgtaattaacatttcaaggtcagttgggcttccagagcttcgtaggatgcgccgtaccttcataaaattgacagggcaaacaagtttaagtgggccaccacctccttctgatgcagatagtgcaaaaagaatgttcattgactacttgaacagggaactgggaacatcctgaaagatatgatagtcttgcaattcatcttatatgtgtgctaaaagatgccatgtttgtgtgtttagatcctgagctgttttatatttacctagagcattattattgaatacactgcttttttgaattccctctttattctactatcatttaattttctcttc

SEQ ID NO: 12847 - protein, 119 aa, Glycine max
  misc_feature (22)..(22): Xaa can be any naturally occurring amino acid
DSKTRDVKILQPTIATQTSRFXDANSLYELDKATQEVTNAIVEAQSQALGGPLNGVSIGKDLPVINISRSVGLPELRRMRRTFIKLTGQTSLSGPPPPSDADSAKRMFIDYLNRELGTS

SEQ ID NO: 12848 - DNA, 528 bp, Glycine max
  misc_feature (32)..(32): n is a, c, g, or t
ccattggcaagatgtgtttgccggaggcattntagggcttgttgtggcaaccttttgttatatgcagttcttccctgcgccctataatgatgaaggatggggtccatatgcatatttccgggcaatggaggaatcacgagcgaatgcaaatattaatcgggaattaccagttgggcaggccatggaggatcgggtaacgaatcaagaaccaaggagaaatggtgataccacctttaccccttactcttaccgtagcccaaccttggaagccatggaaatgggacagaagtaatagtcttctatagcactaatcttctccctagctacctagttccttacttttgtgtatacttatgagcttctctacacggcaaccactagatttagctaattgtgcagcttctgtttcttcttgcattattattattattggcactgccactgtaaaaaatgaaaaatgacggcttctttccgctgaattagattatgttgatagatggtacgttaatgggatcccattttgacctt

SEQ ID NO: 12849 - protein, 96 aa, Glycine max
  misc_feature (11)..(11): Xaa can be any naturally occurring amino acid
HWQDVFAGGIXGLVVATFCYMQFFPAPYNDEGWGPYAYFRAMEESRANANINRELPVGQAMEDRVTNQEPRRNGDTTFTPYSYRSPTLEAMEMGQK

SEQ ID NO: 12850 - protein, 76 aa, Glycine max
MQFFPAPYNDEGWGPYAYFRAMEESRANANINRELPVGQAMEDRVTNQEPRRNGDTTFTPYSYRSPTLEAMEMGQK

SEQ ID NO: 12851 - protein, 55 aa, Glycine max
MEESRANANINRELPVGQAMEDRVTNQEPRRNGDTTFTPYSYRSPTLEAMEMGQK

SEQ ID NO: 12852 - DNA, 557 bp, Glycine max
caagaagcttactcaagctgatgtcaaacacttctttgaatctatttgcggagaggttcaacggttgaggcttcttggagattaccatcattcaactcgaattgcttttgttgagttcacagtggctgagagtgcaattgcagctctaagctgtagtggggtgattttgggttcactgcccataagggtaagtccatcgaagacaccagttcgttcacgtgctcctcgtccttctatgcactgaatcaactttccatgtttctggggttgattgctgctgagatatatttacatatatacatacatagaaacagctatgttctaaggaacatgtggcatttagttggtacttttgtcctcatgtcttacagtatggttactttgctccccttgggggattatgggtctctgttttagcatgtagagtcgaatcgtacttcgaggatcttgatggcttaatttatgatgcacaatgtgtcgtgttgatcatgcaaggagagaagtttatggttgttgggtgtttctaacatctggaatttattttaaagaaacatgtt

SEQ ID NO: 12853 - protein, 80 aa, Glycine max
KKLTQADVKHFFESICGEVQRLRLLGDYHHSTRIAFVEFTVAESAIAALSCSGVILGSLPIRVSPSKTPVRSRAPRPSMH

SEQ ID NO: 12854 - protein, 53 aa, Glycine max
MFLGLIAAEIYLHIYIHRNSYVLRNMWHLVGTFVLMSYSMVTLLPLGDYGSLF

SEQ ID NO: 12855 - DNA, 1521 bp, Glycine max
gttaatttcgtatacaacatgacataatagaagactgtatgcccgtaactactcctaacaaacgaagtgaacttgctaacaaaattgagctaactaactttgagttaatcaccaactctggtaatataaactatttaacataagtaagtggctataaaaggaatgccacctttcaatgatgaaaccaaaattaacaatatcctagaattcactttggttccctcgaagtttagcttgcgttacatcggtggatcacataggttttgtttaaggtaactcacttttataaaaatgtaacactgtgtctttgttggttgttatgctgtaattatttggaacgattgatagccattgcagtgttcaactgttcattgttaattttgtgtctctatactgaacagtatgagtcaggagctgaaaaaagctgcctctaagggtcatgagaaaatggtaacatcacaagaagagcaggcaaagatcactgaggttagagggttgatagggccactatcagataaggaatctgtgtactgttctgatgcttccatctcaaggtatttaaggtcgcgaaattggaatgtcaagaaggcagctcaaatgttgaaacagagcctaaaatggagaaaagaatacaaacctgaagagattcgctgggaagaggttgctgaggaagcacagacagggatgatgtataaaccaaattatcatgacaagtatgggagatcagtgcttgtaatgagaccttgtgtccagaagtcatcgtcaacacaaggacaaattaagtattttgtatacagcattgagcatgccattttaaaccttccaccacaccaggaacagatggtctggctggtagatttccagggtttcaagctgtcagatatatcattcaaggtggcacgtgaatctgcccatattctgcaagagtattatccaaagcagctgggtttaataatactatacaatgcacctatgatcttccaaccatttttctcgatggtaaagccctttttagagactgagactgttaataaaataaagtttggctattcgaacaaccacaacacaaagaagattatggaggatttgtttgataaggataatcttgaatctgcatttggtgggaatggtgacacaggagttgacataaataaatatgctgagagaatgaaagaggatgacaataagaagcattctttctggacacaggccaagtccatatcatcagttgcacaaaatgctccgtcagattcaatcaggttagatgcagtttctgatgcttctaacactaagaaaatagactgttcccgtgtccctaattgatcaatacatcttggttgctcaaagggacagaaaagccgtggcgttgtggaatgagaaattacatacctaaatcagtgttgattcaactgtaatgcagcaagatgctatgacatatattctagtttgaaacccagattcaagacacctagtgtcaacttcatgtatgatttatgatgataaataatttttccttgtgcc

SEQ ID NO: 12856 - protein, 306 aa, Glycine max
MSQELKKAASKGHEKMVTSQEEQAKITEVRGLIGPLSDKESVYCSDASISRYLRSRNWNVKKAAQMLKQSLKWRKEYKPEEIRWEEVAEEAQTGMMYKPNYHDKYGRSVLVMRPCVQKSSSTQGQIKYFVYSIEHAILNLPPHQEQMVWLVDFQGFKLSDISFKVARESAHILQEYYPKQLGLIILYNAPMIFQPFFSMVKPFLETETVNKIKFGYSNNHNTKKIMEDLFDKDNLESAFGGNGDTGVDINKYAERMKEDDNKKHSFWTQAKSISSVAQNAPSDSIRLDAVSDASNTKKIDCSRVPN

SEQ ID NO: 12857 - protein, 291 aa, Glycine max
MVTSQEEQAKITEVRGLIGPLSDKESVYCSDASISRYLRSRNWNVKKAAQMLKQSLKWRKEYKPEEIRWEEVAEEAQTGMMYKPNYHDKYGRSVLVMRPCVQKSSSTQGQIKYFVYSIEHAILNLPPHQEQMVWLVDFQGFKLSDISFKVARESAHILQEYYPKQLGLIILYNAPMIFQPFFSMVKPFLETETVNKIKFGYSNNHNTKKIMEDLFDKDNLESAFGGNGDTGVDINKYAERMKEDDNKKHSFWTQAKSISSVAQNAPSDSIRLDAVSDASNTKKIDCSRVPN

SEQ ID NO: 12858 - protein, 241 aa, Glycine max
MLKQSLKWRKEYKPEEIRWEEVAEEAQTGMMYKPNYHDKYGRSVLVMRPCVQKSSSTQGQIKYFVYSIEHAILNLPPHQEQMVWLVDFQGFKLSDISFKVARESAHILQEYYPKQLGLIILYNAPMIFQPFFSMVKPFLETETVNKIKFGYSNNHNTKKIMEDLFDKDNLESAFGGNGDTGVDINKYAERMKEDDNKKHSFWTQAKSISSVAQNAPSDSIRLDAVSDASNTKKIDCSRVPN

SEQ ID NO: 12859 - DNA, 1697 bp, Glycine max
aaaaactactttttcattccatttcgcgtccttccttctcaccatctcccacactccaccgccatgacggacaacgaccgcgtctcccgccgcaccgaggtcctcaccaaccacctcctccgccgcacacccccaccctcccttctccgccccctcccctgcctgagctactcccccccggagctctccaacaccatctccttcgacactcgcgagatgcgaaaactgatggactgccacaaccttgaggaccgcgactggctcttctcccttatcctccagagccccctcttcaatccccgccaccgcgccggaagattcttcgtctgccccgactacaaccagcccatggagcaccagcgccaggccaccatgaagcgcatcgcctatctcctcgacaaaggggtcttccgaggctggctcacgggaaatggccccgaacaggagctcaggaagctcgcgctgcacgaggtcattgggatgtacgatcattctctcgcggttaagcttggcgttcacttcttcttgtggggtggggcagtaaagtttctgggaaccaagcgccatcatgacaagtggttgaattctactgaaaactatgatatcaagggttgttttgctatgtcggagttaggccatggaagtaatgttcgaggaattgaaacagtcactacttatgattcaaacaccggggaatttgtcatcaatactccatgtgaatcgggtcagaagtattggattggtggtgcagcaaatcatgcaacgcacactatagtcttttcacagctctatataaatggaagcaatcaaggggtgcatgcatttattgcccaaatcagggattcagatggaaacatatgtccaaacatccgaatagctgattgtggtcacaaaattggtttaaatggagttgataatggccgtatctggtttgataatgtgaggatacccagagagaatttgttgaattctgtggctgatgtttcaccaagtggtgaatatttgagtgcaataaaaaatgcagatcagaggtttgctgcattcttagcccctttgacttctggtcgtgttaccattgctgttagtgctgtttacatctccaagattagcttggccattgctataagatatgcattgacaaggcgagcattctccattacaccaaacgggcctgaagttttactgcttgattaccctagtcatcaacggcgtctgttacctttacttgcaaaggtatatgcaatgagttttgctgcaaatgagctgaaaatgatgtatgtcaacagaacacctaagtcaaacaaagcaattcatattgtttctagtgcttacaaggctactttaacttggaataatatgcgcactctccaggaatgtcgtgaagcctgtggaggacaaggagttaaatctgaaaatcgtgttggcaatttcatgggtgaatttgatgtgcattcgacatttgagggggacaacaatgttctaatgcagcagattagcaaggcactctttgcagaatatgtagcaagtcagaagaaaaagaaaccattcagcggtttgggattagaacacatgaacaaacctttgcctgttatcccatctcagctaacaagttcctacattaggaacagtgaatttcagattgatctgttccacctaagagagcgagacctattgagacgttttgctgaagaggtctc

SEQ ID NO: 12860 - protein, 565 aa, Glycine max
KNYFFIPFRVLPSHHLPHSTAMTDNDRVSRRTEVLTNHLLRRTPPPSLLRPLPCLSYSPPELSNTISFDTREMRKLMDCHNLEDRDWLFSLILQSPLFNPRHRAGRFFVCPDYNQPMEHQRQATMKRIAYLLDKGVFRGWLTGNGPEQELRKLALHEVIGMYDHSLAVKLGVHFFLWGGAVKFLGTKRHHDKWLNSTENYDIKGCFAMSELGHGSNVRGIETVTTYDSNTGEFVINTPCESGQKYWIGGAANHATHTIVFSQLYINGSNQGVHAFIAQIRDSDGNICPNIRIADCGHKIGLNGVDNGRIWFDNVRIPRENLLNSVADVSPSGEYLSAIKNADQRFAAFLAPLTSGRVTIAVSAVYISKISLAIAIRYALTRRAFSITPNGPEVLLLDYPSHQRRLLPLLAKVYAMSFAANELKMMYVNRTPKSNKAIHIVSSAYKATLTWNNMRTLQECREACGGQGVKSENRVGNFMGEFDVHSTFEGDNNVLMQQISKALFAEYVASQKKKKPFSGLGLEHMNKPLPVIPSQLTSSYIRNSEFQIDLFHLRERDLLRRFAEEV

SEQ ID NO: 12861 - protein, 544 aa, Glycine max
MTDNDRVSRRTEVLTNHLLRRTPPPSLLRPLPCLSYSPPELSNTISFDTREMRKLMDCHNLEDRDWLFSLILQSPLFNPRHRAGRFFVCPDYNQPMEHQRQATMKRIAYLLDKGVFRGWLTGNGPEQELRKLALHEVIGMYDHSLAVKLGVHFFLWGGAVKFLGTKRHHDKWLNSTENYDIKGCFAMSELGHGSNVRGIETVTTYDSNTGEFVINTPCESGQKYWIGGAANHATHTIVFSQLYINGSNQGVHAFIAQIRDSDGNICPNIRIADCGHKIGLNGVDNGRIWFDNVRIPRENLLNSVADVSPSGEYLSAIKNADQRFAAFLAPLTSGRVTIAVSAVYISKISLAIAIRYALTRRAFSITPNGPEVLLLDYPSHQRRLLPLLAKVYAMSFAANELKMMYVNRTPKSNKAIHIVSSAYKATLTWNNMRTLQECREACGGQGVKSENRVGNFMGEFDVHSTFEGDNNVLMQQISKALFAEYVASQKKKKPFSGLGLEHMNKPLPVIPSQLTSSYIRNSEFQIDLFHLRERDLLRRFAEEV

SEQ ID NO: 12862 - protein, 493 aa, Glycine max
MRKLMDCHNLEDRDWLFSLILQSPLFNPRHRAGRFFVCPDYNQPMEHQRQATMKRIAYLLDKGVFRGWLTGNGPEQELRKLALHEVIGMYDHSLAVKLGVHFFLWGGAVKFLGTKRHHDKWLNSTENYDIKGCFAMSELGHGSNVRGIETVTTYDSNTGEFVINTPCESGQKYWIGGAANHATHTIVFSQLYINGSNQGVHAFIAQIRDSDGNICPNIRIADCGHKIGLNGVDNGRIWFDNVRIPRENLLNSVADVSPSGEYLSAIKNADQRFAAFLAPLTSGRVTIAVSAVYISKISLAIAIRYALTRRAFSITPNGPEVLLLDYPSHQRRLLPLLAKVYAMSFAANELKMMYVNRTPKSNKAIHIVSSAYKATLTWNNMRTLQECREACGGQGVKSENRVGNFMGEFDVHSTFEGDNNVLMQQISKALFAEYVASQKKKKPFSGLGLEHMNKPLPVIPSQLTSSYIRNSEFQIDLFHLRERDLLRRFAEEV

SEQ ID NO: 12863 - DNA, 1285 bp, Glycine max
actcatccctttccttctctctcacatttcattacttctaccaagctactacatttttaacttcctctttctacatttcattcaaaacaatcatggcttctcttcattccattacattttcaacaaaaactgtcctttatgtatttgtattggcctcttccatcgcagcctctgctggcaacttctaccaggattttgacgtaacttggggagatggtcgtgccaagatactcaacaacggcgatcttctcactctttcccttgacaaagcctctggctcggggtttcagtccaaaaacgagtatctctttggcaagattgatatgcaactcaagcttgtacccggaaattctgcaggcactgtcaccgcctattatttgtcatcaaaaggatcaaattgggatgagattgactttgaattcttggggaatctgagcggtgacccatacattcttcacaccaatgtgttcagtcagggcaaaggcagcagagagcaacagttctatctgtggttcgacccaactgcagatttccatacctattccattctttggaatcctcagcgcataatgtaagcacttgtcaatggcctaagtaccctcaagcattcctcaaaaatgttttatatttataattcataatttcacaattcacagcctgagttatattaatcaatccatggtggttcatatgtacgtatgtttcagcttctcagtggatgggaccccaataagagaattcaagaacatggaatcaaaaggagttgcattcccaaaggaacagccaatgaggatatactctagtctatggaatgctgatgactgggcaacaagaggtggacttgtgaagacagattggacacaagctccattcacagcatcatatagaaatttcaatgccaatgcctgcgtccattctggatcatcatcatcatcatcatcttgcactgccaactcttcttcctccaatgcctggttctcccaacagttggattcaacaagccaggacagactgagttgggtgcagaagaattacatgatttacaattactgcactgacaccaaaagatttccacaaggccttcccccagagtgccaaacatcttgaactccttctaatcctactcgaaacaaataccacaacactattctttattcttcctaggctgattgaattgcttttcatttgtatggatgttcattcttttattctttgatacttgtcgattgtattacaagaaacggaaagaagcctcaataatacttttcttgaatcttttacactt

SEQ ID NO: 12864 - protein, 190 aa, Glycine max
SSLSFSLTFHYFYQATTFLTSSFYISFKTIMASLHSITFSTKTVLYVFVLASSIAASAGNFYQDFDVTWGDGRAKILNNGDLLTLSLDKASGSGFQSKNEYLFGKIDMQLKLVPGNSAGTVTAYYLSSKGSNWDEIDFEFLGNLSGDPYILHTNVFSQGKGSREQQFYLWFDPTADFHTYSILWNPQRIM

SEQ ID NO: 12865 - protein, 160 aa, Glycine max
MASLHSITFSTKTVLYVFVLASSIAASAGNFYQDFDVTWGDGRAKILNNGDLLTLSLDKASGSGFQSKNEYLFGKIDMQLKLVPGNSAGTVTAYYLSSKGSNWDEIDFEFLGNLSGDPYILHTNVFSQGKGSREQQFYLWFDPTADFHTYSILWNPQRIM

SEQ ID NO: 12866 - protein, 142 aa, Glycine max
MVVHMYVCFSFSVDGTPIREFKNMESKGVAFPKEQPMRIYSSLWNADDWATRGGLVKTDWTQAPFTASYRNFNANACVHSGSSSSSSSCTANSSSSNAWFSQQLDSTSQDRLSWVQKNYMIYNYCTDTKRFPQGLPPECQTS

SEQ ID NO: 12867 - DNA, 1143 bp, Glycine max
tcactctccctgccgccgctgagacacgaagagtaactgcctcgcaacgccgcccttgccatcgcgacagagtgtcgtacacagcggagctccctcgcgacgccatcctcactgtgccgtttcaggtgtttgacgaaattccccataaacgaagctcatgggcaagaaaggaggggccaaaaaattagagtctgtgtctcacactccaatatcattgagggaagaagccaccggaaaaatacaaaccaaggcagcctcaaacaccaagtccaaattgagatttgagcacttgaaaaacctagcagtgtgggccaccgccataccatctttgggtgccttctatggacaccaattcgccgcctttggagaggccactggaataccacccgatccttctttaataacttgccaaagatgtgaaactattcttcaacctggatttaattcaactgtacgaattgagaagaatcaatcaaagctcaggcatagacacaagaagtctggtaacatcactcaaaacaaggtagtgtacaagtgccatttttgtttgcatcagaatctgaagagagggactcctaagggacacataaaaggaatctgtccatcaaaagataaatcatcgttagagtcaacacctccatcaaaatccatcacaagtgattcttctaaattagagaaaggcattttaagcaaagatgaagccaatgaaataaatgtgtttcctttacgagatgtagctaacgtggacggtttagctactccgtcaagtacaaatacgacaactttgtctaaaaaggctattaaaactataaacaagtctgcaaaacaagtagcaaaatctgcaagtacatccaacaaaagacgaagaaaatcttggactagtttaaaggaaattgctcagagcaacgagcataagaacaatccgattgctaatttaacgatcccattctttttataagcagagatattttctatataggttaaattgagttgtatttctttttacatgatgcatgcaggctttatgttttatctgctattacactttcaagcaaatatgtttttactgtgtttgatgctctgttggacttttgttctcctgcatggatatcagtttagttttcctttttctatttgcaattc

SEQ ID NO: 12868 - protein, 266 aa, Glycine max
MGKKGGAKKLESVSHTPISLREEATGKIQTKAASNTKSKLRFEHLKNLAVWATAIPSLGAFYGHQFAAFGEATGIPPDPSLITCQRCETILQPGFNSTVRIEKNQSKLRHRHKKSGNITQNKVVYKCHFCLHQNLKRGTPKGHIKGICPSKDKSSLESTPPSKSITSDSSKLEKGILSKDEANEINVFPLRDVANVDGLATPSSTNTTTLSKKAIKTINKSAKQVAKSASTSNKRRRKSWTSLKEIAQSNEHKNNPIANLTIPFFL

SEQ ID NO: 12869 - DNA, 1564 bp, Glycine max
  misc_feature (566)..(566): n is a, c, g, or t
  misc_feature (581)..(581): n is a, c, g, or t
  misc_feature (775)..(775): n is a, c, g, or t
atgagcaattataaaggtttacccgtgcgtggatccttcgattcataggaggtgtcctcttggttaacaaaagtagtaacagtgtttccttaaggtacctacaatttttacgtgactttaacagtgcaacacgtatgcgtggggacctgccgtgcttgcgtatttatatagagagatgtgcagcgccaccgattacaaagttaaatcaatcggaggtatgtgcatcttaatccaaatgtgggcatgagaacgatgcacgacctgagctccaaagaggacgtctcccatcatagaaaataaaccactcggacacaggtggttgcgaagtggaaatcaacatattggcaatgatgatcttagacttttccgtcgcaaattggatttgatgaaacaacatgagtttgtctgggagccatacacagcaactgtgatgacagcgttgcctccaatttgtgtggttggaagtgtagcctggtttgcggtggtgcccctgatttgtttccatgttgttgagtggcaccaaccccgatagagttttacgacaatttggattgcaacaacccatncccgggtttccttcncaaccgcagaatctccatggcataacgctcaaaggcaaacaagatgagaattggttccacctgttggccccaatcattagtcagtagaacaatgcagctgagtttagggtcgacgtttatcctcgacaggagggcctactgggttttaactcggactacatggtgtggtataggcgtaaaacaaagatgtttgncgacccaaacaatgcaaacacaactgcattgggtgaagttgtggagactttacaatatatggtgtcaccacaagggagcaacacatggacagttaatgatctcgtgccttacgtggataagttagcgattatatctgaagagcaagagagaatcattgagccagtgtcacatggtccagcatcagagcgtgaattcccagcacaagagtttcacattcttcagtcaagtgttgaaactcggggcataggcatacgaagggagcctgttgaagcggaacaatattcccaacaaatgatggagtgtggtcatggaatgtattacacgccaacaacattttctgaatatccttcacagatgtatcagtatccttttgcaggtcatcatactgatatatctgagacctcacattcgttcggtagtgttgcggaaacacaacctcatttttcatggcccactatgactccttcacagcagcacgatgcccccatggcaacacctaacacctcatttgctccgcaatggaatgtacccggagcaatacctgatatgggcgacttattaggtgttgatttgcgtcaggagttttctgcagagggtgagcaagcagaagcggggagacaacgcggcgacagaagaaattttaatcgtcaagcacgaagatgggatcaaccatgtggcacatcttcacgacatcacggacaccataatgactgattttgatgtatctgtgtaattttgttgttgttggtaagacatttgattttgacaattaatctatcgcatctcat

SEQ ID NO: 12870 - protein, 249 aa, Glycine max
  misc_feature (12)..(12): Xaa can be any naturally occurring amino acid
MVWYRRKTKMFXDPNNANTTALGEVVETLQYMVSPQGSNTWTVNDLVPYVDKLAIISEEQERIIEPVSHGPASEREFPAQEFHILQSSVETRGIGIRREPVEAEQYSQQMMECGHGMYYTPTTFSEYPSQMYQYPFAGHHTDISETSHSFGSVAETQPHFSWPTMTPSQQHDAPMATPNTSFAPQWNVPGAIPDMGDLLGVDLRQEFSAEGEQAEAGRQRGDRRNFNRQARRWDQPCGTSSRHHGHHND

SEQ ID NO: 12871 - protein, 240 aa, Glycine max
  misc_feature (3)..(3): Xaa can be any naturally occurring amino acid
MFXDPNNANTTALGEVVETLQYMVSPQGSNTWTVNDLVPYVDKLAIISEEQERIIEPVSHGPASEREFPAQEFHILQSSVETRGIGIRREPVEAEQYSQQMMECGHGMYYTPTTFSEYPSQMYQYPFAGHHTDISETSHSFGSVAETQPHFSWPTMTPSQQHDAPMATPNTSFAPQWNVPGAIPDMGDLLGVDLRQEFSAEGEQAEAGRQRGDRRNFNRQARRWDQPCGTSSRHHGHHND

SEQ ID NO: 12872 - protein, 218 aa, Glycine max
MVSPQGSNTWTVNDLVPYVDKLAIISEEQERIIEPVSHGPASEREFPAQEFHILQSSVETRGIGIRREPVEAEQYSQQMMECGHGMYYTPTTFSEYPSQMYQYPFAGHHTDISETSHSFGSVAETQPHFSWPTMTPSQQHDAPMATPNTSFAPQWNVPGAIPDMGDLLGVDLRQEFSAEGEQAEAGRQRGDRRNFNRQARRWDQPCGTSSRHHGHHND

SEQ ID NO: 12873 - DNA, 1032 bp, Glycine max
atgaggcatataacttctttgttttattatgatgattaatattgtaagcaccagtagaaaggttgcaggatgtgtctcttgtgcaaggaaattgaacttaccatacacaacaccactcgtattttgaactgatgcgtagcatgtaaatgactaggaccaaacacctttaattttgcaggtctcttttagtgatgagaggaaacagtgctgacatggcaaggcacgtaatgtgtccatcccctaacagaagggtcagcatcaccttcttcagagtgaggccagactccaaccaatgccaaacaccaactcccactaccatgacaagtgcaatgactatgtggcaaccgggcattgctgctagtccatatgctttgccaaatagtgctctaactagctatgagggtatggacatgaacatgatgcccaaatggggaatgcttcacgctccaatggtgatgcttactcctatgcgtcctgtggcgctgaaccctcgcaaacttgctggtggtgggactggggtgtttttgccctggaatgtgccatctagaaaacctgccaagcatcttcccccacgtgcacaaaaaggaaggcttctcacattaccttcctccgttgaaccacaaatgggagagtccacttctgaaccaagcatttgtgttgaaggataaggacaagtttagttctgaaagcagccttgggtttgaagaaatctgaatcaagaaaggtgacttccacgactcagctatttgctctacactgttgaaattttgttgtacaaacacaaacgcccccccccccccaagtgctgcaatgaaagagcagtttggttcttcttcatcttttttccctttggatagagtagagtctagtggtgttcaaaacggtttcccatgtttgccaatcaccgcaagagcttagtagagtagtcaagctttcaaatttaaagtgtgaattatatctgatggtagctttttgtaagaatgatattttaagttaaaaagacaaatcaattcgtcaccagaatgcttactt

SEQ ID NO: 12874 - protein, 158 aa, Glycine max
MRGNSADMARHVMCPSPNRRVSITFFRVRPDSNQCQTPTPTTMTSAMTMWQPGIAASPYALPNSALTSYEGMDMNMMPKWGMLHAPMVMLTPMRPVALNPRKLAGGGTGVFLPWNVPSRKPAKHLPPRAQKGRLLTLPSSVEPQMGESTSEPSICVEG

SEQ ID NO: 12875 - protein, 151 aa, Glycine max
MARHVMCPSPNRRVSITFFRVRPDSNQCQTPTPTTMTSAMTMWQPGIAASPYALPNSALTSYEGMDMNMMPKWGMLHAPMVMLTPMRPVALNPRKLAGGGTGVFLPWNVPSRKPAKHLPPRAQKGRLLTLPSSVEPQMGESTSEPSICVEG

SEQ ID NO: 12876 - protein, 146 aa, Glycine max
MCPSPNRRVSITFFRVRPDSNQCQTPTPTTMTSAMTMWQPGIAASPYALPNSALTSYEGMDMNMMPKWGMLHAPMVMLTPMRPVALNPRKLAGGGTGVFLPWNVPSRKPAKHLPPRAQKGRLLTLPSSVEPQMGESTSEPSICVEG

SEQ ID NO: 12877 - DNA, 1814 bp, Glycine max
  misc_feature (1736)..(1736): n is a, c, g, or t
tcatcagcttatcctcagttttttgcctcccaatcccaatccaattcggtttcccagcgtttgagttctcccaatttgagtcctgcttcgtcccattccaggtctttgtctcagccctcttttttctctctggattccttgcccccattgagtccttccccttataaagaaccttccttttctgactcaatttcgactgatgtgtctgctgaggaaagcttggctaactctcatgcccccttgccgaatcgtggccacgctcttcagcttggccattctcttcctcctcgtaaaggacataggcgctctagcagtgattcccctttaggaattgctgattttattcagtctgcccctcagtttgttccctctaagacttggagcaatcgtgaaaattcggcatctaggggagggaactctggttttgagaagccgattcagttagtgttaaaggaaccgattaaggatatggaccgtgttgatggttttggtggagaacctatggttgggaggaaagaggatgatgcactggatgatttgtttagtgcatatatgaatttggacaatattgatggtctcaatttttctggtatggaagataaggatttggatagcagaactagtggttccaagacagttgagagcagtgataacgaagttgagagtcatgcaaatggcaaagtgactggttctcaaggggctagttcccgctgttctgaagagaggagggaaggagtgaagaggagttctaatggagacgttgcacctggttcccgacaccggagaagtttctcattggacagctccataggaaatttccatattggagatgaatcgcctaagcttcctccttcacaaaaccgatttggtcaacactctcctagcagttcaatagatggtaagacatctgaaacaagcatggagtttggaaatggtgaattcagctcagaggagctaaagaaaataaaggagaacgataaacttgctgaaattgccatggccgatcctaagcgtgctaaaaggattttggctaatcgtctatcagctgctcgctcaaaagagaggaagatgcggtacatttctgaattagagctcaaagtacaaacacttcagacagagacaaccacattgtctactcagtttaccaaattacagatggataattcagagctgaaaagtgagaataatgagtacaaattgaggattcaagccttggaacagcagtcccaactaaaagatgctctgaatgagaccttggatgctgaagtgcggcgtttaagacgcacagttgcagaacttggtggagagtctcttctctcaagtcgcatggctcaacagcttgctattagccaacaagtgttccagttacagcaccagcagcaccctaaccagcttagacatgttcaactggacaatagccattcccaggagcagacacagactcagtcacagtgccacaatggcaaagctactgcctactgattagcactctgataccatgtatgctcaatgtttgtgatatgaatctgaataggatattgcatgaccaaacaagctcaagtaaaaaaaaaaaagactcgattctaagagaggacccgttaacaaaaagaaaagttcaaaagatacaagaggcaaaaggagtctgtgaatgcaattcctatctaataaggttgtagttcgacttgtgcaagcccaaggatatgattatatgaagactcaaaatagtgtataattgntaactttattgcctaagatttgtagttattatttgtaaatctaatgatgatttgagatagatttcattagaatttatg

SEQ ID NO: 12878 - protein, 493 aa, Glycine max
SSAYPQFFASQSQSNSVSQRLSSPNLSPASSHSRSLSQPSFFSLDSLPPLSPSPYKEPSFSDSISTDVSAEESLANSHAPLPNRGHALQLGHSLPPRKGHRRSSSDSPLGIADFIQSAPQFVPSKTWSNRENSASRGGNSGFEKPIQLVLKEPIKDMDRVDGFGGEPMVGRKEDDALDDLFSAYMNLDNIDGLNFSGMEDKDLDSRTSGSKTVESSDNEVESHANGKVTGSQGASSRCSEERREGVKRSSNGDVAPGSRHRRSFSLDSSIGNFHIGDESPKLPPSQNRFGQHSPSSSIDGKTSETSMEFGNGEFSSEELKKIKENDKLAEIAMADPKRAKRILANRLSAARSKERKMRYISELELKVQTLQTETTTLSTQFTKLQMDNSELKSENNEYKLRIQALEQQSQLKDALNETLDAEVRRLRRTVAELGGESLLSSRMAQQLAISQQVFQLQHQQHPNQLRHVQLDNSHSQEQTQTQSQCHNGKATAY

SEQ ID NO: 12879 - protein, 337 aa, Glycine max
MDRVDGFGGEPMVGRKEDDALDDLFSAYMNLDNIDGLNFSGMEDKDLDSRTSGSKTVESSDNEVESHANGKVTGSQGASSRCSEERREGVKRSSNGDVAPGSRHRRSFSLDSSIGNFHIGDESPKLPPSQNRFGQHSPSSSIDGKTSETSMEFGNGEFSSEELKKIKENDKLAEIAMADPKRAKRILANRLSAARSKERKMRYISELELKVQTLQTETTTLSTQFTKLQMDNSELKSENNEYKLRIQALEQQSQLKDALNETLDAEVRRLRRTVAELGGESLLSSRMAQQLAISQQVFQLQHQQHPNQLRHVQLDNSHSQEQTQTQSQCHNGKATAY

SEQ ID NO: 12880 - protein, 326 aa, Glycine max
MVGRKEDDALDDLFSAYMNLDNIDGLNFSGMEDKDLDSRTSGSKTVESSDNEVESHANGKVTGSQGASSRCSEERREGVKRSSNGDVAPGSRHRRSFSLDSSIGNFHIGDESPKLPPSQNRFGQHSPSSSIDGKTSETSMEFGNGEFSSEELKKIKENDKLAEIAMADPKRAKRILANRLSAARSKERKMRYISELELKVQTLQTETTTLSTQFTKLQMDNSELKSENNEYKLRIQALEQQSQLKDALNETLDAEVRRLRRTVAELGGESLLSSRMAQQLAISQQVFQLQHQQHPNQLRHVQLDNSHSQEQTQTQSQCHNGKATAY

SEQ ID NO: 12881 - DNA, 1332 bp, Glycine max
  misc_feature (1208)..(1208): n is a, c, g, or t
  misc_feature (1210)..(1210): n is a, c, g, or t
  misc_feature (1244)..(1244): n is a, c, g, or t
  misc_feature (1268)..(1268): n is a, c, g, or t
  misc_feature (1288)..(1289): n is a, c, g, or t
  misc_feature (1298)..(1298): n is a, c, g, or t
gaatttttatatttaaatttgtgtatcaacaggttgacaatacggtcattgagtaacctaatcttctagtctactatcatagaattacatgttactagtgatcagatttttcattaatcttgttgacagaatcctcttccacttatttcacatatagtgacagcatctgattctttggaaatcaaggagttatatttcatttagatttgaatgcaaattatctgagtgaaatgtctttacagatcacactgtgtgttgatatgttgtctatccattttctgcttttccatgtgagtctatgcggtcatagcacccaccatatatcaaatagtaaatagttaagtcagactagctatgttccataaacaatggctcctatcatcctatgtctcctttccttgtaaacatgcacgcattgaagttgacattttgagattgcaataacgttaatatcccattgcagacgaggaagatgatctttatcagggaatcaacaagtatagggaatcattaaacttgacatctctaacaaagaatgaaaatgcaaattgctttgctgatgaaatggctgaccagttcaagaatcaaccttgtacaaataccacaggcgcaaacacagtaccaggcacagagcctcggttctccaactatccagaccttttgaataaatgtcatttgaatatttctaacacgagggatggaattgtaatgcctgcttgtgttcctggcctggtttcgagtgttgtcctcacaaatttcacgcaatctctctactcgggtaatcttaatgactccaagtttacaggaattggtattggttcagaagataactggattgtagtcgtactgagcactaacactcctgaaggaagctttgttcctgagactgacagtggtgccaatttgatttcgaaaattggattgatttactgctcattgcttttgttagttggtaatcttttcctgttgtgaacaagaggatgccattgttctcatttttgttttgttttagtattgtcaatttggaggccttgctacctccataaagttcttactaatctgtgtccaggaacactaaaaataatatagacaagtgcttttctagtgaaacatagatggtcgtggttacaagtgttgtttcaatattgtaagtgtctgtaggatgctagagaagaggaatatgggaacagcatttatcctcaagggtngntatcttactgttgtcattactaacagtttcattncttttcttttctttctgttttttngaatactttacttttgccanntcagaatangaagcaataaattgtagcattgatgatagcacac

SEQ ID NO: 12882 - protein, 135 aa, Glycine max
MADQFKNQPCTNTTGANTVPGTEPRFSNYPDLLNKCHLNISNTRDGIVMPACVPGLVSSVVLTNFTQSLYSGNLNDSKFTGIGIGSEDNWIVVVLSTNTPEGSFVPETDSGANLISKIGLIYCSLLLLVGNLFLL

SEQ ID NO: 12883 - protein, 87 aa, Glycine max
MPACVPGLVSSVVLTNFTQSLYSGNLNDSKFTGIGIGSEDNWIVVVLSTNTPEGSFVPETDSGANLISKIGLIYCSLLLLVGNLFLL

SEQ ID NO: 12884 - DNA, 1338 bp, Glycine max
  misc_feature (1051)..(1051): n is a, c, g, or t
  misc_feature (1059)..(1059): n is a, c, g, or t
taatggtggacagagaaatacagatactactattcttattctactactagtctccaaggaaaggagatcactatccaaaccattctcactttctcccttcaatgccactcttcttcctttctctttgagagactgcacacaaatttctactgtttccagagcgacaatggatccggcggccatgatgaacgccgccgccaacacggcgtcatatcacctgtcagagatctggcacttcccgcctcccaacgcgccagacgcgctgggcctcaggagggcccacttcgccccgggtccgacccgacatgccgtcccgggtcgcgacctggctagcatcgcccccaagaagcgccgccaagccgaggaggaggaggtggaatccactaggggcgcttccaccaccaatgccgtggatgagggttgtggtgatggaaaacgggttaagacgagtgagagtgggaaaggtgaaggagaaagctgttcaggaaagcctgcgaagcaaagcggtaagccaccttcggagcctccaaagcaagactacattcatgtcagagctagaagaggtcaagctactgatagccacagtcttgcagaaagagctagacgggagaagatcagtgaaaggatgaaaattcttcaggatttagtcccgggttgtaataaggttattgggaaagcattggtccttgatgagataattaattatatccaatcacttcagcggcaagtagagtttttgtcaatgaagcttgaagcagtaaattcaagaattgcccccggaatcgaagtgtttcctccgaaagattttgatcagcaaacattcgatacaactggcatgccattcgcttctcaagctacaagagactatagccgaggctcatcaccggagtggttacatatgcaggttggagatggttttgaaagagcaacgtagtctttgaaatcacatcacctgacaataaatgcatataggatctttaatctctctatcagagctcccataaatcatatactcaaggtgttgttgctaagtcctatagacacctcattnttgttttntacaagagaggcatggagctgttatttgtttccacgggatcacttcagttagtacgcaagtaacaacatttgttagtgtgttggaaaatggattcatttacccaatatgtagtttagtatgctgatactcttcataacctttaaaatgattgttattattcttgtaaaagaatgctgcttgtcctgaatacataaaggcttacatgttgtgtaatagtgtcaacattgttgtttgtatgtgaagctatgttgaataaattaagcccatgtgattttgtc

SEQ ID NO: 12885 - protein, 310 aa, Glycine max
NGGQRNTDTTILILLLVSKERRSLSKPFSLSPFNATLLPFSLRDCTQISTVSRATMDPAAMMNAAANTASYHLSEIWHFPPPNAPDALGLRRAHFAPGPTRHAVPGRDLASIAPKKRRQAEEEEVESTRGASTTNAVDEGCGDGKRVKTSESGKGEGESCSGKPAKQSGKPPSEPPKQDYIHVRARRGQATDSHSLAERARREKISERMKILQDLVPGCNKVIGKALVLDEIINYIQSLQRQVEFLSMKLEAVNSRIAPGIEVFPPKDFDQQTFDTTGMPFASQATRDYSRGSSPEWLHMQVGDGFERAT

SEQ ID NO: 12886 - protein, 255 aa, Glycine max
MDPAAMMNAAANTASYHLSEIWHFPPPNAPDALGLRRAHFAPGPTRHAVPGRDLASIAPKKRRQAEEEEVESTRGASTTNAVDEGCGDGKRVKTSESGKGEGESCSGKPAKQSGKPPSEPPKQDYIHVRARRGQATDSHSLAERARREKISERMKILQDLVPGCNKVIGKALVLDEIINYIQSLQRQVEFLSMKLEAVNSRIAPGIEVFPPKDFDQQTFDTTGMPFASQATRDYSRGSSPEWLHMQVGDGFERAT

SEQ ID NO: 12887 - protein, 250 aa, Glycine max
MMNAAANTASYHLSEIWHFPPPNAPDALGLRRAHFAPGPTRHAVPGRDLASIAPKKRRQAEEEEVESTRGASTTNAVDEGCGDGKRVKTSESGKGEGESCSGKPAKQSGKPPSEPPKQDYIHVRARRGQATDSHSLAERARREKISERMKILQDLVPGCNKVIGKALVLDEIINYIQSLQRQVEFLSMKLEAVNSRIAPGIEVFPPKDFDQQTFDTTGMPFASQATRDYSRGSSPEWLHMQVGDGFERAT

SEQ ID NO: 12888 - DNA, 1287 bp, Glycine max
acttttttcctttatccattttccaagcaaacttttcaaacaaaaaaataaataataaagaaaacaaaacaagaagaaggaaacgcgcaacgcaacacaaaaaaccacactttcaattgcatttctctctctttctcacaatttccactttccgggttttcgattcgatattcgttgttccaatgagcgatcacttggtggtgttcgttgaccgtctcgcgcgccctgtccccgttgatccggtggcgcagacggcgcaggtgccttccgaaccatctccacctccggccgccgtggatgccgacgccgccgggagctccggcacctcaccgtcggaggattgcgacggcgagggcggcgacgaggaggagccgctgatccagatggcagagtgccgcatctgccaggaggaggatggcgtttccaacttggagaccccctgcgcctgtagcggcagtcttaagtatgctcacagaaagtgtgtccagcattggtgtgatgagaaaggagacataacttgtgagatatgtcatcagccatatcaacctgggtatactgcccccccacctcgtcctaatcctgaagaaactaccattgatataggaggtggctggacaatatctggcacacccttggacttgcgtgatcctcgactcttggcaattgcagaggcagaacgtcagttcttggatgctgaatatgatgagtatgctgcttccaacgccagtggagctgcattttgccgctcagctgctttaattttaatggcccttttactcttgcggcatgcactttctgtctcagatggtgataattctgatgatgatccatccaattttttctcccttttcttgcttcgtgccgctggatttctattaccttgctacatcatggcttgggcaatcagtattctgcagcgtcggcgacaaagacaagaggctgcagcactagcagcaacccaagttgctttcgttctacaatctgggcagcgtagaggtttacagtttgcaatagcaccaggatcacccactgtaccccaggaacaagtctaataatttgtatgcttttttatttttattttttatgtatgaatgaatattaagaaggctttgttgaaatgccgtgcatttttactctttactttcgcagctgtaacgttatgtacatgtacatactagggggtggtaaaacgatatagtaagtgaatccattggtatccattcaattcacatctatctatgaatgtaactgaatccatccacactatatagtaagtgatttatatgg

SEQ ID NO: 12889 - protein, 349 aa, Glycine max
FFPLSIFQANFSNKKINNKENKTRRRKRATQHKKPHFQLHFSLFLTISTFRVFDSIFVVPMSDHLVVFVDRLARPVPVDPVAQTAQVPSEPSPPPAAVDADAAGSSGTSPSEDCDGEGGDEEEPLIQMAECRICQEEDGVSNLETPCACSGSLKYAHRKCVQHWCDEKGDITCEICHQPYQPGYTAPPPRPNPEETTIDIGGGWTISGTPLDLRDPRLLAIAEAERQFLDAEYDEYAASNASGAAFCRSAALILMALLLLRHALSVSDGDNSDDDPSNFFSLFLLRAAGFLLPCYIMAWAISILQRRRQRQEAAALAATQVAFVLQSGQRRGLQFAIAPGSPTVPQEQV

SEQ ID NO: 12890 - protein, 289 aa, Glycine max
MSDHLVVFVDRLARPVPVDPVAQTAQVPSEPSPPPAAVDADAAGSSGTSPSEDCDGEGGDEEEPLIQMAECRICQEEDGVSNLETPCACSGSLKYAHRKCVQHWCDEKGDITCEICHQPYQPGYTAPPPRPNPEETTIDIGGGWTISGTPLDLRDPRLLAIAEAERQFLDAEYDEYAASNASGAAFCRSAALILMALLLLRHALSVSDGDNSDDDPSNFFSLFLLRAAGFLLPCYIMAWAISILQRRRQRQEAAALAATQVAFVLQSGQRRGLQFAIAPGSPTVPQEQV

SEQ ID NO: 12891 - protein, 222 aa, Glycine max
MAECRICQEEDGVSNLETPCACSGSLKYAHRKCVQHWCDEKGDITCEICHQPYQPGYTAPPPRPNPEETTIDIGGGWTISGTPLDLRDPRLLAIAEAERQFLDAEYDEYAASNASGAAFCRSAALILMALLLLRHALSVSDGDNSDDDPSNFFSLFLLRAAGFLLPCYIMAWAISILQRRRQRQEAAALAATQVAFVLQSGQRRGLQFAIAPGSPTVPQEQV

SEQ ID NO: 12892 - DNA, 1214 bp, Glycine max
gctaagaaagtcattactcattagttcttatttgacggcaatgctcttattctataaaagatatatggtgtctaaatgttcagcatgaatatatagctaggcaaagaagagcaaaagaaaatcacattacctgtctctgaaatcagattcactttgttcttcatcaatggaaagagaacaactatcccttcacatgaatggtggcaagggacaaaggagttatgcaaacaactcctcactacaaagaacaataatacgtaaaaccagatccatacttgaagaaactataacgaggttgtactgtgatacttttcctaataattgcttaaaagtggcagatttgggttgctctgtaggatcaaacacacttcttgtgacatcaaatattattgacattgttgataacagaagcactcaattgaaccgtgaaccccccaccttccaattttatctcaacgatttatttggaaacgatttcaataccatcttcaagtcactccctggtttctatgaaagattgctagaagataagggtcacaagtttagtcgatgctttattaatgcaacccctggatccttctatgggaggctctttcccagtaattccataaatctttttcactcctcctacagtctacactggctttctcaggatccattattgaggtctagggaggtagcatcacttaacaagggccattgtcacatagttagcacaagccctcccgaggtatacaaggcttaccttaagcagtttcaacaagattttaaattgtttctaaaatcacgttcggaggaacttgtgcctggaggagcaatggtcttattgtttttcggtagagatgaaactcctagaagaacctcttttgaagtaactagcctaatactcaacgacatgctcttggagggtttgattgaagaagaaaaaatggactcctttaacataccagcttataaaccaacggttgaagaaattaggcatgtgattgaggaagaagggtcattctttgttcaacggttggagattttaatctcgccttggtacgaaggcataaatattgaaggtggtgatggtttttttgttgatggaaatgtaagagccgaatacattaccaagaacataagagcagtaatggagcctctcttgtctacaaagtttggtggtgaagttataaatgaactattcatcaggtttaaaaagaaaattgagcaaa

SEQ ID NO: 12893 - protein, 349 aa, Glycine max
MEREQLSLHMNGGKGQRSYANNSSLQRTIIRKTRSILEETITRLYCDTFPNNCLKVADLGCSVGSNTLLVTSNIIDIVDNRSTQLNREPPTFQFYLNDLFGNDFNTIFKSLPGFYERLLEDKGHKFSRCFINATPGSFYGRLFPSNSINLFHSSYSLHWLSQDPLLRSREVASLNKGHCHIVSTSPPEVYKAYLKQFQQDFKLFLKSRSEELVPGGAMVLLFFGRDETPRRTSFEVTSLILNDMLLEGLIEEEKMDSFNIPAYKPTVEEIRHVIEEEGSFFVQRLEILISPWYEGINIEGGDGFFVDGNVRAEYITKNIRAVMEPLLSTKFGGEVINELFIRFKKKIEQ

SEQ ID NO: 12894 - protein, 340 aa, Glycine max
MNGGKGQRSYANNSSLQRTIIRKTRSILEETITRLYCDTFPNNCLKVADLGCSVGSNTLLVTSNIIDIVDNRSTQLNREPPTFQFYLNDLFGNDFNTIFKSLPGFYERLLEDKGHKFSRCFINATPGSFYGRLFPSNSINLFHSSYSLHWLSQDPLLRSREVASLNKGHCHIVSTSPPEVYKAYLKQFQQDFKLFLKSRSEELVPGGAMVLLFFGRDETPRRTSFEVTSLILNDMLLEGLIEEEKMDSFNIPAYKPTVEEIRHVIEEEGSFFVQRLEILISPWYEGINIEGGDGFFVDGNVRAEYITKNIRAVMEPLLSTKFGGEVINELFIRFKKKIEQ

SEQ ID NO: 12895 - DNA, 1805 bp, Glycine max
aaaagaaagaaggagatgcatggcattggcctattgagagtgaaggaacatggtttcccacaataagccttacactgtagccaccctcttctttctcgcattgttccttatctccatcttcttcttcttctccaccagaacaactcttcaccccgctccctccatccactcagatctctacatccacctccagccactttctccgcctccgcccctccaacctctttctccgcctcctcctccttttccgtccccacactcctcctccgccaccactgaaacccaacctgagcctgttggtgacattgaggatgtcgcggacaatgccaccgacgccgaatctgatgcccagcctgtaacggagaatatcgccgaggacgtagcgttgagtttgaaggtgtgcgatttgttcacgggaacgtgggtgaaggatgaaagttacccgatttaccaaccgggttcttgcccttacgtggacgaggcttacgattgcaaagttaacggaagaaccgacactctctactccaattggcgctggaaacctgatgcctgtgatcttcccaggtttaatgccacagacttcttggtgagactgaaaggtaaaagactaatgctggttggagattcgatgaaccggaaccaatttgagtccatcctgtgcctactacgtgaaggcctgcacaataagagcagaatgtatgaggtacacggacacaaaataacaaaaggaagaggctactttgtttttaaatttgaggactataattgcacagtgctatttgtgagatctcatttccttgtgagggaaggagttcgtcttaatggacaagggagatcaaatcctacattgtcaatagatcggattgacaagacatccggtcgttggaagaaggctgatattcttgtcttcaatactggacactggtggactcatggaaaaactgctcgagggataaactactataaagaaggtgattatctatatccaaaatttgatgcagttgaggcatacagaaaggctataaagactaggggaaaatggatcgatgataatatcaatccacgaaaacagattgtctactatcgtggatattctaatgcccatttcagaggtggggactgggactcaggtgggtcatgctacggtgaaactgaaccagcttttaatggctctatcctgaataactatcctttgaaaatgaaggtagtagaggaagtgatccggggaatgaaggttcccgtaaagttattaaatgtcacaaagctgaccaatttccgcaaggatgggcacccatctgtctttggcaagaatacaatgggtggaaggaaagtctctacaaggaagcaggattgcagccattggtgtcttcctggggtccctgatgcatggaatgagctaatttatgccactcttgtttttcaacaaacaaattcaaggaattgacttacacaagttccttctttccaggactttaccttttccgcggcaaagaaggggaaaacaaaacctctggggccttggcttacattaaggtgattgagaacaatgaaaagtgtttttgcccgtggtacccctttgggtattatcgtgagattagttattcgggtaacatggaaaagtgtacttcattgcacataatcaagtgaaaagttagtataaaaattagtgatgctatttgttcattgctaaaatatacagtattttaatgaggttaatctttcgggtattactctaagatgtatttattacatataatcaaactcaacataggaaatagtattgttaattttgcactgttaattcg

SEQ ID NO: 12896 - protein, 464 aa, Glycine max
MVSHNKPYTVATLFFLALFLISIFFFFSTRTTLHPAPSIHSDLYIHLQPLSPPPPLQPLSPPPPPFPSPHSSSATTETQPEPVGDIEDVADNATDAESDAQPVTENIAEDVALSLKVCDLFTGTWVKDESYPIYQPGSCPYVDEAYDCKVNGRTDTLYSNWRWKPDACDLPRFNATDFLVRLKGKRLMLVGDSMNRNQFESILCLLREGLHNKSRMYEVHGHKITKGRGYFVFKFEDYNCTVLFVRSHFLVREGVRLNGQGRSNPTLSIDRIDKTSGRWKKADILVFNTGHWWTHGKTARGINYYKEGDYLYPKFDAVEAYRKAIKTRGKWIDDNINPRKQIVYYRGYSNAHFRGGDWDSGGSCYGETEPAFNGSILNNYPLKMKVVEEVIRGMKVPVKLLNVTKLTNFRKDGHPSVFGKNTMGGRKVSTRKQDCSHWCLPGVPDAWNELIYATLVFQQTNSRN

SEQ ID NO: 12897 - protein, 277 aa, Glycine max
MLVGDSMNRNQFESILCLLREGLHNKSRMYEVHGHKITKGRGYFVFKFEDYNCTVLFVRSHFLVREGVRLNGQGRSNPTLSIDRIDKTSGRWKKADILVFNTGHWWTHGKTARGINYYKEGDYLYPKFDAVEAYRKAIKTRGKWIDDNINPRKQIVYYRGYSNAHFRGGDWDSGGSCYGETEPAFNGSILNNYPLKMKVVEEVIRGMKVPVKLLNVTKLTNFRKDGHPSVFGKNTMGGRKVSTRKQDCSHWCLPGVPDAWNELIYATLVFQQTNSRN

SEQ ID NO: 12898 - protein, 271 aa, Glycine max
MNRNQFESILCLLREGLHNKSRMYEVHGHKITKGRGYFVFKFEDYNCTVLFVRSHFLVREGVRLNGQGRSNPTLSIDRIDKTSGRWKKADILVFNTGHWWTHGKTARGINYYKEGDYLYPKFDAVEAYRKAIKTRGKWIDDNINPRKQIVYYRGYSNAHFRGGDWDSGGSCYGETEPAFNGSILNNYPLKMKVVEEVIRGMKVPVKLLNVTKLTNFRKDGHPSVFGKNTMGGRKVSTRKQDCSHWCLPGVPDAWNELIYATLVFQQTNSRN

SEQ ID NO: 12899 - DNA, 1433 bp, Glycine max
ataataaatagagaaaaagaaaagaaggaattgaacctctgaaacaagaagatgatgggaagtggagatgtgaagctgttgagcttttgggtgagtccatttggtaaaagggttgagtgggctttgaaactgaagggaatagagtatgagtatattgaagaagatatcttcaacaagagcaatctccttctccagttgaacccggttcacaagaaggttccggttcttgttcatgcccacaaaccgattgcagagtcattcatcatccttgaatacattgatgaaacatggaagcagtatccattgttaccttgccatcctcatcaaagagctcttgctcgcttttgggctacttctgttgaacaaaaggtgatttacagagcacggttctttctacgagggattgtgcatgtgagaggtggaagcgaatttggaaacgaagtccattcggtgaaacttgtacccacatgaggcaaccaaattaattacaccgataatttgcataaattacgagaagaacccaccagacacactattaaaagaaggaagtggtgaaacacggaaggaagatgggaagcgaagaagtgaagctgttgagcttttttgcgagtccatttggcaaaagggttgaatgggcattgaaactgaagggtgtggagtatgagtacatagaacaagatatcttcaacaagactagtctccttctccagttgaacccggttcacaagaaggttccggttcttgttcatgcccacaaacccatcgctgagtcattcgtcatcgttgaatacgttgatgaaacatggaagcagtatccactgttgcctcgagacccttatcaaagagcacttgctcgattttgggctaatttcgctgagcaaaagcttttagatgcagcatggattggtatgtatagcagcggggatgagcagcaaaacgctgtgaaagtagccagagaagcaatagagaagatagaagaagagattaaggggaagaaatattttggaggggagaatataggataccttgacattgcacttggatggatctcttactggcttcctatttgggaggaagttggatcgatacagataattgacccattgaaatttccagccatcactgcatggatcaccaattttcttagccatcctgtgatcaaggacaacttgcccccaagagacaagatgcttgtttacttccacagtcgcagaactgcgctttcttcaacttttcagggctgattcaagttttaatttggatctatatgtttcttatggtccatgtgatataataagaatatcagggaatcatactagctaagtctctgtgctattattttctgagattgtggattttatttagactttttcttattaggtagagaagtttgtttggttaagttttcaataataaattatgtcttttttatt

SEQ ID NO: 12900 - protein, 224 aa, Glycine max
MGSEEVKLLSFFASPFGKRVEWALKLKGVEYEYIEQDIFNKTSLLLQLNPVHKKVPVLVHAHKPIAESFVIVEYVDETWKQYPLLPRDPYQRALARFWANFAEQKLLDAAWIGMYSSGDEQQNAVKVAREAIEKIEEEIKGKKYFGGENIGYLDIALGWISYWLPIWEEVGSIQIIDPLKFPAITAWITNFLSHPVIKDNLPPRDKMLVYFHSRRTALSSTFQG

SEQ ID NO: 12901 - protein, 139 aa, Glycine max
MMGSGDVKLLSFWVSPFGKRVEWALKLKGIEYEYIEEDIFNKSNLLLQLNPVHKKVPVLVHAHKPIAESFIILEYIDETWKQYPLLPCHPHQRALARFWATSVEQKVIYRARFFLRGIVHVRGGSEFGNEVHSVKLVPT

SEQ ID NO: 12902 - protein, 138 aa, Glycine max
MGSGDVKLLSFWVSPFGKRVEWALKLKGIEYEYIEEDIFNKSNLLLQLNPVHKKVPVLVHAHKPIAESFIILEYIDETWKQYPLLPCHPHQRALARFWATSVEQKVIYRARFFLRGIVHVRGGSEFGNEVHSVKLVPT

SEQ ID NO: 12903 - DNA, 1420 bp, Glycine max
  misc_feature (1209)..(1209): n is a, c, g, or t
  misc_feature (1236)..(1236): n is a, c, g, or t
  misc_feature (1238)..(1238): n is a, c, g, or t
accacacttcacttttcttcatagcactcaaaaaacaacaactcatctcatcattattccctttctcactcagcacattctaaacagtagcaccatcaccaataataatggcatcatcctcatcaaccgttgctttgagaaccatctcctctttctctctgaaacctgccaccacaacaagatcattactcaacactagtacttcatccaccataaccctcttaccctttacatcagcaaactcatttctctccaaaaccctcaaactcaacacctcttccccacactctcacctttcactacccctcaacaagtctttcacttgtagaagccaggctgaaccatcttctgactcagccaaagtccaagaactgagtgtgtatgagatcaatgagagagatcgtggaagccctgcttatcttagattgagccagaaaactgtcaattcccttggtgacctagtccccttcagcaacaagttgtactctggatgtttgcaaaagagggtagggataacagctggaatttgtgtgttgatccaaaacaaatcagagaagaagggagatatgtatgaggcaatctacagcttctactttggggactatggtcacatttcagtgcagggttcatacctgacctatgaagacacttatcttgctgtgactggtggatctggcatctttgaaggggcttatggtcaagtcaagctgcatcaaattgtgttcccctttaaattattctacacattttatcttaagggcatcaaggacttgcctcaggagcttctttccaagcctgttgagcccagcccatctgttgagcctagcccatctgccaaggcctgtgagccacatgctgttattgctggcttcactgactaaacaacaatgactcaatgaggatccacattttttttgtttcttttttaaggaaaaaattcggttacagtttcttaggtgttgttctctagtcagaattggagttttatttcgacaatttacgtaataaaagttttcattaaaggtttatacagattgtcgaagtgaggcttaattttcatagaagaacagcacaaattaaaaactgtttaagttttctccttaatttttattttttttaattctcttcattgttggcttggtttggagacacttgcaacaagttcacaatttaaccacctgttacttgtattgaaatttattaatgtantaattgtgggtcaagatgtcaggtagnantagtagagttttttatgttgttgaataatgaaagtgacaagtgaggttgggttttgcagtgatggagatgggaatttatagaagccattactgtattctcaggggtgttaggtcatatattattcaagaaagtgttgcactagcaattattgttgatctactgaatcacgtggtttgatttt

SEQ ID NO: 12904 - protein, 257 aa, Glycine max
MASSSSTVALRTISSFSLKPATTTRSLLNTSTSSTITLLPFTSANSFLSKTLKLNTSSPHSHLSLPLNKSFTCRSQAEPSSDSAKVQELSVYEINERDRGSPAYLRLSQKTVNSLGDLVPFSNKLYSGCLQKRVGITAGICVLIQNKSEKKGDMYEAIYSFYFGDYGHISVQGSYLTYEDTYLAVTGGSGIFEGAYGQVKLHQIVFPFKLFYTFYLKGIKDLPQELLSKPVEPSPSVEPSPSAKACEPHAVIAGFTD

SEQ ID NO: 12905 - DNA, 818 bp, Glycine max
  misc_feature (377)..(377): n is a, c, g, or t
  misc_feature (379)..(379): n is a, c, g, or t
  misc_feature (532)..(532): n is a, c, g, or t
gaagcagaaaaacagaaaaagaaaacaattatcagcaataataaaattataggcacgattggtggcatgtccaattctcaacagaatgagcttcattattcaaccgccaacggggacgagaggtcaaacccttgtttagccaacacgcgctgcagcttctgctttccctgttgcttcggttcccgtcgcgactcggccaccctcgggttcgggtggtgggagcgcgtgcgagccacgtcgtcatggtccgagtcgcgctccgaggcgcaaccggtgaccgggagtcccggtgggcggtggtggtctggcggcgtgagggcctttatgaaggtgcgcgagtggtcggagctcgcggcggggcctcggtggaagacttncnatccggcggttcagccggagccggagtggcgggtcgcggcacgcggcggggaagtaccagtacgaccccttgagttacgctttgaacttcgacgaggggcataacggggatttcggcgatgacggctacgacgggttacggaatttctccacncgttacgccgcgcctcctccgattaagtccgtttcctcggattcgaatcaagacgtcgccgttttgggataagactaaggaaaaaaaaaaaaaaaaaagaggaattgcgctgattacatatgccaggtcatgtggtgtcgattttgggaattttgcttctgctagcttacaagtgtgcagttactgtgtattaattttattatattactatcaatcaatagttataggattttaatttcttactattgtatattccttccttggcattacagtattttttttagtt

SEQ ID NO: 12906 - protein, 160 aa, Glycine max
  misc_feature (126)..(127): Xaa can be any naturally occurring amino acid
EAEKQKKKTIISNNKIIGTIGGMSNSQQNELHYSTANGDERSNPCLANTRCSFCFPCCFGSRRDSATLGFGWWERVRATSSWSESRSEAQPVTGSPGGRWWSGGVRAFMKVREWSELAAGPRWKTXXPAVQPEPEWRVAARGGEVPVRPLELRFELRRGA

SEQ ID NO: 12907 - protein, 138 aa, Glycine max
  misc_feature (104)..(105): Xaa can be any naturally occurring amino acid
MSNSQQNELHYSTANGDERSNPCLANTRCSFCFPCCFGSRRDSATLGFGWWERVRATSSWSESRSEAQPVTGSPGGRWWSGGVRAFMKVREWSELAAGPRWKTXXPAVQPEPEWRVAARGGEVPVRPLELRFELRRGA

SEQ ID NO: 12908 - protein, 89 aa, Glycine max
  misc_feature (12)..(12): Xaa can be any naturally occurring amino acid
MTATTGYGISPXVTPRLLRLSPFPRIRIKTSPFWDKTKEKKKKKRGIALITYARSCGVDFGNFASASLQVCSYCVLILLYYYQSIVIGF

SEQ ID NO: 12909 - DNA, 1584 bp, Glycine max
  misc_feature (972)..(972): n is a, c, g, or t
  misc_feature (1573)..(1573): n is a, c, g, or t
attctttcttcactttcttcccttcttcaaccccaactcatgcatgtccctctctatcttctcccaatgaaatgaaccatcaaaaaacccaccaccccaattgcaccaccatcaaccaccatgtcctcctagccaccaaagtccgcaaacccaaaaaccctcatagagttagctagaaacaccccaaaagattcattttgttttaaagcgcaacttatggcatccattgccaccttcttcaacaagttcctctacttctttatcctcttagtccacctcggctgcttcatcttcaccaccgccgggaaacaatcgccgccgtcaaagaaacgcaaaacctcacctttatcccaaccctcctccccttcccacaccaaattcaaaacccacaaagccctctcctcttcttggcatttcatcaaacatctcttctccaccaagtcctgcaaaaccccaaacaccgccaccacccaatcctcccctcaatccaccgccaccaccactaccaccaccgcctccgccgccgcagcaagttctttaatttccttatcgcaacccgacccggataggaatcaacccgtttcgtgccccgaatccggcatctccaccgacaccaacctcttcttccctctccgcaacgacatcttcccctgcactgcgtgcggcgagattttccagaagccccacctcttagaagcccatcaaaccctcaaacacgcggtttcggatctacccggatccgacccgggtcacaacatcgtccaaatcatcttcaaatcgggttggcccgaatccaagccattcccaaccataacccgcattctcaagatccacaacagccccaagatcctctccaaattcgaagagtaccgcgaggccgtgaagtccaaggcggcgcgtcacggcgcccatacgcgccgccgcgacgagcgctgcatcgccgacggaaacgagctcatgcgcttccactgntcgacctttttatgcgacttgggacacaacggggattccgcgatttgttcgcagcagttttgtaacatttgcggaattattaagtccgggttttccccgaaactcgacgggatcgccacgctgtccactagttggcgggcacacgtggcgatccccgaggacatagagcgggagttccgcttcatgaatgtgaagcgggcaatgcttgtttgtcgggtgattgcgggtcgggtcggatcggattcggatgaggtggaaaaagaggacggagggtttgattcggtgatggcgagtggagagagtggggtctacacccgccttgatgaggaggagcttttggtgtttaatcctagggctgtgcttccttgctttgtgattgtgtatagtgtgtgatgaatttgacggttgtgatgatgatgtgagcttcatgatggcttgtaattttaattttgttaagtattttgtagctatgagatgcttctttttgcataatccgggttcttggacccttgtgcacgaaattatgtgcattaaattgacacattatagtatagaaactgaatgtgctgtatgtaagactgttttttagataaatttctgnttaactgtgtg

SEQ ID NO: 12910 - protein, 382 aa, Glycine max
  misc_feature (252)..(252): Xaa can be any naturally occurring amino acid
MASIATFFNKFLYFFILLVHLGCFIFTTAGKQSPPSKKRKTSPLSQPSSPSHTKFKTHKALSSSWHFIKHLFSTKSCKTPNTATTQSSPQSTATTTTTTASAAAASSLISLSQPDPDRNQPVSCPESGISTDTNLFFPLRNDIFPCTACGEIFQKPHLLEAHQTLKHAVSDLPGSDPGHNIVQIIFKSGWPESKPFPTITRILKIHNSPKILSKFEEYREAVKSKAARHGAHTRRRDERCIADGNELMRFHXSTFLCDLGHNGDSAICSQQFCNICGIIKSGFSPKLDGIATLSTSWRAHVAIPEDIEREFRFMNVKRAMLVCRVIAGRVGSDSDEVEKEDGGFDSVMASGESGVYTRLDEEELLVFNPRAVLPCFVIVYSV

SEQ ID NO: 12911 - DNA, 1172 bp, Glycine max
  misc_feature (814)..(814): n is a, c, g, or t
gttttgcgagagaatggagttcctggacgaggacgcaaggccaaggttcgtgttccagtccggtgcagctgcgaggagcagcgagccaccgcacccgatccacaaacctaccaagccattcctcttcgccaccgtttccctctcctcactcttcctcactctctccctcttcttcctcgaagcggagcccttcaaatcgctcctcttctggctcgcactctctctcctcgttggccccttcgcccctccctccatcactggcggcgacgtccgcgtcggccgcggcgaggtcgtcaacttccccgatccggagcccgagcccgacgaggacgccagtaggaagtcctcacaacggcgatccagacagcggagggccgaggaagcctccgccgccgtaggcccggtggtttccgtcagcgcggcggagaagagaaaagaatcttctggaatcgagaagcgtgcgacggtggtggaggaggagaaggggtggagcgaggaggatgtggaggtgctgaagaagcagatggtgaagaatccggtggggaagccagggaggtgggaggcgatagcggcggcgttcggggggaggcacggagtggacagtgtgataaagaaagcgaaggaattgggggagaagagagtggatgattcggagtcgtatgcgttgtttttgaagaagaggaaagcgttggataagagggttgtggaggagaatgcggatgagggtgagaaagttgttgataatggttggagttctgctgaggatatcgcgttgctgaatgctttgaaagcgtttcctaaggaagtttccatnaggtgggaaaaggttgctgctgcggttcccgggagatccaaggctgcttgcatgaaaagatttcgccgaattgaagaaagggtttcggactgcaaaagctgcagccgagtgagcactgaacactctcaaagggatcatttttttgtttgattttgatatgttaaggtaaatggattcgtcgacttgtaacttaaacataattttttgtttctagctattttgagttatgatttatgttggcctccttctaggtgacactcaaattgtggttgtgtaactttataaaatgcaatgaaccgatcgagattgtgtattcgggatctcttatagtgcgaataaatatttaatatttcgactt

SEQ ID NO: 12912 - protein, 320 aa, Glycine max
  misc_feature (271)..(271): Xaa can be any naturally occurring amino acid
FCERMEFLDEDARPRFVFQSGAAARSSEPPHPIHKPTKPFLFATVSLSSLFLTLSLFFLEAEPFKSLLFWLALSLLVGPFAPPSITGGDVRVGRGEVVNFPDPEPEPDEDASRKSSQRRSRQRRAEEASAAVGPVVSVSAAEKRKESSGIEKRATVVEEEKGWSEEDVEVLKKQMVKNPVGKPGRWEAIAAAFGGRHGVDSVIKKAKELGEKRVDDSESYALFLKKRKALDKRVVEENADEGEKVVDNGWSSAEDIALLNALKAFPKEVSXRWEKVAAAVPGRSKAACMKRFRRIEERVSDCKSCSRVSTEHSQRDHFFV

SEQ ID NO: 12913 - protein, 316 aa, Glycine max
  misc_feature (267)..(267): Xaa can be any naturally occurring amino acid
MEFLDEDARPRFVFQSGAAARSSEPPHPIHKPTKPFLFATVSLSSLFLTLSLFFLEAEPFKSLLFWLALSLLVGPFAPPSITGGDVRVGRGEVVNFPDPEPEPDEDASRKSSQRRSRQRRAEEASAAVGPVVSVSAAEKRKESSGIEKRATVVEEEKGWSEEDVEVLKKQMVKNPVGKPGRWEAIAAAFGGRHGVDSVIKKAKELGEKRVDDSESYALFLKKRKALDKRVVEENADEGEKVVDNGWSSAEDIALLNALKAFPKEVSXRWEKVAAAVPGRSKAACMKRFRRIEERVSDCKSCSRVSTEHSQRDHFFV

SEQ ID NO: 12914 - DNA, 1923 bp, Glycine max
  misc_feature (1864)..(1864): n is a, c, g, or t
  misc_feature (1884)..(1884): n is a, c, g, or t
  misc_feature (1917)..(1917): n is a, c, g, or t
aacctcaagataataataaagctaaatcatagtagtgaggagtgactagtacaaacagaatccaaagcttttttttttcttcttcttcttcttctttctaacgccatgtctgggagccaccaagagcagccactgttagagaactcgttcatagaagaagacgagccgcaagaaacagcttatgattcgtcggagaagatagtggtggtcggagtcgacgagttcgatgacgaggagaattgggggagagtgccccgattctcgtggaagaagctatggctgttcaccgggccgggctttctgatgagcatagcgtttctggaccctggaaacttagagggggaccttcaggcgggtgccattgcagggtactcattgttgtggcttctgatgtgggccacagcaatgggcctcctgatccagctcctctcggcacggctcggcgtggccacagggaagcacctcgccgagctctgccgagaggagtatcctccgtgggcccggatagtgctctggatcatggcggaactcgctctcattggctccgatattcaggaggttattgggagcgctattgcaatcaggattcttagtcatggggttgtgcccctttgggctggggttgtcattactgctcttgattgttttatttttctctttcttgagaactatggtgtgaggactttggaagctttttttgctattctcattggtgtgatggcaatctcgttcgcatggatgtttggtgaagccaagcccagtggcaaggaacttcttcttggagttttgattccaaaactcagctccaaaactatacagcaggctgttggagttgtggggtgccttattatgcctcacaatgtgttcttgcactctgctcttgttcagtcaaggcaggttgaccgcagcaagaaaggccgagttcaagaagctcttaattattactcgatagagtccacccttgcccttgtagtttcctttattataaatatttttgtaacaacagtgtttgctaagggattttatggctctgaacttgcaaacagcataggtcttgtaaatgcaggacagtatctagaggagacatatgggggtggactatttccaattttatacatatggggtattggattattagcagcaggccaaagtagcactattactgggacttatgcaggacaattcatcatgggaggttttctaaatttaaggttaaagaagtggatgagggcgttgattacccgaagttgtgcaataattccaactatgatagttgctcttttattcgatacctcggaggaatcgttagatgttttgaatgagtggcttaatgttcttcagtcagtccagatcccctttgcacttattcccttgctttgtctggtgtcaaaggagcagataatgggcactttcagaattggtgctgtcctcaagactacttcatggctcgtggctgctctggtgatagtgattaatggctatcttttgacggaattcttttcctctgaagtgaatggaccaatgattggcactgtagtgggtgtaataactgctgcatatgttgccttcgtagtataccttatttggcaagccatcacctatttaccttggcaaagtgtaacacaaccaaagacaattgctcattcagagggttgaggttgagtgatcaatctttaaaatcgcggaataggaagtgccatccatttttaagtatgctcatgcttgtttgttactcgtgtggcaagttgatgcaataggtggtggcaccttattctttgcctgtaattataaactatgtcagagtagattttagctctgtattagtactttcaaattttgttgtcaaaatgccttggcaacactntaattagttgagacaccttngaagctgtagtgtgcaaaccagcaatgtagttntttttc

SEQ ID NO: 12915 - protein, 516 aa, Glycine max
MSGSHQEQPLLENSFIEEDEPQETAYDSSEKIVVVGVDEFDDEENWGRVPRFSWKKLWLFTGPGFLMSIAFLDPGNLEGDLQAGAIAGYSLLWLLMWATAMGLLIQLLSARLGVATGKHLAELCREEYPPWARIVLWIMAELALIGSDIQEVIGSAIAIRILSHGVVPLWAGVVITALDCFIFLFLENYGVRTLEAFFAILIGVMAISFAWMFGEAKPSGKELLLGVLIPKLSSKTIQQAVGVVGCLIMPHNVFLHSALVQSRQVDRSKKGRVQEALNYYSIESTLALVVSFIINIFVTTVFAKGFYGSELANSIGLVNAGQYLEETYGGGLFPILYIWGIGLLAAGQSSTITGTYAGQFIMGGFLNLRLKKWMRALITRSCAIIPTMIVALLFDTSEESLDVLNEWLNVLQSVQIPFALIPLLCLVSKEQIMGTFRIGAVLKTTSWLVAALVIVINGYLLTEFFSSEVNGPMIGTVVGVITAAYVAFVVYLIWQAITYLPWQSVTQPKTIAHSEG

SEQ ID NO: 12916 - protein, 450 aa, Glycine max
MSIAFLDPGNLEGDLQAGAIAGYSLLWLLMWATAMGLLIQLLSARLGVATGKHLAELCREEYPPWARIVLWIMAELALIGSDIQEVIGSAIAIRILSHGVVPLWAGVVITALDCFIFLFLENYGVRTLEAFFAILIGVMAISFAWMFGEAKPSGKELLLGVLIPKLSSKTIQQAVGVVGCLIMPHNVFLHSALVQSRQVDRSKKGRVQEALNYYSIESTLALVVSFIINIFVTTVFAKGFYGSELANSIGLVNAGQYLEETYGGGLFPILYIWGIGLLAAGQSSTITGTYAGQFIMGGFLNLRLKKWMRALITRSCAIIPTMIVALLFDTSEESLDVLNEWLNVLQSVQIPFALIPLLCLVSKEQIMGTFRIGAVLKTTSWLVAALVIVINGYLLTEFFSSEVNGPMIGTVVGVITAAYVAFVVYLIWQAITYLPWQSVTQPKTIAHSEG

SEQ ID NO: 12917 - protein, 421 aa, Glycine max
MWATAMGLLIQLLSARLGVATGKHLAELCREEYPPWARIVLWIMAELALIGSDIQEVIGSAIAIRILSHGVVPLWAGVVITALDCFIFLFLENYGVRTLEAFFAILIGVMAISFAWMFGEAKPSGKELLLGVLIPKLSSKTIQQAVGVVGCLIMPHNVFLHSALVQSRQVDRSKKGRVQEALNYYSIESTLALVVSFIINIFVTTVFAKGFYGSELANSIGLVNAGQYLEETYGGGLFPILYIWGIGLLAAGQSSTITGTYAGQFIMGGFLNLRLKKWMRALITRSCAIIPTMIVALLFDTSEESLDVLNEWLNVLQSVQIPFALIPLLCLVSKEQIMGTFRIGAVLKTTSWLVAALVIVINGYLLTEFFSSEVNGPMIGTVVGVITAAYVAFVVYLIWQAITYLPWQSVTQPKTIAHSEG

SEQ ID NO: 12918 - DNA, 1656 bp, Glycine max
acttcttgttctgtccttatgttcttgttctagttcttctaccctcttcttcactcttgttccatcactgctttgcagagcttgctatttctctttgaagaagaggggcacagacccatgaagagtctcgtagctgtgcttttagttatagtattaagcactgctctggaaagcaatggagaagatgatcatgaacgatgtaaacaggaagcagtggatcctaggcctcacagcgtgtcaatcttagagttcggagcagttggagacgggaaaacgctgaacacagttgcattccaaaatgcagttttttatgccaagtcatttgctgacaaaggtggggctaaactatatgttccatctggcaagtggcttactggaagttttaaccttaccagccacctcactctcttccttgagcgaggcgcaaccatcattgcatcacaggattatgcacactggactgcaatggaccccctaccctcctatggtcgaggaattgatgttcctagtgggagatatcgcagtttaatttatggacagaacttaagtgatgtggtgattacaggtgataatgcaattattgatgggcagggttctgtctggtgggacctaatcggtactcattccttaaattacagcagaccacatattatagaacttgttggttctgataatatcacaatctcaaatttgacatttttaaactctcctgcctggagcatccatccagtatattgcagtaacgttcaaatccagaagataacagttcatgcaccaactgagttcccttacacaagcggtatagttccagattcttctgagcatgtttgcatttacaacagcaatattagcactggtcatgatgcaattgtgctgaagagtggttgggatcaatatggagttgcctatggcaaaccaacctcaaaggtccacatccggggtgtttatctacaatcttcatctggcgctggcctagcatttgggagtgagatgtctggaggcatatctgatataattgcagagcagctccatattaccaactcaactattggcattgaactgaagacaactaggggtagaggtggttatatgaaaaacatcttcatttctgacgcaaaattggaaaatatttacttgggtatcagcatgacgggaagctctggctcccatccagatgacaagtacgatcctaatgcagttccggatgttggtaatgttacttttgagaatgtgattggtacaaatattgctattgctgggaatttttcaggaatagttgattcgcctttcactcctatctgtcttttgaacgcgaccttttcttccagttctgagtcatcatctccttcatggttttgttctgacataatgggaatctccgaggaagtgtttcctgagccatgtcctgatctgcagaacacgtattcaaacttttcctcttgcttttcttccctacatccgtcgtctagttatgtctcaagcgcatgagatcgccatctctaagaatctagtcatttctttgattcaacctgtacatgagacacaaaattcatattccatcaggaacttcattacaattttccaataaaaggaaattcttgatgtaaagatgttctttctcttcaacatttcaatgaaccttcctcttgtctgtgc

SEQ ID NO: 12919 - protein, 456 aa, Glycine max
MKSLVAVLLVIVLSTALESNGEDDHERCKQEAVDPRPHSVSILEFGAVGDGKTLNTVAFQNAVFYAKSFADKGGAKLYVPSGKWLTGSFNLTSHLTLFLERGATIIASQDYAHWTAMDPLPSYGRGIDVPSGRYRSLIYGQNLSDVVITGDNAIIDGQGSVWWDLIGTHSLNYSRPHIIELVGSDNITISNLTFLNSPAWSIHPVYCSNVQIQKITVHAPTEFPYTSGIVPDSSEHVCIYNSNISTGHDAIVLKSGWDQYGVAYGKPTSKVHIRGVYLQSSSGAGLAFGSEMSGGISDIIAEQLHITNSTIGIELKTTRGRGGYMKNIFISDAKLENIYLGISMTGSSGSHPDDKYDPNAVPDVGNVTFENVIGTNIAIAGNFSGIVDSPFTPICLLNATFSSSSESSSPSWFCSDIMGISEEVFPEPCPDLQNTYSNFSSCFSSLHPSSSYVSSA

SEQ ID NO: 12920 - protein, 340 aa, Glycine max
MDPLPSYGRGIDVPSGRYRSLIYGQNLSDVVITGDNAIIDGQGSVWWDLIGTHSLNYSRPHIIELVGSDNITISNLTFLNSPAWSIHPVYCSNVQIQKITVHAPTEFPYTSGIVPDSSEHVCIYNSNISTGHDAIVLKSGWDQYGVAYGKPTSKVHIRGVYLQSSSGAGLAFGSEMSGGISDIIAEQLHITNSTIGIELKTTRGRGGYMKNIFISDAKLENIYLGISMTGSSGSHPDDKYDPNAVPDVGNVTFENVIGTNIAIAGNFSGIVDSPFTPICLLNATFSSSSESSSPSWFCSDIMGISEEVFPEPCPDLQNTYSNFSSCFSSLHPSSSYVSSA

SEQ ID NO: 12921 - DNA, 1449 bp, Glycine max
ggacagactcctttttctcaaacaaacgacgactttcctttcctgctgcgttcattccaaattccaaacccaccataatatctagcttcttgtgaaggctgttagtttgatttagaagttgatattgataatttgctgtgatgggtggccaaaggagtggttatggtaagcgtccccactctcaatctgaccatgataatgggccaaataaaaggaggaatcatggtgatgacagagagcagtttgtgattgatttggaggatactgtgtatcgttacgtgtgcccgggtcgaaagattggcagtgttattggtaggggaggtgagattgttaagcagctgagggtggagactaaggctaagattaggattggtgagacggtgccggggtgcgaagagcgtgtcgttactatttatagtcccagtgatgagactaatgctgttgagggtggtggcaactatgtgtctccggctcaggatgctttgtttaaggtgcatgacagagtggttgccgaggactttcacggtgaccaggatgatgatggaggccaacaagtgactgctaagctgctagtgccatctgatcagataggttgtgttattggaaaaggtgggtcaatagttcagaacatacgtagtgaaacgggggcccagattcggatactgaaggatgatcatttacctttgtgcgctttgagctctgatgaacttgtgcagatgttggcttatatgttttgggttctgggttataaacttaacgaggctcatacactacttcagagcaaaaggtcgtgctttccaaaactggatgccattaaaagtgcaacagctgatattcttacaggcctcagtaagaagtctgtcactttgtcatgggaagacaaaaattgctctaccgtggaaatttcaggacttgatattggatgggggcagagaatacccctaaattttgatgacaaagagggtttgtggtttctcaagagggaattgcctgaaggactctacgagtacaagtacattgttgatggggaatggacatgcaacagcgatgagcttataacctctcccaacaaagatggccatgtcaacaattttattcaagtccttgatgatacaagcagtgttcgtgcctctcttcggaagagattgacggctgatgatcctgatctcacaacagatgaacaactcagaataaaggagtttcttgaagcttgtcctgatgaggattagtgaaccatcaattcacgtggttgttgatatgaaaaatactagatgcgcgcatacatgttacctaataagattaatctaaaccttacaatatgttgggttcctgcggtttattgagttccatagtaatcaaatgtcttggaaattatttaaatagcaccatgaccttcaaatttcaatgtaccatgaaatagaatgtggctataaaatgagttttacattt

SEQ ID NO: 12922 - protein, 362 aa, Glycine max
MGGQRSGYGKRPHSQSDHDNGPNKRRNHGDDREQFVIDLEDTVYRYVCPGRKIGSVIGRGGEIVKQLRVETKAKIRIGETVPGCEERVVTIYSPSDETNAVEGGGNYVSPAQDALFKVHDRVVAEDFHGDQDDDGGQQVTAKLLVPSDQIGCVIGKGGSIVQNIRSETGAQIRILKDDHLPLCALSSDELVQMLAYMFWVLGYKLNEAHTLLQSKRSCFPKLDAIKSATADILTGLSKKSVTLSWEDKNCSTVEISGLDIGWGQRIPLNFDDKEGLWFLKRELPEGLYEYKYIVDGEWTCNSDELITSPNKDGHVNNFIQVLDDTSSVRASLRKRLTADDPDLTTDEQLRIKEFLEACPDED

SEQ ID NO: 12923 - DNA, 425 bp, Glycine max
tcagtcaagttcagagtaagctcgaggtccatttagctgctcaccgaatcaaggatgagctgcgccgccccaaaagcccccgccggagaggagaagaagacgtcatggccggaggtagtgggaaagtccatcgaggaggccaaggagatcatccttaaggacatgcctaacgccgacatcgatgtccttcctgctggctcggcgatgaccctcgacttcaggaccaaccgtgtccgcattatcgttgacactgtcgcgaccaccccttccattggttagcaagctttgcgagcgagatacaaaatggatgcacttatgcattctgatgaataagtagtttcaataatcatggatgaataaatacacgcagatcaatggcgtgtgtcgatgtacttatggtgcaatggacttgactagttattttt

SEQ ID NO: 12924 - protein, 74 aa, Glycine max
MSCAAPKAPAGEEKKTSWPEVVGKSIEEAKEIILKDMPNADIDVLPAGSAMTLDFRTNRVRIIVDTVATTPSIG

SEQ ID NO: 12925 - protein, 51 aa, Glycine max
SQVQSKLEVHLAAHRIKDELRRPKSPRRRGEEDVMAGGSGKVHRGGQGDHP

SEQ ID NO: 12926 - protein, 38 aa, Glycine max
MPNADIDVLPAGSAMTLDFRTNRVRIIVDTVATTPSIG

SEQ ID NO: 12927 - DNA, 775 bp, Glycine max
ttagcctcttccctgaatcctcctctgcctccgtgcaaagatttcaagactcatcaaacagctggggcaacctgagacacactcgctcatccaacaaaacctcatggccaacgtggaaatcctcgttctacttgttgcagcggcattattaatgccattgcgacacaccacagaagctgcagagcatgttgtgggtggttctgccggttggattattccttcccaaggagacacctccttatatacctcctttgcagctaataacactttcagactaaacgacatactcgtgttcaacttcgcaacaggatttcacaacgtagtcaccctgtcaaagaaacactacgacagttgcaacgtgagtgaagtaatgcaatcattcgacacagcgccggcgagaatcattctgaaccgcacgggcgagttctatttcgcatgcgcgttctcgagtcactgctccctcggccaaaagctgagtattcatgtgactgcagggtcgtcttcccttgctccattatccccacctccacctgcgtcacgtgcagccatgccccttgttgctgtcacaatccctgttcttttcattgcagttgccacaaatgtcttgttctagaattatgtatgtggtctcggtctattttgggacttggttatttacttgtatttgttggatcaagggttatgttgtttgaataagttattattattattatttattttccagctgcactggatttgtgtttttgtgttgtattatgtatgagaattgtagatg

SEQ ID NO: 12928 - protein, 169 aa, Glycine max
MANVEILVLLVAAALLMPLRHTTEAAEHVVGGSAGWIIPSQGDTSLYTSFAANNTFRLNDILVFNFATGFHNVVTLSKKHYDSCNVSEVMQSFDTAPARIILNRTGEFYFACAFSSHCSLGQKLSIHVTAGSSSLAPLSPPPPASRAAMPLVAVTIPVLFIAVATNVLF

SEQ ID NO: 12929 - protein, 153 aa, Glycine max
MPLRHTTEAAEHVVGGSAGWIIPSQGDTSLYTSFAANNTFRLNDILVFNFATGFHNVVTLSKKHYDSCNVSEVMQSFDTAPARIILNRTGEFYFACAFSSHCSLGQKLSIHVTAGSSSLAPLSPPPPASRAAMPLVAVTIPVLFIAVATNVLF

SEQ ID NO: 12930 - protein, 86 aa, Glycine max
MRVLESLLPRPKAEYSCDCRVVFPCSIIPTSTCVTCSHAPCCCHNPCSFHCSCHKCLVLELCMWSRSILGLGYLLVFVGSRVMLFE

SEQ ID NO: 12931 - DNA, 1110 bp, Glycine max
  misc_feature (1011)..(1011): n is a, c, g, or t
aaaagatatattgagttgacccaccccagcaagtagtccgaaacgtatactcaacttgccccactttcatctttaaaatcctccccacacagtccattttctgaccagccattaattcctcatctatggacttaagtggcatatctaaacctccaaaattcatttgaatccttcttttttctaattaaaaatgaagttttttaatctcttgaaaagcagacatgtcagatcctgctcctctccttcatcatgggcctggccatcctgccaccaacccaaaaccctctctttcagagtcaccgccaccaataccaacaataacaaaaacaacgatgatgatgacaacaacatgagagacattaacttagcgttagtgtcacaaactccagaatcgttcttcaccgagtcaccagactcggcgagcttctcgacaacctcggagttgtcccgtggcgtggaccccatcgagacggtgattcgcggcctgcgttcggatcgactcttcttcgatcgggacgatgcaagcttcatgttagagggcaaaccgacgacgaccagccacctggagccgttcaaaaacagcgtcgttttgacgatggactcggaggaccctcacgtggatttccgcaagtccatggaggagatggtggagactctcggcgtcgaagactgggagagtctcgaggaccttctgtgctggtacctgcaggccaacgccaagagcaaccatgagtacatcattggcgctttcgtcgatttgttgttctatctcgctgttccaaattcaccttgctcacaagactttgaacattctcattctcgtccttcttctcctttatcgttttatagttcttcttcttcttcttctccctcatcttcatgcagcactcgctgtaatataaaaggtgaagtggaagaggaagaggaggaggttggtgcttgtagttcttctttttctttagcgcagggtaaggaggagattacacctgaagatgaagttgcttcatcttntaacaactgattttaatggtagtggactgaattgtatgtaaacaattggcacaggaaaagagtataattagtgacatcaaaattttaatttttgttgcg

SEQ ID NO: 12932 - protein, 276 aa, Glycine max
  misc_feature (274)..(274): Xaa can be any naturally occurring amino acid
MKFFNLLKSRHVRSCSSPSSWAWPSCHQPKTLSFRVTATNTNNNKNNDDDDNNMRDINLALVSQTPESFFTESPDSASFSTTSELSRGVDPIETVIRGLRSDRLFFDRDDASFMLEGKPTTTSHLEPFKNSVVLTMDSEDPHVDFRKSMEEMVETLGVEDWESLEDLLCWYLQANAKSNHEYIIGAFVDLLFYLAVPNSPCSQDFEHSHSRPSSPLSFYSSSSSSSPSSSCSTRCNIKGEVEEEEEEVGACSSSFSLAQGKEEITPEDEVASSXNN

SEQ ID NO: 12933 - protein, 223 aa, Glycine max
  misc_feature (221)..(221): Xaa can be any naturally occurring amino acid
MRDINLALVSQTPESFFTESPDSASFSTTSELSRGVDPIETVIRGLRSDRLFFDRDDASFMLEGKPTTTSHLEPFKNSVVLTMDSEDPHVDFRKSMEEMVETLGVEDWESLEDLLCWYLQANAKSNHEYIIGAFVDLLFYLAVPNSPCSQDFEHSHSRPSSPLSFYSSSSSSSPSSSCSTRCNIKGEVEEEEEEVGACSSSFSLAQGKEEITPEDEVASSXNN

SEQ ID NO: 12934 - protein, 163 aa, Glycine max
  misc_feature (161)..(161): Xaa can be any naturally occurring amino acid
MLEGKPTTTSHLEPFKNSVVLTMDSEDPHVDFRKSMEEMVETLGVEDWESLEDLLCWYLQANAKSNHEYIIGAFVDLLFYLAVPNSPCSQDFEHSHSRPSSPLSFYSSSSSSSPSSSCSTRCNIKGEVEEEEEEVGACSSSFSLAQGKEEITPEDEVASSXNN

SEQ ID NO: 12935 - DNA, 528 bp, Glycine max
  misc_feature (445)..(445): n is a, c, g, or t
  misc_feature (464)..(464): n is a, c, g, or t
  misc_feature (507)..(507): n is a, c, g, or t
  misc_feature (516)..(516): n is a, c, g, or t
atcaccaatgcgtgccagtggggttaatatatggaagtctccaattccttacttgtttggaggcttagctgtgatgctggctatcatatctatggcattggtgatccttgtttgctcatacagaaaacgtgattctcagtcatcatcatctgaagttaatgaagacgtgaaatcacaagcaatggccaagaatttagagacaaactcagagcctgaggttcttgtcataatggctggtaatcacaaccccacataccttgcaaaaccaatcacttcttcttcaattttctgcacgtgtggggctcaaccaagtgaaccaaacccttcatcaacctcaacacccgagtgaagactaaccaattatcaacatgccaagttcaacaaaattttgctctacacttttcttccttctcaattttcatattcttgtggttttgtgtgagcncagaatgtgactactgaanatgagtgctttctttttttgagaattttgcttttccataatgnaattatctnacggcttattag

SEQ ID NO: 12936 - protein, 115 aa, Glycine max
SPMRASGVNIWKSPIPYLFGGLAVMLAIISMALVILVCSYRKRDSQSSSSEVNEDVKSQAMAKNLETNSEPEVLVIMAGNHNPTYLAKPITSSSIFCTCGAQPSEPNPSSTSTPE

SEQ ID NO: 12937 - protein, 113 aa, Glycine max
MRASGVNIWKSPIPYLFGGLAVMLAIISMALVILVCSYRKRDSQSSSSEVNEDVKSQAMAKNLETNSEPEVLVIMAGNHNPTYLAKPITSSSIFCTCGAQPSEPNPSSTSTPE

SEQ ID NO: 12938 - protein, 91 aa, Glycine max
MLAIISMALVILVCSYRKRDSQSSSSEVNEDVKSQAMAKNLETNSEPEVLVIMAGNHNPTYLAKPITSSSIFCTCGAQPSEPNPSSTSTPE

SEQ ID NO: 12939 - DNA, 2374 bp, Glycine max
atgttcaaagctgtttaggattgcttagaaagtgaaacggattgaaaagcggcaaaggggattgaattgaaaggttttggaacaagctttatcttctgggatggccatggttaggtgcttctctcttttgcctgtgaggaaggacaaacacaaggggaatgaaaggtcttcaaaagaggactttaacactctacttgccaaactacaatctacaaaaaaaataacatcagagtcaaccacttttgatgccattggtattcagaaaaattcaaggttcaatgcgacgaggattatgacccttgagagtcctgtgaaggatgaagcacatgaaacttataaagatgaagattcaccattgatcaagagagaactctctgattttgatctccaagatcatgaagctgttgcaagcaacgcatatgatacaacagataaaaaggtagagtaccccattttatatgaaaaccaagtcaacaatgaattggaagacaaaaatgatagatacagccaaaagagtgtcgatacaactgaaagcggacacatcactgatcctggaattggcaaggctgattcctgggcttctccaaagttcaagagacacttctccaaccttgaaaaatttgatgagcatgggaagataactcgtcacttgccggcttcaaagtcgaagtcttttgagaattttcaggagttatcagcaatggttaatcttgaaagccctaggtctgtgatgagtcactacagtgctgatagagtattgttgaaaaggcactcttcaagtcaggtactcccttctagaagtaaaaaactgtggtggaagatgatcctatggagccacaggaacacacgcagaactctccctagcaattcaacactagttcctactagtgctgctttaaatagtggatactcttcagacacccttgaactgaaacaaggcaaggcattgaggcctgtgaaatcttctgattcaattactatggaatcctttaacaaaagaagaattggtaaaaatattgataatcaaagggggagcaggtttcaaagcgaccaatggattgctttctcaacagaatcatcttctttttccagagtggatgcatgggtgaagggtctcgaaattcagcaaatgcttcctgaggatgattttgatgatgacaatgccagaagaagcattgtcttcccaccttctcctaatgctggtgggtcaatgatgagaaccacatctcagttgacttatccagatgccaatctttcaaaagaggctttaactgcgattagtgtagtccagtctctaaatccagcttcaactattgctcacatatctggtattggtgtaaaagccatccctgctatttcacacttatccaatctccgctctgtcaacttgtcaaacattttcatagttcacatctcaccaggagttctaccaaagggtattcaaacacttaacttgtcaaaaaacaaaatcagcacccttgagggcctcagagaattggccaagttgcggatacttgacctaagctacaaccgcatttcgagaattggacaaggtttgtcaagttgtacactaatcaaagagctgtatcttgttgggaacaagataagtgatgttgaagggctacacaggctattgaagctaacagttctagacttgagcttcaacaagatcacaacagcaaaagcattaggccagctagtggctaacttcaactcacttaaggcccttaatctccttggaaatccgattcaaagcaatatcaatgatgaccagcttagcaaagcagtctgtggtctccttccaaaggtggtgtacctgaacaagcaaccccttaaggccaataggacacgcgaaatattaagcgatagtgttgccagagctgcactcgggaacagcacacggagctgtgaaagaagatcagtaagaagagttggccatggaggatcaaatctttccagagggaatagtagaaatgccagtgtttcccagaaaagcatgaaccggacaaggaggtgaaattgaacttgttagttgcatgtaaaaggaacaactcaatggaacacttttcatttggttcttctcaatgttatagcagaggaaactgtgttctagatgttgctgtctcttgatttgtttgtgagagatgtaaaatttcatttaaatagcttaaacgtttaagataattgtttcctgatatattaccgaagccctcataattatgtagtctcttcaaggccaagggactctatcatgaatgggtgtgttagaatttaaaatgaaagtcattatttgctttcatcctacagtttgaacttttggaacgtttgattcatgacattgttaattgataaaagtgttgaagtaatggggtct

SEQ ID NO: 12940 - protein, 638 aa, Glycine max
MAMVRCFSLLPVRKDKHKGNERSSKEDFNTLLAKLQSTKKITSESTTFDAIGIQKNSRFNATRIMTLESPVKDEAHETYKDEDSPLIKRELSDFDLQDHEAVASNAYDTTDKKVEYPILYENQVNNELEDKNDRYSQKSVDTTESGHITDPGIGKADSWASPKFKRHFSNLEKFDEHGKITRHLPASKSKSFENFQELSAMVNLESPRSVMSHYSADRVLLKRHSSSQVLPSRSKKLWWKMILWSHRNTRRTLPSNSTLVPTSAALNSGYSSDTLELKQGKALRPVKSSDSITMESFNKRRIGKNIDNQRGSRFQSDQWIAFSTESSSFSRVDAWVKGLEIQQMLPEDDFDDDNARRSIVFPPSPNAGGSMMRTTSQLTYPDANLSKEALTAISVVQSLNPASTIAHISGIGVKAIPAISHLSNLRSVNLSNIFIVHISPGVLPKGIQTLNLSKNKISTLEGLRELAKLRILDLSYNRISRIGQGLSSCTLIKELYLVGNKISDVEGLHRLLKLTVLDLSFNKITTAKALGQLVANFNSLKALNLLGNPIQSNINDDQLSKAVCGLLPKVVYLNKQPLKANRTREILSDSVARAALGNSTRSCERRSVRRVGHGGSNLSRGNSRNASVSQKSMNRTRR

SEQ ID NO: 12941 - protein, 636 aa, Glycine max
MVRCFSLLPVRKDKHKGNERSSKEDFNTLLAKLQSTKKITSESTTFDAIGIQKNSRFNATRIMTLESPVKDEAHETYKDEDSPLIKRELSDFDLQDHEAVASNAYDTTDKKVEYPILYENQVNNELEDKNDRYSQKSVDTTESGHITDPGIGKADSWASPKFKRHFSNLEKFDEHGKITRHLPASKSKSFENFQELSAMVNLESPRSVMSHYSADRVLLKRHSSSQVLPSRSKKLWWKMILWSHRNTRRTLPSNSTLVPTSAALNSGYSSDTLELKQGKALRPVKSSDSITMESFNKRRIGKNIDNQRGSRFQSDQWIAFSTESSSFSRVDAWVKGLEIQQMLPEDDFDDDNARRSIVFPPSPNAGGSMMRTTSQLTYPDANLSKEALTAISVVQSLNPASTIAHISGIGVKAIPAISHLSNLRSVNLSNIFIVHISPGVLPKGIQTLNLSKNKISTLEGLRELAKLRILDLSYNRISRIGQGLSSCTLIKELYLVGNKISDVEGLHRLLKLTVLDLSFNKITTAKALGQLVANFNSLKALNLLGNPIQSNINDDQLSKAVCGLLPKVVYLNKQPLKANRTREILSDSVARAALGNSTRSCERRSVRRVGHGGSNLSRGNSRNASVSQKSMNRTRR

SEQ ID NO: 12942 - protein, 574 aa, Glycine max
MTLESPVKDEAHETYKDEDSPLIKRELSDFDLQDHEAVASNAYDTTDKKVEYPILYENQVNNELEDKNDRYSQKSVDTTESGHITDPGIGKADSWASPKFKRHFSNLEKFDEHGKITRHLPASKSKSFENFQELSAMVNLESPRSVMSHYSADRVLLKRHSSSQVLPSRSKKLWWKMILWSHRNTRRTLPSNSTLVPTSAALNSGYSSDTLELKQGKALRPVKSSDSITMESFNKRRIGKNIDNQRGSRFQSDQWIAFSTESSSFSRVDAWVKGLEIQQMLPEDDFDDDNARRSIVFPPSPNAGGSMMRTTSQLTYPDANLSKEALTAISVVQSLNPASTIAHISGIGVKAIPAISHLSNLRSVNLSNIFIVHISPGVLPKGIQTLNLSKNKISTLEGLRELAKLRILDLSYNRISRIGQGLSSCTLIKELYLVGNKISDVEGLHRLLKLTVLDLSFNKITTAKALGQLVANFNSLKALNLLGNPIQSNINDDQLSKAVCGLLPKVVYLNKQPLKANRTREILSDSVARAALGNSTRSCERRSVRRVGHGGSNLSRGNSRNASVSQKSMNRTRR

SEQ ID NO: 12943 - DNA, 2837 bp, Glycine max
ttttgacttttaagcgtggtttgcttttcaattcagcattttgtcgcttcttctattaattctaccaagcttcgctgattgatccatcttcgtcgacgaattgtgcattcctgtgctgtgctggtgatgggtatggtttggatttcaaatgtctttcttctcgggtaatgagatgcatcaagttttgaagtacagtgagcagggatggacattgctgctcttttaacttctgctggaattaatattgctgtgtgtgtggtgctcttttcattttattctgtattaagaaaacaacccagcaatgttaatgtgtactttggaaggagactagcctctcagcattcaagacgcattgatctctgcttggaaagatttgttccctcccctagctggatattgaaagcatgggaaacatctgaggatgagatactggccattggtggcttggatgctgtggttttcgtgaggatacttgtgttcaggggaagagttttcaggagaaacattcttcacattgagttttcctcgaagaacttcaaatcatgatgcagaaagaggcttggtgagaatatcagcccactgatctagagctggaacgtggacaatatattcaagtgttttccattgctgctgccatatgcactgttatggtgcttcctgtaaattacaatggtatgggcggaatgcgtaagaatatacctttcgagtcgctggaagtatttaccattgagaatgtcaaagaaggatcaaagtggctttgggttcattgtcttgcactatacatcataacattatcagcttgtgctcttctttactttgaatataagagtattactaatttgaggctactacatattattggatcacctccaaatccaagtcattttacaattcttgtccgatcaattccctggtcttcagaagaatcatactgtgaaaccgtgaaaaaattcttctcatattaccatgcatcaacatatttgtcacaccaaatgatttataagtctggtaaagttcaaaaactgaaggatgatgctgaacatatatgtaaggtaattagagatgcttcattggaaaagacttgtaagcctagttttacgaaatgttgctgttatggagcaccaacattttcttttaagaagatttctactgaaacgggtagtacacatgggagaacatgcaacaatgacttgcatttagatacaggaaaaaaggaatgtcccgctgcttttgtgttctttaaaagtcggtatgctgctcttacggctgcacaggtactgcagacatcaaaccctatgttatgggtgacagacgtagctcctgaaccacatgatgtatattggtccaatatttgcataccatataggcaactttggatccgtaagatagctacccttgtggcctcggttgccttcatgcttgtgttccttatccctgttacatttgtacaaggcttgactcaactagacaaacttcagaaaatgttcccttttctgacagggatacttaaagagaaatttgtgaatcaggtggtgactggttacctgccaagtgtgatattggttttatttttgtgcgcagttccacctgtgatgattctattgtcttctgtggagggttctatttcccgtagtgaaaggaagaagagtgcatgttttaaagtcttgtacttcacaatctggaacgtgttttttgttaatgtatttactggttctgtaatcagccagctcttagtcttttctagtgtaacagatctgcctgcccagcttgccaaggcagtgccactgcaggctactttcttcacaacttacattttatcatctggttgggcaagtttggcagttgaagttatgcaaattttccctctactatgcaatcttttccagagattcatactcaggcttaaggaagatgcacttgatggcagcctatcttttccgtaccatacagaagttccaagaatcttactgtttggattccttgggttcacttgtgctattctggcacccttaatgttgcccttcttgttgatctactttttcattgcttaccttgtttatcgaaaccagattatcaatgtatacattacaaaatacgatagtgggggacagtactggcccattgttcacaacacaacggtcttttcattgctattttctcaacttatagcgctaggggtgtttggactcaaacgctcatcagttacatctggattcaccattcctctgctgattggtacacttctatttcaccagtattgtaggcaacggtttctcccagtatttaggaacaattcagcacagattcttattgacttggatcggagagatgagcactgcggaagggtggaagaaatttatgaacatttgtgttcagcctacaaccagtccagtttaatgccacattccacaagccaagccaaatgtgtcagtcttcatgaggacaaggatagcagtccatcttcatcagaagatatggagaaaggcaatgaaaaggaaattaatcaaaaagatagaccacggcctgtccaacgctcattgagtttgagttcagataaatcggtacttggtgtaaagcaatgagtactcagaattgtacattgtataagaataagaatatcatggtgtgccgatgcatgaacagttaatcaattatagatgaagatgaaagtctcttgatatattgttcataaatttttttagttgtaattattttttaaaatgattttcaattagttgtaattgtccttttggctgtgatgtggttggatctatccatcatattctgtctgtatgcccgaaaattttatgcatttggtggcagtggtattctctctt

SEQ ID NO: 12944 - protein, 644 aa, Glycine max
MVLPVNYNGMGGMRKNIPFESLEVFTIENVKEGSKWLWVHCLALYIITLSACALLYFEYKSITNLRLLHIIGSPPNPSHFTILVRSIPWSSEESYCETVKKFFSYYHASTYLSHQMIYKSGKVQKLKDDAEHICKVIRDASLEKTCKPSFTKCCCYGAPTFSFKKISTETGSTHGRTCNNDLHLDTGKKECPAAFVFFKSRYAALTAAQVLQTSNPMLWVTDVAPEPHDVYWSNICIPYRQLWIRKIATLVASVAFMLVFLIPVTFVQGLTQLDKLQKMFPFLTGILKEKFVNQVVTGYLPSVILVLFLCAVPPVMILLSSVEGSISRSERKKSACFKVLYFTIWNVFFVNVFTGSVISQLLVFSSVTDLPAQLAKAVPLQATFFTTYILSSGWASLAVEVMQIFPLLCNLFQRFILRLKEDALDGSLSFPYHTEVPRILLFGFLGFTCAILAPLMLPFLLIYFFIAYLVYRNQIINVYITKYDSGGQYWPIVHNTTVFSLLFSQLIALGVFGLKRSSVTSGFTIPLLIGTLLFHQYCRQRFLPVFRNNSAQILIDLDRRDEHCGRVEEIYEHLCSAYNQSSLMPHSTSQAKCVSLHEDKDSSPSSSEDMEKGNEKEINQKDRPRPVQRSLSLSSDKSVLGVKQ

SEQ ID NO: 12945 - protein, 635 aa, Glycine max
MGGMRKNIPFESLEVFTIENVKEGSKWLWVHCLALYIITLSACALLYFEYKSITNLRLLHIIGSPPNPSHFTILVRSIPWSSEESYCETVKKFFSYYHASTYLSHQMIYKSGKVQKLKDDAEHICKVIRDASLEKTCKPSFTKCCCYGAPTFSFKKISTETGSTHGRTCNNDLHLDTGKKECPAAFVFFKSRYAALTAAQVLQTSNPMLWVTDVAPEPHDVYWSNICIPYRQLWIRKIATLVASVAFMLVFLIPVTFVQGLTQLDKLQKMFPFLTGILKEKFVNQVVTGYLPSVILVLFLCAVPPVMILLSSVEGSISRSERKKSACFKVLYFTIWNVFFVNVFTGSVISQLLVFSSVTDLPAQLAKAVPLQATFFTTYILSSGWASLAVEVMQIFPLLCNLFQRFILRLKEDALDGSLSFPYHTEVPRILLFGFLGFTCAILAPLMLPFLLIYFFIAYLVYRNQIINVYITKYDSGGQYWPIVHNTTVFSLLFSQLIALGVFGLKRSSVTSGFTIPLLIGTLLFHQYCRQRFLPVFRNNSAQILIDLDRRDEHCGRVEEIYEHLCSAYNQSSLMPHSTSQAKCVSLHEDKDSSPSSSEDMEKGNEKEINQKDRPRPVQRSLSLSSDKSVLGVKQ

SEQ ID NO: 12946 - protein, 632 aa, Glycine max
MRKNIPFESLEVFTIENVKEGSKWLWVHCLALYIITLSACALLYFEYKSITNLRLLHIIGSPPNPSHFTILVRSIPWSSEESYCETVKKFFSYYHASTYLSHQMIYKSGKVQKLKDDAEHICKVIRDASLEKTCKPSFTKCCCYGAPTFSFKKISTETGSTHGRTCNNDLHLDTGKKECPAAFVFFKSRYAALTAAQVLQTSNPMLWVTDVAPEPHDVYWSNICIPYRQLWIRKIATLVASVAFMLVFLIPVTFVQGLTQLDKLQKMFPFLTGILKEKFVNQVVTGYLPSVILVLFLCAVPPVMILLSSVEGSISRSERKKSACFKVLYFTIWNVFFVNVFTGSVISQLLVFSSVTDLPAQLAKAVPLQATFFTTYILSSGWASLAVEVMQIFPLLCNLFQRFILRLKEDALDGSLSFPYHTEVPRILLFGFLGFTCAILAPLMLPFLLIYFFIAYLVYRNQIINVYITKYDSGGQYWPIVHNTTVFSLLFSQLIALGVFGLKRSSVTSGFTIPLLIGTLLFHQYCRQRFLPVFRNNSAQILIDLDRRDEHCGRVEEIYEHLCSAYNQSSLMPHSTSQAKCVSLHEDKDSSPSSSEDMEKGNEKEINQKDRPRPVQRSLSLSSDKSVLGVKQ

SEQ ID NO: 12947 - DNA, 1827 bp, Glycine max
ttttttgccatatttcccaaataaaattccccgattaaccttcgtgctacccacgaaatctatttttcttcccatttttttctgagcatttagctgtcgcttctttttgtttgtttttgtcatcctcggcagatcaggttttgtttttgcttctgctccagctttggaagatccacaatctctctctgagtggatggtttagtgtatatttttaagatactgatataaaagtatgggaagcagtgagatggataaaactacaaaagagaaggagtcaaagacgccgccaccacctacatcacaggagcagtcttcgaccaccggcactggaacaattaatcctgagtggcctggctttcaggcatattctcctatacctccacatggtttcttggcatcaagtccccaggctcacccttatatgtggggtgtccagcaatttatgcctccctatggtactccaccacatccctatgttgcaatgtatccccctggtggcatttatgctcatccatccatgcctccgggatcttatccttttaatccttttgccatgccttctcctaatggcattgctgaggcttcaggaaacactcctggcagcatggaagctgatggcaagccttctgaggtgaaggaaaaattgccaatcaaaagatcaaaaggaagtttgggtagtttgaatatgatcacagggaaaaataatgaacatggtaaaacactggggacatctgctaatggaattcattcaaagagtggtgagagtgctagtgaaggtgaaggtaccagtgaaggaagtgatgcaaattctcagaatgactctcaattaaaatcagggggccggcaggattcttttgaagatgaaccctctcaaaatggcagttcagcatatactcctcaaaatgggggactaaatatacctcatacagtggtcaatcaaaccatgtctatcatacctatctctgcaggtggtgctcctggagctgttcctggtcccacgacaaacttaaatataggaatggattattggggtacaccaggttcatccaacattcctggacttggcagaaaggttccatctactgcagttgctggagggatggttactgttggatcacgggatagtgctcagtcacaactctggctacaggatgaaagagagcttaaaaggcaaaggcggaagcagtctaacagggaatctgctcgcaggtccaggttgcgcaagcaggccgagtgtgatgagttagctcagcgtgctgaggctttgaaggaagaaaatgcttctctccggtcagaagtaaatcgaatcaggagtgattatgagcagctactctccgagaatgcagctctcaaggagagacttggggaactacctccgaatgatgatcatcatcataggtctggcaggaatgatcagcatgtgggtaatgacactcaacagagtgggcagacagaggccgtgcagggtggtcattagcaccaaccaaccacttcatgctgcctttcagggagataatctaacttaaatagcaagagcaagatcttgtttcggataggttgtagttcaaattgtattaatgctgaccatttatcgtcttaagatctgtttaatgttatgtgatccttcattcctaatttaccttttttttaactcattcaaaacgacctggattgtatgtagtgtgtgaattctgtgtcataccttatctgcagcttcaaagttagtgttctcattaagtaagcaatatagttaacgaacctgggtgttgtccattatatcatttcctgtacaaataatttatcgggaaaataaataaaagagaaaat

SEQ ID NO: 12948 - protein, 414 aa, Glycine max
MGSSEMDKTTKEKESKTPPPPTSQEQSSTTGTGTINPEWPGFQAYSPIPPHGFLASSPQAHPYMWGVQQFMPPYGTPPHPYVAMYPPGGIYAHPSMPPGSYPFNPFAMPSPNGIAEASGNTPGSMEADGKPSEVKEKLPIKRSKGSLGSLNMITGKNNEHGKTLGTSANGIHSKSGESASEGEGTSEGSDANSQNDSQLKSGGRQDSFEDEPSQNGSSAYTPQNGGLNIPHTVVNQTMSIIPISAGGAPGAVPGPTTNLNIGMDYWGTPGSSNIPGLGRKVPSTAVAGGMVTVGSRDSAQSQLWLQDERELKRQRRKQSNRESARRSRLRKQAECDELAQRAEALKEENASLRSEVNRIRSDYEQLLSENAALKERLGELPPNDDHHHRSGRNDQHVGNDTQQSGQTEAVQGGH

SEQ ID NO: 12949 - protein, 409 aa, Glycine max
MDKTTKEKESKTPPPPTSQEQSSTTGTGTINPEWPGFQAYSPIPPHGFLASSPQAHPYMWGVQQFMPPYGTPPHPYVAMYPPGGIYAHPSMPPGSYPFNPFAMPSPNGIAEASGNTPGSMEADGKPSEVKEKLPIKRSKGSLGSLNMITGKNNEHGKTLGTSANGIHSKSGESASEGEGTSEGSDANSQNDSQLKSGGRQDSFEDEPSQNGSSAYTPQNGGLNIPHTVVNQTMSIIPISAGGAPGAVPGPTTNLNIGMDYWGTPGSSNIPGLGRKVPSTAVAGGMVTVGSRDSAQSQLWLQDERELKRQRRKQSNRESARRSRLRKQAECDELAQRAEALKEENASLRSEVNRIRSDYEQLLSENAALKERLGELPPNDDHHHRSGRNDQHVGNDTQQSGQTEAVQGGH

SEQ ID NO: 12950 - protein, 351 aa, Glycine max
MWGVQQFMPPYGTPPHPYVAMYPPGGIYAHPSMPPGSYPFNPFAMPSPNGIAEASGNTPGSMEADGKPSEVKEKLPIKRSKGSLGSLNMITGKNNEHGKTLGTSANGIHSKSGESASEGEGTSEGSDANSQNDSQLKSGGRQDSFEDEPSQNGSSAYTPQNGGLNIPHTVVNQTMSIIPISAGGAPGAVPGPTTNLNIGMDYWGTPGSSNIPGLGRKVPSTAVAGGMVTVGSRDSAQSQLWLQDERELKRQRRKQSNRESARRSRLRKQAECDELAQRAEALKEENASLRSEVNRIRSDYEQLLSENAALKERLGELPPNDDHHHRSGRNDQHVGNDTQQSGQTEAVQGGH

SEQ ID NO: 12951 - DNA, 1301 bp, Glycine max
  misc_feature (991)..(991): n is a, c, g, or t
  misc_feature (1075)..(1075): n is a, c, g, or t
gttttcctctgccatagcttctgtctttgaattttagatggctgcaacagaaacaataacagcggaacctcacgaagccgaagaacaacaacatcaacaacaccacgtatacgtagaagcagaacctctctcatacaagaccgtcgtgttgagagtctccatccactgccaaggctgcaaaaggaaagtccagaaaattcttcaagccgttcacggtgttcacactatagacattgatttgaggcagcacaaagtggtagtaacggggaacgttaacagcgagacgttgatttggaaattgactaaggcagggaagcatgctgagttatggcctcaattaaaagcagattccaaaaagaaaaagcaacccaaaccagaaagcagccaaggaattaaccaaaccgataaacaagctgttaacgttgttgctcaaggcactaacgctaacgttagcaaacccggcgaaggatgcgcgaccggtaaagccggtgttcagattcaagagccgaagccggaggtgatcaggcagaccgtggtactaccaccggccggtccggtaactgagaaggtcagcatcgcagttcaagttcctaacgacaatgaagcaaccgggaatgagaatataaccggcggtaccggtggcggtggtgcagggaaaaagaagaaaaagaaggcgagcgtgaaagggagtactaataacaacgccaacgaaggtgctggtgctgctactgttactgttgaacacgctaaagcaaacgatggttccggaccttcttccggtaaccagtcacatggtcaaggtcatgtacatgttcatgggccatggcttccattttcaagcccagccaatgagagtccaccacgtcatcataacatttaccgtcagtacccaccgcattactatgctcctcctcctcctcctcctcctccttctactacccctgctgttcatacggtcatgagttatcacacggcgcatcctagcagcagntacggtacagcgtattacacctctccgcaaccgtattcgtacgcccacgtggtgcgtccagggaacgaaatggagcctccaccnccgtacacgtacgaaagggaatcgtatgcttcatcgcagccgtcggattccttcgagctcttcagcgatgaaaatccaaatgcgtgctcggtcatgtaaatgtaagtgtgtgtgatgcatcattacgcgcaattatttctttgaactgctttaccacatacgacttgtacgagcatggagtaattttgtaatgcttgtagagttggagatatacaagaatattatt

SEQ ID NO: 12952 - protein, 378 aa, Glycine max
  misc_feature (318)..(318): Xaa can be any naturally occurring amino acid
  misc_feature (346)..(346): Xaa can be any naturally occurring amino acid
MAATETITAEPHEAEEQQHQQHHVYVEAEPLSYKTVVLRVSIHCQGCKRKVQKILQAVHGVHTIDIDLRQHKVVVTGNVNSETLIWKLTKAGKHAELWPQLKADSKKKKQPKPESSQGINQTDKQAVNVVAQGTNANVSKPGEGCATGKAGVQIQEPKPEVIRQTVVLPPAGPVTEKVSIAVQVPNDNEATGNENITGGTGGGGAGKKKKKKASVKGSTNNNANEGAGAATVTVEHAKANDGSGPSSGNQSHGQGHVHVHGPWLPFSSPANESPPRHHNIYRQYPPHYYAPPPPPPPPSTTPAVHTVMSYHTAHPSSXYGTAYYTSPQPYSYAHVVRPGNEMEPPXPYTYERESYASSQPSDSFELFSDENPNACSVM

SEQ ID NO: 12953 - DNA, 1380 bp, Glycine max
acgcggggattgtaacagagaaagaaacatttgagcaaaaatggttcaagcacagcctctacaacatgttggtaatggtgcagggaaagaagatcaagcttattttgatccaagtgctccaccacccttcaagattgcaaatatcagagcagcaattccaaaacattgctgggagaagaacacattgagatctctgagttatgttctgagggatgtgttggtagtgactgcattggtagctgcagcaatcggcttcaatagctggttcttctggccactctattggcctgcacaaggcacaatgttttgggcactttttgttcttggacatgattgtggtcatggaagtttttcaaacagtcctttgttgaacagcattgtgggccacatcttgcactcttcaattcttgtaccataccatggatggagaattagccacaggactcaccatcagaaccatggccatgttgagaaggatgaatcatgggttccgcttacagagaaagtttacaagaatctagacaacatgacaagaatgatgagattcactcttcctttccccatctttgcataccccttttatttgtggagcagaagccctggaaaagaaggctctcatttcaacccttacagcaacttgttctctcctggtgagagaagagatgtgctaacttcaactctgtgttggggcatcatgctttctgtgcttctctatctttccctcacaatgggtccactttttatgctcaagctctatggggttccctatttgatcttcgtcatgtggctggatttcgtcacgtacttgcatcatcatggttacaagcagaaactgccttggtaccgtggccaggaatggagttatctaaggggtggtcttacaacagtagatcgcgactatggttggatcaacaacattcaccatgacattggcacccatgttatccatcaccttttccctcaaattccacattatcatttaatcgaagcgactaaagcagcaaaggcagtgctaggaaagtattatcgtgagcctcagaaatctgggccattgccacttcatctaataaagtacttgctccacagcataagtcaggatcacttcgttagcgactctggcgacattgtgtactaccagactgattcccagctccacaaagattcttggacccagtccaactaaagtttttgatgctacatttacctattttcactcttaaatactatttcctatgtaatatgtaatttagaatatgttacctactcaaatcaattaggtgacatgtataagctttcataaattatgctagaaatgcacttacttttcaaagcatgctatgttagaattgaatctacttttcaatacccagatcatcaatt

SEQ ID NO: 12954 - protein, 380 aa, Glycine max
MVQAQPLQHVGNGAGKEDQAYFDPSAPPPFKIANIRAAIPKHCWEKNTLRSLSYVLRDVLVVTALVAAAIGFNSWFFWPLYWPAQGTMFWALFVLGHDCGHGSFSNSPLLNSIVGHILHSSILVPYHGWRISHRTHHQNHGHVEKDESWVPLTEKVYKNLDNMTRMMRFTLPFPIFAYPFYLWSRSPGKEGSHFNPYSNLFSPGERRDVLTSTLCWGIMLSVLLYLSLTMGPLFMLKLYGVPYLIFVMWLDFVTYLHHHGYKQKLPWYRGQEWSYLRGGLTTVDRDYGWINNIHHDIGTHVIHHLFPQIPHYHLIEATKAAKAVLGKYYREPQKSGPLPLHLIKYLLHSISQDHFVSDSGDIVYYQTDSQLHKDSWTQSN

SEQ ID NO: 12955 - protein, 293 aa, Glycine max
MFWALFVLGHDCGHGSFSNSPLLNSIVGHILHSSILVPYHGWRISHRTHHQNHGHVEKDESWVPLTEKVYKNLDNMTRMMRFTLPFPIFAYPFYLWSRSPGKEGSHFNPYSNLFSPGERRDVLTSTLCWGIMLSVLLYLSLTMGPLFMLKLYGVPYLIFVMWLDFVTYLHHHGYKQKLPWYRGQEWSYLRGGLTTVDRDYGWINNIHHDIGTHVIHHLFPQIPHYHLIEATKAAKAVLGKYYREPQKSGPLPLHLIKYLLHSISQDHFVSDSGDIVYYQTDSQLHKDSWTQSN

SEQ ID NO: 12956 - protein, 218 aa, Glycine max
MTRMMRFTLPFPIFAYPFYLWSRSPGKEGSHFNPYSNLFSPGERRDVLTSTLCWGIMLSVLLYLSLTMGPLFMLKLYGVPYLIFVMWLDFVTYLHHHGYKQKLPWYRGQEWSYLRGGLTTVDRDYGWINNIHHDIGTHVIHHLFPQIPHYHLIEATKAAKAVLGKYYREPQKSGPLPLHLIKYLLHSISQDHFVSDSGDIVYYQTDSQLHKDSWTQSN

SEQ ID NO: 12957 - DNA, 1590 bp, Glycine max
  misc_feature (706)..(706): n is a, c, g, or t
  misc_feature (720)..(720): n is a, c, g, or t
  misc_feature (951)..(951): n is a, c, g, or t
  misc_feature (958)..(958): n is a, c, g, or t
  misc_feature (1389)..(1390): n is a, c, g, or t
gagtgtcatattattattccttccttctcactgtgctctggtgcataaacctcaacaacacactcttcaattttctagggtttgagttttgctccctttttcttcgccttctccaatggccgcttcctcgctcctgagatccgcgcttctcgctccttcctcctgcgatcgccccaaggtatataccaatgcctcaagttctaatttaaaatccaagggattacatagcagcatttttggtacttcaattcaatgtgactccttagtcttacaaaattgcaatggtcgtgggatccagcctattaaagccacagcaacggaaatccctctccccacccagcaatcaaggagcactgggaagacaagagttggaataaatggttttggtagaattggaaggttggtgttacgtgtagctactttccgagatgatgttgatgttgttgcaattaatgatccatttattgatgcgaaatatatggcatacatgttcaaatacgattctactcatggtccattcaaggggtccattaatattttggatgactctactttggaaattaatgggaagcatgttaaagttgtgagcaaaagagatcctgcagagatcccatggagtgattttggggctgattatgtcattgagtcttcaggagtttttacaacagtggagaaagcttcatcacatttgaaggctggtgccaanaaagttgtaatatnagctccatcggcggatgcaccaatgtttgtggtaggagtgaatgagaagacatacaacccaaaaatggacattgtttctaatgcaagctgtacaacgaattgtcttgctcctcttgccaaggtggttaatgaagagtttggaatagttgaaggtttgatgacaacggtacatgcaacaacagcaacacaaaagaccgtagatggtccttctatgaaggattggcgaggagnaagaggngcagctcaaaatataattccaagttcaactggtgctgcgaaggccgttgggaaagttcttcctgagctaaatgggaaactcactgggatggcattccgtgtaccgactcccaatgtttctgtggtggacttgacttgccggcttaagaagaatgcttcctatgaagatgttaaagcagcaataaagtatgcctcagagggaccactgaaaggtatccttgggtacacagacgaggatgttgtctctaatgactttgttggtgattcaaggtcaagtatctttgatgccaaggctggcattgcactaagtgcttcctttgttaagctggtttcgtggtatgacaatgagtggggttacagcaaccgagtattggaccttatagagcacatggcattggtgggagctcaaaattgaacaccattagtgtatgnngtgttgcaattcttgttgaatagggtttaatattggtagagtggtttaggttcagattttggttttgatctgatttttataagatgtgaggttaaatgatcacatcatgtacactgaaaataaaataaaaaaggatattatcctggttacctgttttggaattaccagcatgaattttacaatctgccttttaaaatgat

SEQ ID NO: 12958 - protein, 418 aa, Glycine max
  misc_feature (197)..(197): Xaa can be any naturally occurring amino acid
  misc_feature (202)..(202): Xaa can be any naturally occurring amino acid
  misc_feature (279)..(279): Xaa can be any naturally occurring amino acid
  misc_feature (281)..(281): Xaa can be any naturally occurring amino acid
MAASSLLRSALLAPSSCDRPKVYTNASSSNLKSKGLHSSIFGTSIQCDSLVLQNCNGRGIQPIKATATEIPLPTQQSRSTGKTRVGINGFGRIGRLVLRVATFRDDVDVVAINDPFIDAKYMAYMFKYDSTHGPFKGSINILDDSTLEINGKHVKVVSKRDPAEIPWSDFGADYVIESSGVFTTVEKASSHLKAGAXKVVIXAPSADAPMFVVGVNEKTYNPKMDIVSNASCTTNCLAPLAKVVNEEFGIVEGLMTTVHATTATQKTVDGPSMKDWRGXRXAAQNIIPSSTGAAKAVGKVLPELNGKLTGMAFRVPTPNVSVVDLTCRLKKNASYEDVKAAIKYASEGPLKGILGYTDEDVVSNDFVGDSRSSIFDAKAGIALSASFVKLVSWYDNEWGYSNRVLDLIEHMALVGAQN

SEQ ID NO: 12959 - protein, 297 aa, Glycine max
  misc_feature (76)..(76): Xaa can be any naturally occurring amino acid
  misc_feature (81)..(81): Xaa can be any naturally occurring amino acid
  misc_feature (158)..(158): Xaa can be any naturally occurring amino acid
  misc_feature (160)..(160): Xaa can be any naturally occurring amino acid
MAYMFKYDSTHGPFKGSINILDDSTLEINGKHVKVVSKRDPAEIPWSDFGADYVIESSGVFTTVEKASSHLKAGAXKVVIXAPSADAPMFVVGVNEKTYNPKMDIVSNASCTTNCLAPLAKVVNEEFGIVEGLMTTVHATTATQKTVDGPSMKDWRGXRXAAQNIIPSSTGAAKAVGKVLPELNGKLTGMAFRVPTPNVSVVDLTCRLKKNASYEDVKAAIKYASEGPLKGILGYTDEDVVSNDFVGDSRSSIFDAKAGIALSASFVKLVSWYDNEWGYSNRVLDLIEHMALVGAQN

SEQ ID NO: 12960 - protein, 294 aa, Glycine max
  misc_feature (73)..(73): Xaa can be any naturally occurring amino acid
  misc_feature (78)..(78): Xaa can be any naturally occurring amino acid
  misc_feature (155)..(155): Xaa can be any naturally occurring amino acid
  misc_feature (157)..(157): Xaa can be any naturally occurring amino acid
MFKYDSTHGPFKGSINILDDSTLEINGKHVKVVSKRDPAEIPWSDFGADYVIESSGVFTTVEKASSHLKAGAXKVVIXAPSADAPMFVVGVNEKTYNPKMDIVSNASCTTNCLAPLAKVVNEEFGIVEGLMTTVHATTATQKTVDGPSMKDWRGXRXAAQNIIPSSTGAAKAVGKVLPELNGKLTGMAFRVPTPNVSVVDLTCRLKKNASYEDVKAAIKYASEGPLKGILGYTDEDVVSNDFVGDSRSSIFDAKAGIALSASFVKLVSWYDNEWGYSNRVLDLIEHMALVGAQN

SEQ ID NO: 12961 - DNA, 1490 bp, Glycine max
  misc_feature (1423)..(1423): n is a, c, g, or t
  misc_feature (1448)..(1448): n is a, c, g, or t
tctctctcacacacacacacacacacaactgacaacttcctcaagtagctatagcaagtaaaattaactgttcttagcattctcttgaagcatatacttatgatgatgctatatagttaattattaccaacaaggtgtggttgtttaagagctaattaaagtagctagttatataggtttgaagtcaatccatctcgggatccatattcacctttctcagctttttcctctctcactctctcaagaatatctgaaaagtttgaagaatagagaaagctatatataagtaagcacaggatccatgagctgaagagatcagatccattaattccctatcatatattatccttttcagtgtttggtgtggtggaagaaaatatgtccaatttgacgtctgcatccagtgaaataagtgctacttctggaatcaggaataacaacggttcttctctctatgctcaatattcctctacttcaataagtcaagaaccagaacctaaaaagaagcgaagtcttccaggtcacccagaccctgaggcagaagtgatagcattgactccgaagacccttttggcaacaaacaggttcgtttgtgagatttgccagaaagggttccagagagaccagaatctgcagcttcatagaagagggcacaatttgccatggaagctgaagaaaaagagtagcaaaaacgtgagaaagaaagtgtatgtgtgcccagaggcaacatgcgttcaccatgacccttcaagggcacttggggacctcactggaatcaagaaacacttcttcaggaaacacggagagaagaaatggaagtgtgacaagtgcttcaaacgctacgcggttcaatcagattggaaagcccactccaaaatctgtggcaccagagagtataaatgcgactgtggtacccttttctcaagaagggacagctttatcactcacagagccttctgtgatgccttagcacaggaaagtggtagaacagtgaaccctcttctagatctatcaactcaatttcgtagccatggccttcaacttcaagcaccatcatcacttctgatgaaaggagaacatgatcatcacttcaacttattaaacccagaaattccatcatggttattaagttctccaacagtggtagtagaagaagaagcactccacaacagtagtcaaaccataagatccaccttagataatttctccacaataccacagttattattcccaacagcacaacatgtcaacaactaccactcctcctcattagtccaccatgatcaaaaccctaaccctagtactactacaacaacaacatcatcaaccactttgcttccttctttgagtacttctttccattcttcttcttcttttcctcacatgtcagccactgctttgttgcaaaaagcctcacaaatangggtaacagtgagttgtattactgntgcaccttcatcacaaacgatgatgctggttagaccccactt

SEQ ID NO: 12962 - protein, 370 aa, Glycine max
  misc_feature (349)..(349): Xaa can be any naturally occurring amino acid
  misc_feature (357)..(357): Xaa can be any naturally occurring amino acid
MSNLTSASSEISATSGIRNNNGSSLYAQYSSTSISQEPEPKKKRSLPGHPDPEAEVIALTPKTLLATNRFVCEICQKGFQRDQNLQLHRRGHNLPWKLKKKSSKNVRKKVYVCPEATCVHHDPSRALGDLTGIKKHFFRKHGEKKWKCDKCFKRYAVQSDWKAHSKICGTREYKCDCGTLFSRRDSFITHRAFCDALAQESGRTVNPLLDLSTQFRSHGLQLQAPSSLLMKGEHDHHFNLLNPEIPSWLLSSPTVVVEEEALHNSSQTIRSTLDNFSTIPQLLFPTAQHVNNYHSSSLVHHDQNPNPSTTTTTTSSTTLLPSLSTSFHSSSSFPHMSATALLQKASQIXVTVSCITXAPSSQTMMLVRPH

SEQ ID NO: 12963 - DNA, 1602 bp, Glycine max
  misc_feature (463)..(463): n is a, c, g, or t
  misc_feature (635)..(635): n is a, c, g, or t
cactttcatcttcagttatctatcacttaagattgcatttctcaaagtctagttactcatcacagtaatcatttgcctctttctgagagacacaacatagatatgataataagtaacacacttatctaaatggctgccacgtgctgtagcttcactcaatcgtcttctggtttcaggaaactccatgagaacattcagctgcagagctacttcacaaggtaccagcaaagatcaacttgcagtgttgaaaatatcttccatagggactatggaggaaggtttttacaagttgaaggatggcatcaacatcagtatttgttatgtgcaagaggagttgagttgtccccttctgccaatgaagaagttggagaggagactgaggaggatatctcaaaggaaacgttgatttggagagccatcaagttgccaatttactctgttgcatttgttcctctcactgtangcagtgcagcagtttattttcagacagggatcttctcagctagatgttattttgttctcctggcttcttcagttcttgctattacctggctcaatttaagcaatgatgtttatgattttgacactggagttgacaagaacaaaaaggaatcagttgtaaacctggcaggtanccgtaaaggaaccttcattgctgcctacttgtgccttgctattggcttccttgggctgacttggactgctgttgtggaaagaaacatacgttcaatattgtttcttgtttgtgcaattatttgtggctatatatatcagtgtccaccatttcggttaagctaccaggggctgggagagcccttgtgctttgcagcatttgggccttttgccacttgtgccttttatttattacatggcagttcaagtgtgatgaaccatttccccttaagtggaacggttctttcagcatcaattcttgttggcttcacaacatctcttatcttgttttgcagtcatttccatcaggtggaaggagacaaggaggttgggaaaatgtcacctttggttagacttggcactaaaaaaggtgcagaggtagtgaaaggggcagtctttatgctctatgctcttttggttgcttttggtctaatcaaggcacttcctctcacttgtatattcctttgtgcattgaccttgccgatgggaaacctggtagttagatttgtcgaagacaattacaagaacaaaaataagattttcatggctaagtacttctgtgtgaggcttcatgcattgtttggagttgcactggctttaggactagtgctggctagaaatacaaaatttacatcatggccaatattgagttgaagattggctggtcgaaagaggaagtaatgtagtgcactaagggtaagcttgaaagaaactgcatgacactgaaaccaatcaagagttgtgtgcagcaagcttacctcatcaatctgaacaggtcaggagatggttccactatctaggcgcctcattttaacttacaccaataaaccgtagttgattagcagcacgaaaacatttgctgcaaagaattttttgtgaaatcagaccacatgtgttgattcttttatttttgccatgaaaattggattt

SEQ ID NO: 12964 - protein, 398 aa, Glycine max
  misc_feature (112)..(112): Xaa can be any naturally occurring amino acid
  misc_feature (169)..(169): Xaa can be any naturally occurring amino acid
MAATCCSFTQSSSGFRKLHENIQLQSYFTRYQQRSTCSVENIFHRDYGGRFLQVEGWHQHQYLLCARGVELSPSANEEVGEETEEDISKETLIWRAIKLPIYSVAFVPLTVXSAAVYFQTGIFSARCYFVLLASSVLAITWLNLSNDVYDFDTGVDKNKKESVVNLAGXRKGTFIAAYLCLAIGFLGLTWTAVVERNIRSILFLVCAIICGYIYQCPPFRLSYQGLGEPLCFAAFGPFATCAFYLLHGSSSVMNHFPLSGTVLSASILVGFTTSLILFCSHFHQVEGDKEVGKMSPLVRLGTKKGAEVVKGAVFMLYALLVAFGLIKALPLTCIFLCALTLPMGNLVVRFVEDNYKNKNKIFMAKYFCVRLHALFGVALALGLVLARNTKFTSWPILS

SEQ ID NO: 12965 - DNA, 1657 bp, Glycine max
  misc_feature (1540)..(1540): n is a, c, g, or t
aaaaaaaagaaaccaatgacgaaattcctcctcttcgaaaatactacgaaaatcgaaaatcaatcgtagaccacttctcaaacacaagagacaccaccgatgatgatgatgatgatattaaagcaacatcaccaggagtaagagagagcaaaggtggctccttttcatgtgagttttgagtgattcattgattcttctgctaccatcttcttttctactcgaaaaaggaagaggggaaaagaaattgaaacatgggttggattccctgttccggaagttcaaacactaagaagaagttaaagaagaaattggagaagatggaagggcagagcagcctcgttgatccgatcaaagccaccccagggaaattaaagaggaatccatccatgaattccaaaaattcctccaaaaatgggaaccctgagcacattgctgcacagacattctcattccgtgagttggcaactgcaactagaaacttcagagccgaatgtcttttgggtgagggaggctttggcagagtatacaaggggcgtttggaaaatattaatcagattgttgcaattaaacaacttgaccgaaatgggctacaagggaatagagaattccttgttgaagtgctgatgttaagtcttcttcaccaccctaaccttgtcaacctgattggttattgtgctgatggggatcaaagacttctagtttatgaatttatgtcattaggatccttggaagaccacttacatgatatttctcctggcaagaaacgacttgactggaacacgcggatgaaaatagctgctggggctgcaagaggattggaatatttgcatgacaaagctaatcctcctgtcatataccgagatttaaagtgctccaacattttgctcggtgaaggatatcatccaaagttatctgattttggtttggctaaacttggtccagtgggggaaaacacccatgtatcaacaagggttatgggcacctatggatattgtgctccagagtatgcaatgacaggtcaactgactctgaaatcagatgtttatagctttggtgttgttcttctggaaataattactggaaggaaagcaattgacaattcaaaagctgcaggagagcagaatcttgttgcatgggccagacccttgttcaaagatcgaagaaaattttcgcaaatggctgatccaatgctccaaggtcaatatcctccaagagggctattccaggcccttgctgttgcagcaatgtgtgttcaggagcaggccaatatgcgtccagttatagctgatgttgtcacagctttgagttaccttgcttcacaaaaatatgacccgaatactcagacattacaaagctctcgccttgctcctggtactcctccaagatccaagaggggatattgatatggagcttaatgtttattagctatataatagtctggtgaaaatttcaaacatcttacaagttatagatttgtagatgttaataccagttgtcttatggtggtgttctttcttcagagcatagatgctaaaaatgntgtaaatttttgttctaccctggtgcacagaactgctcctatttccatttggagccaagatagtatatcctcttccttttcttagtttctatttaaaggcatattgctggattcatg

SEQ ID NO: 12966 - protein, 383 aa, Glycine max
MGWIPCSGSSNTKKKLKKKLEKMEGQSSLVDPIKATPGKLKRNPSMNSKNSSKNGNPEHIAAQTFSFRELATATRNFRAECLLGEGGFGRVYKGRLENINQIVAIKQLDRNGLQGNREFLVEVLMLSLLHHPNLVNLIGYCADGDQRLLVYEFMSLGSLEDHLHDISPGKKRLDWNTRMKIAAGAARGLEYLHDKANPPVIYRDLKCSNILLGEGYHPKLSDFGLAKLGPVGENTHVSTRVMGTYGYCAPEYAMTGQLTLKSDVYSFGVVLLEIITGRKAIDNSKAAGEQNLVAWARPLFKDRRKFSQMADPMLQGQYPPRGLFQALAVAAMCVQEQANMRPVIADVVTALSYLASQKYDPNTQTLQSSRLAPGTPPRSKRGY

SEQ ID NO: 12967 - protein, 361 aa, Glycine max
MEGQSSLVDPIKATPGKLKRNPSMNSKNSSKNGNPEHIAAQTFSFRELATATRNFRAECLLGEGGFGRVYKGRLENINQIVAIKQLDRNGLQGNREFLVEVLMLSLLHHPNLVNLIGYCADGDQRLLVYEFMSLGSLEDHLHDISPGKKRLDWNTRMKIAAGAARGLEYLHDKANPPVIYRDLKCSNILLGEGYHPKLSDFGLAKLGPVGENTHVSTRVMGTYGYCAPEYAMTGQLTLKSDVYSFGVVLLEIITGRKAIDNSKAAGEQNLVAWARPLFKDRRKFSQMADPMLQGQYPPRGLFQALAVAAMCVQEQANMRPVIADVVTALSYLASQKYDPNTQTLQSSRLAPGTPPRSKRGY

SEQ ID NO: 12968 - protein, 338 aa, Glycine max
MNSKNSSKNGNPEHIAAQTFSFRELATATRNFRAECLLGEGGFGRVYKGRLENINQIVAIKQLDRNGLQGNREFLVEVLMLSLLHHPNLVNLIGYCADGDQRLLVYEFMSLGSLEDHLHDISPGKKRLDWNTRMKIAAGAARGLEYLHDKANPPVIYRDLKCSNILLGEGYHPKLSDFGLAKLGPVGENTHVSTRVMGTYGYCAPEYAMTGQLTLKSDVYSFGVVLLEIITGRKAIDNSKAAGEQNLVAWARPLFKDRRKFSQMADPMLQGQYPPRGLFQALAVAAMCVQEQANMRPVIADVVTALSYLASQKYDPNTQTLQSSRLAPGTPPRSKRGY

SEQ ID NO: 12969 - DNA, 1185 bp, Glycine max
  misc_feature (477)..(477): n is a, c, g, or t
  misc_feature (479)..(480): n is a, c, g, or t
  misc_feature (705)..(705): n is a, c, g, or t
  misc_feature (821)..(821): n is a, c, g, or t
  misc_feature (857)..(857): n is a, c, g, or t
  misc_feature (889)..(889): n is a, c, g, or t
  misc_feature (1078)..(1078): n is a, c, g, or t
  misc_feature (1125)..(1125): n is a, c, g, or t
  misc_feature (1127)..(1127): n is a, c, g, or t
  misc_feature (1154)..(1154): n is a, c, g, or t
gatatggtaatgatactagctgctatagtctcataatcatggatgtatatattgatggtctgtgtttgaaatgattgtaaacagggaatggaggaagacagggatctgagggatgaggaggagttcctgagaaacatcctcagtgaaccttctgagagtgagatggtaaccgttgggtcagccaaaaggcctccgaggacatacattttgtcttttgataactccaccataataccagctactcctgaacccacttccagaaaacgcacacgccaaccacaaaatctcaacttagaaccaattaaaccaaaccccaacacccagcctggaaagaggggtagaagctgttcccagactctggatcacattatggccgaaagaaaaaggagacaggaactcacccagaagttcattgctctttcagccactatccctggcttgaagaagacggacaagagttctatacttggcgaagcnanngattacgtgaaacaacttcaagaacgcgtgacggagcttgaacagagaaacatgagagggaaagaatcaatgataatcctcaagaagagtgaagtgtgtaactcaagtgaaacaaattctgaggattgctgtagagccagcgaaatgctccctgatgttgaagcaagagtgatggagaatgaggtactcattgagatccattgcgagaaggaagatggggttganctcaaaatattggaccaccttgaaaatcttcaactctgtgtcaccgccagcagcgtattgccctttgggaattcaactcttggtattactattatcgctcagatgggtgacgcgtncaaaatgaaggtgaatgatctagtcccaaaactaanacaagtgctgttgaatcgcatgaacgtcaatnccgatccgtactagtgtatcaaattattcaagcagattgttgtgtacggactcactctttttcttcttctttttttttatttattttttgtggtccgatcgcgtatgaactttgaagctgtaaaggtttgacaagtttgttgggctttgtgtaggagtttgatctttatgcttttatgagtaggtagcnctttatagttttgtgtgtgtcttgtgctgctcgagtaacagcacatntntcatgtgcaatcttcccgttcgtgctnttgtacataacatcaatcaaacgtgtttggg

SEQ ID NO: 12970 - protein, 271 aa, Glycine max
  misc_feature (130)..(131): Xaa can be any naturally occurring amino acid
  misc_feature (206)..(206): Xaa can be any naturally occurring amino acid
  misc_feature (245)..(245): Xaa can be any naturally occurring amino acid
  misc_feature (257)..(257): Xaa can be any naturally occurring amino acid
  misc_feature (268)..(268): Xaa can be any naturally occurring amino acid
MEEDRDLRDEEEFLRNILSEPSESEMVTVGSAKRPPRTYILSFDNSTIIPATPEPTSRKRTRQPQNLNLEPIKPNPNTQPGKRGRSCSQTLDHIMAERKRRQELTQKFIALSATIPGLKKTDKSSILGEXXDYVKQLQERVTELEQRNMRGKESMIILKKSEVCNSSETNSEDCCRASEMLPDVEARVMENEVLIEIHCEKEDGVXLKILDHLENLQLCVTASSVLPFGNSTLGITIIAQMGDAXKMKVNDLVPKLXQVLLNRMNVNXDPY

SEQ ID NO: 12971 - protein, 246 aa, Glycine max
  misc_feature (105)..(106): Xaa can be any naturally occurring amino acid
  misc_feature (181)..(181): Xaa can be any naturally occurring amino acid
  misc_feature (220)..(220): Xaa can be any naturally occurring amino acid
  misc_feature (232)..(232): Xaa can be any naturally occurring amino acid
  misc_feature (243)..(243): Xaa can be any naturally occurring amino acid
MVTVGSAKRPPRTYILSFDNSTIIPATPEPTSRKRTRQPQNLNLEPIKPNPNTQPGKRGRSCSQTLDHIMAERKRRQELTQKFIALSATIPGLKKTDKSSILGEXXDYVKQLQERVTELEQRNMRGKESMIILKKSEVCNSSETNSEDCCRASEMLPDVEARVMENEVLIEIHCEKEDGVXLKILDHLENLQLCVTASSVLPFGNSTLGITIIAQMGDAXKMKVNDLVPKLXQVLLNRMNVNXDPY

SEQ ID NO: 12972 - protein, 177 aa, Glycine max
  misc_feature (36)..(37): Xaa can be any naturally occurring amino acid
  misc_feature (112)..(112): Xaa can be any naturally occurring amino acid
  misc_feature (151)..(151): Xaa can be any naturally occurring amino acid
  misc_feature (163)..(163): Xaa can be any naturally occurring amino acid
  misc_feature (174)..(174): Xaa can be any naturally occurring amino acid
MAERKRRQELTQKFIALSATIPGLKKTDKSSILGEXXDYVKQLQERVTELEQRNMRGKESMIILKKSEVCNSSETNSEDCCRASEMLPDVEARVMENEVLIEIHCEKEDGVXLKILDHLENLQLCVTASSVLPFGNSTLGITIIAQMGDAXKMKVNDLVPKLXQVLLNRMNVNXDPY

SEQ ID NO: 12973 - DNA, 1406 bp, Glycine max
gaccgagctagctagctagcaagcaagcacagagatggaggcaaagcgaggccatgccctcatgtgcttggcacgtgtttcactcttcctctgcgctctaaccctatccgctgctcacggaagcaccacggttcaagacatcgcgagaaagttgaaactcggggacaacgagcttctgcgcacggagaagaagttcaaggttttcatggagaattacgggaggagctactccacagaggaggagtatttgcgccgtttggggattttcgcccagaacatggtcagagcggcggagcatcaggcgctggaccccaccgccgtccacggcgtcacgcagttctcccttcccgtctcgaataatgccgccggcggtattgcgccgccgttggaggtggacgggctgccggagaattttgattggagagagaaaggagctgtcaccgaagttaagttacagggtagatgtggatcatgctgggctttcagcaccacaggatctatagaaggagccaattttcttgccaccggaaagctcgtcagtcttagtgaccaacagctccttgactgtgacaacaagtgtgacataacagaaaagacttcatgtgacaatgggtgtaatggaggtcttatgacaaatgcctacaattatttgctcgagtctggtgggttggaggaggagtcttcatatccctacactggggagagaggtgaatgcaagtttgatccagagaaaatagcagttaagatcacaaatttcaccaatatccctgctgatgagaaccaaattgccgcatatttagtaaaaaatggtccacttgctatgggcgtgaatgcaattttcatgcaaacatacattggtggtgtctcatgccctctcatatgtagcaagaaaaggctgaaccatggtgtgttacttgtgggatatggtgcaaaaggcttctcaattcttaggcttggcaacaaaccatactggatcatcaagaattcgtggggggagaaatggggagaagatggctattacaagctctgcagagggcatggcatgtgtggaataaacactatggtttctgctgcaatggtgcctcaaccacaaacaacacctacaaagaattatgcttcttattagctatgcacttaaggaaatctaaataaatatttttcattctaggtgatgtatcatgtatgtaccaaaatattttggtacgtaagtcttttaaaaagtttgcatctcctctttggttttccttagttctgaaagttatctcctaagaagacaatcatatgtactgtacgtagtgtgaagatatagtattgtatgctgcagaatatgattgtctaataaggtggactagctgtaataaaagatatttccaggtagaaaacagagcaaatcatgttaaagagct

SEQ ID NO: 12974 - protein, 363 aa, Glycine max
MEAKRGHALMCLARVSLFLCALTLSAAHGSTTVQDIARKLKLGDNELLRTEKKFKVFMENYGRSYSTEEEYLRRLGIFAQNMVRAAEHQALDPTAVHGVTQFSLPVSNNAAGGIAPPLEVDGLPENFDWREKGAVTEVKLQGRCGSCWAFSTTGSIEGANFLATGKLVSLSDQQLLDCDNKCDITEKTSCDNGCNGGLMTNAYNYLLESGGLEEESSYPYTGERGECKFDPEKIAVKITNFTNIPADENQIAAYLVKNGPLAMGVNAIFMQTYIGGVSCPLICSKKRLNHGVLLVGYGAKGFSILRLGNKPYWIIKNSWGEKWGEDGYYKLCRGHGMCGINTMVSAAMVPQPQTTPTKNYASY

SEQ ID NO: 12975 - protein, 354 aa, Glycine max
MCLARVSLFLCALTLSAAHGSTTVQDIARKLKLGDNELLRTEKKFKVFMENYGRSYSTEEEYLRRLGIFAQNMVRAAEHQALDPTAVHGVTQFSLPVSNNAAGGIAPPLEVDGLPENFDWREKGAVTEVKLQGRCGSCWAFSTTGSIEGANFLATGKLVSLSDQQLLDCDNKCDITEKTSCDNGCNGGLMTNAYNYLLESGGLEEESSYPYTGERGECKFDPEKIAVKITNFTNIPADENQIAAYLVKNGPLAMGVNAIFMQTYIGGVSCPLICSKKRLNHGVLLVGYGAKGFSILRLGNKPYWIIKNSWGEKWGEDGYYKLCRGHGMCGINTMVSAAMVPQPQTTPTKNYASY

SEQ ID NO: 12976 - protein, 306 aa, Glycine max
MENYGRSYSTEEEYLRRLGIFAQNMVRAAEHQALDPTAVHGVTQFSLPVSNNAAGGIAPPLEVDGLPENFDWREKGAVTEVKLQGRCGSCWAFSTTGSIEGANFLATGKLVSLSDQQLLDCDNKCDITEKTSCDNGCNGGLMTNAYNYLLESGGLEEESSYPYTGERGECKFDPEKIAVKITNFTNIPADENQIAAYLVKNGPLAMGVNAIFMQTYIGGVSCPLICSKKRLNHGVLLVGYGAKGFSILRLGNKPYWIIKNSWGEKWGEDGYYKLCRGHGMCGINTMVSAAMVPQPQTTPTKNYASY

SEQ ID NO: 12977 - DNA, 429 bp, Glycine max
atcgcatttcatagcactcaccctcagcattcttggcagaaaccctacatttataaaagttagagaaatgccaattgttgggggtactgggatcttcaaatatgcaaggggttctgctgtgcttacgacatatgtgtatgacatcaccggtggtgttgcaattgttgaatacaacgtgactgtcatgcatgtttgagaaataggttgaagctttatgtaggtttattttcggtgtttttaaggtccttaagaggatatccctcttgaaaagtgagtaggttttaaatttaagcagcagcagtcgtcgtgcatgttgtattaagtagaggctagaaggcagggagacgtacacagaactctcactgtgggaaaatattttatatccgttgggttaaacaaaaaaataaataaaaatggatcaattaattg

SEQ ID NO: 12978 - protein, 64 aa, Glycine max
SHFIALTLSILGRNPTFIKVREMPIVGGTGIFKYARGSAVLTTYVYDITGGVAIVEYNVTVMHV

SEQ ID NO: 12979 - protein, 42 aa, Glycine max
MPIVGGTGIFKYARGSAVLTTYVYDITGGVAIVEYNVTVMHV

SEQ ID NO: 12980 - DNA, 2415 bp, Glycine max
agcgtgtctgagaattccgtgtcgttgacgagcgagggtgcgactatgacctgcgacttcgatctccggcaatccgcggcgaggttcgtccagtaaaacggcgccgtatagcgggatctgcgacgctgggcggagtggcaatggagggcgagaacgcgagcaacaaggtgatcgagttgatgaacgagatagccagcatctccgattacaggcctccggtgaagaagcagtactgcaacttggcgcggaggctgaagcttctgatcccgatgttcgaggagattagggacatgaacaaagacgcgcttcccgataacacttccaacgccgtcctcgccttcaaggaagctctcgaatccgctatggaactcctcagattcggaagcgagggcagcaagctttacttggtccttgagcgggacgaaattatgaataaattctacaaggtgacagctcagttggaacagtacgttgggtggtatttcctatgataaacttgatatatcagatgaagttaaagagcaggttgagttggttcttgcccagttcagaagagctaaagggagggttgatgaaccagatgtcaggttgtatgaggatatgttgtctgtttacaacaacagcagtgatgcagctacagatccatctgttctaagtcaattagctgaaaagttgaaattgatgggaatagctgaccttactcaagaatcacttgctttgcatgagatggtggcatcaagtggtggggatccaggggcacgcattgagaaaatgtcaatgttattgaagaagataaaggatttcgtgcaaatagaaaatctagtcaaggatgataatttaggaggaaaaggcattttctcaaaagtctatggacttgggacaaatgaaaagagtcatcaagctcctgttatccctgatgattttcgatgtccgatttccctggaattaatgaaggaccctgtcattgtttcaacgggacagacttatgagcgtacttgtattgagaagtggttgcaagcagggcatggaacctgccccaaaacacagcagactctcactagtactgttctcacgcctaactatgtattgcgaagcctcatagcacaatggtgtgaagccaatggcatagagccaccaaaacgacctagtggttcacaacctagtaaatcagcatcagcctactcacccgctgagcaaagtaagattggaagtcttctccaaaagctcatatctgtcagtcctgaagaccagagatcagctgcaggtgagatccgccttcttgcaaagcgcaatgctgataaccgcgttgccattgctgaagctggtgcaatacctctccttgtcagtctcttgtctgtgcctgactcccgcactcaagaacatgctgtgacagcgctcctgaatctttccatatacgaaaataacaaaggaagtattgtttcttcaggagcagttccaggtatagttcatgtgctgaagaagggaagcatggaagctcgggaaaatgcagctgcaacacttttcagcctttcagttatagatgaaaacaaggttacaattgggtctttaggagccataccaccactggtgacactgctaagtgagggtagccaaaggggtaagaaagatgctgcaacagcactcttcaatttgtgcatttaccagggcaacaagggaaaggcagtgagggctggcgttattcccacactgatgcgactactgaccgaacctagcgggggaatggtggatgaagcattagctattttggcaatattggccagccatcctgaagggaaggttactattagagcttcagaggcagtgccagtgttagtagagtttattgggaatggctccccaaggaacaaagagaatgctgctgctgttttagttcacctctgttctggagatcaacaatatctagcacaggcccaagagctgggggtgatgggtccactgttggaattggctcaaaatggaacagacagaggcaaaagaaaggctggacaattgctagagcgtatgagcaggctagttgagcaacagcaggaagttccaacacaaactgaaactcaagctcagaacgaggataccgaaccacctttgattactaaccccgatgattcctaagatgtcttgttataccttgttttcattttgtctttttgttcttttaaaagtgttgaaagaagcatctgtttggaggaaagggtggaagatcaccttcctactccataagttatttgtttgtttgtgtgatattcagagatgcaatgcaaaaacttgtgaaagtgggcaagaagaaatcgaatcaaatgggcaagcctgacgtggaaaaatgtataattgtaacatgtactatattctaatcatcctcagattttaatgaagagatgttttgtttattcgtaccgc

SEQ ID NO: 12981 - protein, 509 aa, Glycine max
MLSVYNNSSDAATDPSVLSQLAEKLKLMGIADLTQESLALHEMVASSGGDPGARIEKMSMLLKKIKDFVQIENLVKDDNLGGKGIFSKVYGLGTNEKSHQAPVIPDDFRCPISLELMKDPVIVSTGQTYERTCIEKWLQAGHGTCPKTQQTLTSTVLTPNYVLRSLIAQWCEANGIEPPKRPSGSQPSKSASAYSPAEQSKIGSLLQKLISVSPEDQRSAAGEIRLLAKRNADNRVAIAEAGAIPLLVSLLSVPDSRTQEHAVTALLNLSIYENNKGSIVSSGAVPGIVHVLKKGSMEARENAAATLFSLSVIDENKVTIGSLGAIPPLVTLLSEGSQRGKKDAATALFNLCIYQGNKGKAVRAGVIPTLMRLLTEPSGGMVDEALAILAILASHPEGKVTIRASEAVPVLVEFIGNGSPRNKENAAAVLVHLCSGDQQYLAQAQELGVMGPLLELAQNGTDRGKRKAGQLLERMSRLVEQQQEVPTQTETQAQNEDTEPPLITNPDDS

SEQ ID NO: 12982 - protein, 482 aa, Glycine max
MGIADLTQESLALHEMVASSGGDPGARIEKMSMLLKKIKDFVQIENLVKDDNLGGKGIFSKVYGLGTNEKSHQAPVIPDDFRCPISLELMKDPVIVSTGQTYERTCIEKWLQAGHGTCPKTQQTLTSTVLTPNYVLRSLIAQWCEANGIEPPKRPSGSQPSKSASAYSPAEQSKIGSLLQKLISVSPEDQRSAAGEIRLLAKRNADNRVAIAEAGAIPLLVSLLSVPDSRTQEHAVTALLNLSIYENNKGSIVSSGAVPGIVHVLKKGSMEARENAAATLFSLSVIDENKVTIGSLGAIPPLVTLLSEGSQRGKKDAATALFNLCIYQGNKGKAVRAGVIPTLMRLLTEPSGGMVDEALAILAILASHPEGKVTIRASEAVPVLVEFIGNGSPRNKENAAAVLVHLCSGDQQYLAQAQELGVMGPLLELAQNGTDRGKRKAGQLLERMSRLVEQQQEVPTQTETQAQNEDTEPPLITNPDDS

SEQ ID NO: 12983 - protein, 467 aa, Glycine max
MVASSGGDPGARIEKMSMLLKKIKDFVQIENLVKDDNLGGKGIFSKVYGLGTNEKSHQAPVIPDDFRCPISLELMKDPVIVSTGQTYERTCIEKWLQAGHGTCPKTQQTLTSTVLTPNYVLRSLIAQWCEANGIEPPKRPSGSQPSKSASAYSPAEQSKIGSLLQKLISVSPEDQRSAAGEIRLLAKRNADNRVAIAEAGAIPLLVSLLSVPDSRTQEHAVTALLNLSIYENNKGSIVSSGAVPGIVHVLKKGSMEARENAAATLFSLSVIDENKVTIGSLGAIPPLVTLLSEGSQRGKKDAATALFNLCIYQGNKGKAVRAGVIPTLMRLLTEPSGGMVDEALAILAILASHPEGKVTIRASEAVPVLVEFIGNGSPRNKENAAAVLVHLCSGDQQYLAQAQELGVMGPLLELAQNGTDRGKRKAGQLLERMSRLVEQQQEVPTQTETQAQNEDTEPPLITNPDDS

SEQ ID NO: 12984 - DNA, 565 bp, Glycine max
acaacatcatcatcaacaacaagcagatcaatctctctctctctctcaaccataatagtcatgggtttgaaggaggattttgagcagtatgctgagaaagcaaagactttgccaccgactcaatcaaacgaagacttgcttatcctttatggattgtacaaacaggccaccgttggacctgtcaacaccagccgtcctggaatgttcaacatgagggacagagctaaatgggatgcatggaaggctgttgaagggaaatccaaggacgaagcaatgggtgattacatcattaaggtgaaacagctgctggaagcagctggcttgcctgcttgataacattgtcatgccttgctttctgattctgtgctagaagttcacaacagtttggaaataaacaattgcagtgtttgaagcttttattatcataatcatatttatttctaatgatttagacatgttgcttttgagtttagttatctgtatcactgttattggaaatgcctgtagacagatgctgaggacctgaaaatttctgtctagtataattaaaactacttcgactttt

SEQ ID NO: 12985 - protein, 110 aa, Glycine max
TTSSSTTSRSISLSLSTIIVMGLKEDFEQYAEKAKTLPPTQSNEDLLILYGLYKQATVGPVNTSRPGMFNMRDRAKWDAWKAVEGKSKDEAMGDYIIKVKQLLEAAGLPA

SEQ ID NO: 12986 - protein, 90 aa, Glycine max
MGLKEDFEQYAEKAKTLPPTQSNEDLLILYGLYKQATVGPVNTSRPGMFNMRDRAKWDAWKAVEGKSKDEAMGDYIIKVKQLLEAAGLPA

SEQ ID NO: 12987 - DNA, 985 bp, Glycine max
aacaagaaaacggattttaatcgggtcaaaccaaattggggtatataaagtctgagtgttagggttttaggttgttggatgtgttgggggatccactgttgcagaatccagtttgtgacaccaaatccaaatcactattcactatgactactcagacccaagaggagcttcttgctcaacatctcgaacagcaaaagatccatgatgatgaacctgtcgtcgaggatgataatgatgaggagaggatgatgatgatgatgaggatgacgaggatgatgaccatgccgacggactagaaggtgatgcatctggtaggtccaagcagaccagaagtgaaaagaagagtcgcaaggcaatgcttaaacttggaatgaaacctgtaacaggtgtcagccgagtgacggtcaagaagagcaagaatatcctgttcgtcatctcaaaaccagacgttttcaagagtccaacgtctgacacgtacattatatttggggaagccaagattgaagacttgagctcacagctacaaactcaggcagcagagcaattcaaggctcctaatttgagcaatgttggatcaaagcctgaatcttctgctgttgctcaagatgatgaggaagtggatgaggctggtgtagatcccaaggacatagagttggtgatgactcaagctggcgtgtcaagacctaaagccgttaaagctctcaaggcggccggtggtgacattgttgctgccattatggagttaactaattaattgtctggtttgtctgaattttagaatgtgtagctatttttctttgttgattgaaatttttgttttccttgaatttgaaatactggtttcagtggtttgtcaattgtctgtaattgtttgcacggaaagaaaaagactgtagactcatttgcaacccagtttcgatcttgagtgagaaacatatgattacacaccatttgtcttgctattatttaagacaagacttggatg

SEQ ID NO: 12988 - protein, 132 aa, Glycine max
MLKLGMKPVTGVSRVTVKKSKNILFVISKPDVFKSPTSDTYIIFGEAKIEDLSSQLQTQAAEQFKAPNLSNVGSKPESSAVAQDDEEVDEAGVDPKDIELVMTQAGVSRPKAVKALKAAGGDIVAAIMELTN

SEQ ID NO: 12989 - protein, 127 aa, Glycine max
MKPVTGVSRVTVKKSKNILFVISKPDVFKSPTSDTYIIFGEAKIEDLSSQLQTQAAEQFKAPNLSNVGSKPESSAVAQDDEEVDEAGVDPKDIELVMTQAGVSRPKAVKALKAAGGDIVAAIMELTN

SEQ ID NO: 12990 - DNA, 2391 bp, Glycine max
acactgagtgcaacaaagttttaacatgaaaggcaataatacacttttgttgcatttattctacactactctcttcctgtttcttgtagtgtcaagttcatcttcaacagggaatgaaagtaacgatgacactaacagtaaagaagtttatatcgtgtacatgggagctgcagattcaacaaaagcttctcttaaaaatgagcacgctcagattctgaattcagtgctaagaaggaatgagaatgccctagtacggaactacaagcatggtttctctgggttcgcagctcgtctatcaaaagaggaggcaaactcaattgctcagaaacctggtgtggtgtctgttttccctgaccccattctgaagctccacactacacgttcatgggatttcctcaaaagccaaactcgtgtcaatatcgacaccaaaccaaatacgctgtccggttcttctttttcttcatcagacgtcattcttggcgtcttagacacaggcatatggccagaggcggcgagttttagcgacaagggtttcggtcctgttccatcccgatggaaaggcacctgcatgacatcaaaagacttcaattcctcttgttgtaacaggaagataattggcgcgaggttttaccctaacccagaggagaaaacggcaagggatttcaacggacatgggactcacgtttcgtcgacggcagtgggcgtgccggtgagtggcgcatcgttctatggtctggcggcggggacggcaaggggtgggtcccctgagtcaaggttggcggtttacaaagtgtgtggggcttttgggtcatgtcctgggtcggccattcttgcggggtttgacgatgccattcacgacggagtggatatcttgtcgctgtcgctcggtggattcggtggaaccaaaaccgatttgaccaccgacccgattgcgattggagcattccactccgtccagcgcggcatcctggtggtctgcgccgccgggaacgacggagaaccattcaccgttctcaacgacgcaccttggattttaaccgttgcagcttccaccatcgaccgtgatcttcaatccgacgtggtcttgggtaataaccaagtcgtcaagggaagagccataaatttctcccctcttttaaattctcccgattatccaatgatatatgctgagtctgctgccagggcaaatatctccaacataactgatgcaagacaatgccacccagattcattagatccaaaaaaagtcatagggaagattgtggtttgtgatggaaaaaatgacatttattattcaactgatgagaaaattgtcatagtgaaggcgttgggaggaataggtctggttcatattactgatcaatctggatcagtagcattttattatgtggacttcccagtaacagaggtaaaatcaaaacatggcgacgcaatcctccagtacatcaactcaactagccatccagtgggaacaatactagcaacagttacaattcctgattataagcctgctccccgggtgggttatttttcatcaagagggccttcattgattacaagcaatgttctcaagcctgatattgcagccccgggagttaacattctcgctgcatggtttggaaatgacacatcagaggttccaaaaggaagaaagccctcactatatcgcatactctcaggaacttccatggctactccacatgtttcagggcttgcatgcagtgtcaaaagaaaaaaccccacttggagtgcctccgcaatcaaatctgccatcatgacttcagcaattcaaaatgacaatttgaagggtcccataacaacggattcagggttgatagccacaccttatgactatggagcaggggcaattacaacatctgaaccattgcaaccggggctagtttatgaaaccaacaacgttgactacttgaactatttgtgttacaatggacttaacataaccatgataaaggtcatctccggaactgtccccgagaatttcaattgtcccaaggattcgagctctgatctcatctccagcatcaactacccttccatagcagtaaacttcactggcaaagcagacgcggtcgtgagtagaactgtcacaaacgttgacgaagaagatgaaacagtgtacttccccgttgttgaagctcctagtgaagtaattgtcacactctttccatataatcttgagtttacgacaagtattaaaaaacaaagctacaatattactttcagaccgaagacctccttgaagaaagatttgtttggatctatcacttggagtaacgacaaatatatggttcgaattccttttgtattaactaaatagtgaaattaaaaagtagcgatgaataaatgcaagctaagttcttcgtggtgcct

SEQ ID NO: 12991 - protein, 770 aa, Glycine max
MKGNNTLLLHLFYTTLFLFLVVSSSSSTGNESNDDTNSKEVYIVYMGAADSTKASLKNEHAQILNSVLRRNENALVRNYKHGFSGFAARLSKEEANSIAQKPGVVSVFPDPILKLHTTRSWDFLKSQTRVNIDTKPNTLSGSSFSSSDVILGVLDTGIWPEAASFSDKGFGPVPSRWKGTCMTSKDFNSSCCNRKIIGARFYPNPEEKTARDFNGHGTHVSSTAVGVPVSGASFYGLAAGTARGGSPESRLAVYKVCGAFGSCPGSAILAGFDDAIHDGVDILSLSLGGFGGTKTDLTTDPIAIGAFHSVQRGILVVCAAGNDGEPFTVLNDAPWILTVAASTIDRDLQSDVVLGNNQVVKGRAINFSPLLNSPDYPMIYAESAARANISNITDARQCHPDSLDPKKVIGKIVVCDGKNDIYYSTDEKIVIVKALGGIGLVHITDQSGSVAFYYVDFPVTEVKSKHGDAILQYINSTSHPVGTILATVTIPDYKPAPRVGYFSSRGPSLITSNVLKPDIAAPGVNILAAWFGNDTSEVPKGRKPSLYRILSGTSMATPHVSGLACSVKRKNPTWSASAIKSAIMTSAIQNDNLKGPITTDSGLIATPYDYGAGAITTSEPLQPGLVYETNNVDYLNYLCYNGLNITMIKVISGTVPENFNCPKDSSSDLISSINYPSIAVNFTGKADAVVSRTVTNVDEEDETVYFPVVEAPSEVIVTLFPYNLEFTTSIKKQSYNITFRPKTSLKKDLFGSITWSNDKYMVRIPFVLTK

SEQ ID NO: 12992 - protein, 725 aa, Glycine max
MGAADSTKASLKNEHAQILNSVLRRNENALVRNYKHGFSGFAARLSKEEANSIAQKPGVVSVFPDPILKLHTTRSWDFLKSQTRVNIDTKPNTLSGSSFSSSDVILGVLDTGIWPEAASFSDKGFGPVPSRWKGTCMTSKDFNSSCCNRKIIGARFYPNPEEKTARDFNGHGTHVSSTAVGVPVSGASFYGLAAGTARGGSPESRLAVYKVCGAFGSCPGSAILAGFDDAIHDGVDILSLSLGGFGGTKTDLTTDPIAIGAFHSVQRGILVVCAAGNDGEPFTVLNDAPWILTVAASTIDRDLQSDVVLGNNQVVKGRAINFSPLLNSPDYPMIYAESAARANISNITDARQCHPDSLDPKKVIGKIVVCDGKNDIYYSTDEKIVIVKALGGIGLVHITDQSGSVAFYYVDFPVTEVKSKHGDAILQYINSTSHPVGTILATVTIPDYKPAPRVGYFSSRGPSLITSNVLKPDIAAPGVNILAAWFGNDTSEVPKGRKPSLYRILSGTSMATPHVSGLACSVKRKNPTWSASAIKSAIMTSAIQNDNLKGPITTDSGLIATPYDYGAGAITTSEPLQPGLVYETNNVDYLNYLCYNGLNITMIKVISGTVPENFNCPKDSSSDLISSINYPSIAVNFTGKADAVVSRTVTNVDEEDETVYFPVVEAPSEVIVTLFPYNLEFTTSIKKQSYNITFRPKTSLKKDLFGSITWSNDKYMVRIPFVLTK

SEQ ID NO: 12993 - protein, 589 aa, Glycine max
MTSKDFNSSCCNRKIIGARFYPNPEEKTARDFNGHGTHVSSTAVGVPVSGASFYGLAAGTARGGSPESRLAVYKVCGAFGSCPGSAILAGFDDAIHDGVDILSLSLGGFGGTKTDLTTDPIAIGAFHSVQRGILVVCAAGNDGEPFTVLNDAPWILTVAASTIDRDLQSDVVLGNNQVVKGRAINFSPLLNSPDYPMIYAESAARANISNITDARQCHPDSLDPKKVIGKIVVCDGKNDIYYSTDEKIVIVKALGGIGLVHITDQSGSVAFYYVDFPVTEVKSKHGDAILQYINSTSHPVGTILATVTIPDYKPAPRVGYFSSRGPSLITSNVLKPDIAAPGVNILAAWFGNDTSEVPKGRKPSLYRILSGTSMATPHVSGLACSVKRKNPTWSASAIKSAIMTSAIQNDNLKGPITTDSGLIATPYDYGAGAITTSEPLQPGLVYETNNVDYLNYLCYNGLNITMIKVISGTVPENFNCPKDSSSDLISSINYPSIAVNFTGKADAVVSRTVTNVDEEDETVYFPVVEAPSEVIVTLFPYNLEFTTSIKKQSYNITFRPKTSLKKDLFGSITWSNDKYMVRIPFVLTK

SEQ ID NO: 12994 - DNA, 1477 bp, Glycine max
agattcaaacatctcaccctcttgtccctctctctcttctttcttctctcaccttttcctctctcaatttcctttcccttttgaaattatgatataagagaacaaaaactcccccttaaacagataaggtatatataagccacccttcagagcaatttgtccatcttcttcaatttattagcagaagatgtggtgcattagattaccttagtctttgtcctagtgtcttccacaacaacttggtccaacgtttccaaatattcacataagagaagaacaatagttctctccctagaaactcatgatatgctagataagccatccttaggagcaatatatccgtcctcttcaatttattagcagaaggtgtgttgcgtattagaccatagtctttttgtcattgttgtttcccaacaacgcagtttagcctttgagagcatcagcaatcacatggtgatcagaatatcattcagcaattgaagatcagtggcatcaggcataggctagcaagcaatgatatggctttcttcccagcaaatttcatgctacaaacacctcaccaagatgaccatcaacctccaccttcactcaactcaattataacttcatgtgcacctcaagagtaccatggtggaggagcatcctttcttggcaagagatctatgtcattttcagggattgaacttggagaagaagctaatgctgaggaagattctgatgatggatctcaggcaggagagaagaaaaggaggcttaacatggaacaagtgaagacacttgagaagagctttgagttgggaaacaagcttgaacctgagaggaaaatgcagcttgcaagggctcttggattgcaacctagacagattgctatatggttccagaacagaagggctaggtggaagaccaagcagttggagaaggactatgatcttctcaaaagacaatatgaagctatcaaagcagataatgatgcacttcaatttcagaaccaaaaacttcagactgaggtttctaattttcttccaacttctatatattggcactgaaaagcagagaaccaactgaatccatcaacctcaacaaagaaactgagggatccagcagcaatagaagtgagaacagctcagagattaagttggatatctcaagaacaccagctattgatagtcctctatccactcagcagaacaacaacaacagaacactctttccatcttctgctagaccaacaggagtggctcagcttttccaaaccactccaaggccagagattcagtgccaaaagattgatcacatggtcaaagaagagagcctaagcaacatgttctgtgccattgatgatcaatctggcctttggccttggttggagcagcaacatttcaattgatcatcatgcaaaaggagagtgtgagagtgagtgagagagtttcatattgcaatgtaatttttccttttccgaatgaaaatgaaatcatct

SEQ ID NO: 12995 - protein, 175 aa, Glycine max
MAFFPANFMLQTPHQDDHQPPPSLNSIITSCAPQEYHGGGASFLGKRSMSFSGIELGEEANAEEDSDDGSQAGEKKRRLNMEQVKTLEKSFELGNKLEPERKMQLARALGLQPRQIAIWFQNRRARWKTKQLEKDYDLLKRQYEAIKADNDALQFQNQKLQTEVSNFLPTSIYWH

SEQ ID NO: 12996 - protein, 167 aa, Glycine max
MLQTPHQDDHQPPPSLNSIITSCAPQEYHGGGASFLGKRSMSFSGIELGEEANAEEDSDDGSQAGEKKRRLNMEQVKTLEKSFELGNKLEPERKMQLARALGLQPRQIAIWFQNRRARWKTKQLEKDYDLLKRQYEAIKADNDALQFQNQKLQTEVSNFLPTSIYWH

SEQ ID NO: 12997 - protein, 127 aa, Glycine max
MSFSGIELGEEANAEEDSDDGSQAGEKKRRLNMEQVKTLEKSFELGNKLEPERKMQLARALGLQPRQIAIWFQNRRARWKTKQLEKDYDLLKRQYEAIKADNDALQFQNQKLQTEVSNFLPTSIYWH

SEQ ID NO: 12998 - DNA, 599 bp, Glycine max
tcaacattgttcaatgttgggtcaatatcaagtccaattgggtcatacttgctcagtgtgagggttgcagggtatttatatgatatggaagcaagaaggcaattggaagctttggggcaaaagacaagtccaggggaggagctgaactgcaatggtgatgagtgctacaagttggcattcattacaatgactgcagtttgcttgtttggggcatgtttgtcactcattctggtctttaggaccatacaactttatagaagagacctatacaagaaattcaatggtgctacaactgatgtaactgaaacaactgatgtaactgaaacggctgtgtcttagaaatatattggaccatcagctgcaaatgaaggctaggtgactttggtatggaaatggcaacagaaaattcagaaccagagcaatagctatagcaactactttgcaatcactaacaaatttacagtttataatgagtagtccttgtaaatttgtaatgttatcttttctaccttagagacctatttcggctagtgggataacactttattgttatttgttttttactgtgacaacttggtaacatagtttctttccgcttc

SEQ ID NO: 12999 - protein, 112 aa, Glycine max
STLFNVGSISSPIGSYLLSVRVAGYLYDMEARRQLEALGQKTSPGEELNCNGDECYKLAFITMTAVCLFGACLSLILVFRTIQLYRRDLYKKFNGATTDVTETTDVTETAVS

SEQ ID NO: 13000 - protein, 84 aa, Glycine max
MEARRQLEALGQKTSPGEELNCNGDECYKLAFITMTAVCLFGACLSLILVFRTIQLYRRDLYKKFNGATTDVTETTDVTETAVS

SEQ ID NO: 13001 - DNA, 2007 bp, Glycine max
acatttctcactctcgtctcgaagatcgagatatctatttagatctcagaaaaacagtgtttcatttcaattcattcagtcttattattattagggtttgccgattgagagagaaagagaaatgggagaacgaaaaggaatcccaatggctttggggctcttggcgatgatcctcttcttcattgcttcctcttcctctcacctcgttcgcgcttccgatgacgccgacgacgcgatcttctacgagtcgttcgacgaggattttgatggacggtggattgtatccgacaaggaggattacaatggtgtctggaagcatgccaagagtgatgggcatgatgattatggacttcttgttagtgaacaagccaggaaatatgctatagtcaaagaacttgccgagtctgtcagtcttaaggatggaacagttgttcttcagtttgagactcgccttcagaatggcctcgaatgtggtggtgcatatattaaatatcttcgaccccaggagagcggatggaaaccaaaggaatttgacaacgaatctccatattctatcatgtttggtcctgataagtgtggtgctacaaacaaggttcacttcattttcaagcataagaacccaaagagtggggagtatgttgagcatcatctcaagtatcccccttctgtcccatcggacaaactaactcatgtgtacactgcaattctgaagcctgataatgaattgcaaatcttgattgatggggaggagaagaaaaaggcaaatttcttgtcttctgaggactttgagcctcctcttataccttccaagacaatccctgatcctgatgataagaaacctgaggactgggacgaaagagccaaaatcccagacccaagtgctgtgaagccagatgactgggatgaggatgcacccatggaaatcttagatgaagaagcagagaaacctgaaggatggttggatgatgagccagaggaaattgatgacccagaggcaactaaaccagaagactgggatgatgaggaggatggtgaatgggaagccccaaagattgaaaacccaaagtgtgaggccgcccctggttgtggtgaatggaagaggccaacgaagaggaatccagcttataagggaaagtggagtgctccttacatcgataaccccagttacaagggcatatggaagcctcgcgagattccaaaccctgaatactttgaactcgcaaaacctgattttgagcctattgctgctattggcattgagatttggacaatgcaggatggcatcctatttgacaatgttctgatagctaacgatgataaagttgcagaatcctatcgggagactacatggaagcccaagtttaccgttgagaaagacaaactgaaggctgaagaggaggcggcaacgggttcagatggtatttcaggcttccagaagaaggtatttgacctcttgtacaagattgcagatattcccttcttgagcgagcacaaatctaagattttcgatctcattgagaaagctgagaaacagccaaatctcacaattggaattcttgtagctgttgtggttgtcttcgtgtcaattttcttcagactcatatttggtggcaagaaacctgcaaaggtggagaagaaaccagaacgcacagaagcttccaataaccaaggtagtggagagaatgaagaaaacaaagagaaggagaaacagaaagaggaagcatctaatgctgcgcgtcggaggccaaggcgagaaacttgaaatggttgaatctttattttaaagtggcgccctgtttagtatcatcatcaccacagataaattttgggcttagtttcattttaggtgcactctgttttcagtattttcttttttcttccttttaagaaaaggaaaagattatttgcttcaggggtgtagatcttctcctgtttttggagactcgagtgtttgagctagttgaagttgtacaattatttttctattaatggattctgtttttaacc

SEQ ID NO: 13002 - protein, 546 aa, Glycine max
MGERKGIPMALGLLAMILFFIASSSSHLVRASDDADDAIFYESFDEDFDGRWIVSDKEDYNGVWKHAKSDGHDDYGLLVSEQARKYAIVKELAESVSLKDGTVVLQFETRLQNGLECGGAYIKYLRPQESGWKPKEFDNESPYSIMFGPDKCGATNKVHFIFKHKNPKSGEYVEHHLKYPPSVPSDKLTHVYTAILKPDNELQILIDGEEKKKANFLSSEDFEPPLIPSKTIPDPDDKKPEDWDERAKIPDPSAVKPDDWDEDAPMEILDEEAEKPEGWLDDEPEEIDDPEATKPEDWDDEEDGEWEAPKIENPKCEAAPGCGEWKRPTKRNPAYKGKWSAPYIDNPSYKGIWKPREIPNPEYFELAKPDFEPIAAIGIEIWTMQDGILFDNVLIANDDKVAESYRETTWKPKFTVEKDKLKAEEEAATGSDGISGFQKKVFDLLYKIADIPFLSEHKSKIFDLIEKAEKQPNLTIGILVAVVVVFVSIFFRLIFGGKKPAKVEKKPERTEASNNQGSGENEENKEKEKQKEEASNAARRRPRRET

SEQ ID NO: 13003 - protein, 538 aa, Glycine max
MALGLLAMILFFIASSSSHLVRASDDADDAIFYESFDEDFDGRWIVSDKEDYNGVWKHAKSDGHDDYGLLVSEQARKYAIVKELAESVSLKDGTVVLQFETRLQNGLECGGAYIKYLRPQESGWKPKEFDNESPYSIMFGPDKCGATNKVHFIFKHKNPKSGEYVEHHLKYPPSVPSDKLTHVYTAILKPDNELQILIDGEEKKKANFLSSEDFEPPLIPSKTIPDPDDKKPEDWDERAKIPDPSAVKPDDWDEDAPMEILDEEAEKPEGWLDDEPEEIDDPEATKPEDWDDEEDGEWEAPKIENPKCEAAPGCGEWKRPTKRNPAYKGKWSAPYIDNPSYKGIWKPREIPNPEYFELAKPDFEPIAAIGIEIWTMQDGILFDNVLIANDDKVAESYRETTWKPKFTVEKDKLKAEEEAATGSDGISGFQKKVFDLLYKIADIPFLSEHKSKIFDLIEKAEKQPNLTIGILVAVVVVFVSIFFRLIFGGKKPAKVEKKPERTEASNNQGSGENEENKEKEKQKEEASNAARRRPRRET

SEQ ID NO: 13004 - protein, 531 aa, Glycine max
MILFFIASSSSHLVRASDDADDAIFYESFDEDFDGRWIVSDKEDYNGVWKHAKSDGHDDYGLLVSEQARKYAIVKELAESVSLKDGTVVLQFETRLQNGLECGGAYIKYLRPQESGWKPKEFDNESPYSIMFGPDKCGATNKVHFIFKHKNPKSGEYVEHHLKYPPSVPSDKLTHVYTAILKPDNELQILIDGEEKKKANFLSSEDFEPPLIPSKTIPDPDDKKPEDWDERAKIPDPSAVKPDDWDEDAPMEILDEEAEKPEGWLDDEPEEIDDPEATKPEDWDDEEDGEWEAPKIENPKCEAAPGCGEWKRPTKRNPAYKGKWSAPYIDNPSYKGIWKPREIPNPEYFELAKPDFEPIAAIGIEIWTMQDGILFDNVLIANDDKVAESYRETTWKPKFTVEKDKLKAEEEAATGSDGISGFQKKVFDLLYKIADIPFLSEHKSKIFDLIEKAEKQPNLTIGILVAVVVVFVSIFFRLIFGGKKPAKVEKKPERTEASNNQGSGENEENKEKEKQKEEASNAARRRPRRET

SEQ ID NO: 13005 - DNA, 984 bp, Glycine max
gctcttctctttctttgtcacaaacacaacacagcacccttcacacactgcacagtgcctcctttctagtttctactatctgcttcttcttcttcaattagggttttccccttctccgtgatcagcgccaacatcatgaacatgaatatcttcaagaagaaaacctcacccaaagaggctctgcggtcaagtaagagggaaatggctgttgcaaccagaggaattgaaagagagatagcatcacttcagatggaggaaaaaaaattggtggcagagattaaaagagaagcaaaaacaggaaatgaggctgccaccagaatcttagctcgtcaacttgttaggttacgtcaacagataaccaatttgcagggaagtcgtgctcagatcaggggtgtagcaactcacacacaggcattatatgcaagcacttcaatctctacaggaatgaagggtgcaactaaagcaatggtggcaatgaataagcaaatggcaccggcaaaacaggttaaagtgatcaaagaattccaaaagcaatcagcgcagttggacatgacgattgagatgatgtcagaatctattgatgaaactctagacaaagatgaagctgaggaagaaacagaagagctcactaaccaggttcttgatgagattggagtggatattgcatcccagttatcttctgctcccaaagggcgtattgcttcaaggaatactgaaaatgttgctccaagaccagcagaatcccaagatgtcgaagaacttgaaaagagattggcttctcttcgaagaatttaaatctctgctacagcctgtacccatatatatgtttcttaatgtacaaatcattatatatagcaatggagagattgtactattggcacctcttttaattaccaattttatgctgtgatgtgtgtttggatataaagaactagtaaaaatagttttagactggaatatatattactatcccaaacatttatt

SEQ ID NO: 13006 - protein, 219 aa, Glycine max
MNMNIFKKKTSPKEALRSSKREMAVATRGIEREIASLQMEEKKLVAEIKREAKTGNEAATRILARQLVRLRQQITNLQGSRAQIRGVATHTQALYASTSISTGMKGATKAMVAMNKQMAPAKQVKVIKEFQKQSAQLDMTIEMMSESIDETLDKDEAEEETEELTNQVLDEIGVDIASQLSSAPKGRIASRNTENVAPRPAESQDVEELEKRLASLRRI

SEQ ID NO: 13007 - protein, 217 aa, Glycine max
MNIFKKKTSPKEALRSSKREMAVATRGIEREIASLQMEEKKLVAEIKREAKTGNEAATRILARQLVRLRQQITNLQGSRAQIRGVATHTQALYASTSISTGMKGATKAMVAMNKQMAPAKQVKVIKEFQKQSAQLDMTIEMMSESIDETLDKDEAEEETEELTNQVLDEIGVDIASQLSSAPKGRIASRNTENVAPRPAESQDVEELEKRLASLRRI

SEQ ID NO: 13008 - protein, 197 aa, Glycine max
MAVATRGIEREIASLQMEEKKLVAEIKREAKTGNEAATRILARQLVRLRQQITNLQGSRAQIRGVATHTQALYASTSISTGMKGATKAMVAMNKQMAPAKQVKVIKEFQKQSAQLDMTIEMMSESIDETLDKDEAEEETEELTNQVLDEIGVDIASQLSSAPKGRIASRNTENVAPRPAESQDVEELEKRLASLRRI

SEQ ID NO: 13009 - DNA, 627 bp, Glycine max
gcagggtatgcatctggctgggtgcctgacatcgtccatgtacctggctcctacagatgatagggctgtcattagatgtgttaaaagtgctaacaaccatagctactccctcaatcttgtcctgcaagactacttgcatgcattcaggaaacagtaccctcaagctgtcatactttatgctgattactatgatgcctcccgcactgtcatgaagaatccaagcaaatacggattcaaagagaccttcaacgtttgctgtggatcaggagaaccaccttataacttcactgtgtttgccacatgtggcacacctaatgccactgtgtgttcaagcccttctcagtacatcaattgggatggtgttcatctcacggaggccatgtacaaagtaatttctagtatgtttttgcaaggaaatttcacccaacctccgtttaattttttgttggaaaaaaaggagagggtggggtgaatggttagtatttgggatttgcttgtccctatgactttaatgcatcagctaatgtaactataagtgagggaatcaggtcttacctgttttgctacaacttgtgtcctctgcacatcatatatgatgagaagttctaaggaatatgttgtatttgt

SEQ ID NO: 13010 - protein, 156 aa, Glycine max
QGMHLAGCLTSSMYLAPTDDRAVIRCVKSANNHSYSLNLVLQDYLHAFRKQYPQAVILYADYYDASRTVMKNPSKYGFKETFNVCCGSGEPPYNFTVFATCGTPNATVCSSPSQYINWDGVHLTEAMYKVISSMFLQGNFTQPPFNFLLEKKERVG

SEQ ID NO: 13011 - protein, 154 aa, Glycine max
MHLAGCLTSSMYLAPTDDRAVIRCVKSANNHSYSLNLVLQDYLHAFRKQYPQAVILYADYYDASRTVMKNPSKYGFKETFNVCCGSGEPPYNFTVFATCGTPNATVCSSPSQYINWDGVHLTEAMYKVISSMFLQGNFTQPPFNFLLEKKERVG

SEQ ID NO: 13012 - protein, 144 aa, Glycine max
MYLAPTDDRAVIRCVKSANNHSYSLNLVLQDYLHAFRKQYPQAVILYADYYDASRTVMKNPSKYGFKETFNVCCGSGEPPYNFTVFATCGTPNATVCSSPSQYINWDGVHLTEAMYKVISSMFLQGNFTQPPFNFLLEKKERVG

SEQ ID NO: 13013 - DNA, 1279 bp, Glycine max
  misc_feature (58)..(58): n is a, c, g, or t
  misc_feature (225)..(225): n is a, c, g, or t
attggacgaattgcagttgcccttatgctggttgttgtattttgtgctgtttgcaaanaaaaattagtgagaaggagaggcagcaattcaatgttttcgaggcatgtggatgtctgtgggtatacttggctgatttgcggacatcatcaggaggttcccatgtgcattacaatcccttttatgatccactgaagcatagtggtcctctgttgcccccagcagcancattagcccctactttgtggccccaattccaccttcgttgggcatgtccagaagaagctcaagctggggagattgaagcacaatgcaggaagatagttatgaaatatgctgagatgcagaaggctaaagaaatggcagaaaggaaagctaaagaagttacaaattccatggagtcgttgaatgctgaattacgacgtgagaagcagctaaacagctcagctatgaacatggccaagagtatgagcaaagaaaatatggccataaagcgtgcaattcagtcaatggggtgcaaggttcatgtctctggtagtagtggtgaatgcactgttgacattgaaagcaacccagacattctgtgttgttcctctaggaaagaatcaaatagtaatgtgcgtgatgacaaaaaggatatgtctgtttcagtagtgattacagcagatgatgatgatgatgatggaaacaacacaattggtcgggtatgtgaaacactctgcccatttcgctctggagatggaggctgcagatggccaaatggtggctgtgctcaactaggtagccagtatgttggtctgaaggcaaattttgatgcatttgaccaactatcaattaatgatagttatttcaagtctgagtgaacagggaatttacttcctaaaagactccgatagtgaacagtcgcataatcaattttggtttctttaagctatgaggatagttgttaattctttttaacactcctcgtgatgaaaaaatggggagaagtagtggaccctgtcattttgattgggtttcgggaattgtacaggctataagagttggctggagatcatcttggtgcatatgggaatgcattgggttgatacgcatcatggtggtccatattgatatatgcatgtgtataatttttacagtcgctgattacatcgtaattgctcttgaataagatcaattttgtacagacgatcaagcttttctgtttttaatgcatcttgagggatcaatgtatatcaagaataatgttaccctatattaatgaagaagatcgtcgaccttg

SEQ ID NO: 13014 - protein, 285 aa, Glycine max
  misc_feature (19)..(19): Xaa can be any naturally occurring amino acid
  misc_feature (75)..(75): Xaa can be any naturally occurring amino acid
WTNCSCPYAGCCILCCLQXKISEKERQQFNVFEACGCLWVYLADLRTSSGGSHVHYNPFYDPLKHSGPLLPPAAXLAPTLWPQFHLRWACPEEAQAGEIEAQCRKIVMKYAEMQKAKEMAERKAKEVTNSMESLNAELRREKQLNSSAMNMAKSMSKENMAIKRAIQSMGCKVHVSGSSGECTVDIESNPDILCCSSRKESNSNVRDDKKDMSVSVVITADDDDDDGNNTIGRVCETLCPFRSGDGGCRWPNGGCAQLGSQYVGLKANFDAFDQLSINDSYFKSE

SEQ ID NO: 13015 - protein, 178 aa, Glycine max
MKYAEMQKAKEMAERKAKEVTNSMESLNAELRREKQLNSSAMNMAKSMSKENMAIKRAIQSMGCKVHVSGSSGECTVDIESNPDILCCSSRKESNSNVRDDKKDMSVSVVITADDDDDDGNNTIGRVCETLCPFRSGDGGCRWPNGGCAQLGSQYVGLKANFDAFDQLSINDSYFKSE

SEQ ID NO: 13016 - protein, 173 aa, Glycine max
MQKAKEMAERKAKEVTNSMESLNAELRREKQLNSSAMNMAKSMSKENMAIKRAIQSMGCKVHVSGSSGECTVDIESNPDILCCSSRKESNSNVRDDKKDMSVSVVITADDDDDDGNNTIGRVCETLCPFRSGDGGCRWPNGGCAQLGSQYVGLKANFDAFDQLSINDSYFKSE

SEQ ID NO: 13017 - DNA, 1305 bp, Glycine max
  misc_feature (1235)..(1235): n is a, c, g, or t
acaagcgattgaggaaaggatccagcagaactgggcaaggcatgttgaatggtcctccaaaactggttattcttcacatggatatggctatccacaccttggatgatataatgagaagtactgagaatctcaatgagaaatatatcatagggtatggtgcgtctagcactgtatacaaatgtgttttgaagaattcccgaccaattgcaattaagcgactgtacaaccaacaagcacataatttaagggagtttgagactgaacttgaaacagttgggagcattagacatagaaaccttgtcaccttgcatggatatgctcttactccctatggaaatctccttttctatgactatatggcgaatggctcactgtgggatcttctacatggtcccttgaaggtaaaacttgattgggaaactcgcctgaggattgctgttggagcagcagaaggacttgcatatctccatcatgactgcaacccacgtatagttcacagggacatcaagtcttcaaatattctgttggatgagaactttgaggcgcatctttctgactttggcacggcaaaatgtatctcaacagcaaaaactcacgcatcaacttatgtccttggaactataggctatattgaccctgagtatgcccgaacatctaggctgaatgaaaaatcagatgtgtatagttttggaatagttctgctggagctacttactgggaagaaggccgtggacaatgagtccaatttgcatcaattgatattgtccaaggcagataacaacactgtaatggaagctgtggatccagaggtctctattacctgcactgatctggctcatgtcaagaagacctttcagcttgctttgctttgcacgaaaaagaacccttctgagaggcctagcatgcatgaagtagccagggtgctggtatcactacttccttcacctccaagtaaaatccttgcccctcctgcaaagaagttcgactatgcgcattttgtgatcgagaagggacaacagagaaaaatggaagaacaaaaacctcagcaggataacaactcatccaatgctcaatggtttgttcgctttggggatgttatctccaagagcacttgacctttcttacctatgtgcctgaaggattcatgtcagtgaaaaaactagtttctttttgtgattagatatcatatatcatttggatagaggttaaagggctttactattataggacgtttntactgtatatcttacaacagttgttttcaagcattgttatggcaaatggttaagagcacttacgatgctt

SEQ ID NO: 13018 - protein, 370 aa, Glycine max
KRLRKGSSRTGQGMLNGPPKLVILHMDMAIHTLDDIMRSTENLNEKYIIGYGASSTVYKCVLKNSRPIAIKRLYNQQAHNLREFETELETVGSIRHRNLVTLHGYALTPYGNLLFYDYMANGSLWDLLHGPLKVKLDWETRLRIAVGAAEGLAYLHHDCNPRIVHRDIKSSNILLDENFEAHLSDFGTAKCISTAKTHASTYVLGTIGYIDPEYARTSRLNEKSDVYSFGIVLLELLTGKKAVDNESNLHQLILSKADNNTVMEAVDPEVSITCTDLAHVKKTFQLALLCTKKNPSERPSMHEVARVLVSLLPSPPSKILAPPAKKFDYAHFVIEKGQQRKMEEQKPQQDNNSSNAQWFVRFGDVISKST

SEQ ID NO: 13019 - protein, 357 aa, Glycine max
MLNGPPKLVILHMDMAIHTLDDIMRSTENLNEKYIIGYGASSTVYKCVLKNSRPIAIKRLYNQQAHNLREFETELETVGSIRHRNLVTLHGYALTPYGNLLFYDYMANGSLWDLLHGPLKVKLDWETRLRIAVGAAEGLAYLHHDCNPRIVHRDIKSSNILLDENFEAHLSDFGTAKCISTAKTHASTYVLGTIGYIDPEYARTSRLNEKSDVYSFGIVLLELLTGKKAVDNESNLHQLILSKADNNTVMEAVDPEVSITCTDLAHVKKTFQLALLCTKKNPSERPSMHEVARVLVSLLPSPPSKILAPPAKKFDYAHFVIEKGQQRKMEEQKPQQDNNSSNAQWFVRFGDVISKST

SEQ ID NO: 13020 - protein, 345 aa, Glycine max
MDMAIHTLDDIMRSTENLNEKYIIGYGASSTVYKCVLKNSRPIAIKRLYNQQAHNLREFETELETVGSIRHRNLVTLHGYALTPYGNLLFYDYMANGSLWDLLHGPLKVKLDWETRLRIAVGAAEGLAYLHHDCNPRIVHRDIKSSNILLDENFEAHLSDFGTAKCISTAKTHASTYVLGTIGYIDPEYARTSRLNEKSDVYSFGIVLLELLTGKKAVDNESNLHQLILSKADNNTVMEAVDPEVSITCTDLAHVKKTFQLALLCTKKNPSERPSMHEVARVLVSLLPSPPSKILAPPAKKFDYAHFVIEKGQQRKMEEQKPQQDNNSSNAQWFVRFGDVISKST

SEQ ID NO: 13021 - DNA, 2050 bp, Glycine max
  misc_feature (206)..(206): n is a, c, g, or t
aaaactctctctctctctctctcttacaaacccgcaatttcacttcccctcttccaagagccaccggatcctgcaattcctctctctattagggtggtgcagcagtgatgggcaaattccagcttcgtctatattggagggcaagttgtggttcctaatgtgtcttgcatgttatttctccctgttagtgtaatgaaacgagtcanaatgcaggtttttaggcagagggagtagattattggaataagggagacacatggtgctttgatagcttttgcgaatttgttttatctttgactgcgttctgaaaatggaaaatcctgacgttgaaaagtctgaagaaaccaatagacaaattgacagtaacacaaaatctaattctaaacagcagagcgtagagaaagctaatgaacaccctgattggttacctgatggctggaacgtggaagtcagaacccgtaaaagtggtgtacacatgggatctggatataagtgttacattgagccattgaaaggatacaaattcttctccaaaccggaggtattacgatatctcgaaactgtaaaggacaacagttgcacttccaagaaggggaagaaatgcagtaacatgcattctccaaaacacaacagttgcacctccaagaaggagaagaaatgcagtaacatgcattctccaaacgacaacaattgcacttccaagaaggagaagaaatgcactaacatggattctccagacgacaacagttgcactctcaagaaggagaagaattgcagtaacatggattctccaaacgacaaaaagttgcacttccaagaaggagaagaattgcagtaacttggattctccaaacgataacagttgcactctcaaggagaagaattgcggtaacatggattctccaaacaacaacagtttcactcccgagaaggagaagaattgctgtaacatggattctccaatcgacaacagttgctcttccaagaagaagaattgcagtaacatggattctccaaccgatgttgtggttgagaagtctactgtggaggatttaccacctggatgggtgaaagaattaaagattaggaagaacagcaagggcattcggaaagatccgttttatatagatccagcgagtggatatgtattccgttccaagaaggatgtacttcggtatcttgaatctggtgatatacgttcatgtgcatttaagccaagtagaagacaagtccaagatgaagacaatttaactccaccacctgctgccaagagacagaaactgaagcagtctgcacccgaacaacagctttcttcagccacagaaattcttgataaaagcaacttagaattgctagatgctaacagctcaaggaaagggaaaaatgcaaatgtgtcatctggaatgatggttgcttctgttcccatgggtgaatctgttgaaaagatgcattcactggaggatggagctgcaaactcttctgaattgaagaaaacatctgacccaagtagctcagcacttttgaatgaatccttgaaagaatcagaacaagtactttctgcagatgatgtgcaagagaaggagcatgttgtgaatatgatggagaatgctattgaaaagaatcacagtaactatagcatatccaaaaacaggaaggagttcaatgtacctcaccggtcatcaccaagacttgctggaagtaaacctgtccagttggccaacaatgtgatgaatgaacagactctccaggttcctaaaagaaacttgaggaaaagtagaaacactctagatattgatatttctgaagaccaaacagtttctaaggaacaaccgcatcagcaagaagcagataaaatagaagacaaaaagccagaaattcaaattagctcaaacaaatcaagtaaaaagaaagagtaccaccttcctcgtcgggcttcaaaacgattagctgcaattgaacatgagtcaatgaactccaaagcaaaattgcagcaaagtgagtgtgggccagttacagtgcttgcagatcaagcaccaacaaatggaaagtc

SEQ ID NO: 13022 - protein, 385 aa, Glycine max
MDSPNNNSFTPEKEKNCCNMDSPIDNSCSSKKKNCSNMDSPTDVVVEKSTVEDLPPGWVKELKIRKNSKGIRKDPFYIDPASGYVFRSKKDVLRYLESGDIRSCAFKPSRRQVQDEDNLTPPPAAKRQKLKQSAPEQQLSSATEILDKSNLELLDANSSRKGKNANVSSGMMVASVPMGESVEKMHSLEDGAANSSELKKTSDPSSSALLNESLKESEQVLSADDVQEKEHVVNMMENAIEKNHSNYSISKNRKEFNVPHRSSPRLAGSKPVQLANNVMNEQTLQVPKRNLRKSRNTLDIDISEDQTVSKEQPHQQEADKIEDKKPEIQISSNKSSKKKEYHLPRRASKRLAAIEHESMNSKAKLQQSECGPVTVLADQAPTNGK

SEQ ID NO: 13023 - protein, 366 aa, Glycine max
MDSPIDNSCSSKKKNCSNMDSPTDVVVEKSTVEDLPPGWVKELKIRKNSKGIRKDPFYIDPASGYVFRSKKDVLRYLESGDIRSCAFKPSRRQVQDEDNLTPPPAAKRQKLKQSAPEQQLSSATEILDKSNLELLDANSSRKGKNANVSSGMMVASVPMGESVEKMHSLEDGAANSSELKKTSDPSSSALLNESLKESEQVLSADDVQEKEHVVNMMENAIEKNHSNYSISKNRKEFNVPHRSSPRLAGSKPVQLANNVMNEQTLQVPKRNLRKSRNTLDIDISEDQTVSKEQPHQQEADKIEDKKPEIQISSNKSSKKKEYHLPRRASKRLAAIEHESMNSKAKLQQSECGPVTVLADQAPTNGK

SEQ ID NO: 13024 - protein, 348 aa, Glycine max
MDSPTDVVVEKSTVEDLPPGWVKELKIRKNSKGIRKDPFYIDPASGYVFRSKKDVLRYLESGDIRSCAFKPSRRQVQDEDNLTPPPAAKRQKLKQSAPEQQLSSATEILDKSNLELLDANSSRKGKNANVSSGMMVASVPMGESVEKMHSLEDGAANSSELKKTSDPSSSALLNESLKESEQVLSADDVQEKEHVVNMMENAIEKNHSNYSISKNRKEFNVPHRSSPRLAGSKPVQLANNVMNEQTLQVPKRNLRKSRNTLDIDISEDQTVSKEQPHQQEADKIEDKKPEIQISSNKSSKKKEYHLPRRASKRLAAIEHESMNSKAKLQQSECGPVTVLADQAPTNGK

SEQ ID NO: 13025 - DNA, 733 bp, Glycine max
  misc_feature (124)..(124): n is a, c, g, or t
  misc_feature (679)..(679): n is a, c, g, or t
ggagacttggaagaggaagaggaagaggaagaggaggaggaggaggaggaagaagaagaagaaatggaggaggaggaacttgaagctggtattcagtctgttgatagtctgtcaagcactcccnctggagtggaaacacctgatgttatcgacctccggaagcaacagaggaaggagcctgagaggcctctttatcaagtacttgaagagaaggaagaaaaaattgcccctggaactttgcttggaaccacacacacttatgtggttggcactggcacacaggacaaatcaggtgctaaaagggttgatttgcttagaggtcagaagacagataaagtggatgtcactttacagcctgaagagttggaagccatggaaaatgttttgcctgccaagtacgaagaagcaagggaagaagagaagttacgtagccagcgagaagatttcagtgacatggttgcagagaacgagaagaagaggaaaagaaagatgcaagaaaaagagggcaagtcaaagaagagagacttcaagttttaggctgcgcctagttcgtttcttttgctggaagatgggcggctgctaccctttttctactggggaagttctcacattcatggggcatgagttgagaatttgttgttagcatttaacgcaactgtattattgcccgaaagttganaatttgttgttagcaggggtctatagacattataatacaatgaagactccatgc

SEQ ID NO: 13026 - protein, 213 aa, Glycine max
  misc_feature (41)..(41): Xaa can be any naturally occurring amino acid
ETWKRKRKRKRRRRRRKKKKKWRRRNLKLVFSLLIVCQALXLEWKHLMLSTSGSNRGRSLRGLFIKYLKRRKKKLPLELCLEPHTLMWLALAHRTNQVLKGLICLEVRRQIKWMSLYSLKSWKPWKMFCLPSTKKQGKKRSYVASEKISVTWLQRTRRRGKERCKKKRASQRRETSSFRLRLVRFFCWKMGGCYPFSTGEVLTFMGHELRICC

SEQ ID NO: 13027 - protein, 178 aa, Glycine max
  misc_feature (42)..(42): Xaa can be any naturally occurring amino acid
GDLEEEEEEEEEEEEEEEEEEMEEEELEAGIQSVDSLSSTPXGVETPDVIDLRKQQRKEPERPLYQVLEEKEEKIAPGTLLGTTHTYVVGTGTQDKSGAKRVDLLRGQKTDKVDVTLQPEELEAMENVLPAKYEEAREEEKLRSQREDFSDMVAENEKKRKRKMQEKEGKSKKRDFKF

SEQ ID NO: 13028 - protein, 166 aa, Glycine max
MLSTSGSNRGRSLRGLFIKYLKRRKKKLPLELCLEPHTLMWLALAHRTNQVLKGLICLEVRRQIKWMSLYSLKSWKPWKMFCLPSTKKQGKKRSYVASEKISVTWLQRTRRRGKERCKKKRASQRRETSSFRLRLVRFFCWKMGGCYPFSTGEVLTFMGHELRICC

SEQ ID NO: 13029 - DNA, 1441 bp, Glycine max
gagaatcgatcacacagcttttgttctagcacttcgctgtctgaggttcgttccaaagaaaaacatcgtcaatcctcacgacagctctgctctgctctgcttcttttgttttcttatttttcttctgaaaccctaaattttgtctgctctaaactttgggatctttcacacttgaaaaaaactgcttcttgtgcccgacccagcacaattctcatactatagatctttgaatcaaatataatttctgatcattttttttgtttctctttttcccccatttgatcccttctcaggttctggattctcagtgtttgcggagcgcagcatcatcttttagggaagaatggatcatcaagggcatagccagaacccatctatgggggttgttggtagtggagctcaattagcatatggttctaacccatatcagccaggccaaataactgggccaccggggtctgttgtgacatcagttgggaccattcaatccaccggtcaacctgctggagctcagcttggacagcatcaacttgcttatcagcatattcatcagcaacaacagcaccagcttcagcaacagctacaacaattttggtcaagccagtaccaagaaattgagaaggttactgattttaagaaccacagtcttcccctggcaaggatcaagaagattatgaaggctgacgaggatgttaggatgatatcagctgaagcaccagtcatttttgcaagggcatgtgaaatgttcatattagagttaaccctgcgctcttggaatcacactgaagagaacaaaaggcgaacacttcagaaaaatgatattgctgctgctatcacaaggactgacatctttgatttcttggttgacattgtgcctcgtgaggacttgaaagatgaagtgcttgcatcaatcccaagaggaacaatgcctgttgcagggcctgctgatgcccttccatactgctacatgccgcctcagcatccgtcccaagttggagctgctggtgtcataatgggtaagcctgtgatggacccaaacatgtatgctcagcagtctcacccttacatggcaccacaaatgtggccacagccaccagaccaacgacagtcatctccagaacattagctgatgtgtcgtggaaattaagataaccaggcactggaatcagttgtgaatgtcaaactgaatggttgggaaggtcgatactacatagcgagcagaagctgtagctgatagtttacatgcaatgcagactataaacatatgtagataatgtgctagggaaaacttaaccttatctttgatttagctggaaaaaatggtatttttcatgtttaaatttacaggtcatcagatgataatatttatttactggtgcatagcaggatttttacttgagtttaaacttgtcatgctcccaaaacatatcccatctttttc

SEQ ID NO: 13030 - protein, 260 aa, Glycine max
MDHQGHSQNPSMGVVGSGAQLAYGSNPYQPGQITGPPGSVVTSVGTIQSTGQPAGAQLGQHQLAYQHIHQQQQHQLQQQLQQFWSSQYQEIEKVTDFKNHSLPLARIKKIMKADEDVRMISAEAPVIFARACEMFILELTLRSWNHTEENKRRTLQKNDIAAAITRTDIFDFLVDIVPREDLKDEVLASIPRGTMPVAGPADALPYCYMPPQHPSQVGAAGVIMGKPVMDPNMYAQQSHPYMAPQMWPQPPDQRQSSPEH

SEQ ID NO: 13031 - protein, 249 aa, Glycine max
MGVVGSGAQLAYGSNPYQPGQITGPPGSVVTSVGTIQSTGQPAGAQLGQHQLAYQHIHQQQQHQLQQQLQQFWSSQYQEIEKVTDFKNHSLPLARIKKIMKADEDVRMISAEAPVIFARACEMFILELTLRSWNHTEENKRRTLQKNDIAAAITRTDIFDFLVDIVPREDLKDEVLASIPRGTMPVAGPADALPYCYMPPQHPSQVGAAGVIMGKPVMDPNMYAQQSHPYMAPQMWPQPPDQRQSSPEH

SEQ ID NO: 13032 - protein, 150 aa, Glycine max
MKADEDVRMISAEAPVIFARACEMFILELTLRSWNHTEENKRRTLQKNDIAAAITRTDIFDFLVDIVPREDLKDEVLASIPRGTMPVAGPADALPYCYMPPQHPSQVGAAGVIMGKPVMDPNMYAQQSHPYMAPQMWPQPPDQRQSSPEH

SEQ ID NO: 13033 - DNA, 1283 bp, Glycine max
  misc_feature (1236)..(1236): n is a, c, g, or t
tttatgccctaagcccttgttggacacaccaatcccaattgttccacaagagggaaatgctaaaacatctacacagaaccctaacccaatcccccagaaaaagaagaagaagaagaatgtgcaaggtgcagagcaacatctgacgtgtgatccttcaatcctaatagacgtggaacctgatgttacgaaggaagtaggggcacaacaaatttcagaaacagctgaaacaactacacatgaccctgttccaacccccaagaaaaacaagaataaggatgtgcaagtcgcacaacagcaacttcacacatgcgacccttcaatcccgacaagtgccgaacctgatgttatgaaggaagaagcaacaaaacaaggtgatgctgatgggaatgagggtttatgccctaaacccttactggacaaaccaatcccaatttttccacaagaagaaaatgctgaaacatctaggcagaaccctaatccaaccccccggaaaaagaagaagaagaatgttgaaggtgcagagcaagttcagacatgtgatccttcaatcctgactggtgtggaacctgatgttatgaaggaagaaggggcacaacaaggttcagacctgccagctgaaacaactagacagatccatgccccaacccccaagaaaaacaagaagaaggatgtgcaaggtgcacaacagcaacttcagacatgcgacccttcaatcatgataggtgtggaacccaatgttatgaaggaagaaggagcacaacaaggtgaagctaatgaaactgcggtctttggaataaatgaagaatgccctggacctgattcaatgcccctgaaagacactctccggaaaaagaagaatgtgcttaagtcccagggggctgaacctgaaccaaaatcaaaggagtccaataatacacatcaccctcaacaatgctactcagactcagaactgaaaatgaagatgaaaaaaggggcagaagccaatgctgagaactctgcagtgtgccctaaacctaaattggcactcccatctgacatagcaatccctaataattcacaagtgaacaaaagggcagaaccaactgaagctaaggttgaggatcaggcatgttctaaacctaaattagcatccccaatagacctgccagctccaacaaactcagaaaagaaaaaagaggtagaacctgtccaaaaccctgatgcacgtgctcaaccccctcaacctcaaccttgctntgcgccatgtgcagagcctccgggtgatccagcaactccaattgatc

SEQ ID NO: 13034 - protein, 427 aa, Glycine max
  misc_feature (412)..(412): Xaa can be any naturally occurring amino acid
LCPKPLLDTPIPIVPQEGNAKTSTQNPNPIPQKKKKKKNVQGAEQHLTCDPSILIDVEPDVTKEVGAQQISETAETTTHDPVPTPKKNKNKDVQVAQQQLHTCDPSIPTSAEPDVMKEEATKQGDADGNEGLCPKPLLDKPIPIFPQEENAETSRQNPNPTPRKKKKKNVEGAEQVQTCDPSILTGVEPDVMKEEGAQQGSDLPAETTRQIHAPTPKKNKKKDVQGAQQQLQTCDPSIMIGVEPNVMKEEGAQQGEANETAVFGINEECPGPDSMPLKDTLRKKKNVLKSQGAEPEPKSKESNNTHHPQQCYSDSELKMKMKKGAEANAENSAVCPKPKLALPSDIAIPNNSQVNKRAEPTEAKVEDQACSKPKLASPIDLPAPTNSEKKKEVEPVQNPDARAQPPQPQPCXAPCAEPPGDPATPID

SEQ ID NO: 13035 - protein, 312 aa, Glycine max
  misc_feature (297)..(297): Xaa can be any naturally occurring amino acid
MKEEATKQGDADGNEGLCPKPLLDKPIPIFPQEENAETSRQNPNPTPRKKKKKNVEGAEQVQTCDPSILTGVEPDVMKEEGAQQGSDLPAETTRQIHAPTPKKNKKKDVQGAQQQLQTCDPSIMIGVEPNVMKEEGAQQGEANETAVFGINEECPGPDSMPLKDTLRKKKNVLKSQGAEPEPKSKESNNTHHPQQCYSDSELKMKMKKGAEANAENSAVCPKPKLALPSDIAIPNNSQVNKRAEPTEAKVEDQACSKPKLASPIDLPAPTNSEKKKEVEPVQNPDARAQPPQPQPCXAPCAEPPGDPATPID

SEQ ID NO: 13036 - protein, 236 aa, Glycine max
  misc_feature (221)..(221): Xaa can be any naturally occurring amino acid
MKEEGAQQGSDLPAETTRQIHAPTPKKNKKKDVQGAQQQLQTCDPSIMIGVEPNVMKEEGAQQGEANETAVFGINEECPGPDSMPLKDTLRKKKNVLKSQGAEPEPKSKESNNTHHPQQCYSDSELKMKMKKGAEANAENSAVCPKPKLALPSDIAIPNNSQVNKRAEPTEAKVEDQACSKPKLASPIDLPAPTNSEKKKEVEPVQNPDARAQPPQPQPCXAPCAEPPGDPATPID

SEQ ID NO: 13037 - DNA, 587 bp, Glycine max
gcttacatatttacctcaaataaagacgtggccgatgccgttggggacttgtcacctttgttggcaatctctattctactaaacagtgttcaacctgtactctcaggggttgctattggagcagggtggcaaagtattgtagcatatgtgaacatagggtgttattacatcataggtattcctgtaggagttgtgcttggtaacgttttgaatttgcaagtcaagggtatttggattggaatgttgtttggaacatttattcaaaccgtagtgctgactgtaatcacttacaaaactgattgggacgaacaggtaactaaagctcgtaatcgtattaataagtggtccaaggtggaatctgatcatgaaacaattacatcagatgattagtttcatgttccttctttgatttagttttttaaattcaaaattaatgaatctagccacggatttatttatggcaatatattttctgttgctagtgttatacaggcaaatattgtttatttgtatggacgcaaattatgttggataggatcggatccttgaatttaattggacattgttatttaaaaaagcaatactcc

SEQ ID NO: 13038 - protein, 129 aa, Glycine max
AYIFTSNKDVADAVGDLSPLLAISILLNSVQPVLSGVAIGAGWQSIVAYVNIGCYYIIGIPVGVVLGNVLNLQVKGIWIGMLFGTFIQTVVLTVITYKTDWDEQVTKARNRINKWSKVESDHETITSDD

SEQ ID NO: 13039 - DNA, 536 bp, Glycine max
ttacctacaccacctatcggtgctttcgcatatggcatgtaccaggtcggccaggggaacaaggtccgccgggcgctcaaagaagagaaaattgctgctcgcagtgctatactgccgatgctccaagcagaagaggatgaaagatttgtcaaagagtggaagaagtgtcttgaggaggaggcgaggatcatgaaagacgttccagggtggaaggtcggcgagagcgtgtacaactctgggaaatggatgcccccggctactggtgagctccgccctgaggtttggtaagggcctgttgcaggcactgaatgccatcatgtcacgggggcacggataaagcttcatttttcattaaggatcagctgtttaaagacctgtatttgttgtacttgaaatctggctggttaataattggacatgtaaagccgacgtttacattgatgtaacgtgttcttgtctgctattgcttcccagcctctggtgtttcttcctgtaagtcattccgaacatgaatccttgttattgaagaaagtatg

SEQ ID NO: 13040 - protein, 95 aa, Glycine max
LPTPPIGAFAYGMYQVGQGNKVRRALKEEKIAARSAILPMLQAEEDERFVKEWKKCLEEEARIMKDVPGWKVGESVYNSGKWMPPATGELRPEVW

SEQ ID NO: 13041 - protein, 83 aa, Glycine max
MYQVGQGNKVRRALKEEKIAARSAILPMLQAEEDERFVKEWKKCLEEEARIMKDVPGWKVGESVYNSGKWMPPATGELRPEVW

SEQ ID NO: 13042 - protein, 63 aa, Glycine max
YLHHLSVLSHMACTRSARGTRSAGRSKKRKLLLAVLYCRCSKQKRMKDLSKSGRSVLRRRRGS

SEQ ID NO: 13043 - DNA, 1374 bp, Glycine max
aatgtaagagaaagagaaattgtgagtgtgttgtgtctaacggcccaagtctaacgttgtggagcatagaagagaaagggatgatattgaactgtgttagagtgacagctatgcctatgatggctgttccttcatggagatccacgtgctgctgcgcttcttcttcttcttcttcttcagtttcaaccatcaacactgaccaacttcgttctcaacttgatcaccttcattcagaggctgacgccaccagagccaaggataagcagttactttctctatctgaatcaaccgtgtttcctggacaacacccattatagccagtcccatgaatatgattgaagttttactttttttttactttttccactacaattctcaccaaaagaattgaaattggactgctgtctaaagggttcatgtaaagattgaggattgaggcttatattgaaataattgtgtgtggtggttaacacttaacagcaactaatgctagattgaggtttctgcgactgtcagaggttgcagagaagcttcaaaagcaagcagctataagcattcaaaaggggcaggaaaattatgcaagggaaatgctttttcagaggaagaaagtgttgcaggctttagacaagtctaaaagacgcattgaagtgctcgatgagctttcctccaagctaagtgaggcaatatctttgaaagaaagtcagctaattggaaatgttactgtgaaaattgaagacacaacagaagatgcttcaagtccagttcgaattattgctccaaaggaggaagttcaaaataatgtcactaaggatgagtcagatcctgatacggcggaatttggtggtgatattcaagatgtgcaactttctatcgaaagtgaaggaagttcactggatgataaggagactcagcatcttctggaatcccttagtatcagcactccaaatgaagacaatatagccagaaactcgtcagaaatatcctcttatgaggacttcatggaatatatagatctaaaactcagtgaaattgaagctgaactagtgactgttttgaatgtctcaaccttggtactggataatgaagagagagcaaagaattctaggttgcaacaaacaattgaactccttgacagcatccatggcattagacagagaattagaaatactaaggaggcaaaagtgaggatctgatcaattttgttttgctcgactcatcttctgcttccaggtgagaactaacttcatttgtaaaaaaaggtctgccacaattttcttgtatcccttaatcacttaatgtggaaacaggaaagacacatttgagatgcttattattagtttattaaaattaaaagaggtgttgatgttttgattt

SEQ ID NO: 13044 - protein, 201 aa, Glycine max
MLFQRKKVLQALDKSKRRIEVLDELSSKLSEAISLKESQLIGNVTVKIEDTTEDASSPVRIIAPKEEVQNNVTKDESDPDTAEFGGDIQDVQLSIESEGSSLDDKETQHLLESLSISTPNEDNIARNSSEISSYEDFMEYIDLKLSEIEAELVTVLNVSTLVLDNEERAKNSRLQQTIELLDSIHGIRQRIRNTKEAKVRI

SEQ ID NO: 13045 - protein, 104 aa, Glycine max
CKRKRNCECVVSNGPSLTLWSIEEKGMILNCVRVTAMPMMAVPSWRSTCCCASSSSSSSVSTINTDQLRSQLDHLHSEADATRAKDKQLLSLSESTVFPGQHPL

SEQ ID NO: 13046 - DNA, 674 bp, Glycine max
tgcaattcagctgctaagatggccaataatttagaggtggatgcgctttttgtgtacacaaagacagggcacatggcgtctctattgtctcgttgccgtcctgactgcccaatctttgcttttactaccacttcatctgtgcgtaggcgactgaatcttcagtggggcttgatacctttccgcctgagcttcacagatgatatggagagcaatctcaacagaaccttttcattgctcaaggccagaaatctgatcaaatctggtgaccttgtcattgccgtctcagacatgttgcagtcaatacaagtgatgaatgttccttgagaacatgtttcatttcttttgaaagccaacattgctgcttgttcaaaacctgggatgctgctagagtgctaaaatggggcagagactacatgaatgaattttgttcgttctgtcattttaatttataggacacgacagaagttttggagagttaatattatggccttgaagttcttagttttaatgcatacaccttcaagctctagatatcttttttagtcgagtgaggcaatagtgtaatagctacccttttaagttgtaaggcacacatttgcattttccatgttttatatcattgcattagctttccacttcaatgttgactaaaatgtgaaggtttcaataaagat

SEQ ID NO: 13047 - protein, 107 aa, Glycine max
CNSAAKMANNLEVDALFVYTKTGHMASLLSRCRPDCPIFAFTTTSSVRRRLNLQWGLIPFRLSFTDDMESNLNRTFSLLKARNLIKSGDLVIAVSDMLQSIQVMNVP

SEQ ID NO: 13048 - protein, 101 aa, Glycine max
MANNLEVDALFVYTKTGHMASLLSRCRPDCPIFAFTTTSSVRRRLNLQWGLIPFRLSFTDDMESNLNRTFSLLKARNLIKSGDLVIAVSDMLQSIQVMNVP

SEQ ID NO: 13049 - protein, 83 aa, Glycine max
MASLLSRCRPDCPIFAFTTTSSVRRRLNLQWGLIPFRLSFTDDMESNLNRTFSLLKARNLIKSGDLVIAVSDMLQSIQVMNVP

SEQ ID NO: 13050 - DNA, 814 bp, Glycine max
ataccaaacttaaaattggagaagacgaaacaatttagaaaagaaaaatgaaaatagtagaaaagaaggcattaggttaagagtgaaggcagtgagcgaaagagagcatagtaatacttactgagtgcttacagttgctgcgtcgcaaggtaccggcggcgacggagaactatcttctcaattttcgatcactgcattggttctgttgtcaagggttttgttcttcctgacttgcatacttgatggcttcaaagttgcagaagttgcaggccacagcatctcaagcgtctcaatttgtatgcagtcgtggaactaactactacaagcaattgctggaacagaacaagcaacacattcaggagcctcctacagcagagaaatgcaacctgttggcaaagcaattgttttacactcgccttgctagtattccgagtcgtaatgagtccttttggaaggaacttgattatgccaagaatttgtggaagaacaggaaagagctaaaggttgaagatgcaggaattgctgctttgtttggcctcgaatgctttgcatggttttgcgctggtgagattgttggcagaggatttactttcaccggttactatgtctgataataaccacttggaaagtgtagattttatcagggctaaacactcctaaagccaactgctctggtcatttatacattgtgtggattatggcattctgcatggcaatttttgttatgataagcctcaataaccccttgtagttgaaagcgggatgaaccttgtgatgttctcttattatgttggaaagctagtgatggtactcc

SEQ ID NO: 13051 - protein, 122 aa, Glycine max
MASKLQKLQATASQASQFVCSRGTNYYKQLLEQNKQHIQEPPTAEKCNLLAKQLFYTRLASIPSRNESFWKELDYAKNLWKNRKELKVEDAGIAALFGLECFAWFCAGEIVGRGFTFTGYYV

SEQ ID NO: 13052 - DNA, 1003 bp, Glycine max
ttgacaatgtgaaatccatataatgtagtgcttgatttgggatgcttgttattgttattccatactgaaaaggtgtgtccttgtggttaactttcattaactatgttgctattgccagatgaattgaagccttctaatgtgggtcttgaacaagaggcgcaattggtgcgtggatggaaaggttctttgaatggcaccaatggcaaaaaggggcgcaatggaagttatcagtatccaccctccattaagtacattcacttgcatgaatgtgacaaattctctatgggaatcttctgtatgtctcctggttccgttattccgcttcataaccatcccggaatgactgttttgagcaagcttctttatggttcattacttgtgaggtcatatgattggctggatttacctgggccagatgatccatctcaagctagaccagcaaaacttgtgaaagattgtcagatgagtgccccctgtaacaccacagttctttatccaagcaagggtggcaacattcattgtttcaaagccttaaccccttgcgctctctttgacgttctttcccctccttactcatcagaagatggaagacactgctcatatttcaggaagtcaactaggaaagatcttccaggtgttgagcttgatcagctgagtggtgtaaagccatctgaaataacctggctagaagagatccaagcacctgaaaacctggtggttagaagaggtgtttacaaaggccctactataagacgatgaaggatacaactaatttgtatttacataacattagccaggcatgactagaaactaaatatgatggggatataaattaaaggtggtatatcttgggaataattgaccatctgctttatatgattgttaactgtacatactgtgataaatgatggcagttaatgttgatcatgccttgtgtatccttgttctaactagcccctttttagattattagaggaatagcaccaacatggtgatctttggc

SEQ ID NO: 13053 - protein, 218 aa, Glycine max
MLLLPDELKPSNVGLEQEAQLVRGWKGSLNGTNGKKGRNGSYQYPPSIKYIHLHECDKFSMGIFCMSPGSVIPLHNHPGMTVLSKLLYGSLLVRSYDWLDLPGPDDPSQARPAKLVKDCQMSAPCNTTVLYPSKGGNIHCFKALTPCALFDVLSPPYSSEDGRHCSYFRKSTRKDLPGVELDQLSGVKPSEITWLEEIQAPENLVVRRGVYKGPTIRR

SEQ ID NO: 13054 - protein, 158 aa, Glycine max
MGIFCMSPGSVIPLHNHPGMTVLSKLLYGSLLVRSYDWLDLPGPDDPSQARPAKLVKDCQMSAPCNTTVLYPSKGGNIHCFKALTPCALFDVLSPPYSSEDGRHCSYFRKSTRKDLPGVELDQLSGVKPSEITWLEEIQAPENLVVRRGVYKGPTIRR

SEQ ID NO: 13055 - protein, 153 aa, Glycine max
MSPGSVIPLHNHPGMTVLSKLLYGSLLVRSYDWLDLPGPDDPSQARPAKLVKDCQMSAPCNTTVLYPSKGGNIHCFKALTPCALFDVLSPPYSSEDGRHCSYFRKSTRKDLPGVELDQLSGVKPSEITWLEEIQAPENLVVRRGVYKGPTIRR

SEQ ID NO: 13056 - DNA, 802 bp, Glycine max
agatactattcaagagttgaaggaaatggctgaagcacaactacgagaccagcatggcaaccctgtcccactcaccgatcaatacggtaatccggttatcttaactgacgagcgcggtaatcccgtccaactcactggtgtcgctaccaccgctaccggcacagcaggttctgggtttgggtcctatggtaccggtgcttacggtggtggtgcaagtgcaaccaccgttgcagatcttttggcaacccaaccaaggagtggcagggaggctagagagcttcgtcgttcctccagttcaagctctagctcgtctgaggatgatgggcaaggtgggaggaggaagaagggagtgaaggataaaataaaagagaaactaccaggggtaggaggagggaataataataaggagcatgcacacacaacaactgctccaaccaccgccactaaccaccctgctgatcagcatgagaagaagggcataatggagaggatcaaagaaaaattgcctggccaccacacccactgaaaacctgcgttacattaccatatgtttgcgcctgtctgtcttatatatgtaacataaagtactatatatgtcatgggctgagtatcttgtgcaattatgctctttatattatgttcagaatatatatctgattatgtcactatcttgattcttttgaatcatgtatatggatgtgttccatcttctctttgtatgcaccttcgattaatatctcggcctcgatcgcatcagtgtgacttctgcttttattttataataataacgcttctttataat

SEQ ID NO: 13057 - protein, 174 aa, Glycine max
DTIQELKEMAEAQLRDQHGNPVPLTDQYGNPVILTDERGNPVQLTGVATTATGTAGSGFGSYGTGAYGGGASATTVADLLATQPRSGREARELRRSSSSSSSSSEDDGQGGRRKKGVKDKIKEKLPGVGGGNNNKEHAHTTTAPTTATNHPADQHEKKGIMERIKEKLPGHHTH

SEQ ID NO: 13058 - protein, 166 aa, Glycine max
MAEAQLRDQHGNPVPLTDQYGNPVILTDERGNPVQLTGVATTATGTAGSGFGSYGTGAYGGGASATTVADLLATQPRSGREARELRRSSSSSSSSSEDDGQGGRRKKGVKDKIKEKLPGVGGGNNNKEHAHTTTAPTTATNHPADQHEKKGIMERIKEKLPGHHTH

SEQ ID NO: 13059 - DNA, 1945 bp, Glycine max
ccgtaacatgatgctcacaaatcacatgcattaatgtgacacggaactaacttgtcgtacataatatatatatatgttccggaacaaaaataaccttatatatcaaattaattccatctttactattgactgaaaatatcatatttattactgtatctgttagctagtactcgtaccgggtaattcctgccgacagaagaaatatgataaatttagctaatttttaatattaaattcatttccttttgattgtacagtatgtatatgatccaattgagtgcgtgggaacatacatgcatagataatacacaaacaagcatacacacaaaaatgatatattattggaaaagcaagctagctagcagaaatgtttaattacaaattgataaaagaagagagtatatataaacctagtgaaacatgggatgataaatgtacataatcatgcatcttattcatgtaacccttcaaacatataattaattgcaaagagctccctcaatgacgcaaatcacatggcatgtttctggtcatctaatcgaacgaccatgatcaaatctcagaaggcagcatgcatgggtcgttggatgtctcccatatcgaacttattattggtggttcggcgaggggacaaactttgtccccacaattgtttctctttctcatgtgaccgaccacttccccttacttgatctgtcattgctcccacttaacctctcttttttttccattcactttctctctctctatatatataaagccctttctattccatattcctaacaattcaattcattcatccttcactactacaccaaattaatagaaattaaagatatatcattccacaacacaaattaaagttagtgagacgtacccttattatggccaaagaaggtcttggacttgaaatcactgagctaaggttgggtctacctgatgcggagcatcaagtaagtgtagtcaataagaaaaatgagaagaagagggcattctcggaaattgatgatggtgttggagatgaaaatagctcctccggcggaggcgaccggaaaatggagacgaataagagtcaagtggtggggtggcctccggtgtgctcttaccggaagaagaacagcatgaacgaaggtgcttcaaagatgtacgtgaaggttagcatggacggtgctcctttcttgcgtaaaattgatttgggtctgcataagggctactcagatttagctttggctttggacaagctctttggttgctatggaatggtggaggcgttgaaaaatgcagacaattctgaacacgttcccatttatgaggacaaagatggtgattggatgcttgttggagatgtcccttgggaaatgtttatggagtcatgcaagaggctgaggattatgaagaaatcagatgcgaagggcttcggtttgcaaccaaaaggatctttaaagggattcatagaaagcgcggcaaagtgaaagattatgttaggcttctaattaatgtcgtgcacattttgcgatcatcaatccaagtttatgtgttatcgttttcttatatttgaggaaaaacatgcatttttagtttgatatatgaattatcagacttttgtttatgtcaagttattaatgaatgacatataggaccctatataaataatagggaaaactcgtcgttttagattaattaatgctttgccataaatgtttgtttatttgcattcagttgcagtacaagttattgtatcagtatactgttttcttactgattccaatttgttaattacttcacctaaactctcctttttttccttttcctttttaaatagttgatatagtaaaccgccatatcaagttattcacgtaaaaagagactaaagtaaagaatttaaataataatgagaaaaatacaagtatgttttattttatttcttataatatatagcattgct

SEQ ID NO: 13060 - protein, 195 aa, Glycine max
MAKEGLGLEITELRLGLPDAEHQVSVVNKKNEKKRAFSEIDDGVGDENSSSGGGDRKMETNKSQVVGWPPVCSYRKKNSMNEGASKMYVKVSMDGAPFLRKIDLGLHKGYSDLALALDKLFGCYGMVEALKNADNSEHVPIYEDKDGDWMLVGDVPWEMFMESCKRLRIMKKSDAKGFGLQPKGSLKGFIESAAK

SEQ ID NO: 13061 - protein, 138 aa, Glycine max
METNKSQVVGWPPVCSYRKKNSMNEGASKMYVKVSMDGAPFLRKIDLGLHKGYSDLALALDKLFGCYGMVEALKNADNSEHVPIYEDKDGDWMLVGDVPWEMFMESCKRLRIMKKSDAKGFGLQPKGSLKGFIESAAK

SEQ ID NO: 13062 - protein, 116 aa, Glycine max
MNEGASKMYVKVSMDGAPFLRKIDLGLHKGYSDLALALDKLFGCYGMVEALKNADNSEHVPIYEDKDGDWMLVGDVPWEMFMESCKRLRIMKKSDAKGFGLQPKGSLKGFIESAAK

SEQ ID NO: 13063 - DNA, 1756 bp, Glycine max
gtaattaacctcactcaaactcgggatcacagaaaccaacaacagttcttgcactgaggtttcacgatgttgctggaacttgcacttggtttgtttgtgttagctttgtttctgcacttgcgtcccacaccaagtgcaaaatcaaaagcacttcgccacctcccaaaccctccaagcccaaagcctcgtcttcccttcattggccaccttcacctcttaaaagataaacttctccactatgcactcatcgatctctccaaaaagcatggccccttattctctctctccttcggctccatgccaaccgtcgttgcctccacccctgagttgttcaagctcttcctccaaacccacgaggcaacttccttcaacacaaggttccaaacctctgccataagacgcctcacttacgacaactctgtggccatggttccattcggaccttactggaagttcgtgaggaagctcatcatgaacgaccttctcaacgccaccaccgtcaacaagctcaggcctttgaggacccaacagatccgcaagttccttagggttatggcccaaagcgcagaggcccagaagccccttgacgtcaccgaggagcttctcaaatggaccaacagcaccatctccatgatgatgctcggcgaggctgaggagatcagagacatcgctcgcgaggttcttaagatcttcggcgaatacagcctcactgacttcatctggcctttgaagtatctcaaggttggaaagtatgagaagaggattgatgacatcttgaacaagttcgaccctgtcgttgaaagggtcatcaagaagcgccgtgagatcgtcagaaggagaaagaacggagaagttgttgagggcgaggccagcggcgtcttcctcgacactttgcttgaattcgctgaggacgagaccatggagatcaaaattaccaaggagcaaatcaagggccttgttgtcgactttttctctgcagggacagattccacagcggtggcaacagagtgggcattggcagagctcatcaacaatcccagggtgttgcaaaaggctcgtgaggaggtctacagtgttgtgggcaaagatagactcgttgacgaagttgacactcaaaaccttccttacattagggccattgtgaaggagacattccgaatgcacccaccactcccagtggtcaaaagaaagtgcacagaagagtgtgagattaatgggtatgtgatcccagagggagcattggttcttttcaatgtttggcaagtaggaagggaccccaaatactgggacagaccatcagaattccgtcccgagaggttcttagaaactggtgctgaaggggaagcagggcctcttgatcttaggggccagcatttccaactcctcccatttgggtctgggaggagaatgtgccctggtgtcaatttggctacttcaggaatggcaacacttcttgcatctcttatccaatgctttgacctgcaagtgctgggccctcaaggacaaatattgaaaggtgatgatgccaaagttagcatggaagagagagctggcctcacagttccaagggcacatagtctcgtttgtgttccacttgcaaggatcggcgttgcatctaaactcctttcttaattaagataatcatcatatacaatagtagtgtcttgccatcgcagttgctttttatgtattcataatcatcatttcaataaggtgtgactggtacttaatcaagtaattaaggttacatacatgc

SEQ ID NO: 13064 - protein, 521 aa, Glycine max
MLLELALGLFVLALFLHLRPTPSAKSKALRHLPNPPSPKPRLPFIGHLHLLKDKLLHYALIDLSKKHGPLFSLSFGSMPTVVASTPELFKLFLQTHEATSFNTRFQTSAIRRLTYDNSVAMVPFGPYWKFVRKLIMNDLLNATTVNKLRPLRTQQIRKFLRVMAQSAEAQKPLDVTEELLKWTNSTISMMMLGEAEEIRDIAREVLKIFGEYSLTDFIWPLKYLKVGKYEKRIDDILNKFDPVVERVIKKRREIVRRRKNGEVVEGEASGVFLDTLLEFAEDETMEIKITKEQIKGLVVDFFSAGTDSTAVATEWALAELINNPRVLQKAREEVYSVVGKDRLVDEVDTQNLPYIRAIVKETFRMHPPLPVVKRKCTEECEINGYVIPEGALVLFNVWQVGRDPKYWDRPSEFRPERFLETGAEGEAGPLDLRGQHFQLLPFGSGRRMCPGVNLATSGMATLLASLIQCFDLQVLGPQGQILKGDDAKVSMEERAGLTVPRAHSLVCVPLARIGVASKLLS

SEQ ID NO: 13065 - protein, 444 aa, Glycine max
MPTVVASTPELFKLFLQTHEATSFNTRFQTSAIRRLTYDNSVAMVPFGPYWKFVRKLIMNDLLNATTVNKLRPLRTQQIRKFLRVMAQSAEAQKPLDVTEELLKWTNSTISMMMLGEAEEIRDIAREVLKIFGEYSLTDFIWPLKYLKVGKYEKRIDDILNKFDPVVERVIKKRREIVRRRKNGEVVEGEASGVFLDTLLEFAEDETMEIKITKEQIKGLVVDFFSAGTDSTAVATEWALAELINNPRVLQKAREEVYSVVGKDRLVDEVDTQNLPYIRAIVKETFRMHPPLPVVKRKCTEECEINGYVIPEGALVLFNVWQVGRDPKYWDRPSEFRPERFLETGAEGEAGPLDLRGQHFQLLPFGSGRRMCPGVNLATSGMATLLASLIQCFDLQVLGPQGQILKGDDAKVSMEERAGLTVPRAHSLVCVPLARIGVASKLLS

SEQ ID NO: 13066 - protein, 401 aa, Glycine max
MVPFGPYWKFVRKLIMNDLLNATTVNKLRPLRTQQIRKFLRVMAQSAEAQKPLDVTEELLKWTNSTISMMMLGEAEEIRDIAREVLKIFGEYSLTDFIWPLKYLKVGKYEKRIDDILNKFDPVVERVIKKRREIVRRRKNGEVVEGEASGVFLDTLLEFAEDETMEIKITKEQIKGLVVDFFSAGTDSTAVATEWALAELINNPRVLQKAREEVYSVVGKDRLVDEVDTQNLPYIRAIVKETFRMHPPLPVVKRKCTEECEINGYVIPEGALVLFNVWQVGRDPKYWDRPSEFRPERFLETGAEGEAGPLDLRGQHFQLLPFGSGRRMCPGVNLATSGMATLLASLIQCFDLQVLGPQGQILKGDDAKVSMEERAGLTVPRAHSLVCVPLARIGVASKLLS

SEQ ID NO: 13067 - DNA, 748 bp, Glycine max
aatgcatccaatgagtggtatgtcaaactgtctatgggaacaagatgggtgacctatattttgggaattggtggattgactttgcttgtgtttggggccttcaactttctgaacaagcttcagtgtgctcatgaagatagagcaggagttagatctgagggaacagaacgtcagagagcccctttgcttcctcacaaagatgatgatctttcaagttggggttcatcgtatgagtccttgccacaagatgagaaggatcttggctttcttccaggaggccccattgatgggaagactttagttgatggtgaaaccagtaataacacacggcatctttgtgctatttgctttgatgctccgagggactgcttcttccttccatgtggacactgtgtggcttgctttgcttgtggaactaggatagccgaggcagctggtacttgccctgtttgtcgtaggaacatgaagaaggttaggaagattttcactgtttgatcagtgcacttcctagtgtagagattaaatgagtagtcaccagaatcatagaataccttttatgtactcaactatacattattttcttgccaatcattaacaatgatcaagcaaatggtgtctgctgatgagggtcgtattggccattgcagcattgcctactgtaatagtgactagatgaatagccaccggaatcatagattactttttatgtattcaactacacattattttcttgccaatcaacaacaat

SEQ ID NO: 13068 - protein, 164 aa, Glycine max
NASNEWYVKLSMGTRWVTYILGIGGLTLLVFGAFNFLNKLQCAHEDRAGVRSEGTERQRAPLLPHKDDDLSSWGSSYESLPQDEKDLGFLPGGPIDGKTLVDGETSNNTRHLCAICFDAPRDCFFLPCGHCVACFACGTRIAEAAGTCPVCRRNMKKVRKIFTV

SEQ ID NO: 13069 - protein, 153 aa, Glycine max
MGTRWVTYILGIGGLTLLVFGAFNFLNKLQCAHEDRAGVRSEGTERQRAPLLPHKDDDLSSWGSSYESLPQDEKDLGFLPGGPIDGKTLVDGETSNNTRHLCAICFDAPRDCFFLPCGHCVACFACGTRIAEAAGTCPVCRRNMKKVRKIFTV

SEQ ID NO: 13070 - DNA, 681 bp, Glycine max
gagatgtttcagcttatattcctactaatgtaatttccattacagatggccaaatattcttatctgccgatctattcaatgctggaatcagacccgctattaatgtaggtatttccgtttccagagttggatcggcggctcaaattaaagccatgaaacaagtagctggtaaattaaaattggaattagcacaattcgcagaattagaagcttttgcccaattcgcttctgatctcgataaagctactcaaaatcaattagcaagaggtcaacgattgcgcgagttgcttaaacaatcccaatcagctcctcttaccgtggaagaacagataataactatttatactggaacgaatggttatcttgattcattagaaattggacaggtaaggaaatttcttgttgagttacgtgcttacttaaacacgaataaacctcaattcaaagaaatcatatcttctaccaagacattcactggggaagcagaagtccttttgaaggaagctattcaagaacagatggaactctttttactacaggaacaggtagaaaaaaattgattaatcatttaataactttataatttcactttcaaattcttataattagtatcttttaatatctttttatttcatttgaatataatattaatatataaataaaatgaattcgaatgaaaat

SEQ ID NO: 13071 - protein, 185 aa, Glycine max
DVSAYIPTNVISITDGQIFLSADLFNAGIRPAINVGISVSRVGSAAQIKAMKQVAGKLKLELAQFAELEAFAQFASDLDKATQNQLARGQRLRELLKQSQSAPLTVEEQIITIYTGTNGYLDSLEIGQVRKFLVELRAYLNTNKPQFKEIISSTKTFTGEAEVLLKEAIQEQMELFLLQEQVEKN

SEQ ID NO: 13072 - protein, 135 aa, Glycine max
MKQVAGKLKLELAQFAELEAFAQFASDLDKATQNQLARGQRLRELLKQSQSAPLTVEEQIITIYTGTNGYLDSLEIGQVRKFLVELRAYLNTNKPQFKEIISSTKTFTGEAEVLLKEAIQEQMELFLLQEQVEKN

SEQ ID NO: 13073 - DNA, 1182 bp, Glycine max
  misc_feature (1005)..(1005): n is a, c, g, or t
aggttcgaagtggcttccttgcaacgagtccgttcccgaccccacctcctgggaggtcgacaaaggtggcacgcgacgcgtcgtttcggaaacagaatcgaattttgccaagattagttggctttcgcggttgatgaacgtgtgttccgaagacgcgaaggctgcgttcactgctcttaccgttagtttactctttaaatcgtccttggctgaacccagatcaattccctcctcttctatgtaccctactcttgaagtaggtgaccgtgttcttaccgagaaggtttcgttcttctttagaaagcctgatgtttcggatatagtcattttcaaagctcctccttggttagaggagtttggttttagttcgtctgatgtatttataaagaggattgtggctaaggctggggacactgttgaggtgcgtgatgggaaactactgataaatggtgctgctgaagaacaagaatttgtattagaggctctagcttatgagatggatccaatggttgtgccagaaggatatgtgtttgtaatgggcgacaatcggaataaaagctttgattctcataactggggtcccctgccggttgagaacattgttggtaggtccatgtttcggtactggcctccatccaaggcatctgacactgatacccatcgtaaactcccacctggtaacaaacctgtggcaatttcttgacatgattcccgcagctttgtgaaggtgatgaaggtttccagatacggtcgtttgttctaaattgttagcttgagctgactttgcacacagtttgggatgaatatcttattcattgatacaaatttgtcgatgacctaataataccattaagcgttcattagtgccatctgagatgtatttctattgctgaagtgcggggagaaaaaaaagaattaaaaaagcatgatgattttgcccccccccaaaaaaaaaaatgaaacatggtgattgatttgttttgtattctttaatgtatgcatagngtatgaatgctagaaactggaggaaagatttgacatggagctaattgactccctgtgagttccataatcaagcttcctcccattttgaatctgtctgtaatgccattcagtcatacatgaaattgtatggacttgcctattttaaaataataaagtaagaatgcaatttcactcttt

SEQ ID NO: 13074 - protein, 233 aa, Glycine max
GSKWLPCNESVPDPTSWEVDKGGTRRVVSETESNFAKISWLSRLMNVCSEDAKAAFTALTVSLLFKSSLAEPRSIPSSSMYPTLEVGDRVLTEKVSFFFRKPDVSDIVIFKAPPWLEEFGFSSSDVFIKRIVAKAGDTVEVRDGKLLINGAAEEQEFVLEALAYEMDPMVVPEGYVFVMGDNRNKSFDSHNWGPLPVENIVGRSMFRYWPPSKASDTDTHRKLPPGNKPVAIS

SEQ ID NO: 13075 - protein, 189 aa, Glycine max
MNVCSEDAKAAFTALTVSLLFKSSLAEPRSIPSSSMYPTLEVGDRVLTEKVSFFFRKPDVSDIVIFKAPPWLEEFGFSSSDVFIKRIVAKAGDTVEVRDGKLLINGAAEEQEFVLEALAYEMDPMVVPEGYVFVMGDNRNKSFDSHNWGPLPVENIVGRSMFRYWPPSKASDTDTHRKLPPGNKPVAIS

SEQ ID NO: 13076 - protein, 154 aa, Glycine max
MYPTLEVGDRVLTEKVSFFFRKPDVSDIVIFKAPPWLEEFGFSSSDVFIKRIVAKAGDTVEVRDGKLLINGAAEEQEFVLEALAYEMDPMVVPEGYVFVMGDNRNKSFDSHNWGPLPVENIVGRSMFRYWPPSKASDTDTHRKLPPGNKPVAIS

SEQ ID NO: 13077 - DNA, 476 bp, Glycine max
  misc_feature (326)..(326): n is a, c, g, or t
  misc_feature (353)..(353): n is a, c, g, or t
  misc_feature (456)..(456): n is a, c, g, or t
ggtaccaaagctgaatagccattcgtatgtcgcagagaaagaaaaccctagctcaccgtttcaagatgcaagatcttcgttgaagaccctcactggtaagaccatcactctcgaagtcgagagttcagataccatagacaatgtaaaggccaaaattcaagacaaggaagggatcccaccagatcagcaacggctcatttttgctggcaagcagcttgaggatggacgtacccttggctgattataacatccaaaaggagtccactctccacttggttcttcgtctccgtggtgggatgcaaatctttgttaagaccttgacgggnaagacaatcacccttgaggtcgagagngtccgacaccattgacaacgttaaggctaagattcaggacaaagagggtatccctccagatcaacagaggctgatctttgctggaaagcagcttgaggatggncgtacccttgctgattacaa

SEQ ID NO: 13078 - protein, 79 aa, Glycine max
VPKLNSHSYVAEKENPSSPFQDARSSLKTLTGKTITLEVESSDTIDNVKAKIQDKEGIPPDQQRLIFAGKQLEDGRTLG

SEQ ID NO: 13079 - protein, 48 aa, Glycine max
  misc_feature (35)..(35): Xaa can be any naturally occurring amino acid
  misc_feature (44)..(44): Xaa can be any naturally occurring amino acid
MDVPLADYNIQKESTLHLVLRLRGGMQIFVKTLTXKTITLEVEXVRHH

SEQ ID NO: 13080 - DNA, 1477 bp, Glycine max
  misc_feature (595)..(595): n is a, c, g, or t
  misc_feature (609)..(609): n is a, c, g, or t
  misc_feature (614)..(614): n is a, c, g, or t
  misc_feature (631)..(631): n is a, c, g, or t
  misc_feature (673)..(673): n is a, c, g, or t
  misc_feature (806)..(806): n is a, c, g, or t
  misc_feature (911)..(911): n is a, c, g, or t
  misc_feature (925)..(925): n is a, c, g, or t
  misc_feature (943)..(943): n is a, c, g, or t
aaagtaacaggggcatgggtgatactccaaagcgttcaaacctttcacgaagaatagcatccttagtcaggttccgtgagaaacgcaaggaaagatgttttgacaagaaaattaggtattccgtcagaaaagaggtggcacagaggatgcatcggaagaatgggcagtttgcttccttgaaggaaagcccaggttcatctaattgggattctgcacagagttctggtcaagatggcacttctcattctgaatctgtacgtagatgtcaccattgtggtgtcagtgaaaataatactcctgcaatgcgtcgggggccagctggaccaaggactttatgtaatgcatgcggccttatgtgggctaacaagggcacacttagagatctcagtaagggcggaaggaatctttctgttgagcaaagtgatctggacactcctattgatgtcaagcctacttctgttcttgaaggggaattgccaggcatccatgatgagcaagatagttctgaagatccttccaagtccaatgcagcggatggttctagtaatcatgctgtaaaccccagtgatgaggaattgcctgaaactgcagaacnctttacgaacgttntgccnctgggaattggtcattnttcaacaaatgacagtgaacaggaacctctggttgagctttntaatccttcagatacagatattgacattccaggaaactttgattagaaggtactaagtgattcattaagttgaggggttttataaaatggtccctctgtagtatattgtcggtgtactaatcagatgcagatntagaagcagtgatacatacccgagacaattaggaaattcggggttatgactgatagtagccctcggaaatggaaatgattactgattagcaagtgtcaagaagcnctgctgttccggtntaacattaaatagtagtntgcaatattgatgctggcataagtgccaagacattgtttgtgtatatgttatcagatgatcttccttcagtgtttatatcataaaatattcattagtatggggcctgtgttgtaaaaatgcggtctgcttgtccctgactataataatttcattgagatcaaagttctgctaccctcattttagagatgaaatttcggtgatatgctatgctatgccactcaaggatgggttgctggtttgaatatcaacgcaacggtgtgctaatcacgacctttgatggagtttaggcttgtgctgctgtgctcctggtgagaacatttggatatgttaattaatacagatagactagatccaaatgtacatacataaataaatattggttgtcgtcttctctatgttctttcacacttatgttatcattgctgttgtggtgcccgaaaataattgccattcttgtcatcatcatatcccaatagcctgatattatattaagcatagttataatcaaataaaattattggaatttttacgct

SEQ ID NO: 13081 - protein, 238 aa, Glycine max
  misc_feature (198)..(198): Xaa can be any naturally occurring amino acid
  misc_feature (203)..(204): Xaa can be any naturally occurring amino acid
  misc_feature (210)..(210): Xaa can be any naturally occurring amino acid
  misc_feature (224)..(224): Xaa can be any naturally occurring amino acid
SNRGMGDTPKRSNLSRRIASLVRFREKRKERCFDKKIRYSVRKEVAQRMHRKNGQFASLKESPGSSNWDSAQSSGQDGTSHSESVRRCHHCGVSENNTPAMRRGPAGPRTLCNACGLMWANKGTLRDLSKGGRNLSVEQSDLDTPIDVKPTSVLEGELPGIHDEQDSSEDPSKSNAADGSSNHAVNPSDEELPETAEXFTNVXXLGIGHXSTNDSEQEPLVELXNPSDTDIDIPGNFD

SEQ ID NO: 13082 - protein, 234 aa, Glycine max
  misc_feature (194)..(194): Xaa can be any naturally occurring amino acid
  misc_feature (199)..(200): Xaa can be any naturally occurring amino acid
  misc_feature (206)..(206): Xaa can be any naturally occurring amino acid
  misc_feature (220)..(220): Xaa can be any naturally occurring amino acid
MGDTPKRSNLSRRIASLVRFREKRKERCFDKKIRYSVRKEVAQRMHRKNGQFASLKESPGSSNWDSAQSSGQDGTSHSESVRRCHHCGVSENNTPAMRRGPAGPRTLCNACGLMWANKGTLRDLSKGGRNLSVEQSDLDTPIDVKPTSVLEGELPGIHDEQDSSEDPSKSNAADGSSNHAVNPSDEELPETAEXFTNVXXLGIGHXSTNDSEQEPLVELXNPSDTDIDIPGNFD

SEQ ID NO: 13083 - protein, 190 aa, Glycine max
  misc_feature (150)..(150): Xaa can be any naturally occurring amino acid
  misc_feature (155)..(156): Xaa can be any naturally occurring amino acid
  misc_feature (162)..(162): Xaa can be any naturally occurring amino acid
  misc_feature (176)..(176): Xaa can be any naturally occurring amino acid
MHRKNGQFASLKESPGSSNWDSAQSSGQDGTSHSESVRRCHHCGVSENNTPAMRRGPAGPRTLCNACGLMWANKGTLRDLSKGGRNLSVEQSDLDTPIDVKPTSVLEGELPGIHDEQDSSEDPSKSNAADGSSNHAVNPSDEELPETAEXFTNVXXLGIGHXSTNDSEQEPLVELXNPSDTDIDIPGNFD

SEQ ID NO: 13084 - DNA, 682 bp, Glycine max
  misc_feature (59)..(59): n is a, c, g, or t
gagctagggttgtgattgcaaaccgtacctatgaccatgccagaaaatttgcttatgcnattggaggagatgctttagcccttgctgatttagataattaccatccggaggatggtatgattcttgcaaacacaacatcaattggaatgcaacctaaagttgatgagacgcctgtttctaagcacgctttgaaatattactccctagtttttgatgctgtctacacgcccaagattactagactcttgaaagaagcagaagaatcaggagccactattgtaacaggattggagatgtttatggggcaagcatatggacaatatgagaatttcaccggattaccagcaccaaaggagctcttcagaaaaattatggaaaactattgaagaggtttgctggccataaactctgtccacttgatcttgtttttccatgtgttgaaagttctaagtttgctaatttattgctccatccatcattgcattatagagcttattaaatgtaattgtgtctttgttgtttacatatgaactgagtatgctaaccgctggggatttttacttgttgcaatattcttgaatctttttttttaagaaaaaaaatctaaatttaatttctttgaaaatgacaattttgtatttcatactagggttttaatgtgttacgatgaaagtaatgatgc

SEQ ID NO: 13085 - protein, 127 aa, Glycine max
  misc_feature (19)..(19): Xaa can be any naturally occurring amino acid
ARVVIANRTYDHARKFAYXIGGDALALADLDNYHPEDGMILANTTSIGMQPKVDETPVSKHALKYYSLVFDAVYTPKITRLLKEAEESGATIVTGLEMFMGQAYGQYENFTGLPAPKELFRKIMENY

SEQ ID NO: 13086 - protein, 89 aa, Glycine max
MILANTTSIGMQPKVDETPVSKHALKYYSLVFDAVYTPKITRLLKEAEESGATIVTGLEMFMGQAYGQYENFTGLPAPKELFRKIMENY

SEQ ID NO: 13087 - protein, 79 aa, Glycine max
MQPKVDETPVSKHALKYYSLVFDAVYTPKITRLLKEAEESGATIVTGLEMFMGQAYGQYENFTGLPAPKELFRKIMENY

SEQ ID NO: 13088 - DNA, 808 bp, Glycine max
caaacttcagagcgcaggcaaacaacttcttctctcagacatggcatctcaaggtttgtgtccttcgataaaaaatattcttcttttggactctgaagggaagcgtgtggcagtcaagtattactcagatgactggccaacaaacaatgcaaagttagcttttgagaagtttgtatttaccaagactgttaagacaaatgctcgtacagaagctgaggtaacactacttgagaacaatatcattatttacaaatttgtacaagacctgcatttttttgtcactggtggtgaagatgaaaatgagctcattctagcatcagttcttcaaggtttctttgatgcagtcactcttctgttgaggagcaatgttgacaaaagagaggcacttgagaacttggatctcattctcttgtgtcttgacgagattgttgatggagggatgatacttgaaacaaatggacctcttattgctgaaaaagtgacctctcatagcttggatgctgatgcccccttgtcagagcagacattaactcaagcctgggctacagccagagaacatttgacaagaacccttttaaaatgatgtttgcatacactgaaaatgagctacttatagtcgaatatccaattttttgtctgttaatgggagttgtttcatcccccattgcgagttattgtaatgagcaccataccatttttctgaaaagtgtgttccgcgtgcatcttagctattatttgtcaaattcgtggaagaagttattgatcgaaatattgtgatattcaagttatggttgagatttggttcccc

SEQ ID NO: 13089 - protein, 193 aa, Glycine max
KLQSAGKQLLLSDMASQGLCPSIKNILLLDSEGKRVAVKYYSDDWPTNNAKLAFEKFVFTKTVKTNARTEAEVTLLENNIIIYKFVQDLHFFVTGGEDENELILASVLQGFFDAVTLLLRSNVDKREALENLDLILLCLDEIVDGGMILETNGPLIAEKVTSHSLDADAPLSEQTLTQAWATAREHLTRTLLK

SEQ ID NO: 13090 - protein, 180 aa, Glycine max
MASQGLCPSIKNILLLDSEGKRVAVKYYSDDWPTNNAKLAFEKFVFTKTVKTNARTEAEVTLLENNIIIYKFVQDLHFFVTGGEDENELILASVLQGFFDAVTLLLRSNVDKREALENLDLILLCLDEIVDGGMILETNGPLIAEKVTSHSLDADAPLSEQTLTQAWATAREHLTRTLLK

SEQ ID NO: 13091 - DNA, 534 bp, Glycine max
atttacaaacctccattcgagaaaccacccatttacaaacctccattcgagaaaccacccatttacaaacctcctttcgagaaaccaccagtatacgagccacctcctttggtgaagccaccaccatttgaaaagccacccttttacaaacctcctttcgagaaaccaccgctttacgagccacctcctttggtgaagccaccgatctacaatcccccaccttatggccactatccaccatccaagaaaaactaataataaccagtggcgagtgtgacatgcatgttttcgtctactcaacgttagagcagtcgtttgtcatataaagttttttgtttgcgtttattaggaagcacttttaagatgccaattgaagtacaatccgccacttctgcgtgtagtagttcttcaaaataaaggctatattcctctgtgtacttaataacttcaatttcccttttcagcaatgatattgtagtgtcaattattagtggcaaaatctatgactacaatcagtttaattttctttgtgct

SEQ ID NO: 13092 - protein, 84 aa, Glycine max
IYKPPFEKPPIYKPPFEKPPIYKPPFEKPPVYEPPPLVKPPPFEKPPFYKPPFEKPPLYEPPPLVKPPIYNPPPYGHYPPSKKN

SEQ ID NO: 13093 - protein, 42 aa, Glycine max
LQTSIRETTHLQTSIRETTHLQTSFRETTSIRATSFGEATTI

SEQ ID NO: 13094 - DNA, 542 bp, Glycine max
  misc_feature (55)..(55): n is a, c, g, or t
gtgttcatatccactagttcaagttgatgaggaggaggactattatgatgggacncagcattcagattatgaatctgatgactcaaatgctgaaaacaatccactgaatgattatccagatgaggtttctgaagaggatgaagaggatgaaaattctgagaatgaatcagaacgtgaggatggcaacacgagcagtgaatcatcagatgagaatatagaacatggtttttctgaagatgatgctgatccattatatgatgaggattttgatgaatatgaaggtgctcatagtgatgatgttgagcatatggatgatgaaaattggaggtggtcgtaccgatgaagttggctttagttttattttgcaaaatgtaaatctgatggggtaaaaatgttgtaggaacaaaatcaaacctaccatgccggagccatccaactagacaggcttttttgctattataagggatgctttaaggcattttttatggacctattagttttatgttgaaatttgagctagaatgcttacaaaaatggcattt

SEQ ID NO: 13095 - protein, 113 aa, Glycine max
  misc_feature (18)..(18): Xaa can be any naturally occurring amino acid
CSYPLVQVDEEEDYYDGXQHSDYESDDSNAENNPLNDYPDEVSEEDEEDENSENESEREDGNTSSESSDENIEHGFSEDDADPLYDEDFDEYEGAHSDDVEHMDDENWRWSYR

SEQ ID NO: 13096 - DNA, 876 bp, Glycine max
  misc_feature (506)..(506): n is a, c, g, or t
  misc_feature (509)..(509): n is a, c, g, or t
  misc_feature (541)..(541): n is a, c, g, or t
  misc_feature (551)..(551): n is a, c, g, or t
  misc_feature (623)..(623): n is a, c, g, or t
  misc_feature (635)..(635): n is a, c, g, or t
  misc_feature (650)..(650): n is a, c, g, or t
  misc_feature (655)..(655): n is a, c, g, or t
  misc_feature (683)..(683): n is a, c, g, or t
  misc_feature (699)..(699): n is a, c, g, or t
  misc_feature (701)..(701): n is a, c, g, or t
  misc_feature (709)..(709): n is a, c, g, or t
  misc_feature (835)..(835): n is a, c, g, or t
aagattgcgctggatgctgcgaggggactttcatacctgcatgaaaactcacagccctgtgtaatacacagagacttcaaggcatccaacatactgcttgagaacaactttcaagctaaggttgcagattttggtcttgctaagcaagcacctgaaggaagatctaattatttgtctactcgtgtcatggggacatttgggtacgtagctcctgaatatgccatgactgggcacctacttgttaaaagtgatgtttatagctatggtgttgtcttgctggaactgcttactggtaggaagcctgtggatatgtcacagccaactggacaagagaaccttgttacttgggctaggccaatccttagagataaggagcggttggaagagattgctgatccaagacttgggggagagtatccaaaggaagattttgtacgtgtttgcactattgctgcggcctgtgttgctccggaagcaaaccaacgacctacaatgggtgaagtggnacnatcacttaaaatggtgcagcgcgtcacagaanaccatgattntgtgttagcctcatccaatgcacgacccaacctaagacagtcctctagcacttttgaatttgatggaacgtnttcgatgttctnttcaggtccttactntggtntaagtgcctttgacaatgacaacatttntaggaccgtggttttntntgaagatntttgtgaaggacgatgaaaactgagaaaacttggccattcaaaatgttttttatttttttcccatttttgtgagcactttcaagctttcaaccaaaaagttttttaacctcatgaatcataaggcncagaatttccaaataaatttaagcattttgttggtgagtgg

SEQ ID NO: 13097 - protein, 241 aa, Glycine max
  misc_feature (169)..(170): Xaa can be any naturally occurring amino acid
  misc_feature (181)..(181): Xaa can be any naturally occurring amino acid
  misc_feature (184)..(184): Xaa can be any naturally occurring amino acid
  misc_feature (208)..(208): Xaa can be any naturally occurring amino acid
  misc_feature (212)..(212): Xaa can be any naturally occurring amino acid
  misc_feature (217)..(217): Xaa can be any naturally occurring amino acid
  misc_feature (219)..(219): Xaa can be any naturally occurring amino acid
  misc_feature (228)..(228): Xaa can be any naturally occurring amino acid
  misc_feature (233)..(234): Xaa can be any naturally occurring amino acid
  misc_feature (237)..(237): Xaa can be any naturally occurring amino acid
KIALDAARGLSYLHENSQPCVIHRDFKASNILLENNFQAKVADFGLAKQAPEGRSNYLSTRVMGTFGYVAPEYAMTGHLLVKSDVYSYGVVLLELLTGRKPVDMSQPTGQENLVTWARPILRDKERLEEIADPRLGGEYPKEDFVRVCTIAAACVAPEANQRPTMGEVXXSLKMVQRVTEXHDXVLASSNARPNLRQSSSTFEFDGTXSMFXSGPYXGXSAFDNDNIXRTVVXXEDXCEGR

SEQ ID NO: 13098 - protein, 179 aa, Glycine max
  misc_feature (107)..(108): Xaa can be any naturally occurring amino acid
  misc_feature (119)..(119): Xaa can be any naturally occurring amino acid
  misc_feature (122)..(122): Xaa can be any naturally occurring amino acid
  misc_feature (146)..(146): Xaa can be any naturally occurring amino acid
  misc_feature (150)..(150): Xaa can be any naturally occurring amino acid
  misc_feature (155)..(155): Xaa can be any naturally occurring amino acid
  misc_feature (157)..(157): Xaa can be any naturally occurring amino acid
  misc_feature (166)..(166): Xaa can be any naturally occurring amino acid
  misc_feature (171)..(172): Xaa can be any naturally occurring amino acid
  misc_feature (175)..(175): Xaa can be any naturally occurring amino acid
MGTFGYVAPEYAMTGHLLVKSDVYSYGVVLLELLTGRKPVDMSQPTGQENLVTWARPILRDKERLEEIADPRLGGEYPKEDFVRVCTIAAACVAPEANQRPTMGEVXXSLKMVQRVTEXHDXVLASSNARPNLRQSSSTFEFDGTXSMFXSGPYXGXSAFDNDNIXRTVVXXEDXCEGR

SEQ ID NO: 13099 - protein, 167 aa, Glycine max
  misc_feature (95)..(96): Xaa can be any naturally occurring amino acid
  misc_feature (107)..(107): Xaa can be any naturally occurring amino acid
  misc_feature (110)..(110): Xaa can be any naturally occurring amino acid
  misc_feature (134)..(134): Xaa can be any naturally occurring amino acid
  misc_feature (138)..(138): Xaa can be any naturally occurring amino acid
  misc_feature (143)..(143): Xaa can be any naturally occurring amino acid
  misc_feature (145)..(145): Xaa can be any naturally occurring amino acid
  misc_feature (154)..(154): Xaa can be any naturally occurring amino acid
  misc_feature (159)..(160): Xaa can be any naturally occurring amino acid
  misc_feature (163)..(163): Xaa can be any naturally occurring amino acid
MTGHLLVKSDVYSYGVVLLELLTGRKPVDMSQPTGQENLVTWARPILRDKERLEEIADPRLGGEYPKEDFVRVCTIAAACVAPEANQRPTMGEVXXSLKMVQRVTEXHDXVLASSNARPNLRQSSSTFEFDGTXSMFXSGPYXGXSAFDNDNIXRTVVXXEDXCEGR

SEQ ID NO: 13100 - DNA, 383 bp, Glycine max
atatataaccattggggatggaggaaaccttgaaggtttagcaaccaacatgacagaaccacagccaaagtattctgcattccgagaggccagctttggacatgccatttttgacataacgaaccgaactcatgctcactatagctggcaccgaaatcaagatggagttgctgtggaggccgattccctttggtttttcaacagatactggcacccagttgatgattccactgctcatgtttcacattaacacagattcacttgtcttatgagaagaataccaaatgtcatgtcaataaattcatgagtcgacaattgattgtatgtcaatactaccaacattgattagcagtatctttatatctctgtcacatttgataagt

SEQ ID NO: 13101 - protein, 82 aa, Glycine max
YITIGDGGNLEGLATNMTEPQPKYSAFREASFGHAIFDITNRTHAHYSWHRNQDGVAVEADSLWFFNRYWHPVDDSTAHVSH

SEQ ID NO: 13102 - protein, 66 aa, Glycine max
MTEPQPKYSAFREASFGHAIFDITNRTHAHYSWHRNQDGVAVEADSLWFFNRYWHPVDDSTAHVSH

SEQ ID NO: 13103 - protein, 46 aa, Glycine max
MLTIAGTEIKMELLWRPIPFGFSTDTGTQLMIPLLMFHINTDSLVL

SEQ ID NO: 13104 - DNA, 878 bp, Glycine max
atgagtgatgaggtagtgttattagatttctggccaagtccatttgggatgagggtcaggattgcacttgctgaaaagggtatcaaatatgagtacaaagaagaggacttgaggaacaagagtcctcttctcctccaaatgaacccggttcacaagaagattccggttctcatccacaatggcaaacccatttgtgaatccctcattgctgttcagtacattgaggaggtttggaatgacagaaatcccttgttgccttctgacccttaccagagagctcagactagattctgggctgattatgttgataagaagatatatgatcttggaaggaagatttggacatcaaaaggagaagaaaaagaagctgccaagaaggagttcatagaagcccttaaattgttggaggaacagctgggagacaagacttattttggaggagacaatctaggttttgtggatatagcgcttgttccattctacacttggttcaaagcctatgagacttttggcaccctcaacatagagagtgagtgccccaagtttattgcttgggccaagaggtgccttcagaaagaaagcgttgccaagtctcttcctgatcagcaaaaggtttatgagttcattatggatctaagaaagaagttaggcattgagtaggttggagcttaatggccattgtgaagtagtggttttccattggtcgttcttagcctttcaaataagtaatatttgtgtaataaaaggcacttagatgtgccaaacttcgtgctttctgtaggaatgtgtgggttttggaaaatctctgatgtatctttcatgtgtttgttggttttgtaatttttttttggtattgtcttatacttgaataatttgag

SEQ ID NO: 13105 - protein, 219 aa, Glycine max
MSDEVVLLDFWPSPFGMRVRIALAEKGIKYEYKEEDLRNKSPLLLQMNPVHKKIPVLIHNGKPICESLIAVQYIEEVWNDRNPLLPSDPYQRAQTRFWADYVDKKIYDLGRKIWTSKGEEKEAAKKEFIEALKLLEEQLGDKTYFGGDNLGFVDIALVPFYTWFKAYETFGTLNIESECPKFIAWAKRCLQKESVAKSLPDQQKVYEFIMDLRKKLGIE

SEQ ID NO: 13106 - protein, 203 aa, Glycine max
MRVRIALAEKGIKYEYKEEDLRNKSPLLLQMNPVHKKIPVLIHNGKPICESLIAVQYIEEVWNDRNPLLPSDPYQRAQTRFWADYVDKKIYDLGRKIWTSKGEEKEAAKKEFIEALKLLEEQLGDKTYFGGDNLGFVDIALVPFYTWFKAYETFGTLNIESECPKFIAWAKRCLQKESVAKSLPDQQKVYEFIMDLRKKLGIE

SEQ ID NO: 13107 - protein, 173 aa, Glycine max
MNPVHKKIPVLIHNGKPICESLIAVQYIEEVWNDRNPLLPSDPYQRAQTRFWADYVDKKIYDLGRKIWTSKGEEKEAAKKEFIEALKLLEEQLGDKTYFGGDNLGFVDIALVPFYTWFKAYETFGTLNIESECPKFIAWAKRCLQKESVAKSLPDQQKVYEFIMDLRKKLGIE

SEQ ID NO: 13108 - DNA, 599 bp, Glycine max
agattaagcgaaataccttggtgtctggtggtgttcgtggaactctaccttggatggcaccagagctactaaatggtagtagcaataaggtctcagaaaaggttgatgtgttctcttttggcattgtcttatgggagattcttactggtgatgagccatatgctaatatgcactatggtgcaatcataggaggcattgtgaataacacattaagaccaacaatccccagttattgtgatcttgactggaaaacactaatggagcaatgttgggcacccaatccagcagtcaggccatccttcaccgaaattgctcgccgcttgcgtgtgatgtctgcagccgctagtcagatcaaaggacagggccacaaggcatctaaatgaaaatcaacagatttgatctgattgccacacacggttcattcaattatgctccaaaaagatatatattattgttatacaagggccaacaataattgtttgtattgtagttttctggtccctgctctttttgtatttgattgtgaatatgtatgtgtgcatgtgaaaaaccacatatatagactgtgcaaattaacatttgacttaatgctattccac

SEQ ID NO: 13109 - protein, 126 aa, Glycine max
IKRNTLVSGGVRGTLPWMAPELLNGSSNKVSEKVDVFSFGIVLWEILTGDEPYANMHYGAIIGGIVNNTLRPTIPSYCDLDWKTLMEQCWAPNPAVRPSFTEIARRLRVMSAAASQIKGQGHKASK

SEQ ID NO: 13110 - protein, 109 aa, Glycine max
MAPELLNGSSNKVSEKVDVFSFGIVLWEILTGDEPYANMHYGAIIGGIVNNTLRPTIPSYCDLDWKTLMEQCWAPNPAVRPSFTEIARRLRVMSAAASQIKGQGHKASK

SEQ ID NO: 13111 - protein, 71 aa, Glycine max
MHYGAIIGGIVNNTLRPTIPSYCDLDWKTLMEQCWAPNPAVRPSFTEIARRLRVMSAAASQIKGQGHKASK

SEQ ID NO: 13112 - DNA, 1659 bp, Glycine max
  misc_feature (474)..(474): n is a, c, g, or t
cggacgcgtgggtactactcaaggtatggcttttcaagtgttgttcatttgtttgatctcaaccatcgtgtttgcatccatactatggagaaaacaaaacaaaaacaagacccttcttccaccgagtccaatgcccctacccatcattggacacctccaccttctttctccaacacctcaccaagattttcacaagctctcactccgctatggacccataatacacctttttcttggttcagtcccctgtgtggtggcttccacagcagaagccgccaaagagttcctcaaaactcacgaacccgccttctccaaccgccccgctaacactgtcgccgtcgaaaccttaacctacggtttccaagacttcttgttcgcaccctacggaccctattggaagttcatgaagaaactctgcatgtccgaactcctcggtggccacatgctggaccagtttcttcccgtgagacagcnagagacaaaaaaattcatcaaacgtgtcctccaaaagggtatttctggtgaggccgtggattttgggggagagttcatcacgctctcgaacaacatcgtgtcgagaatgatcgtgagtcagacgagtactactgaggacgagaacgaagttgaagagatgaggaagctggtgaaggatgccgcagagctctcggggaagttcaacatatcggacttcgtttcgttcttgaagcgctttgatttgcaggggttcaacaagaggctcgagaagattcgggactgctttgacaccgtgttggacagaatcataaagcaacgtgaagaggaaagaaggaacaagaatgaaaccgttggaaaacgagaatttaaggatatgcttgatgttttgtttgacatatctgaagatgagagttctgaaattaaattaaacaaagaaaacattaaggccttcatcttggacatattaattgctgggactgacacctcagctgtaacgatggaatgggctatggcagagttaatcaacaatccaggtgtgttggagaaggcaagacaagaaatggatgcagtggttggaaagagtagaatagtagaagaatcagatattgccaaccttccttacttgcaaggcattgttagagaaacattaagacttcacccagctggtccattgctttttagagagtcatctagaagagctgtggtttgtgggtatgatattccagcaaagactcgattatttgtcaatgtttgggctattggtagggaccccaatcactgggagaaccctcttgagtttaggccagagaggtttgttgaaaatgggaagagtcaattggatgttaggggacaacattatcatctacttccgttcggtagtggaagaagagcatgtcctggtacttctttggcattgcaagttgtgcatgtgaatttggcagttctaattcagtgtttccaatggaaggttgactgtgacaatggcaaggtgaacatggaagaaaaggctggcatcactcttccgagggctcaccccataatttgtgtccctattcgaagacttaacccattccctgttgtgtgattgttttttattttaaacatcatttttccattcacgtatatgatatgatgtcatgtcaaacatttatgcactttttacataatatatttggggattcaaat

SEQ ID NO: 13113 - protein, 518 aa, Glycine max
  misc_feature (158)..(158): Xaa can be any naturally occurring amino acid
GRVGTTQGMAFQVLFICLISTIVFASILWRKQNKNKTLLPPSPMPLPIIGHLHLLSPTPHQDFHKLSLRYGPIIHLFLGSVPCVVASTAEAAKEFLKTHEPAFSNRPANTVAVETLTYGFQDFLFAPYGPYWKFMKKLCMSELLGGHMLDQFLPVRQXETKKFIKRVLQKGISGEAVDFGGEFITLSNNIVSRMIVSQTSTTEDENEVEEMRKLVKDAAELSGKFNISDFVSFLKRFDLQGFNKRLEKIRDCFDTVLDRIIKQREEERRNKNETVGKREFKDMLDVLFDISEDESSEIKLNKENIKAFILDILIAGTDTSAVTMEWAMAELINNPGVLEKARQEMDAVVGKSRIVEESDIANLPYLQGIVRETLRLHPAGPLLFRESSRRAVVCGYDIPAKTRLFVNVWAIGRDPNHWENPLEFRPERFVENGKSQLDVRGQHYHLLPFGSGRRACPGTSLALQVVHVNLAVLIQCFQWKVDCDNGKVNMEEKAGITLPRAHPIICVPIRRLNPFPVV

SEQ ID NO: 13114 - protein, 510 aa, Glycine max
  misc_feature (150)..(150): Xaa can be any naturally occurring amino acid
MAFQVLFICLISTIVFASILWRKQNKNKTLLPPSPMPLPIIGHLHLLSPTPHQDFHKLSLRYGPIIHLFLGSVPCVVASTAEAAKEFLKTHEPAFSNRPANTVAVETLTYGFQDFLFAPYGPYWKFMKKLCMSELLGGHMLDQFLPVRQXETKKFIKRVLQKGISGEAVDFGGEFITLSNNIVSRMIVSQTSTTEDENEVEEMRKLVKDAAELSGKFNISDFVSFLKRFDLQGFNKRLEKIRDCFDTVLDRIIKQREEERRNKNETVGKREFKDMLDVLFDISEDESSEIKLNKENIKAFILDILIAGTDTSAVTMEWAMAELINNPGVLEKARQEMDAVVGKSRIVEESDIANLPYLQGIVRETLRLHPAGPLLFRESSRRAVVCGYDIPAKTRLFVNVWAIGRDPNHWENPLEFRPERFVENGKSQLDVRGQHYHLLPFGSGRRACPGTSLALQVVHVNLAVLIQCFQWKVDCDNGKVNMEEKAGITLPRAHPIICVPIRRLNPFPVV

SEQ ID NO: 13115 - protein, 475 aa, Glycine max
  misc_feature (115)..(115): Xaa can be any naturally occurring amino acid
MPLPIIGHLHLLSPTPHQDFHKLSLRYGPIIHLFLGSVPCVVASTAEAAKEFLKTHEPAFSNRPANTVAVETLTYGFQDFLFAPYGPYWKFMKKLCMSELLGGHMLDQFLPVRQXETKKFIKRVLQKGISGEAVDFGGEFITLSNNIVSRMIVSQTSTTEDENEVEEMRKLVKDAAELSGKFNISDFVSFLKRFDLQGFNKRLEKIRDCFDTVLDRIIKQREEERRNKNETVGKREFKDMLDVLFDISEDESSEIKLNKENIKAFILDILIAGTDTSAVTMEWAMAELINNPGVLEKARQEMDAVVGKSRIVEESDIANLPYLQGIVRETLRLHPAGPLLFRESSRRAVVCGYDIPAKTRLFVNVWAIGRDPNHWENPLEFRPERFVENGKSQLDVRGQHYHLLPFGSGRRACPGTSLALQVVHVNLAVLIQCFQWKVDCDNGKVNMEEKAGITLPRAHPIICVPIRRLNPFPVV

SEQ ID NO: 13116 - DNA, 1657 bp, Glycine max
ctctctctcgtgtgtgtgtgtgtgtgtgtgtgtgtgtgtgttgggttcaatgtgctgttggtttgcttgaccttgtttatcaaccaaatctagagcaacccatttctctgttctcccatttgaaggaaaggaaaacttacacctctctctctctctaactgattcgctccaattccgccgcgcccagattcttctctctcacctacaaacccggtcccaacaaggtctttccttccaactcctatggcgggagaaacatcttggatcagccactatgatgacagacaaagggagactggggcgtttgattcatttttagaacttggtgaggaaggtgaaaaagaagcaactgctgtttctttggatgttttgccagatgacttgttggaacgaatcctagcctatctccccattgcaagcatttttagagctggctgtgtgtctaagaggtggcatgaaattgttaattcagagaggtttgtatggaacctttcacatgttctaccgcagaaaccttggtactttatgtttacgagctctgatgaaccagatggttatgcttttgatcccgtccttcggaaatggtatcggtatcgcattgaacttccatgcattggaacttctaattggttcattgcttcatcatatggcatggtctgcttcatggacaatgacagcagaagtgaaatatgcatctgcaacccaattaccaaaacctacaggaagcttgaggagcctccaggtttgaaagtttctgattacagtgcattagcaatctcagtgaacagggaatctcactgttatactgtggcaattgtaaaatctaaacaagtccctgagaactttgtccagtgggatatctcaattcatctatacaattcagaaaatgcaacctgggtgacctctttaacggaagttttgatggggtggagaggtggtaatgagagtgtgatatgcaatgggatgctgtgctttttagtttattcaaccgggggtggccaacctgtaaatcgtcatgccctaattgcgtataacatgtccaatcattcttctcaaggtagcttaacaaggaacttcattccagtacctttttctctaacatgtggccgtttgatgaatctgaaggagaagcttgtaatggtgggaggaattggtaaaccagatcgacctgacataataaaaggaattggtatctggcttctaaaggataagaagtgggaagagattgctcgaatgccccacaaattcttccaaggctttggggagtttgatgatgtgtttgctagcagcggtgcagatgatctgatatatattcagagttatggaggtccggcgcttctcatatttgatgtgaaccataagcaatggaaatggtcgcagaaatgccctgtgggaaaaagattcccgctgcagctttttactggcttttgctttgaggctagacttgaaattgctccatagttctccttacaatcaagagctgctaattgtgtccaaggcttctactcattttccttcattgttcttttaagtaaaaatttaatatgatttcagtgttttcacagtttcatacaaaatgttcttgctgataaaactgcttattcatggatactggaatattattaatagcatttgaaaataccacagcttttttttt

SEQ ID NO: 13117 - protein, 405 aa, Glycine max
MAGETSWISHYDDRQRETGAFDSFLELGEEGEKEATAVSLDVLPDDLLERILAYLPIASIFRAGCVSKRWHEIVNSERFVWNLSHVLPQKPWYFMFTSSDEPDGYAFDPVLRKWYRYRIELPCIGTSNWFIASSYGMVCFMDNDSRSEICICNPITKTYRKLEEPPGLKVSDYSALAISVNRESHCYTVAIVKSKQVPENFVQWDISIHLYNSENATWVTSLTEVLMGWRGGNESVICNGMLCFLVYSTGGGQPVNRHALIAYNMSNHSSQGSLTRNFIPVPFSLTCGRLMNLKEKLVMVGGIGKPDRPDIIKGIGIWLLKDKKWEEIARMPHKFFQGFGEFDDVFASSGADDLIYIQSYGGPALLIFDVNHKQWKWSQKCPVGKRFPLQLFTGFCFEARLEIAP

SEQ ID NO: 13118 - protein, 311 aa, Glycine max
MFTSSDEPDGYAFDPVLRKWYRYRIELPCIGTSNWFIASSYGMVCFMDNDSRSEICICNPITKTYRKLEEPPGLKVSDYSALAISVNRESHCYTVAIVKSKQVPENFVQWDISIHLYNSENATWVTSLTEVLMGWRGGNESVICNGMLCFLVYSTGGGQPVNRHALIAYNMSNHSSQGSLTRNFIPVPFSLTCGRLMNLKEKLVMVGGIGKPDRPDIIKGIGIWLLKDKKWEEIARMPHKFFQGFGEFDDVFASSGADDLIYIQSYGGPALLIFDVNHKQWKWSQKCPVGKRFPLQLFTGFCFEARLEIAP

SEQ ID NO: 13119 - protein, 269 aa, Glycine max
MVCFMDNDSRSEICICNPITKTYRKLEEPPGLKVSDYSALAISVNRESHCYTVAIVKSKQVPENFVQWDISIHLYNSENATWVTSLTEVLMGWRGGNESVICNGMLCFLVYSTGGGQPVNRHALIAYNMSNHSSQGSLTRNFIPVPFSLTCGRLMNLKEKLVMVGGIGKPDRPDIIKGIGIWLLKDKKWEEIARMPHKFFQGFGEFDDVFASSGADDLIYIQSYGGPALLIFDVNHKQWKWSQKCPVGKRFPLQLFTGFCFEARLEIAP

SEQ ID NO: 13120 - DNA, 1168 bp, Glycine max
  misc_feature (1090)..(1091): n is a, c, g, or t
cattttcttgtgttctgcctccatcgagtaccaagaaaacagaacaaactaaaaatgggactcttttcttctacaaaactgcttccaattgttgtgctgttttctcttcttttcacatcttatgccacaaattcagctgaaaacaactttgttcactgccttgtgaaccattctgagccctctcaccccatatccgcagcaattttcacacaaaacagttcctcattctcttcagtgctgcaagcctacatcagaaaccttcgtttcaacacctccacaacccgaaaaccattcctcatagtgaccccatttcatgtttcccatgtgcaagcatccattgtttgtgccaaaaagcacaacttgctgatgaaaatccgaagtgggggacatgactacgaaggggtgtcttatgtggcctcacagccattcttcatccttgacatgttcaatctccgatccatcgagatcgacatggaatccgagaccgcgtgggtcgaagccggcgcaatgcttggtgaagtttattatagaattgctgagaagagtaagactcatggttttccagcaggggtttgtcccactgttggtgtgggaggtcacattagtggtggtggatatggcaatctcatgagaaaatatggcacttcagtggacaatgttgttgatgcacaaatagtggatgctcggggaaggttgctgaatagaagaaccatgggtgaagatctcttttgggctgttagaggtggtggtggaggtagctttggtgttgttcttgcctacaaaataaggctagttcgagttcccgaaaaagtcactgttttccaagttggtgtaaccttggagcaaaatgccacagacatagtttacaattggcaacatgttgcgcctagcattgacaatgatcttttcattaggctcatcttggaggtggtaaatggtacacaaactgcaacaaagactgtgagggctaccttcatagcactcttccttggtgactccaaaagccttgtttctctcatggatgagaagtttcctcaattgggtttgaagcaattcgattgcattgagacaacctggcttcgatcggtgnntgttttgggacaacatagacattgcaaccccagttgagattttgcttgaaagacaacctcagtcttttaagtacttg

SEQ ID NO: 13121 - protein, 375 aa, Glycine max
  misc_feature (364)..(364): Xaa can be any naturally occurring amino acid
HFLVFCLHRVPRKQNKLKMGLFSSTKLLPIVVLFSLLFTSYATNSAENNFVHCLVNHSEPSHPISAAIFTQNSSSFSSVLQAYIRNLRFNTSTTRKPFLIVTPFHVSHVQASIVCAKKHNLLMKIRSGGHDYEGVSYVASQPFFILDMFNLRSIEIDMESETAWVEAGAMLGEVYYRIAEKSKTHGFPAGVCPTVGVGGHISGGGYGNLMRKYGTSVDNVVDAQIVDARGRLLNRRTMGEDLFWAVRGGGGGSFGVVLAYKIRLVRVPEKVTVFQVGVTLEQNATDIVYNWQHVAPSIDNDLFIRLILEVVNGTQTATKTVRATFIALFLGDSKSLVSLMDEKFPQLGLKQFDCIETTWLRSVXVLGQHRHCNPS

SEQ ID NO: 13122 - protein, 357 aa, Glycine max
  misc_feature (346)..(346): Xaa can be any naturally occurring amino acid
MGLFSSTKLLPIVVLFSLLFTSYATNSAENNFVHCLVNHSEPSHPISAAIFTQNSSSFSSVLQAYIRNLRFNTSTTRKPFLIVTPFHVSHVQASIVCAKKHNLLMKIRSGGHDYEGVSYVASQPFFILDMFNLRSIEIDMESETAWVEAGAMLGEVYYRIAEKSKTHGFPAGVCPTVGVGGHISGGGYGNLMRKYGTSVDNVVDAQIVDARGRLLNRRTMGEDLFWAVRGGGGGSFGVVLAYKIRLVRVPEKVTVFQVGVTLEQNATDIVYNWQHVAPSIDNDLFIRLILEVVNGTQTATKTVRATFIALFLGDSKSLVSLMDEKFPQLGLKQFDCIETTWLRSVXVLGQHRHCNPS

SEQ ID NO: 13123 - protein, 253 aa, Glycine max
  misc_feature (242)..(242): Xaa can be any naturally occurring amino acid
MKIRSGGHDYEGVSYVASQPFFILDMFNLRSIEIDMESETAWVEAGAMLGEVYYRIAEKSKTHGFPAGVCPTVGVGGHISGGGYGNLMRKYGTSVDNVVDAQIVDARGRLLNRRTMGEDLFWAVRGGGGGSFGVVLAYKIRLVRVPEKVTVFQVGVTLEQNATDIVYNWQHVAPSIDNDLFIRLILEVVNGTQTATKTVRATFIALFLGDSKSLVSLMDEKFPQLGLKQFDCIETTWLRSVXVLGQHRHCNPS

SEQ ID NO: 13124 - DNA, 639 bp, Glycine max
acaagttacaactcatcaattcggcagataaaggtagtagtagtgttacgttcgaattcgaattgttccatttgcttcgcaaaagttgcaactacttccacagaaagaaaaaaagtttctaagttaaggaaatccagagtgaaaaaaaaaaaaatggccggtgacggtgcagctacatgcatagacatccttcttgccattattctccctcctcttggtgtctttctcaaatatggttgccaggtggagttctggatttgtttggtgctgaccctttttggttatatacctggaattatctatgctgtctattctatcaccaagtgatcgtcaccctttaacttttgtggacaataaacaaatgtcatgggcgtttctgtctttcaactcagatattactgtttcttcaatctatcgttgtcaatgttgccattttcttttgttctgtttttaaaaacccttctgtttttagcttaagcgagagtggagtgtgtagcttgctagcttgtgcatgtagtctctagatttggtaatcgatttgaaatacacaattttatttgtatcaacggtcttgttcatgtatcttatgtaaattgtactattcattactttcaaattaataaatcggatttattcttc

SEQ ID NO: 13125 - protein, 108 aa, Glycine max
TSYNSSIRQIKVVVVLRSNSNCSICFAKVATTSTERKKVSKLRKSRVKKKKMAGDGAATCIDILLAIILPPLGVFLKYGCQVEFWICLVLTLFGYIPGIIYAVYSITK

SEQ ID NO: 13126 - protein, 57 aa, Glycine max
MAGDGAATCIDILLAIILPPLGVFLKYGCQVEFWICLVLTLFGYIPGIIYAVYSITK

SEQ ID NO: 13127 - protein, 54 aa, Glycine max
MHRHPSCHYSPSSWCLSQIWLPGGVLDLFGADPFWLYTWNYLCCLFYHQVIVTL

SEQ ID NO: 13128 - DNA, 1867 bp, Glycine max
aaaattggaatcttagaaggttgtttcctcaggccaagagcttggaaaattagcctcacaaaagcaaagatcaaacaaaccaaggacgagaacacgatgttgcttgaacttgcacttggtttattggttttggctctgtttctgcacttgcgtcccacacccactgcaaaatcaaaagcacttcgccatctcccaaacccaccaagcccaaagcctcgtcttcccttcataggacaccttcatctcttaaaagacaaacttctccactacgcactcatcgacctctccaaaaaacatggtcccttattctctctctactttggctccatgccaaccgttgttgcctccacaccagaattgttcaagctcttcctccaaacgcacgaggcaacttccttcaacacaaggttccaaacctcagccataagacgcctcacctatgatagctcagtggccatggttcccttcggaccttactggaagttcgtgaggaagctcatcatgaacgaccttcccaacgccaccactgtaaacaagttgaggcctttgaggacccaacagacccgcaagttccttagggttatggcccaaggcgcagaggcacagaagccccttgacttgaccgaggagcttctgaaatggaccaacagcaccatctccatgatgatgctcggcgaggctgaggagatcagagacatcgctcgcgaggttcttaagatctttggcgaatacagcctcactgacttcatctggccattgaagcatctcaaggttggaaagtatgagaagaggatcgacgacatcttgaacaagttcgaccctgtcgttgaaagggtcatcaagaagcgccgtgagatcgtgaggaggagaaagaacggagaggttgttgagggtgaggtcagcggggttttccttgacactttgcttgaattcgctgaggatgagaccatggagatcaaaatcaccaaggaccacatcgagggtcttgttgtcgactttttctcggcaggaacagactccacagcggtggcaacagagtgggcattggcagaactcatcaacaatcctaaggtgttggaaaaggctcgtgaggaggtctacagtgttgtgggaaaggacagacttgtggacgaagttgacactcaaaaccttccttacattagagcaatcgtgaaggagacattccgcatgcacccgccactcccagtggtcaaaagaaagtgcacagaagagtgtgagattaatggatatgtgatcccagagggagcattgattctcttcaatgtatggcaagtaggaagagaccccaaatactgggacagaccatcggagttccgtcctgagaggttcctagagacaggggctgaaggggaagcagggcctcttgatcttaggggacaacattttcaacttctcccatttgggtctgggaggagaatgtgccctggagtcaatctggctacttcgggaatggcaacacttcttgcatctcttattcagtgcttcgacttgcaagtgctgggtccacaaggacagatattgaagggtggtgacgccaaagttagcatggaagagagagccggcctcactgttccaagggcacatagtcttgtctgtgttccacttgcaaggatcggcgttgcatctaaactcctttcttaattaagatcatcatcatatataatatttactttttgtgtgttgataatcatcatttcaataaggtctcgttcatctactttttatgaagtatataagcccttccatgcacattgtatcatctcccatttgtcttcgtttgctacctaaggcaatctttttttttttagaatcacatcatcctactataaactatcaatccttatat

SEQ ID NO: 13129 - protein, 553 aa, Glycine max
KIGILEGCFLRPRAWKISLTKAKIKQTKDENTMLLELALGLLVLALFLHLRPTPTAKSKALRHLPNPPSPKPRLPFIGHLHLLKDKLLHYALIDLSKKHGPLFSLYFGSMPTVVASTPELFKLFLQTHEATSFNTRFQTSAIRRLTYDSSVAMVPFGPYWKFVRKLIMNDLPNATTVNKLRPLRTQQTRKFLRVMAQGAEAQKPLDLTEELLKWTNSTISMMMLGEAEEIRDIAREVLKIFGEYSLTDFIWPLKHLKVGKYEKRIDDILNKFDPVVERVIKKRREIVRRRKNGEVVEGEVSGVFLDTLLEFAEDETMEIKITKDHIEGLVVDFFSAGTDSTAVATEWALAELINNPKVLEKAREEVYSVVGKDRLVDEVDTQNLPYIRAIVKETFRMHPPLPVVKRKCTEECEINGYVIPEGALILFNVWQVGRDPKYWDRPSEFRPERFLETGAEGEAGPLDLRGQHFQLLPFGSGRRMCPGVNLATSGMATLLASLIQCFDLQVLGPQGQILKGGDAKVSMEERAGLTVPRAHSLVCVPLARIGVASKLLS

SEQ ID NO: 13130 - protein, 521 aa, Glycine max
MLLELALGLLVLALFLHLRPTPTAKSKALRHLPNPPSPKPRLPFIGHLHLLKDKLLHYALIDLSKKHGPLFSLYFGSMPTVVASTPELFKLFLQTHEATSFNTRFQTSAIRRLTYDSSVAMVPFGPYWKFVRKLIMNDLPNATTVNKLRPLRTQQTRKFLRVMAQGAEAQKPLDLTEELLKWTNSTISMMMLGEAEEIRDIAREVLKIFGEYSLTDFIWPLKHLKVGKYEKRIDDILNKFDPVVERVIKKRREIVRRRKNGEVVEGEVSGVFLDTLLEFAEDETMEIKITKDHIEGLVVDFFSAGTDSTAVATEWALAELINNPKVLEKAREEVYSVVGKDRLVDEVDTQNLPYIRAIVKETFRMHPPLPVVKRKCTEECEINGYVIPEGALILFNVWQVGRDPKYWDRPSEFRPERFLETGAEGEAGPLDLRGQHFQLLPFGSGRRMCPGVNLATSGMATLLASLIQCFDLQVLGPQGQILKGGDAKVSMEERAGLTVPRAHSLVCVPLARIGVASKLLS

SEQ ID NO: 13131 - protein, 444 aa, Glycine max
MPTVVASTPELFKLFLQTHEATSFNTRFQTSAIRRLTYDSSVAMVPFGPYWKFVRKLIMNDLPNATTVNKLRPLRTQQTRKFLRVMAQGAEAQKPLDLTEELLKWTNSTISMMMLGEAEEIRDIAREVLKIFGEYSLTDFIWPLKHLKVGKYEKRIDDILNKFDPVVERVIKKRREIVRRRKNGEVVEGEVSGVFLDTLLEFAEDETMEIKITKDHIEGLVVDFFSAGTDSTAVATEWALAELINNPKVLEKAREEVYSVVGKDRLVDEVDTQNLPYIRAIVKETFRMHPPLPVVKRKCTEECEINGYVIPEGALILFNVWQVGRDPKYWDRPSEFRPERFLETGAEGEAGPLDLRGQHFQLLPFGSGRRMCPGVNLATSGMATLLASLIQCFDLQVLGPQGQILKGGDAKVSMEERAGLTVPRAHSLVCVPLARIGVASKLLS

SEQ ID NO: 13132 - DNA, 1607 bp, Glycine max
tttttcgggtgtgtatttctcttccttccttcctttctctcttggtggggtttacgttgagctgtgataatacttgcgcgttcctccttctgctaccaacgttttgcagtgcccaaaaccttaaaaaccttttaagttttccattctggctgttcgctcggactctcacacttgtcgcaaagaagcccttgtttctcacaattacaagatgtggtattttgcggatttaagctgcgactagacctgtaactcagtgggggttctagagtttgtttctgtttcttgcatatatatatatatatatatatatatatatatttggtgagtgatatttcagcaaggaggaatcttcctttggagcgtggtgtgaacagaagatggatgaaaggtcaagaaacgaggcatctcctcagctgttagatttgatctcaaacgagagagagtggcagatgaacaagagaaacgaaggaaaatcctcagaagaaagaaagcttgaactgaggcttggtccacctggtgaagactggtctctgggcggtaaaatgaagaacacagaaagagaagaatctcttctctctcttggttgcttctctcctaacaatgggttccagagcaaggcttctccatggccaaactaccaccaccaccaccagggtaacaacaacaaagcctcttcttcatcatttcttcagtgccctaaggttgtggtagagttgcagaatggtggtgatggcaaagtattctctccctcttctgcaaatacagctgtgtcccagcccaacacctctcagaaaagaactgctcctgctccagtggtggggtggcccccaattcgttccttcaggaagaaccttgcaagcagcagcagtgcttctaagccacctcctgagtctcaggctgagcagcacaacaaggttgctggtaaaaaacctgttgacaactatgctaataataaaggtttgtttgtcaagatcaacatggatggtgttcctatagggagaaaagtggacctcaatgcctatgacagctatgaaaatctctcttccgccgtggacgagctattcagaggtcttcttgctgctcaaagagattcctctgctggtggagttcacaacaagcaggaggaagagaaagcaattacggggttattggatggaagtggagagtatactcttgtttatgaggataatgaaggagacaggatgcttgttggggatgtgccatggcacatgtttgtatcaacagtgaagaggctacgagtgttgaagagttctgagctttctgcttttacccttgggagtaagcaagacaagataccccttgactcagcaatgaaatgaacagcggtttgaggttttgatcacctgctgaaaacttgaagactcttcctaatttgacgttttggttctattgtctgatgaaaagaacatggaatgaagctagttgcgtacattacaactaagtaatgtgatgaatgtgtctttttttttttttctaaatgaagatttgaaatgtttatgggttttgtataaatagggaagggaaacttcacggatgtgtgtacttatgatttactgttgagtagccattaacttgttttggtttgt

SEQ ID NO: 13133 - protein, 320 aa, Glycine max
MDERSRNEASPQLLDLISNEREWQMNKRNEGKSSEERKLELRLGPPGEDWSLGGKMKNTEREESLLSLGCFSPNNGFQSKASPWPNYHHHHQGNNNKASSSSFLQCPKVVVELQNGGDGKVFSPSSANTAVSQPNTSQKRTAPAPVVGWPPIRSFRKNLASSSSASKPPPESQAEQHNKVAGKKPVDNYANNKGLFVKINMDGVPIGRKVDLNAYDSYENLSSAVDELFRGLLAAQRDSSAGGVHNKQEEEKAITGLLDGSGEYTLVYEDNEGDRMLVGDVPWHMFVSTVKRLRVLKSSELSAFTLGSKQDKIPLDSAMK

SEQ ID NO: 13134 - protein, 296 aa, Glycine max
MNKRNEGKSSEERKLELRLGPPGEDWSLGGKMKNTEREESLLSLGCFSPNNGFQSKASPWPNYHHHHQGNNNKASSSSFLQCPKVVVELQNGGDGKVFSPSSANTAVSQPNTSQKRTAPAPVVGWPPIRSFRKNLASSSSASKPPPESQAEQHNKVAGKKPVDNYANNKGLFVKINMDGVPIGRKVDLNAYDSYENLSSAVDELFRGLLAAQRDSSAGGVHNKQEEEKAITGLLDGSGEYTLVYEDNEGDRMLVGDVPWHMFVSTVKRLRVLKSSELSAFTLGSKQDKIPLDSAMK

SEQ ID NO: 13135 - protein, 265 aa, Glycine max
MKNTEREESLLSLGCFSPNNGFQSKASPWPNYHHHHQGNNNKASSSSFLQCPKVVVELQNGGDGKVFSPSSANTAVSQPNTSQKRTAPAPVVGWPPIRSFRKNLASSSSASKPPPESQAEQHNKVAGKKPVDNYANNKGLFVKINMDGVPIGRKVDLNAYDSYENLSSAVDELFRGLLAAQRDSSAGGVHNKQEEEKAITGLLDGSGEYTLVYEDNEGDRMLVGDVPWHMFVSTVKRLRVLKSSELSAFTLGSKQDKIPLDSAMK

SEQ ID NO: 13136 - DNA, 1455 bp, Glycine max
aattcggcaccaggcaccttccgccgtcgtggagcacgatgacgccttcggggcctcccccttccttctcgtcaccgacactggcacctccgccgggaaactcctcggctacgtcgcgaagagtgactggacgaatcataccgacaagggcttgagagtcggcgactacatggcgccacctcccaagccagtgccatggaacgccgacctaaacaaaattaatgaaatatttgagagtgagaaaagtggtgctgtggctttggagaaggatggtgaggttgttgatttggtggtgagggaggaggtggagagggtgaagggttacccgaaactggtggcgccggcgacggtgggggcggacggggagtttatggtgggggccgcggtggggacgagggaagatgataaggagaggttggagcatttggtgaaggctgggttgaatgttgtagtgttggatagttctcaggggaactcaatttatcagttagagatggtgaagtatgtgaagagggtttaccctgagcttgatgtgattggggggaatgttgtgactatgtaccaggctgagaatctgattcaggctggggttgatgggttgagggttggaatggggtctgggtccatttgtactactcaggaggtttgtgctgtggggcgtggtcaggcaactgctgtttacaaggtctcgtccattgcttataaaagtggtgttcctgtgattgctgatggtggcatctcaaactctggtcatattgttaaggctttgtcattgggagcgtcaactgttatgatgggaagcttcttagctggtagtcttgaggctcctggggcttatgtgtatcagaatggtcaacgtgtgaaaaagtacagaggaatgggttccctagaagccatgactaaagggagcgatgcaaggtacttgggtgatacagcaaagctaaaaattgctcagggggttgttggagctgttaaagataagggctctgtcttgaatttcataccatacaccttgcaagcagtcaggcaagggtttcaggatatcggtgccaactctctacagtctgctcatgaccttctaagatccagggtgttaagactgggaggtccggagtggagcagcacaagttggaaggtggaattcatggggctggtttcttatgaaaagaaatacttttgaagtatgaaaccatccaaaaatcataagcggtgctataatcccttgctgcagttcagcataaaagagggggacacactgttattggggttagtggcaacttgttgctactgtgtctagcgaattgaagtctataccaatagaatatcgtgggaaatttttccttgagtttctgaaggaagaacactgatttcgtgggtttttttttatgtccattagattttgtttgtcaaatgtgtcataaactttcctaaatatattttgcatgttttctgtcc

SEQ ID NO: 13137 - protein, 392 aa, Glycine max
IRHQAPSAVVEHDDAFGASPFLLVTDTGTSAGKLLGYVAKSDWTNHTDKGLRVGDYMAPPPKPVPWNADLNKINEIFESEKSGAVALEKDGEVVDLVVREEVERVKGYPKLVAPATVGADGEFMVGAAVGTREDDKERLEHLVKAGLNVVVLDSSQGNSIYQLEMVKYVKRVYPELDVIGGNVVTMYQAENLIQAGVDGLRVGMGSGSICTTQEVCAVGRGQATAVYKVSSIAYKSGVPVIADGGISNSGHIVKALSLGASTVMMGSFLAGSLEAPGAYVYQNGQRVKKYRGMGSLEAMTKGSDARYLGDTAKLKIAQGVVGAVKDKGSVLNFIPYTLQAVRQGFQDIGANSLQSAHDLLRSRVLRLGGPEWSSTSWKVEFMGLVSYEKKYF

SEQ ID NO: 13138 - protein, 336 aa, Glycine max
MAPPPKPVPWNADLNKINEIFESEKSGAVALEKDGEVVDLVVREEVERVKGYPKLVAPATVGADGEFMVGAAVGTREDDKERLEHLVKAGLNVVVLDSSQGNSIYQLEMVKYVKRVYPELDVIGGNVVTMYQAENLIQAGVDGLRVGMGSGSICTTQEVCAVGRGQATAVYKVSSIAYKSGVPVIADGGISNSGHIVKALSLGASTVMMGSFLAGSLEAPGAYVYQNGQRVKKYRGMGSLEAMTKGSDARYLGDTAKLKIAQGVVGAVKDKGSVLNFIPYTLQAVRQGFQDIGANSLQSAHDLLRSRVLRLGGPEWSSTSWKVEFMGLVSYEKKYF

SEQ ID NO: 13139 - protein, 269 aa, Glycine max
MVGAAVGTREDDKERLEHLVKAGLNVVVLDSSQGNSIYQLEMVKYVKRVYPELDVIGGNVVTMYQAENLIQAGVDGLRVGMGSGSICTTQEVCAVGRGQATAVYKVSSIAYKSGVPVIADGGISNSGHIVKALSLGASTVMMGSFLAGSLEAPGAYVYQNGQRVKKYRGMGSLEAMTKGSDARYLGDTAKLKIAQGVVGAVKDKGSVLNFIPYTLQAVRQGFQDIGANSLQSAHDLLRSRVLRLGGPEWSSTSWKVEFMGLVSYEKKYF

SEQ ID NO: 13140 - DNA, 658 bp, Glycine max
  misc_feature (135)..(135): n is a, c, g, or t
  misc_feature (632)..(632): n is a, c, g, or t
ccttggttggtgaagtgaaagcaaatttgaagaaaggtgttggagcaaatgaattgctgtcgcaacttgcagcacatcctgtacctgctcaagaaaagatgagtgctctggttgaagctttgttcgagggaactnaaaaaggttttgctaaagaagctgataaaaagaagaactacttttctgttgctgttgcggatgagggatcccagccgttgttgcttcatgctattgaagagttttcttgcaagtctacttcaaatgctttgaaggaggttgccctggttctaaaggcactctacgatgctgatgtgttagaggaagaacacatagtgcagtggtatcaaaagggactgaagggtgataacaagaactctaggatttggaagaatgctcaacctttcattgattggcttcagaatgcagaatcagaaaccgaggaagaataatttgtcctacattctccgttacttatgtttgcttgcttgtgttatgtcctttatttccaattaagggtcttgttggccccatgtgttgttcaactactatacttgctaaaaacttggtgtgaggggtgcatggttgctggactagtatagcatgtacgcgtcagtgagttttgtgttgtgttgttntaatgtattttggtttttggttggtg

SEQ ID NO: 13141 - protein, 147 aa, Glycine max
  misc_feature (45)..(45): Xaa can be any naturally occurring amino acid
LVGEVKANLKKGVGANELLSQLAAHPVPAQEKMSALVEALFEGTXKGFAKEADKKKNYFSVAVADEGSQPLLLHAIEEFSCKSTSNALKEVALVLKALYDADVLEEEHIVQWYQKGLKGDNKNSRIWKNAQPFIDWLQNAESETEEE

SEQ ID NO: 13142 - protein, 115 aa, Glycine max
  misc_feature (13)..(13): Xaa can be any naturally occurring amino acid
MSALVEALFEGTXKGFAKEADKKKNYFSVAVADEGSQPLLLHAIEEFSCKSTSNALKEVALVLKALYDADVLEEEHIVQWYQKGLKGDNKNSRIWKNAQPFIDWLQNAESETEEE

SEQ ID NO: 13143 - DNA, 760 bp, Glycine max
  misc_feature (517)..(517): n is a, c, g, or t
  misc_feature (530)..(530): n is a, c, g, or t
  misc_feature (685)..(685): n is a, c, g, or t
  misc_feature (688)..(688): n is a, c, g, or t
  misc_feature (735)..(735): n is a, c, g, or t
agttcaacaactctcagcaacatgcacaatcctcccccgccaggcggtccaggccctcaccaccaccccggcccaccggctccgccactacatgctcatccatctcctccgcctcctgggcctccacaccaccaccacggcccacccggcccaccgcatgcttatccaactcctccgcctcctgggcctccacaccaccatcccggcccacccgaaccaggctttcatcaacaccatggcccacccgggccatggtgttgatgaaagcctggtccatgggtggggtcttgattttgctcttagaaaatgtgttgagcctgcacatgagaagattggagttgttgattctcagtggattgttcaccaaggtattccctcactagggaatcagggtgaatctcaaacagggaaagcgccatggcagggggtgagggagcggtgtagaaaggagtggaccatgttccagagtcggttggcaaatgctgaatacgcgtatcacaactccattggaattganacatctaattccnctgctcattaggtgacttcggcctaagttgacttgtaaacatattgttactacccttagccttacgcgtagaattttcccttaaaaaaaaaaatatattcctatgtaacgttacgtacatgcaatgcaatcacaatatagagtcctagctagggnccnaacatcatttcgatgtagaaattgctgtacttaacagtgagtaaatntagtgaagagaattattattgctgc

SEQ ID NO: 13144 - protein, 179 aa, Glycine max
  misc_feature (172)..(172): Xaa can be any naturally occurring amino acid
  misc_feature (177)..(177): Xaa can be any naturally occurring amino acid
VQQLSATCTILPRQAVQALTTTPAHRLRHYMLIHLLRLLGLHTTTTAHPAHRMLIQLLRLLGLHTTIPAHPNQAFINTMAHPGHGVDESLVHGWGLDFALRKCVEPAHEKIGVVDSQWIVHQGIPSLGNQGESQTGKAPWQGVRERCRKEWTMFQSRLANAEYAYHNSIGIXTSNSXAH

SEQ ID NO: 13145 - protein, 149 aa, Glycine max
  misc_feature (142)..(142): Xaa can be any naturally occurring amino acid
  misc_feature (147)..(147): Xaa can be any naturally occurring amino acid
MLIHLLRLLGLHTTTTAHPAHRMLIQLLRLLGLHTTIPAHPNQAFINTMAHPGHGVDESLVHGWGLDFALRKCVEPAHEKIGVVDSQWIVHQGIPSLGNQGESQTGKAPWQGVRERCRKEWTMFQSRLANAEYAYHNSIGIXTSNSXAH

SEQ ID NO: 13146 - protein, 127 aa, Glycine max
  misc_feature (120)..(120): Xaa can be any naturally occurring amino acid
  misc_feature (125)..(125): Xaa can be any naturally occurring amino acid
MLIQLLRLLGLHTTIPAHPNQAFINTMAHPGHGVDESLVHGWGLDFALRKCVEPAHEKIGVVDSQWIVHQGIPSLGNQGESQTGKAPWQGVRERCRKEWTMFQSRLANAEYAYHNSIGIXTSNSXAH

SEQ ID NO: 13147 - DNA, 467 bp, Glycine max
cgctcaaggccaacatcctgggcatcaacctcaacgtgcccatcgatctcagcctcctcgtcaactactgcggcaagaacgtcccctccggcttccagtgcccccgctagaagagaagacccgagagatccatcgtccactgcatgcaggcatctactatacgtacgtacgtgcgtgcatgcatgatctacaatccatccattgactagtgctctatagctagtcgtatacgttatttgcttcataatttatcatcgcacttgctagttgataaactttacatatgcgtgctgcgtgtctctctgtgtggtagtatcgtttgtactactgcttgtcgtcgagctagattacggtactgtaatggatctcatgcgtgtaccgctgcctgctactattatatttgcttcaaaaaagaggttagtcctcctacaattgtaataaagtaatatcatatgtcaactttcagt

SEQ ID NO: 13148 - protein, 67 aa, Glycine max
AQGQHPGHQPQRAHRSQPPRQLLRQERPLRLPVPPLEEKTREIHRPLHAGIYYTYVRACMHDLQSIH

SEQ ID NO: 13149 - protein, 61 aa, Glycine max
RSRPTSWASTSTCPSISASSSTTAARTSPPASSAPARREDPRDPSSTACRHLLYVRTCVHA

SEQ ID NO: 13150 - protein, 35 aa, Glycine max
LKANILGINLNVPIDLSLLVNYCGKNVPSGFQCPR

SEQ ID NO: 13151 - DNA, 1264 bp, Glycine max
taacactaattaatgtgaatcatatcaaataatgaaaagtaaataaaattgtaattaactctatatgtatacacacacaaataataaataatagtaaaaaaaaattatgataaatatttaccatctcataaagatatttaaaataatgataaaaatatagattattttttatgcaactagctagccaaaaagagaacacgggtatatataaaaagagtacctttaaattctactgtacttcctttattcctgacgtttttatatcaagtggacatacgtgaagattttaattatcagtctaaatatttcattagcacttaatacttttctgttttattcctatcctataagtagtcccgattctcccaacattgcttattcacacaactaactaagaaagtcttccatagccccccaaaaatgaagagcaccatcttctttgctctctttctcttttgtgccttcaccacctcatacctaccttcagccatcgctgatttcgtgctcgataatgaaggtaaccctcttgaaaatggtggcacatattatatcttgtcagacataacagcatttggtggaataagagcagccccaacgggaaatgaaagatgccctctcactgtggtgcaatctcgcaatgagctcgacaaagggattggaacaatcatctcgtccccatatcgaatccgttttatcgccgaaggccatcctttgagccttaagttcgattcatttgcagttataatgctgtgtgttggaattcctaccgagtggtctgttgtggaggatctaccagaaggacctgctgttaaaattggtgagaacaaagatgcaatggatggttggtttagacttgagagagtttctgatgatgaattcaataactataagcttgtgttctgtccacagcaagctgaggatgacaaatgtggggatattgggattagtattgatcatgatgatggaaccaggcgtttggtggtgtctaagaacaaaccgttagtggttcagtttcaaaaacttgataaagaatcactggccaagaaaaatcatggcctttctcgcagtgagtgagacacaagtgtgagagtactaaataaatgctttggttgtacgaaatcattacactaaataaaataatcaaagcttatatatgccttccctaaggccgaatgcaaagaaattggttcttctcgttatctttgccactttactagtacgtattaattactacttaatcatcttgttacggctcattatatcc

SEQ ID NO: 13152 - protein, 217 aa, Glycine max
MKSTIFFALFLFCAFTTSYLPSAIADFVLDNEGNPLENGGTYYILSDITAFGGIRAAPTGNERCPLTVVQSRNELDKGIGTIISSPYRIRFIAEGHPLSLKFDSFAVIMLCVGIPTEWSVVEDLPEGPAVKIGENKDAMDGWFRLERVSDDEFNNYKLVFCPQQAEDDKCGDIGISIDHDDGTRRLVVSKNKPLVVQFQKLDKESLAKKNHGLSRSE

SEQ ID NO: 13153 - protein, 109 aa, Glycine max
MLCVGIPTEWSVVEDLPEGPAVKIGENKDAMDGWFRLERVSDDEFNNYKLVFCPQQAEDDKCGDIGISIDHDDGTRRLVVSKNKPLVVQFQKLDKESLAKKNHGLSRSE

SEQ ID NO: 13154 - DNA, 1711 bp, Glycine max
cacaacacaaacattctctccattgtctttgaacactcatcaccatggccaagcttgttctttccctttgtttccttcttttcagtggctgcttcgctctgagagagcaggcacagcaaaatgagtgccagatccaaaagctgaatgccctcaaaccggataaccgtatagagtcggaaggtgggttcattgagacctggaaccctaacaacaagccattccagtgtgccggtgttgccctctctcgctgcacccttaaccgcaatgcccttcgtagaccttcctacaccaacggtccccaggaaatctacatacaacaaggtaatggtatttttggcatgatattcccgggttgtcctagcacttatcaagagccgcaagaatctcagcaacgaggacgaagccagaggccccaagaccgtcaccaaaaggtacatcgcttcagagagggtgatttgatcgcagtgcctactggtgttgcatggtggatgtacaacaatgaagacactcctgttgttgccgtttctattattgacaccaacagcttggagaaccagctcgaccagatgcctaggagattctatcttgctgggaaccaagagcaagagtttctaaaatatcagcagcagcagcaaggaggttcccaaagccagaaaggaaagcaacaagaagaagaaaacgaaggaagcaacatattgagtggcttcgcccctgaattcttgaaagaagcgttcggcgtgaacatgcagatagtgagaaacctacaaggtgagaacgaagaggaggatagtggagccattgtgacagtgaaaggaggtctaagagtcacagctccagccatgaggaagccacagcaagaagaagatgatgatgatgaggaagagcagccacagtgcgtggagacagacaaaggttgccaacgccaaagcaaaaggagcagaaatggcattgatgagaccatttgcacaatgagacttcgccaaaacattggtcagaattcatcacctgacatctacaaccctcaagctggtagcatcacaaccgccaccagccttgacttcccagccctctggcttctcaaactcagtgcccagtatggatcactccgcaagaatgctatgttcgtgccacactacaccctgaacgcgaacagcataatatacgcattgaatgggcgggcattggtacaagtggtgaattgcaatggtgagagagtgtttgatggagagctgcaagagggaggggtgctgatcgttccacaaaactttgcggtggctgcaaaatcccagagcgataactttgagtatgtgtcattcaagaccaatgatagaccctcgatcggaaaccttgcaggggcaaactcattgttgaacgcattgccagaggaagtgattcagcacacttttaacctaaagagccagcaggccaggcaggtgaagaacaacaaccctttcagcttcctggttccacctcaggagtctcagaggagagctgtggcttagagagccctttttgcatgtgctaccacacttttgtccttttgggctctagctagtgctggtagcagtaaataagaatgaataaaagaaacaaaggcttagatgccctttgttaagtgtagaataacgggtatagtaactatgtacccttgtgtaatgagtcactcaagtacctatgcgggaaaagcataaataaaagaagaaattccaat

SEQ ID NO: 13155 - protein, 485 aa, Glycine max
MAKLVLSLCFLLFSGCFALREQAQQNECQIQKLNALKPDNRIESEGGFIETWNPNNKPFQCAGVALSRCTLNRNALRRPSYTNGPQEIYIQQGNGIFGMIFPGCPSTYQEPQESQQRGRSQRPQDRHQKVHRFREGDLIAVPTGVAWWMYNNEDTPVVAVSIIDTNSLENQLDQMPRRFYLAGNQEQEFLKYQQQQQGGSQSQKGKQQEEENEGSNILSGFAPEFLKEAFGVNMQIVRNLQGENEEEDSGAIVTVKGGLRVTAPAMRKPQQEEDDDDEEEQPQCVETDKGCQRQSKRSRNGIDETICTMRLRQNIGQNSSPDIYNPQAGSITTATSLDFPALWLLKLSAQYGSLRKNAMFVPHYTLNANSIIYALNGRALVQVVNCNGERVFDGELQEGGVLIVPQNFAVAAKSQSDNFEYVSFKTNDRPSIGNLAGANSLLNALPEEVIQHTFNLKSQQARQVKNNNPFSFLVPPQESQRRAVA

SEQ ID NO: 13156 - protein, 387 aa, Glycine max
MIFPGCPSTYQEPQESQQRGRSQRPQDRHQKVHRFREGDLIAVPTGVAWWMYNNEDTPVVAVSIIDTNSLENQLDQMPRRFYLAGNQEQEFLKYQQQQQGGSQSQKGKQQEEENEGSNILSGFAPEFLKEAFGVNMQIVRNLQGENEEEDSGAIVTVKGGLRVTAPAMRKPQQEEDDDDEEEQPQCVETDKGCQRQSKRSRNGIDETICTMRLRQNIGQNSSPDIYNPQAGSITTATSLDFPALWLLKLSAQYGSLRKNAMFVPHYTLNANSIIYALNGRALVQVVNCNGERVFDGELQEGGVLIVPQNFAVAAKSQSDNFEYVSFKTNDRPSIGNLAGANSLLNALPEEVIQHTFNLKSQQARQVKNNNPFSFLVPPQESQRRAVA

SEQ ID NO: 13157 - protein, 337 aa, Glycine max
MYNNEDTPVVAVSIIDTNSLENQLDQMPRRFYLAGNQEQEFLKYQQQQQGGSQSQKGKQQEEENEGSNILSGFAPEFLKEAFGVNMQIVRNLQGENEEEDSGAIVTVKGGLRVTAPAMRKPQQEEDDDDEEEQPQCVETDKGCQRQSKRSRNGIDETICTMRLRQNIGQNSSPDIYNPQAGSITTATSLDFPALWLLKLSAQYGSLRKNAMFVPHYTLNANSIIYALNGRALVQVVNCNGERVFDGELQEGGVLIVPQNFAVAAKSQSDNFEYVSFKTNDRPSIGNLAGANSLLNALPEEVIQHTFNLKSQQARQVKNNNPFSFLVPPQESQRRAVA

SEQ ID NO: 13158 - DNA, 952 bp, Glycine max
  misc_feature (224)..(224): n is a, c, g, or t
  misc_feature (248)..(248): n is a, c, g, or t
  misc_feature (300)..(300): n is a, c, g, or t
  misc_feature (448)..(448): n is a, c, g, or t
  misc_feature (478)..(478): n is a, c, g, or t
  misc_feature (513)..(513): n is a, c, g, or t
  misc_feature (566)..(566): n is a, c, g, or t
  misc_feature (575)..(575): n is a, c, g, or t
  misc_feature (620)..(620): n is a, c, g, or t
  misc_feature (664)..(664): n is a, c, g, or t
  misc_feature (873)..(873): n is a, c, g, or t
accaaacccgaactggcggtacatgtgtgaaaagaaaaaaccagccacccgcctgcacagcggagcctcgccatagatcgtgcgcgccataagagctcgcccagctccgagcgcttcctcggcacattcctcccccgcgcggccgccggcgaccaacccgcctcggcggccttcgagctcgacgtggacgacctcttcggttctcccgagcggccgcggccgcngccgcgacgccggcccttgctcanctcctccatctgcgccgcaaaccctagccccccgcgccgcccgccgggggcnatcctcgaggccctccccgagcgcctcgagcctctctcgccgcccccgtctgcttcattcgtctcgacatcccccgcgtctccggcgatggcccttccacgcatgatccccgccatcccccgcccggtgccgtcgtcggcgatgcacntgccgcagtgcgcgccgatgaatgtgccancggcgcggatgcggcgaccgacggtcgaggcgttngcaacttcgcgagtgaagcagatgaggacgactacgacgtggagatgttgtcnccgcacganatggtggcgcgctcgccggcgtgggagtcgcccatgacgaccttntgggtgttggagggcgctggacacacgctcccatgacgaccttntgggtgctggagggcgctggacacacgctcaaggggaggcacctccgccaggtacgcaatgccgtgtggtggaagacctgcctgctcgattgatccattgcgtttgcatttggtagctgcctacagctattgaatttgtgtgtttgaattattttgaacattacacctgtaaaatttgtgttgtattactcaccattccggcattactnttatttatgaactatctatttgagctctcaggagacattgaactatttggtatggattaagataattgtgcttttatgg

SEQ ID NO: 13159 - protein, 74 aa, Glycine max
  misc_feature (21)..(21): Xaa can be any naturally occurring amino acid
  misc_feature (31)..(31): Xaa can be any naturally occurring amino acid
  misc_feature (42)..(42): Xaa can be any naturally occurring amino acid
  misc_feature (60)..(60): Xaa can be any naturally occurring amino acid
  misc_feature (63)..(63): Xaa can be any naturally occurring amino acid
MALPRMIPAIPRPVPSSAMHXPQCAPMNVPXARMRRPTVEAXATSRVKQMRTTTTWRCCXRTXWWRARRRGSRP

SEQ ID NO: 13160 - protein, 69 aa, Glycine max
  misc_feature (16)..(16): Xaa can be any naturally occurring amino acid
  misc_feature (26)..(26): Xaa can be any naturally occurring amino acid
  misc_feature (37)..(37): Xaa can be any naturally occurring amino acid
  misc_feature (55)..(55): Xaa can be any naturally occurring amino acid
  misc_feature (58)..(58): Xaa can be any naturally occurring amino acid
MIPAIPRPVPSSAMHXPQCAPMNVPXARMRRPTVEAXATSRVKQMRTTTTWRCCXRTXWWRARRRGSRP

SEQ ID NO: 13161 - protein, 56 aa, Glycine max
  misc_feature (3)..(3): Xaa can be any naturally occurring amino acid
  misc_feature (13)..(13): Xaa can be any naturally occurring amino acid
  misc_feature (24)..(24): Xaa can be any naturally occurring amino acid
  misc_feature (42)..(42): Xaa can be any naturally occurring amino acid
  misc_feature (45)..(45): Xaa can be any naturally occurring amino acid
MHXPQCAPMNVPXARMRRPTVEAXATSRVKQMRTTTTWRCCXRTXWWRARRRGSRP

SEQ ID NO: 13162 - DNA, 1746 bp, Glycine max
aaaacaactcaaacattctctccattggtccttaaacactcatcagtcatcaccatggccaagctagttttttccctttgttttctgcttttcagtggctgctgcttcgctttcagttccagagagcagcctcagcaaaacgagtgccagatccaaaaactcaatgccctcaaaccggataaccgtatagagtcagaaggagggctcattgagacatggaaccctaacaacaagccattccagtgtgccggtgttgccctctctcgctgcaccctcaaccgcaacgcccttcgtagaccttcctacaccaacggtccccaggaaatctacatccaacaaggtaagggtatttttggcatgatatacccgggttgtcctagcacatttgaagagcctcaacaacctcaacaaagaggacaaagcagcagaccacaagaccgtcaccagaagatctataacttcagagagggtgatttgatcgcagtgcctactggtgttgcatggtggatgtacaacaatgaagacactcctgttgttgccgtttctattattgacaccaacagcttggagaaccagctcgaccagatgcctaggagattctatcttgctgggaaccaagagcaagagtttctaaaatatcagcaagagcaaggaggtcatcaaagccagaaaggaaagcatcagcaagaagaagaaaacgaaggaggcagcatattgagtggcttcaccctggaattcttggaacatgcattcagcgtggacaagcagatagcgaaaaacctacaaggagagaacgaaggggaagacaagggagccattgtgacagtgaaaggaggtctgagcgtgataaaaccacccacggacgagcagcaacaaagaccccaggaagaggaagaagaagaagaggatgagaagccacagtgcaagggtaaagacaaacactgccaacgcccccgaggaagccaaagcaaaagcagaagaaatggcattgacgagaccatatgcaccatgagacttcgccacaacattggccagacttcatcacctgacatctacaaccctcaagccggtagcgtcacaaccgccaccagccttgacttcccagccctctcgtggctcagactcagtgctgagtttggatctctccgcaagaatgcaatgttcgtgccacactacaacctgaacgcgaacagcataatatacgcattgaatggacgggcattgatacaagtggtgaattgcaacggtgagagagtgtttgatggagagctgcaagagggacgggtgctgatcgtgccacaaaactttgtggtggctgcaagatcacagagtgacaacttcgagtatgtgtcattcaagaccaatgatacacccatgatcggcactcttgcaggggcaaactcattgttgaacgcattaccagaggaagtgattcagcacactttcaacctaaaaagccagcaggccaggcagataaagaacaacaaccctttcaagttcctggttccacctcaggagtctcagaagagagctgtggcttagagccctttttgtatgtgctaccccacttttgtctttttggcaatagtgctagcaaccaataaataataataataataatgaataagaaaacaaaggctttagcttgccttttgttcactgtaaaataataatgtaagtactctctataatgagtcacgaaacttttgcgggaataaaaggagaaattccaatgagttttctgtc

SEQ ID NO: 13163 - protein, 513 aa, Glycine max
KTTQTFSPLVLKHSSVITMAKLVFSLCFLLFSGCCFAFSSREQPQQNECQIQKLNALKPDNRIESEGGLIETWNPNNKPFQCAGVALSRCTLNRNALRRPSYTNGPQEIYIQQGKGIFGMIYPGCPSTFEEPQQPQQRGQSSRPQDRHQKIYNFREGDLIAVPTGVAWWMYNNEDTPVVAVSIIDTNSLENQLDQMPRRFYLAGNQEQEFLKYQQEQGGHQSQKGKHQQEEENEGGSILSGFTLEFLEHAFSVDKQIAKNLQGENEGEDKGAIVTVKGGLSVIKPPTDEQQQRPQEEEEEEEDEKPQCKGKDKHCQRPRGSQSKSRRNGIDETICTMRLRHNIGQTSSPDIYNPQAGSVTTATSLDFPALSWLRLSAEFGSLRKNAMFVPHYNLNANSIIYALNGRALIQVVNCNGERVFDGELQEGRVLIVPQNFVVAARSQSDNFEYVSFKTNDTPMIGTLAGANSLLNALPEEVIQHTFNLKSQQARQIKNNNPFKFLVPPQESQKRAVA

SEQ ID NO: 13164 - protein, 495 aa, Glycine max
MAKLVFSLCFLLFSGCCFAFSSREQPQQNECQIQKLNALKPDNRIESEGGLIETWNPNNKPFQCAGVALSRCTLNRNALRRPSYTNGPQEIYIQQGKGIFGMIYPGCPSTFEEPQQPQQRGQSSRPQDRHQKIYNFREGDLIAVPTGVAWWMYNNEDTPVVAVSIIDTNSLENQLDQMPRRFYLAGNQEQEFLKYQQEQGGHQSQKGKHQQEEENEGGSILSGFTLEFLEHAFSVDKQIAKNLQGENEGEDKGAIVTVKGGLSVIKPPTDEQQQRPQEEEEEEEDEKPQCKGKDKHCQRPRGSQSKSRRNGIDETICTMRLRHNIGQTSSPDIYNPQAGSVTTATSLDFPALSWLRLSAEFGSLRKNAMFVPHYNLNANSIIYALNGRALIQVVNCNGERVFDGELQEGRVLIVPQNFVVAARSQSDNFEYVSFKTNDTPMIGTLAGANSLLNALPEEVIQHTFNLKSQQARQIKNNNPFKFLVPPQESQKRAVA

SEQ ID NO: 13165 - protein, 394 aa, Glycine max
MIYPGCPSTFEEPQQPQQRGQSSRPQDRHQKIYNFREGDLIAVPTGVAWWMYNNEDTPVVAVSIIDTNSLENQLDQMPRRFYLAGNQEQEFLKYQQEQGGHQSQKGKHQQEEENEGGSILSGFTLEFLEHAFSVDKQIAKNLQGENEGEDKGAIVTVKGGLSVIKPPTDEQQQRPQEEEEEEEDEKPQCKGKDKHCQRPRGSQSKSRRNGIDETICTMRLRHNIGQTSSPDIYNPQAGSVTTATSLDFPALSWLRLSAEFGSLRKNAMFVPHYNLNANSIIYALNGRALIQVVNCNGERVFDGELQEGRVLIVPQNFVVAARSQSDNFEYVSFKTNDTPMIGTLAGANSLLNALPEEVIQHTFNLKSQQARQIKNNNPFKFLVPPQESQKRAVA

SEQ ID NO: 13166 - DNA, 779 bp, Glycine max
cccacaaaaaaagttcctctctttattctcactatagagcccaaactccattccttttctttcttttttagtcacaagtgtagtgttgcattgagaaattaactaagactaattaaccaattagcaccaatggcgtcgaagaagaacacggttgtttttgaggactacttccctgcaatgatggagaaactgggcactgaggggttcatgaaggagctgacaaacggatttcagttgctgatggacagagagaagaaggtgataacgtttgagagcttgaagaagaactctgcattgcttgggttggaagggatgaacgatgatgagttaaggtgcatgctgagagaaggtgaccttgatggtgatggtgctctggatgagatggagttttgcaccctcatgttcaggttgagtcctgctttgatgaacaactccaaggaacttttggaggaagccatatacccttttcattagtcctttttttatccatagaatttgcaatactgacgcgttttgctcaaccaagtaagttagatcccttgatcttttctcttttctttctatcattttctttgtcctcttttcactctcactcagctccttaatcttgtgtgttctaaggtggttttcatttcttgtttttggtttcttttttagtattttttttatggagctgttctgtagtgtgtaattgcggatttctggttagttggttgaagtcttattcaacaatgccatgccacatattaagttattactattactctttatttttgtcc

SEQ ID NO: 13167 - protein, 114 aa, Glycine max
MASKKNTVVFEDYFPAMMEKLGTEGFMKELTNGFQLLMDREKKVITFESLKKNSALLGLEGMNDDELRCMLREGDLDGDGALDEMEFCTLMFRLSPALMNNSKELLEEAIYPFH

SEQ ID NO: 13168 - protein, 98 aa, Glycine max
MMEKLGTEGFMKELTNGFQLLMDREKKVITFESLKKNSALLGLEGMNDDELRCMLREGDLDGDGALDEMEFCTLMFRLSPALMNNSKELLEEAIYPFH

SEQ ID NO: 13169 - protein, 97 aa, Glycine max
MEKLGTEGFMKELTNGFQLLMDREKKVITFESLKKNSALLGLEGMNDDELRCMLREGDLDGDGALDEMEFCTLMFRLSPALMNNSKELLEEAIYPFH

SEQ ID NO: 13170 - DNA, 823 bp, Glycine max
  misc_feature (553)..(553): n is a, c, g, or t
  misc_feature (788)..(788): n is a, c, g, or t
aaaatcctccgactccttctcgccccctcctgccccgtggtccccaaccgccgtccgccgccgcagaggggagaggcggccgccgcccgccgccacagcaccgccggccccgtcgcccccgcgcaccccgccgggtttgatccgatggcgtccaagaggatcctcaaggagctcaaggacctgcagaaggaccctcccacctcatgcagcgcaggtcctgtaggtgaggacatgttccactggcaggcaactatcatgggaccctctgacagtccgttcaccggtggtctatttttggtgaacattcatttcccaccggattaccccttcaagcccccgaaggtctctttccgcaccaaggtgttccacccaaacatcaacagcaacggcagcatttgccttgacattctcaaggaacagtggagcccggctttgaccatatcaaaggtcctcctgtcaatctgttcgttgctgacggaccccaaccctgatgatcccctggtgcctgagatcgctcacatgtacaagactgatcgggccaagtatgagtccncggcacgctcctggacacagaagtacgccatgggctagagcctggacggccagctggtgaccatggatgcgccgagcccagaaccgttatcacctaaataaccaaccaaagtatcaccccaccctgcgacgaagtgaatggacttttgaggccgtcgtgcccctgttgaactcgtatgaatgtactcttgccatgtcaagtccgttgggtctgggtagtctgttctacctgacgnttcgttatccattaagttaaatctctgtcgtatct

SEQ ID NO: 13171 - protein, 196 aa, Glycine max
  misc_feature (185)..(185): Xaa can be any naturally occurring amino acid
KILRLLLAPSCPVVPNRRPPPQRGEAAAARRHSTAGPVAPAHPAGFDPMASKRILKELKDLQKDPPTSCSAGPVGEDMFHWQATIMGPSDSPFTGGLFLVNIHFPPDYPFKPPKVSFRTKVFHPNINSNGSICLDILKEQWSPALTISKVLLSICSLLTDPNPDDPLVPEIAHMYKTDRAKYESXARSWTQKYAMG

SEQ ID NO: 13172 - protein, 148 aa, Glycine max
  misc_feature (137)..(137): Xaa can be any naturally occurring amino acid
MASKRILKELKDLQKDPPTSCSAGPVGEDMFHWQATIMGPSDSPFTGGLFLVNIHFPPDYPFKPPKVSFRTKVFHPNINSNGSICLDILKEQWSPALTISKVLLSICSLLTDPNPDDPLVPEIAHMYKTDRAKYESXARSWTQKYAMG

SEQ ID NO: 13173 - protein, 119 aa, Glycine max
  misc_feature (108)..(108): Xaa can be any naturally occurring amino acid
MFHWQATIMGPSDSPFTGGLFLVNIHFPPDYPFKPPKVSFRTKVFHPNINSNGSICLDILKEQWSPALTISKVLLSICSLLTDPNPDDPLVPEIAHMYKTDRAKYESXARSWTQKYAMG

SEQ ID NO: 13174 - DNA, 1361 bp, Glycine max
actccactcacaactgaaaccaaaactgaaaaaaaaaacaataccataacatggcttcttccaccatcacctcctccttcctaacatcacccccttcatctctcttcaacaaatcatcatccccttccttccatgccacccctactctccgccccctcgcgccacgcgcctccatgtccgcctcagcgccgccctacgacttcggatcgttccggttcgatccgattagagagtcgattgtgtcgcgcgagatgacccgcaggtacatgatcgacatggtcacccacgccgacaccaacgtcgtcatcgttggcgcgggctccgcgggtctctcgtgcgcctacgagctctccaaaaatccctccatcaacatcgccattgttgagcagtccgtcagccccggcggcggcgcctggctcggcggccaactcttctccgccatggtagtgcgtaagcccgcacacctcttcctagacgagctcaatgtggagtatgacgaacaagacaactatgtggtgatcaagcacgcagcattgttcacatccacaatcatgagcaagctcttggccaggccaaacgtgaagctcttcaatgccgtggcggcggaggacttgattgtgaagaacgggagagttggtggggtggtgaccaactgggccttggtttcattgaaccatgacactcaatcctgcatggaccccaatgtgatggaggctaaggtggtggtgagttcttgtggccatgatggaccctttggagccactggggtgaagaggctcaagagcattgggttaattgatagtgtgcctgggatgaaggcacttgacatgaacaaggctgaggatgccattgtgaggctcactagggaggttgtgcctggcatgattgttactgggatggaagttgctgagattgatggtgctccaaggatgggtccaacatttggagcaatgatgatttcagggcaaaaagcagcccatctggctttgagatcattgggacttcccaatgctttggattcagtgggaaacgttcatcctgagcttgtcctagctgctgctgaatccgctgaaattgctgaggcttaattaatgttgcaacaaattaggttaaaatagtatcaatgcttgcaactagaaataataattgtagacttgtacttagggaattaagctttgaaggtgttggtagtgatctattggggtggttgatgcgactctatgcagtttgttaatacagtactatgaagctttgagggtgttgctagtgatctattgtgtcttactttcctcaaagcctaatttaattgggtcttttttctattataaatggagagggtggggtaccaccaaaccttcgtc

SEQ ID NO: 13175 - protein, 345 aa, Glycine max
MASSTITSSFLTSPPSSLFNKSSSPSFHATPTLRPLAPRASMSASAPPYDFGSFRFDPIRESIVSREMTRRYMIDMVTHADTNVVIVGAGSAGLSCAYELSKNPSINIAIVEQSVSPGGGAWLGGQLFSAMVVRKPAHLFLDELNVEYDEQDNYVVIKHAALFTSTIMSKLLARPNVKLFNAVAAEDLIVKNGRVGGVVTNWALVSLNHDTQSCMDPNVMEAKVVVSSCGHDGPFGATGVKRLKSIGLIDSVPGMKALDMNKAEDAIVRLTREVVPGMIVTGMEVAEIDGAPRMGPTFGAMMISGQKAAHLALRSLGLPNALDSVGNVHPELVLAAAESAEIAEA

SEQ ID NO: 13176 - protein, 304 aa, Glycine max
MSASAPPYDFGSFRFDPIRESIVSREMTRRYMIDMVTHADTNVVIVGAGSAGLSCAYELSKNPSINIAIVEQSVSPGGGAWLGGQLFSAMVVRKPAHLFLDELNVEYDEQDNYVVIKHAALFTSTIMSKLLARPNVKLFNAVAAEDLIVKNGRVGGVVTNWALVSLNHDTQSCMDPNVMEAKVVVSSCGHDGPFGATGVKRLKSIGLIDSVPGMKALDMNKAEDAIVRLTREVVPGMIVTGMEVAEIDGAPRMGPTFGAMMISGQKAAHLALRSLGLPNALDSVGNVHPELVLAAAESAEIAEA

SEQ ID NO: 13177 - protein, 278 aa, Glycine max
MTRRYMIDMVTHADTNVVIVGAGSAGLSCAYELSKNPSINIAIVEQSVSPGGGAWLGGQLFSAMVVRKPAHLFLDELNVEYDEQDNYVVIKHAALFTSTIMSKLLARPNVKLFNAVAAEDLIVKNGRVGGVVTNWALVSLNHDTQSCMDPNVMEAKVVVSSCGHDGPFGATGVKRLKSIGLIDSVPGMKALDMNKAEDAIVRLTREVVPGMIVTGMEVAEIDGAPRMGPTFGAMMISGQKAAHLALRSLGLPNALDSVGNVHPELVLAAAESAEIAEA

SEQ ID NO: 13178 - DNA, 1833 bp, Glycine max
atttttttctcaaaggaacaaagaaacaaagaagtaaacacactgtttcatactttcgtttcgttcattcggcgtagaagcaaaagagagagatagagagagggaaaaaggttgctaccaacaacaaacaaaaacagtgttgcttgattccgcggtggcgagaaccgacgttgagcggcgtaggagaggcgcggaacggtggtcttcagggttttctgacgtctctgttctcgaccctcggcggtgttttcgggtcaacgtttcaagaaccgcatcaaagtgttatcatggcttccagattggaacaacagcaacaacccaccaatgttggtggtgagaataagcagaaaaacatgggcggtgaaggaagaaacagaagggtgctgcaagatattgggaatctcgtgggtaaacaaggccatggaaatggaattaacgtgtctaaacctgtcacaaggaactttcgtgctcaactattggccaatgcacaagccgcaacagaaaagaataagaaatcaagcactgaagtgaacaacggagcagtggtggcaactgatggggttggtgttgggaattttgttcctgctagaaaggtgggagcagctaagaagcctaaagaagaacctgaagtgattgtgattatctctgatgatgaatcagacgaaaagcaagctgtgaagggaaaaaaggcaagggaaaaatctgccatgaagaatgccaaggccttcagttctgttctctctgctagaagcaaggctgcttgcggacttccaagggattttgtgatgaacattgatgcaactgacatggacaatgaattggcagcagccgagtacatcgatgatatctacaaattttacaaagagactgaagaagatggttgtgtgcatgactacatgggttcgcagccagatattaatgccaagatgaggtcaatccttgtggactggttgatagaagtgcataggaagtttgagctcatgccagaaactctttatttgaccttgaacattgtcgatcggttcctgtctgtgaaggctgtgcctagaagggagcttcagctggttggcatcagctccatgctgatagcctcaaaatatgaagagatatgggcaccagaggttaatgactttgtgtgcatatcagacaatggttatgttagtgaacaagtattgatgatggagaaacaaatccttaggaagcttgaatggactttaacagttccaacaccctatcactttttggttagggataccaaagcctccactccgtctgacaaagagatggagaacatggtgtttttccttgctgaacttggattgatgcattatcctactgtaatcttgtaccgtccttctctgattgctgcttctgctgtgtttgcggctcgatgtacccttggaaggagccctttctggacaaacactttgatgcactacacaggctactctgaggagcaactaagggattgcgccaaaatcatggccaaccttcatgctgctgctgcaccaggaagtaagcttagggcagtttacaagaaattctctaactcggatctttctgctgttgctcttctttctccagcaaaggacttgtcagcactgtcttgagcaagcttaggaggggaagtttaggttattttaggccccgatcatgattgttatgatctatattatatattcgtttatattttttttcagtgtgataaacaaaagtgtttgtatttggaatttgctaggaattgcttgaagcctcaagctaagtttgatgattctttttgtgtaaagcagaaatttgaaatattgctgggaaatattgagtgagctttttgtc

SEQ ID NO: 13179 - protein, 440 aa, Glycine max
MASRLEQQQQPTNVGGENKQKNMGGEGRNRRVLQDIGNLVGKQGHGNGINVSKPVTRNFRAQLLANAQAATEKNKKSSTEVNNGAVVATDGVGVGNFVPARKVGAAKKPKEEPEVIVIISDDESDEKQAVKGKKAREKSAMKNAKAFSSVLSARSKAACGLPRDFVMNIDATDMDNELAAAEYIDDIYKFYKETEEDGCVHDYMGSQPDINAKMRSILVDWLIEVHRKFELMPETLYLTLNIVDRFLSVKAVPRRELQLVGISSMLIASKYEEIWAPEVNDFVCISDNGYVSEQVLMMEKQILRKLEWTLTVPTPYHFLVRDTKASTPSDKEMENMVFFLAELGLMHYPTVILYRPSLIAASAVFAARCTLGRSPFWTNTLMHYTGYSEEQLRDCAKIMANLHAAAAPGSKLRAVYKKFSNSDLSAVALLSPAKDLSALS

SEQ ID NO: 13180 - protein, 418 aa, Glycine max
MGGEGRNRRVLQDIGNLVGKQGHGNGINVSKPVTRNFRAQLLANAQAATEKNKKSSTEVNNGAVVATDGVGVGNFVPARKVGAAKKPKEEPEVIVIISDDESDEKQAVKGKKAREKSAMKNAKAFSSVLSARSKAACGLPRDFVMNIDATDMDNELAAAEYIDDIYKFYKETEEDGCVHDYMGSQPDINAKMRSILVDWLIEVHRKFELMPETLYLTLNIVDRFLSVKAVPRRELQLVGISSMLIASKYEEIWAPEVNDFVCISDNGYVSEQVLMMEKQILRKLEWTLTVPTPYHFLVRDTKASTPSDKEMENMVFFLAELGLMHYPTVILYRPSLIAASAVFAARCTLGRSPFWTNTLMHYTGYSEEQLRDCAKIMANLHAAAAPGSKLRAVYKKFSNSDLSAVALLSPAKDLSALS

SEQ ID NO: 13181 - protein, 300 aa, Glycine max
MKNAKAFSSVLSARSKAACGLPRDFVMNIDATDMDNELAAAEYIDDIYKFYKETEEDGCVHDYMGSQPDINAKMRSILVDWLIEVHRKFELMPETLYLTLNIVDRFLSVKAVPRRELQLVGISSMLIASKYEEIWAPEVNDFVCISDNGYVSEQVLMMEKQILRKLEWTLTVPTPYHFLVRDTKASTPSDKEMENMVFFLAELGLMHYPTVILYRPSLIAASAVFAARCTLGRSPFWTNTLMHYTGYSEEQLRDCAKIMANLHAAAAPGSKLRAVYKKFSNSDLSAVALLSPAKDLSALS

SEQ ID NO: 13182 - DNA, 420 bp, Glycine max
gttgcttgctgcgagcgaatccctctctctctctctctctttctctctcatccagatcttgcaaaaaaaaaaaacacaatggcagcgagcgctcccactccacgcgaagagttcgtgtacatggcgaagctggcggagcaggccgagcgctacgaggagatggtggagttcatggagaaggtctccgcctccgccgagagcgaggagctgaccgtggaggagcgcaacctcctctccgtcgcctacaagaacgtaatcggcgctcgccgcgcctcctggcgcatcatctcctccattgagcagaaggaggagagccgcggcaacgaggaccacgtcgccgtcatccgtgactaccgctccaagatcgaggccgagctctccaacatctgcgacggaatcctcaagctcctcgacacgcgc

SEQ ID NO: 13183 - protein, 140 aa, Glycine max
VACCERIPLSLSLFLSHPDLAKKKNTMAASAPTPREEFVYMAKLAEQAERYEEMVEFMEKVSASAESEELTVEERNLLSVAYKNVIGARRASWRIISSIEQKEESRGNEDHVAVIRDYRSKIEAELSNICDGILKLLDTR

SEQ ID NO: 13184 - protein, 114 aa, Glycine max
MAASAPTPREEFVYMAKLAEQAERYEEMVEFMEKVSASAESEELTVEERNLLSVAYKNVIGARRASWRIISSIEQKEESRGNEDHVAVIRDYRSKIEAELSNICDGILKLLDTR

SEQ ID NO: 13185 - protein, 100 aa, Glycine max
MAKLAEQAERYEEMVEFMEKVSASAESEELTVEERNLLSVAYKNVIGARRASWRIISSIEQKEESRGNEDHVAVIRDYRSKIEAELSNICDGILKLLDTR

SEQ ID NO: 13186 - DNA, 1056 bp, Glycine max
  misc_feature (127)..(127): n is a, c, g, or t
ttgggtctgagatattttttttggaatttcatcgggtctgagttctgcaatgtagctttgtttttttttttacctataacacagtccgtgatgttgtgacgtgacatttgcagcctgctgcattttnctgtacttgaagccttaagttagtagactttattcattattcattgtatcattttctcttaagaataactccaaataatctgatcggttgcaacaagttttacacattccattgatgactatggccatggcttcaacagccaccttggtcagttcttttaatactgcattggttttccattaccattaccacggtcaagctttttcactcccctaaatcgggtgaacagtgaacccttaagcagctttttacatcagtagagtggatgctacacttgacaagaaacttgagcaaattggtactactgaggctcttgatctcaaaggaaagggtgcggtttctcaagcagtcttagcttaccaactttaccagaaaaagttctctggtacaagatgggaacgcttagagaagagaggtgccaagaagcagaggttgatgtgggcctcaacaaatgtgaaaaatccatcttaccctgacacattttatgttaattctcttattggaccagatacagccaagctcttcatgcattcatagaccatggtattctttcaagaactcttgatgcaaaagtatcagaggctcaagacatttacaatgcaattgagagaagttggggattgattggagttccgttggatcacaactggaacatgagatgctggattctttcacaaaaagctttgacaatgtgcttgaatgcatgcaaaagaaggctaagcttagggatttcatcagcttataaaccgttatttcaggttaactagtacacaagtctaaggcacaaatatttggcacttttttgtctgacattatgaaattagtgctgtctaagcttaaaactttggcttgtaactaaaatagtattatggactactagttggattaagcttaaaatgtaaaaggatataaaaaaagagttattgtgt

SEQ ID NO: 13187 - protein, 37 aa, Glycine max
MRCWILSQKALTMCLNACKRRLSLGISSAYKPLFQVN

SEQ ID NO: 13188 - protein, 33 aa, Glycine max
MTMAMASTATLVSSFNTALVFHYHYHGQAFSLP

SEQ ID NO: 13189 - protein, 33 aa, Glycine max
MWASTNVKNPSYPDTFYVNSLIGPDTAKLFMHS

SEQ ID NO: 13190 - DNA, 767 bp, Glycine max
aagagctttagattcttttcccctagattcagccacagttggaaaaaaaaaaaaatttgttcgagatggcacgtacgaagcaaactgctcgtaagtccacaggaggaaaggcacctaggaagcagctcgcaaccaaggctgcacgtaagtctgcaccaactactggtggtgtgaagaagccacatcgttatcgtcctggtaccgttgctcttcgtgagattaggaaataccagaagagtaccgagcttttgatcaggaagctccccttccagaggctggttcgtgaaattgctcaggacttcaagactgatctgcgtttccagagccatgctgtgcttgcattgcaagaagctgctgaggcataccttgttggactctttgaggatactaatctgtgtgccattcacgctaagcgtgtaactattatgcccaaagatatccagctggcaagaaggattcgtggtgagcgtgcttgatgtggtggtggtggtggtggttgtgaagatgatgatgggtggctgcgtgatggtgttttgttattcagatttcttttttattcaaagatagggttgttagggagtaggtattaattgtgatacgggcaaatactgctaagtgtccatgactgtgtcttcttcctttcagaaaattggcatgtaattgattttttggacatatgtgtctgtctgtcataatgtttatgtttttacgggatgtgtgcagccactttggacaacattcagttgccatctaatctcgtttaagct

SEQ ID NO: 13191 - protein, 136 aa, Glycine max; identical to SEQ ID NO: 8056

SEQ ID NO: 13192 - DNA, 874 bp, Glycine max
  misc_feature (654)..(654): n is a, c, g, or t
atagtattagcttggcttgactcctctcatcagaagaaagcgaaaaaagcaaaaatgcaatctatgtccctgacgctgagcaagaggctctccaattcaaagcctctcttcagaatctcttccagcctcgtcgctcacgcatcctccgccacaacctctccgccgccaccttcgccgccagtcccctctccctccgccctcaacagcctcctcaccgctccgtggtccgccactcagtcacgcggaatcacgctttccggatctgatattagagtcgggaatctcattggaaaccgaggacgcgctcacgaggttctcaaactgtatcgccctcttgaaggaacgggcaaagccactcttgaggttccgcctcaaagtgtagctggttatgccacagttgctactacagaggatggtgccgaaaggaaggaacgaaacagtggattgagtaaggcaacgaagacaaagagagagcagctcctaaaagctactgcagttgcctctcttcttctaatatacccgaacacttattcattgctcttcgcaaatttctttgtgttctggcacttatatgcagggatcggagagattttggcagactatgttcaccatgaaatgaccagagaatttgtcatgatttctctcaggttgttnttgataatcgcattgaaggatgtttgcttaaattttgtatttgtataatcagatagtgcatgggttgtgctgacattactttccaataagagcccattgggggtcaaacttggcaaaacctttatttgtagtttctagtcgtttttctaacttaagaggggaggcaacatgataacttgatgatttatcatggtaattgatgaattttagcgtgtcttgc

SEQ ID NO: 13193 - protein, 233 aa, Glycine max
  misc_feature (218)..(218): Xaa can be any naturally occurring amino acid
IVLAWLDSSHQKKAKKAKMQSMSLTLSKRLSNSKPLFRISSSLVAHASSATTSPPPPSPPVPSPSALNSLLTAPWSATQSRGITLSGSDIRVGNLIGNRGRAHEVLKLYRPLEGTGKATLEVPPQSVAGYATVATTEDGAERKERNSGLSKATKTKREQLLKATAVASLLLIYPNTYSLLFANFFVFWHLYAGIGEILADYVHHEMTREFVMISLRLXLIIALKDVCLNFVFV

SEQ ID NO: 13194 - protein, 215 aa, Glycine max
  misc_feature (200)..(200): Xaa can be any naturally occurring amino acid
MQSMSLTLSKRLSNSKPLFRISSSLVAHASSATTSPPPPSPPVPSPSALNSLLTAPWSATQSRGITLSGSDIRVGNLIGNRGRAHEVLKLYRPLEGTGKATLEVPPQSVAGYATVATTEDGAERKERNSGLSKATKTKREQLLKATAVASLLLIYPNTYSLLFANFFVFWHLYAGIGEILADYVHHEMTREFVMISLRLXLIIALKDVCLNFVFV

SEQ ID NO: 13195 - protein, 212 aa, Glycine max
  misc_feature (197)..(197): Xaa can be any naturally occurring amino acid
MSLTLSKRLSNSKPLFRISSSLVAHASSATTSPPPPSPPVPSPSALNSLLTAPWSATQSRGITLSGSDIRVGNLIGNRGRAHEVLKLYRPLEGTGKATLEVPPQSVAGYATVATTEDGAERKERNSGLSKATKTKREQLLKATAVASLLLIYPNTYSLLFANFFVFWHLYAGIGEILADYVHHEMTREFVMISLRLXLIIALKDVCLNFVFV

SEQ ID NO: 13196 - DNA, 714 bp, Glycine max
cttcaccttcacccatcaataccaaaatgaccaagcttacaattctcctcatcgctcttctcttcatcgcccacacctgctgcgcctccaaatggcaacagcaccagcaagagagctgccgcgagcagctcaaggggatcaacctcaacccctgtgagcacatcatggagaagatccaagctggccgccgcggcgaggacggcagcgacgaagatcacattctcatcaggaccatgccgggaagaatcaactacatcaggaagaaggaaggaaaagaagaagaagaagaaggacacatgcagaagtgctgcagcgaaatgagcgagctgaaaagccccatatgccagtgcaaagcgctacagaagataatggataaccagagcgagcaactggaggggaaggagaagaagcagatggagagagagctcatgaacttggctattaggtgcaggttgggacccatgatagggtgcgacttgtcctccgatgactgaaaaaaaagtactactaacacatatatgtgttagtttatgctagctagaagaacgtataagctatctccgtatgttgtatattaataaaaagatcatcactggtgaatggtgatcgtgtatgtaacgtagtgggcaatggaagcacttagagtgtgctttgtggccttgccctctgttttgataactgagacttttgcgaataccgttcgtttttcccttc

SEQ ID NO: 13197 - protein, 163 aa, Glycine max
SPSPINTKMTKLTILLIALLFIAHTCCASKWQQHQQESCREQLKGINLNPCEHIMEKIQAGRRGEDGSDEDHILIRTMPGRINYIRKKEGKEEEEEGHMQKCCSEMSELKSPICQCKALQKIMDNQSEQLEGKEKKQMERELMNLAIRCRLGPMIGCDLSSDD

SEQ ID NO: 13198 - protein, 155 aa, Glycine max
MTKLTILLIALLFIAHTCCASKWQQHQQESCREQLKGINLNPCEHIMEKIQAGRRGEDGSDEDHILIRTMPGRINYIRKKEGKEEEEEGHMQKCCSEMSELKSPICQCKALQKIMDNQSEQLEGKEKKQMERELMNLAIRCRLGPMIGCDLSSDD

SEQ ID NO: 13199 - protein, 109 aa, Glycine max
MEKIQAGRRGEDGSDEDHILIRTMPGRINYIRKKEGKEEEEEGHMQKCCSEMSELKSPICQCKALQKIMDNQSEQLEGKEKKQMERELMNLAIRCRLGPMIGCDLSSDD

SEQ ID NO: 13200 - DNA, 1076 bp, Glycine max
  misc_feature (455)..(455): n is a, c, g, or t
  misc_feature (723)..(723): n is a, c, g, or t
aatttctggggtagcccgtctagttcccacggccagatattttccccttaggttgagatgtgtaagaatgctgaaccagattgcagcttctacacattcttttataccagtgtctatgcttcttttggacatgctggagatgaaagaattgaatagaccccctacaggaggtgttggcaaagctgttgacttacacagtatactgaaggttagcaagctgaccctaaagacacgagcatttcaagaggcatgtgttatttctgtggttgaagagcttgctgaacacttggcacagtggagttattctgttgcattcttggagttgtcttttattccacttgtgaggttgcgtagcttttgcaaatcgaccaaagttgagaggtttcgaaaagaaacgaggcagcttatacgccagattgaggctagttctgactatgtgaatggaaagcgcctgncaatttccttttttcctaatgaccctgcagcagcatctttccttgaggatgaaaaaaagtcagcttctagtgcactttcaaagtatgtcatgacactccgccagagagcagagcaaaaaaataattcattgatggaatccagtgttcttgtgggagaagaatcctctaaatttgggaatgaaatatcggaaagtgatgaagaggatgcgagaaagaatgtggatggtgccgtggtctttagttcatcctggttacctggaaatgactntaagattaaacaacctacagaaacaaaacgaaagaggaaaaagcagcggaaagagaaagccattgatgacgatgttgtggaggacttagtacttagttcggacgaagatgtgcctccaagccacagcccttctgctaggaaaaatgacgacacagatgattcacctccaaaacaaaaacgcaagcacaggagcacaggactaaaaggttgaaaaaaaaattaatctcaccttgacgggaaataatgataatatgacatgtctagttggcgacctcactattcaagattgatacttttaggtggaatgtgacagaaaagttttgatagttttaatttaacaatcgtttcaattt

SEQ ID NO: 13201 - protein, 310 aa, Glycine max
  misc_feature (152)..(152): Xaa can be any naturally occurring amino acid
  misc_feature (241)..(241): Xaa can be any naturally occurring amino acid
ISGVARLVPTARYFPLRLRCVRMLNQIAASTHSFIPVSMLLLDMLEMKELNRPPTGGVGKAVDLHSILKVSKLTLKTRAFQEACVISVVEELAEHLAQWSYSVAFLELSFIPLVRLRSFCKSTKVERFRKETRQLIRQIEASSDYVNGKRLXISFFPNDPAAASFLEDEKKSASSALSKYVMTLRQRAEQKNNSLMESSVLVGEESSKFGNEISESDEEDARKNVDGAVVFSSSWLPGNDXKIKQPTETKRKRKKQRKEKAIDDDVVEDLVLSSDEDVPPSHSPSARKNDDTDDSPPKQKRKHRSTGLKG

SEQ ID NO: 13202 - protein, 288 aa, Glycine max
  misc_feature (130)..(130): Xaa can be any naturally occurring amino acid
  misc_feature (219)..(219): Xaa can be any naturally occurring amino acid
MLNQIAASTHSFIPVSMLLLDMLEMKELNRPPTGGVGKAVDLHSILKVSKLTLKTRAFQEACVISVVEELAEHLAQWSYSVAFLELSFIPLVRLRSFCKSTKVERFRKETRQLIRQIEASSDYVNGKRLXISFFPNDPAAASFLEDEKKSASSALSKYVMTLRQRAEQKNNSLMESSVLVGEESSKFGNEISESDEEDARKNVDGAVVFSSSWLPGNDXKIKQPTETKRKRKKQRKEKAIDDDVVEDLVLSSDEDVPPSHSPSARKNDDTDDSPPKQKRKHRSTGLKG

SEQ ID NO: 13203 - protein, 272 aa, Glycine max
  misc_feature (114)..(114): Xaa can be any naturally occurring amino acid
  misc_feature (203)..(203): Xaa can be any naturally occurring amino acid
MLLLDMLEMKELNRPPTGGVGKAVDLHSILKVSKLTLKTRAFQEACVISVVEELAEHLAQWSYSVAFLELSFIPLVRLRSFCKSTKVERFRKETRQLIRQIEASSDYVNGKRLXISFFPNDPAAASFLEDEKKSASSALSKYVMTLRQRAEQKNNSLMESSVLVGEESSKFGNEISESDEEDARKNVDGAVVFSSSWLPGNDXKIKQPTETKRKRKKQRKEKAIDDDVVEDLVLSSDEDVPPSHSPSARKNDDTDDSPPKQKRKHRSTGLKG

SEQ ID NO: 13204 - DNA, 504 bp, Glycine max
acacaacataataaaaaaaaagaagatatacaaaaagttgatagtaggatacaagttcgcttttgatcactgtcctcaaaaagagagaaaaaggaccagctgaaatggggcgttgggtgagacctgaggtgtaccctcttctcggagcaatgggatttgtaacatctatggttgtgtttcaactcacaaggaatgcattattaaaccctgattgcaggataagtaaagagaacagaaaaatgggaattctggaaaatgaagatgaaggagaaaaatatgcacaacacagtcttcgcaagcatttgaggacccgtccacctcaagttacgccttctctcaaccgtttcttctctgaagaggacaactaaactatttcaccttatcataaaagttacttatatactagttattatacaaattaaatctagtttgggattgcttaatgtgtattgtaatacttagtatggctggacaatttatccgttaaatttgattcgatttgtt

SEQ ID NO: 13205 - protein, 87 aa, Glycine max
MGRWVRPEVYPLLGAMGFVTSMVVFQLTRNALLNPDCRISKENRKMGILENEDEGEKYAQHSLRKHLRTRPPQVTPSLNRFFSEEDN

SEQ ID NO: 13206 - protein, 72 aa, Glycine max
MGFVTSMVVFQLTRNALLNPDCRISKENRKMGILENEDEGEKYAQHSLRKHLRTRPPQVTPSLNRFFSEEDN

SEQ ID NO: 13207 - protein, 66 aa, Glycine max
MVVFQLTRNALLNPDCRISKENRKMGILENEDEGEKYAQHSLRKHLRTRPPQVTPSLNRFFSEEDN

SEQ ID NO: 13208 - DNA, 590 bp, Glycine max
attttcgtcactttcacatcagatcggagccacacaccacagcgatcgatgccgtcgacgcagcccttaaccgtcgcagcgaggtccctacgaagccggatcctctccagatccggatccacatccgccggcgcgagccgatgggcaacgccgggccacgaggagcgtcccaagggcttcttcatgaaccgcactcctccgccgccggggcaatcgcggaaatgggaggattgggagcttccctgctacgtcacgagcttcctcacgatcgtcatcctcggcgtggggctcaacgcgaagcctgatctctcgatcgagacttgggctcatcagaaggccctggagcggctcgaggcggagaggctcgccggagattcttccgattgagaggatcagatgtttgatgctttggaactttgaagcagtgtcttttggttttgttgataatggtggaataaagtgttctttgacgaacttatgattacaagtttaaaactttgtcacttttgatttgctagttgttgatcaacatctgaaattcgattgcttttttcaaacgaatattgtttgtttcagtattggcctttgtt

SEQ ID NO: 13209 - protein, 128 aa, Glycine max
IFVTFTSDRSHTPQRSMPSTQPLTVAARSLRSRILSRSGSTSAGASRWATPGHEERPKGFFMNRTPPPPGQSRKWEDWELPCYVTSFLTIVILGVGLNAKPDLSIETWAHQKALERLEAERLAGDSSD

SEQ ID NO: 13210 - protein, 112 aa, Glycine max
MPSTQPLTVAARSLRSRILSRSGSTSAGASRWATPGHEERPKGFFMNRTPPPPGQSRKWEDWELPCYVTSFLTIVILGVGLNAKPDLSIETWAHQKALERLEAERLAGDSSD

SEQ ID NO: 13211 - protein, 100 aa, Glycine max
FRHFHIRSEPHTTAIDAVDAALNRRSEVPTKPDPLQIRIHIRRREPMGNAGPRGASQGLLHEPHSSAAGAIAEMGGLGASLLRHELPHDRHPRRGAQREA

SEQ ID NO: 13212 - DNA, 615 bp, Glycine max
actacacacttctcattttgcaaacagtcaaaagcccctaaaactaagaaaaaatggctggtctagtgaagttggcatgcttggtcttggcctgcatgattgtggccggtccaatagcaacgaacgcggctctaagctgtggaaccgttagcggtaacttggcagcatgcattggctacttaacccaaaatgggcctcttccaagagggtgctgcactggcgttactaatctaaacaacatggcccgtacaaccccggaccgtcagcaagcttgccgttgccttgtaggagccgctaactccttccctactctcaacgctgcccgtgctgctggacttcctaaggcatgtggagtcaatattccttacaaaatcagcaaaagcaccaactgcaacagcgttagatgagcagcggtcggatgaagaaactcaagcggacgtacgaatctaatataatgtatgagagagtactaaataagatgttcgaatggttgtttttctagtgttttaaaatttcatgttttctcttctgttgtgtcgttcctttactttggtcctatgtactatgttcgtaatcaacgtccgctatatgaagttcatatccaaggtttacgtt

SEQ ID NO: 13213 - protein, 117 aa, Glycine max
MAGLVKLACLVLACMIVAGPIATNAALSCGTVSGNLAACIGYLTQNGPLPRGCCTGVTNLNNMARTTPDRQQACRCLVGAANSFPTLNAARAAGLPKACGVNIPYKISKSTNCNSVR

SEQ ID NO: 13214 - protein, 103 aa, Glycine max
MIVAGPIATNAALSCGTVSGNLAACIGYLTQNGPLPRGCCTGVTNLNNMARTTPDRQQACRCLVGAANSFPTLNAARAAGLPKACGVNIPYKISKSTNCNSVR

SEQ ID NO: 13215 - DNA, 711 bp, Glycine max
gcaatactagcgatagctgataagagagataccaacaagaaaagaaaaaaagaagagttgagattccctttgaagaaaagatggcatcccataggcaaagctatgaagctggtcaaactaagggccgaactgaggaaaagacgaaccagacgatgggcaatattggagagaaggctcaagctgcaaaggagaagacccaggaaatggcccaagctgcaaaggagaagacccaacaaacagcccaagctgccaaggacaagacttgcgacacttcccaagcggcaaaggagaagacccaacagaatacaggagctgctcaacaaaagacctcagagatgggccagtccacgaaggaatcggcccagtcagggaaggacaacacccaagggttcctgcagcagacaggggagaaggtgaagggcgcagcccaaggtgctacagaggctgtgaagcaaacccttggcttgggcgagcatgatcaagacaaccgcagaaattactaatactataatttgaagtgctttcttgtagtagtggtttacgcagcatggctttttaaataagctgctattccctacactcctacctaaggagtgtactattatccgcagtttctattctctctagctactttcatgtatgttcaatgctatatatagccttgaattaatgtcaactatgttctaattaatgctatagcttcggtttgtg

SEQ ID NO: 13216 - protein, 140 aa, Glycine max
MASHRQSYEAGQTKGRTEEKTNQTMGNIGEKAQAAKEKTQEMAQAAKEKTQQTAQAAKDKTCDTSQAAKEKTQQNTGAAQQKTSEMGQSTKESAQSGKDNTQGFLQQTGEKVKGAAQGATEAVKQTLGLGEHDQDNRRNY

SEQ ID NO: 13217 - protein, 138 aa, Glycine max
AILAIADKRDTNKKRKKEELRFPLKKRWHPIGKAMKLVKLRAELRKRRTRRWAILERRLKLQRRRPRKWPKLQRRRPNKQPKLPRTRLATLPKRQRRRPNRIQELLNKRPQRWASPRRNRPSQGRTTPKGSCSRQGRR

SEQ ID NO: 13218 - protein, 116 aa, Glycine max
MGNIGEKAQAAKEKTQEMAQAAKEKTQQTAQAAKDKTCDTSQAAKEKTQQNTGAAQQKTSEMGQSTKESAQSGKDNTQGFLQQTGEKVKGAAQGATEAVKQTLGLGEHDQDNRRNY

SEQ ID NO: 13219 - DNA, 579 bp, Glycine max
cagttgctgttttctgatggatttcctgttgccaaggacttcaaccgtattgtatgcacttgtttcaatggtgcatcaaatatttcccaggcaggtggtctggcttgcctttcaccagacggtcttaaggctatgcgagatgttattggattctacaaagaaaataccgacattataatggagacatttgattctcttgggtttaaagtctatggagggaaagatgcaccatatgtatgggtccattttcccggccgaagctcatgggatgtattcgctgagattctcgagaagactcatgtggttacaactcctggcagcggttttggacctggtggtgaaggtttcatcagggttagtgcctttggtcacagggaaaatgtcttggaggcatgcagaaggttcaagcagctatacaagtgaatttagaatttatatctcatttggtttcaagagttgtattctcttggactgaagctagggtctgtcttatttaaataatgcagttgattttccttggaatttagattataagatgtaaagacagggtttatcaattgaggacacgtttattttgct

SEQ ID NO: 13220 - protein, 140 aa, Glycine max
QLLFSDGFPVAKDFNRIVCTCFNGASNISQAGGLACLSPDGLKAMRDVIGFYKENTDIIMETFDSLGFKVYGGKDAPYVWVHFPGRSSWDVFAEILEKTHVVTTPGSGFGPGGEGFIRVSAFGHRENVLEACRRFKQLYK

SEQ ID NO: 13221 - protein, 96 aa, Glycine max
MRDVIGFYKENTDIIMETFDSLGFKVYGGKDAPYVWVHFPGRSSWDVFAEILEKTHVVTTPGSGFGPGGEGFIRVSAFGHRENVLEACRRFKQLYK

SEQ ID NO: 13222 - protein, 87 aa, Glycine max
MEGKMHHMYGSIFPAEAHGMYSLRFSRRLMWLQLLAAVLDLVVKVSSGLVPLVTGKMSWRHAEGSSSYTSEFRIYISFGFKSCILLD

SEQ ID NO: 13223 - DNA, 2080 bp, Glycine max
acccgcatcaaaagtcactccattcccatcagaacacaaaacacagcatttcccttagcgtaggtaaagccatagtatccatcactcactctttcgcaagcattctttctgtttatatatttcactcaccaataccttcattgtgttaggaaatggaagtcacactttcagcctgcaagtccgttagctcgccttctgttcccgtcgcaggtttgtttgcggggaatggaggaattaagagctcgcaatgcagtttcttagcgggagcgagcaaagtgaggtttcctaggcaagtaggtcaagttagccaccttcgcaaacagcgccaaacgcgtcactgcggtgctctccacgcgacttgcagcggtgacaagatcctgatcgcgaacagaggcgagattgccgtccgcgttattcgaaccgctcatgaattggggattccttgtgtggctgtgtactccaccatcgacaaggacgcgcttcatgtcaaattggctgatgaagccgtttgcatcggggaagcgccgagtagccagtcctacttgctgatcccgaatgttctgtcagctgctattagccgcagatgcaccatgttgcatcctggctatggttttcttgcggagaatgcagtgtttgttgaaatgtgcagagaacatggaatcaactttattgggcctaaccctgacagtattcgggttatgggtgacaaagcaactgccagagagacaatgaagaaagcaggtgttcccaccgttccgggaagtgatggccttttacagagcacagaagaagctatcagactggcaaatgagattggtttccctgtgatgatcaaggcaacagctggtggtggaggacgtggcatgcgtcttgctaaagaacctgctgagtttgtgaagtttttacagcaagctaagagtgaggcagctgctgcatttggcaatgatggggtttatttggagaagtacattcaaaacccaaggcacattgagttccaggttcttgcagataaatatggtaatgttgttcactttggagaacgtgattgcagcattcagaggcgcaaccagaaactgcttgaagaagcaccatctcctgccctgacccctgagttgcgaaaggcaatgggagatgcagcagttgcagctgctgcatctattggttacataggtgttggaacggttgagttccttttggatgaaagaggttccttttactttatggagatgaacactcgtatccaggttgagcatccggtgacagaaatgatttcctcaacggatttgatagaagagcaaattcgtgtagctatgggagaaaaacttcgatacaaacaggaggatattgtcctcagaggacattctattgaatgccgtatcaatgcagaagatgcttttaagggatttagaccagggccaggtagaattactgcatacttgccatccggaggtccatttgttagaatggatagccatgtttatcctgattatgtggttcctccaagctatgattcccttcttggaaagctgattgtatgggccccaactagagaaaaagcaattgaacgcatgaaaagggcacttgatgatactattatcacaggagttcctactacaattgattatcataaacttatccttgacatagaggatttcagaaatggcaaggttgatactgcttttattccaaaacacgaggaagagttggcaatgccaccgcagaagatggtactcgctaacagggtgaatgaactagctggttcaactgcctgatgaatatgattgtgtgatgccagaattgctttgttgtaatcaccgtgtcgttagtgccttgaagtcaatgttttattgaaattttgataattagtctcgtacattcctatttcttcacataattatattgtaatatcaattaatttcatcccaaatattagtgcaaggaataaggaataactccttgcatttttcttccaaagttagttgtctaaacggtttagaggatctttgtcccaaggcttgtttgtaattcttgtattaagagctcgttgctagatacactaataaaaacttaatcttatcct

SEQ ID NO: 13224 - protein, 539 aa, Glycine max
MEVTLSACKSVSSPSVPVAGLFAGNGGIKSSQCSFLAGASKVRFPRQVGQVSHLRKQRQTRHCGALHATCSGDKILIANRGEIAVRVIRTAHELGIPCVAVYSTIDKDALHVKLADEAVCIGEAPSSQSYLLIPNVLSAAISRRCTMLHPGYGFLAENAVFVEMCREHGINFIGPNPDSIRVMGDKATARETMKKAGVPTVPGSDGLLQSTEEAIRLANEIGFPVMIKATAGGGGRGMRLAKEPAEFVKFLQQAKSEAAAAFGNDGVYLEKYIQNPRHIEFQVLADKYGNVVHFGERDCSIQRRNQKLLEEAPSPALTPELRKAMGDAAVAAAASIGYIGVGTVEFLLDERGSFYFMEMNTRIQVEHPVTEMISSTDLIEEQIRVAMGEKLRYKQEDIVLRGHSIECRINAEDAFKGFRPGPGRITAYLPSGGPFVRMDSHVYPDYVVPPSYDSLLGKLIVWAPTREKAIERMKRALDDTIITGVPTTIDYHKLILDIEDFRNGKVDTAFIPKHEEELAMPPQKMVLANRVNELAGSTA

SEQ ID NO: 13225 - protein, 393 aa, Glycine max
MLHPGYGFLAENAVFVEMCREHGINFIGPNPDSIRVMGDKATARETMKKAGVPTVPGSDGLLQSTEEAIRLANEIGFPVMIKATAGGGGRGMRLAKEPAEFVKFLQQAKSEAAAAFGNDGVYLEKYIQNPRHIEFQVLADKYGNVVHFGERDCSIQRRNQKLLEEAPSPALTPELRKAMGDAAVAAAASIGYIGVGTVEFLLDERGSFYFMEMNTRIQVEHPVTEMISSTDLIEEQIRVAMGEKLRYKQEDIVLRGHSIECRINAEDAFKGFRPGPGRITAYLPSGGPFVRMDSHVYPDYVVPPSYDSLLGKLIVWAPTREKAIERMKRALDDTIITGVPTTIDYHKLILDIEDFRNGKVDTAFIPKHEEELAMPPQKMVLANRVNELAGSTA

SEQ ID NO: 13226 - protein, 376 aa, Glycine max
MCREHGINFIGPNPDSIRVMGDKATARETMKKAGVPTVPGSDGLLQSTEEAIRLANEIGFPVMIKATAGGGGRGMRLAKEPAEFVKFLQQAKSEAAAAFGNDGVYLEKYIQNPRHIEFQVLADKYGNVVHFGERDCSIQRRNQKLLEEAPSPALTPELRKAMGDAAVAAAASIGYIGVGTVEFLLDERGSFYFMEMNTRIQVEHPVTEMISSTDLIEEQIRVAMGEKLRYKQEDIVLRGHSIECRINAEDAFKGFRPGPGRITAYLPSGGPFVRMDSHVYPDYVVPPSYDSLLGKLIVWAPTREKAIERMKRALDDTIITGVPTTIDYHKLILDIEDFRNGKVDTAFIPKHEEELAMPPQKMVLANRVNELAGSTA

SEQ ID NO: 13227 - DNA, 1401 bp, Glycine max
attgctagtggctgcagtgcatgtgcatggtagacccgtctgtacactgtgattgttgaaaagtctcagccaatacaagttttgtttgtctatatagacgaactagttatcaagcctgaattgcatatctgtctatcagttcttctttcctcaaccttctttcttcttatatatcgaacatggctaagtatcattcaagtgggaaaagctcttccatgactgctatagccttcctgtttatccttctaatcacttatacaggcacaacagatgcacaatccggggtatgttatggaagacttggcaacaacttaccaacccctcaagaagttgtggccctctacaatcaagccaacattcgcaggatgcgaatctacggtccaagcccagaagtcctcgaagcactaagaggttccaacattgagcttttgctagacattccaaatgacaacctcagaaacctagcatctagccaagacaatgcaaacaaatgggtgcaagacaacatcaaaaactatgccaacaatgtcagattcagatacgtttcagtgggaaatgaagtgaaacccgaacactcatttgcacaatttctagtgcctgcattggaaaacattcagagggccatttctaatgctggccttggaaaccaagtaaaagtttccactgccattgatactggtgccttggcagaatcattcccaccatcaaagggttccttcaaatctgattatagaggagcatatcttgatggtgtcatcagatttctagtgaacaataatgccccattaatggttaatgtgtactcttacttcgcttacactgcaaaccctaaggacattagtcttgactatgcactttttaggtctccttcggtggtagtgcaagatggttcacttggttaccgtaacctctttgatgcttcggttgatgctgtttatgctgcattggagaaagcaggaggagggtcattgaacatagttgtgtctgagagtggatggccttcttctggtggaactgcaacttcacttgataatgcaagaacttacaacacaaacttggttcggaatgtgaagcaaggaacccctaaaaggcctggtgcaccccttgaaacttatgtgtttgccatgtttgatgaaaatcagaagcagccagagtttgaaaaattttgggggctcttttctcctataactaagcagcccaaatactcgattaatttcaattaatttttagcagaagcataatttggtgtgaaataagggccacgagtccaaatgaaacttcaataattgttttagaagaggcaggtatagaactttaatttatctgcattcttgaagtctgcatgtaccatttacgagctaagttaattagctttaaataaaagttctcttattaatgatc

SEQ ID NO: 13228 - protein, 347 aa, Glycine max
MAKYHSSGKSSSMTAIAFLFILLITYTGTTDAQSGVCYGRLGNNLPTPQEVVALYNQANIRRMRIYGPSPEVLEALRGSNIELLLDIPNDNLRNLASSQDNANKWVQDNIKNYANNVRFRYVSVGNEVKPEHSFAQFLVPALENIQRAISNAGLGNQVKVSTAIDTGALAESFPPSKGSFKSDYRGAYLDGVIRFLVNNNAPLMVNVYSYFAYTANPKDISLDYALFRSPSVVVQDGSLGYRNLFDASVDAVYAALEKAGGGSLNIVVSESGWPSSGGTATSLDNARTYNTNLVRNVKQGTPKRPGAPLETYVFAMFDENQKQPEFEKFWGLFSPITKQPKYSINFN

SEQ ID NO: 13229 - protein, 335 aa, Glycine max
MTAIAFLFILLITYTGTTDAQSGVCYGRLGNNLPTPQEVVALYNQANIRRMRIYGPSPEVLEALRGSNIELLLDIPNDNLRNLASSQDNANKWVQDNIKNYANNVRFRYVSVGNEVKPEHSFAQFLVPALENIQRAISNAGLGNQVKVSTAIDTGALAESFPPSKGSFKSDYRGAYLDGVIRFLVNNNAPLMVNVYSYFAYTANPKDISLDYALFRSPSVVVQDGSLGYRNLFDASVDAVYAALEKAGGGSLNIVVSESGWPSSGGTATSLDNARTYNTNLVRNVKQGTPKRPGAPLETYVFAMFDENQKQPEFEKFWGLFSPITKQPKYSINFN

SEQ ID NO: 13230 - protein, 285 aa, Glycine max
MRIYGPSPEVLEALRGSNIELLLDIPNDNLRNLASSQDNANKWVQDNIKNYANNVRFRYVSVGNEVKPEHSFAQFLVPALENIQRAISNAGLGNQVKVSTAIDTGALAESFPPSKGSFKSDYRGAYLDGVIRFLVNNNAPLMVNVYSYFAYTANPKDISLDYALFRSPSVVVQDGSLGYRNLFDASVDAVYAALEKAGGGSLNIVVSESGWPSSGGTATSLDNARTYNTNLVRNVKQGTPKRPGAPLETYVFAMFDENQKQPEFEKFWGLFSPITKQPKYSINFN

SEQ ID NO: 13231 - DNA, 843 bp, Glycine max
  misc_feature (445)..(445): n is a, c, g, or t
taccatgatccagaatcaggaggcctacataacgcttaagaataccattctcaagcgcaagtccataaccagtttgtcaggatttttggaagttgctcctcattgtcttgcagcaatatatcctatttgcccgaacttaacatccttgaacttgagctatgcagcaggcattcagggtagtgatctgataaaactgattcgtcactgtgtgaaacttcagcgcttattgataatggattgcattggagacaaaggacttgatgttgtagctacttcatgtaaagacttgcaagaattgagggtgtttccatctgttccctttggaaatccagcagccgtcacagaaaaagggctggttgcaatatcaatgggttgccctaagcttcactcattgctctatttctgccaccagatgacaaatgctgcactcataacggtggctaanaactgcccgaattttatccgattcaggctgtgtatccttgatgcaacaaaacccgaccctgatacaatgcagccactggatgaaggttttggcgcaattgttcagtcttgcaggcgactcaggcgcctatccctctcggggcaattgaccgaccaggttttcctttacataggaatgtacgctgagaagcttgaaatgctgtccattgcatttgctggggagagcgacaagggaatgctctatgtgttgaatggatgcaagaagcttaggaagcttgagattagagactgcccttttggcaatgtggcacttctgacggacgtagggaagtatgaaacaatgcgatccctttggatgtcgtcctgtgaagtgaccgtcggagcctgcaagttgctagc

SEQ ID NO: 13232 - protein, 280 aa, Glycine max
  misc_feature (148)..(148): Xaa can be any naturally occurring amino acid
TMIQNQEAYITLKNTILKRKSITSLSGFLEVAPHCLAAIYPICPNLTSLNLSYAAGIQGSDLIKLIRHCVKLQRLLIMDCIGDKGLDVVATSCKDLQELRVFPSVPFGNPAAVTEKGLVAISMGCPKLHSLLYFCHQMTNAALITVAXNCPNFIRFRLCILDATKPDPDTMQPLDEGFGAIVQSCRRLRRLSLSGQLTDQVFLYIGMYAEKLEMLSIAFAGESDKGMLYVLNGCKKLRKLEIRDCPFGNVALLTDVGKYETMRSLWMSSCEVTVGACKLL

SEQ ID NO: 13233 - protein, 279 aa, Glycine max
  misc_feature (147)..(147): Xaa can be any naturally occurring amino acid
MIQNQEAYITLKNTILKRKSITSLSGFLEVAPHCLAAIYPICPNLTSLNLSYAAGIQGSDLIKLIRHCVKLQRLLIMDCIGDKGLDVVATSCKDLQELRVFPSVPFGNPAAVTEKGLVAISMGCPKLHSLLYFCHQMTNAALITVAXNCPNFIRFRLCILDATKPDPDTMQPLDEGFGAIVQSCRRLRRLSLSGQLTDQVFLYIGMYAEKLEMLSIAFAGESDKGMLYVLNGCKKLRKLEIRDCPFGNVALLTDVGKYETMRSLWMSSCEVTVGACKLL

SEQ ID NO: 13234 - protein, 203 aa, Glycine max
  misc_feature (71)..(71): Xaa can be any naturally occurring amino acid
MDCIGDKGLDVVATSCKDLQELRVFPSVPFGNPAAVTEKGLVAISMGCPKLHSLLYFCHQMTNAALITVAXNCPNFIRFRLCILDATKPDPDTMQPLDEGFGAIVQSCRRLRRLSLSGQLTDQVFLYIGMYAEKLEMLSIAFAGESDKGMLYVLNGCKKLRKLEIRDCPFGNVALLTDVGKYETMRSLWMSSCEVTVGACKLL

SEQ ID NO: 13235 - DNA, 1300 bp, Glycine max
acacacacttgcccatcatcaaagttttttcctttctctgctctttgccttctctgacacatttggtgccttgtagagcgtgttttggcaggaaggtggtatggcgaaggacgttgaggttgctgagcgtggctccttctctgggaaggactaccaggaccctccaccagcaccactcattgatgctgaggagctcacaaagtggtccttttacagggctctcattgctgaattcattgccactttgctcttcctctacattactgtgctcacagtcatagggtacaatcaccagactgacctcaaggaaaatggtgaaatctgtggtggggttggcattcttggcattgcatgggcctttgatggcatgatcttcatccttgtctactgcactgctgggatttcagggggtcacattaacccagcggtgacatttgggctgtttttggctcgcaaggtgtctttgatccgagccatcatgtacatggtggctcagtgcttaggtgctatctgtggagttggtttggttaaggctttccaaaagtcttacttcaacaagtatggtggtggggctaattccctcgctgctgggtacagcacaggtactggattgggtgctgagattattggaacctttgttttggtctacactgtcttctctgccactgaccccaagaggaatgccagagattcccatgtgccggttttggctccacttcccattggatttgctgtgttcatggttcacttggccaccatcccagtcactggtactggtatcaaccctgctaggagtcttggagctgctgttatctacaaccaagataagccatgggatgaccattggatcttttgggtaggaccatttattggggcagccattgcagccttctaccatcagttcatcttaagagcaggtgcagctaaggctcttggatcattcaggagtaacccccataattgagttgtctttctcttccttatgatggctctagtggaaagaagataattggagagatgggggttgatatggcaagtttaataataattgggaatgcttttggcttgtgttttgcaacgtttctttgaccctctcgattatgtcttcaagattgtggataagtgtagattaaagtctctttcatgacagggggagccttttgcactttcctctgtggtgttcttccctttagtgtgtcatttttttcttttaagttattctcttcagctgtcatctctgtactcaaaatatatttatggaaaatgttaaattttaattttaattacattcctgcttttt

SEQ ID NO: 13236 - protein, 287 aa, Glycine max
MAKDVEVAERGSFSGKDYQDPPPAPLIDAEELTKWSFYRALIAEFIATLLFLYITVLTVIGYNHQTDLKENGEICGGVGILGIAWAFDGMIFILVYCTAGISGGHINPAVTFGLFLARKVSLIRAIMYMVAQCLGAICGVGLVKAFQKSYFNKYGGGANSLAAGYSTGTGLGAEIIGTFVLVYTVFSATDPKRNARDSHVPVLAPLPIGFAVFMVHLATIPVTGTGINPARSLGAAVIYNQDKPWDDHWIFWVGPFIGAAIAAFYHQFILRAGAAKALGSFRSNPHN

SEQ ID NO: 13237 - protein, 198 aa, Glycine max
MIFILVYCTAGISGGHINPAVTFGLFLARKVSLIRAIMYMVAQCLGAICGVGLVKAFQKSYFNKYGGGANSLAAGYSTGTGLGAEIIGTFVLVYTVFSATDPKRNARDSHVPVLAPLPIGFAVFMVHLATIPVTGTGINPARSLGAAVIYNQDKPWDDHWIFWVGPFIGAAIAAFYHQFILRAGAAKALGSFRSNPHN

SEQ ID NO: 13238 - protein, 161 aa, Glycine max
MYMVAQCLGAICGVGLVKAFQKSYFNKYGGGANSLAAGYSTGTGLGAEIIGTFVLVYTVFSATDPKRNARDSHVPVLAPLPIGFAVFMVHLATIPVTGTGINPARSLGAAVIYNQDKPWDDHWIFWVGPFIGAAIAAFYHQFILRAGAAKALGSFRSNPHN

SEQ ID NO: 13239 - DNA, 1367 bp, Glycine max
gatagacaaatgatctggtgggaaaagataaagtgtggatagaaagatatgagtaagagatacataaaatcctttaaagccttcccattggttgctccaaaccacaccatccccaccaccagctcacactaaagtgtttctagccacaaatctctctgattctctttccctacatattgatgttacactcttccacacatttctctttaaaccaattagttatcttctatttttcaagtaacttaaggtttcaaacctaggaagttggaagtcatggcagcaacattgatggcagcaacaacaagttctggtactcttaaagcaactcctttccttggccaaggcaagggtgccaatgccaatgctcttagggatgttgtctccatgggaactgggaagtacaccatgggcaatgatttgtggtatggaccagacagagtgaaatacttgggacccttctcagctcagaccccttcatacttgaaaggagaattccctggggattatggatgggacactgctggcttatctgctgacccagaagcatttgccaagaacagggctcttgaggtgatccatgggcgatgggccatgcttggagcactaggatgcatcaccccagaggtgctagagaagtggttgagagtggacttcaaggagccagtgtggttcaaagctggagcccaaatattctccgaaggtgggcttgactatttgggaaacccaaaccttgtccatgcacaaagcatcctggcagtgctgggcttccaagttatcctaatgggccttgttgaagggtaccgcatcaacgggcttgatggggtgggagagggcaatgacctctaccctgggggccagtactttgacccactgggcctagctgatgacccagtcacttttgctgagctcaaagtcaaggagatcaagaatggaaggttggccatgttctctatgtttggattctttgttcaagctattgtcactggaaaaggtccattggagaaccttttggaccacctagacaaccctgtggccaacaatgcttgggtctatgccactaagttttccccagggtcttaaaatgtatatgacttcttcttccctaatcccctatgatcccatccctcgtgcttacctttgtgatttatgtgtagattatatgatcacaataattgttggattagtgtacttcttaaggactaaggttcaatttaaacctcggatgtctcttgtttgttaatatagttttgtctgaagcaaccaatgagaaaggtatagcaatgttgaagtcgggatgcaatgtttaaagagaatttgatactctcttttaacactttcaattattgattggtgtttatatgaattct

SEQ ID NO: 13240 - protein, 268 aa, Glycine max
MAATLMAATTSSGTLKATPFLGQGKGANANALRDVVSMGTGKYTMGNDLWYGPDRVKYLGPFSAQTPSYLKGEFPGDYGWDTAGLSADPEAFAKNRALEVIHGRWAMLGALGCITPEVLEKWLRVDFKEPVWFKAGAQIFSEGGLDYLGNPNLVHAQSILAVLGFQVILMGLVEGYRINGLDGVGEGNDLYPGGQYFDPLGLADDPVTFAELKVKEIKNGRLAMFSMFGFFVQAIVTGKGPLENLLDHLDNPVANNAWVYATKFSPGS

SEQ ID NO: 13241 - protein, 263 aa, Glycine max
MAATTSSGTLKATPFLGQGKGANANALRDVVSMGTGKYTMGNDLWYGPDRVKYLGPFSAQTPSYLKGEFPGDYGWDTAGLSADPEAFAKNRALEVIHGRWAMLGALGCITPEVLEKWLRVDFKEPVWFKAGAQIFSEGGLDYLGNPNLVHAQSILAVLGFQVILMGLVEGYRINGLDGVGEGNDLYPGGQYFDPLGLADDPVTFAELKVKEIKNGRLAMFSMFGFFVQAIVTGKGPLENLLDHLDNPVANNAWVYATKFSPGS

SEQ ID NO: 13242 - protein, 231 aa, Glycine max
MGTGKYTMGNDLWYGPDRVKYLGPFSAQTPSYLKGEFPGDYGWDTAGLSADPEAFAKNRALEVIHGRWAMLGALGCITPEVLEKWLRVDFKEPVWFKAGAQIFSEGGLDYLGNPNLVHAQSILAVLGFQVILMGLVEGYRINGLDGVGEGNDLYPGGQYFDPLGLADDPVTFAELKVKEIKNGRLAMFSMFGFFVQAIVTGKGPLENLLDHLDNPVANNAWVYATKFSPGS

SEQ ID NO: 13243 - DNA, 537 bp, Glycine max
acgaataagatgcacttccggtcatcattttaccaacatgcagattttgagttggtttctgaatataaatggacgccaaacggttcatccagctggttgaggagaagaagaagaaaattatggagagaaaggaagctcctttgaaatgggagcagaagctggaagctgctgctgaagctaaagagaggaagctgaaggttgcaaagcatacaaaaagatctggctctgatagtgacagcgattatgacagtgatgatgagagtacaaagacaagtaaaagatctcacaggaagcacagaaagcattctcactacgactctggtgaccatgagaaaaggaaagaaaaaagttccaaacggaaaacaaggaaatggtcctctgaatctagtgattatagtagtgatgactctgagagtagctttgaggaggaaagaagaagaaagaagaggcaaagcatgaagctgagagatcggggttcaagatcagattctagcaactatgattctactgctgatgaattaagcaagaggaaaagac

SEQ ID NO: 13244 - protein, 156 aa, Glycine max
MDAKRFIQLVEEKKKKIMERKEAPLKWEQKLEAAAEAKERKLKVAKHTKRSGSDSDSDYDSDDESTKTSKRSHRKHRKHSHYDSGDHEKRKEKSSKRKTRKWSSESSDYSSDDSESSFEEERRRKKRQSMKLRDRGSRSDSSNYDSTADELSKRKR

SEQ ID NO: 13245 - protein, 139 aa, Glycine max
MERKEAPLKWEQKLEAAAEAKERKLKVAKHTKRSGSDSDSDYDSDDESTKTSKRSHRKHRKHSHYDSGDHEKRKEKSSKRKTRKWSSESSDYSSDDSESSFEEERRRKKRQSMKLRDRGSRSDSSNYDSTADELSKRKR

SEQ ID NO: 13246 - DNA, 935 bp, Glycine max
cagctacgtaggccccccccccccccgaggccagatggcaagacacaagtaactgttgagtactacaatgacaatggtgccatggttccagttcgtgtccacactgtcctaatttccacccaacatgatgagactgtgagcaatgaccaaattgctgctgaccttaaagagcatgttatcaagcctgtcattcctgagaagtacctggatgagaagaccatcttccaccttaacccttctggccgttttgtcattggtggccctcatggtgatgctggtctcactggaagaaagatcatcattgatacctatggtgggtggggtgctcatggtggaggtgccttttcagggaaggaccctaccaaggttgacagaagtggtgcctatatcgtgaggcaggctgcaaagagtgttgtggcaaatggccttgccagaaggtgcattgtccaagtttcctatgccattggtgtccctgagcccttgtcagtgtttgtggacacttatggaactgggaagattcctgacaaggagattcttcaaattgtgaaggagaatttcgacttcagacctggaatgatcaccattaacttggaccttaagaggggtggccataggttcctcaagacagctgcttatggacactttggaagggatgaccctgacttcacctgggaagttgtgaagccactcaagtctgagaagcctcaagcttaagattgttgtgaagttatcactcccttcaatggatgtcttgctaggtgtggatgaataatttgcgtgttccatgactactactacttcattcataggtctaatgtcatctcatcaatacttaaactgtttttttttttccttttctccttttactcacaatttattttttggttatgcaatgttaccgttttgatgcaatggaaattttatcagaattttgt

SEQ ID NO: 13247 - protein, 237 aa, Glycine max
QLRRPPPPPRPDGKTQVTVEYYNDNGAMVPVRVHTVLISTQHDETVSNDQIAADLKEHVIKPVIPEKYLDEKTIFHLNPSGRFVIGGPHGDAGLTGRKIIIDTYGGWGAHGGGAFSGKDPTKVDRSGAYIVRQAAKSVVANGLARRCIVQVSYAIGVPEPLSVFVDTYGTGKIPDKEILQIVKENFDFRPGMITINLDLKRGGHRFLKTAAYGHFGRDDPDFTWEVVKPLKSEKPQA

SEQ ID NO: 13248 - protein, 210 aa, Glycine max
MVPVRVHTVLISTQHDETVSNDQIAADLKEHVIKPVIPEKYLDEKTIFHLNPSGRFVIGGPHGDAGLTGRKIIIDTYGGWGAHGGGAFSGKDPTKVDRSGAYIVRQAAKSVVANGLARRCIVQVSYAIGVPEPLSVFVDTYGTGKIPDKEILQIVKENFDFRPGMITINLDLKRGGHRFLKTAAYGHFGRDDPDFTWEVVKPLKSEKPQA

SEQ ID NO: 13249 - DNA, 745 bp, Glycine max
catagaacatcctaatcgaaaaacacagcagcaagcatctccttctcaaactagtagtattattcttccattcataatgggtgttttcacattcgaggatgaaatcaactcccctgtggctcctgctactctttacaaggccctagttacagatgccgacaacgtcatcccaaaggctcttgattccttcaagagtgttgaaaacgttgagggaaatggtggcccaggaaccatcaagaagatcactttcgttgaggatggagaaaccaagtttgtgctgcacaaaatagaaagcattgatgaggcgaacttgggatacagctacagcgtggttgggggtgctgcattgccagacacggcggagaagatcacattcgactccaaattggttgctggtcccaatggagggtctgctgggaagctcactgtcaaatacgaaacaaaaggagatgctgagcccaaccaagacgaactcaaaactggaaaagccaaggctgatgctctcttcaaggccattgaggcttaccttttggcccatcccgattacaactaatcctcttcaacttacttgtcatcactttcttgcttggagacttatccaatcactctgttctcaacttaagttgccttccaatgtatccagtctttcctttcttctttccttttcccatataattgtgagacttatgatatatctgtatctcacttcatcaataataaattataataaagatgagcaatcatt

SEQ ID NO: 13250 - protein, 183 aa, Glycine max
IEHPNRKTQQQASPSQTSSIILPFIMGVFTFEDEINSPVAPATLYKALVTDADNVIPKALDSFKSVENVEGNGGPGTIKKITFVEDGETKFVLHKIESIDEANLGYSYSVVGGAALPDTAEKITFDSKLVAGPNGGSAGKLTVKYETKGDAEPNQDELKTGKAKADALFKAIEAYLLAHPDYN

SEQ ID NO: 13251 - protein, 158 aa, Glycine max
MGVFTFEDEINSPVAPATLYKALVTDADNVIPKALDSFKSVENVEGNGGPGTIKKITFVEDGETKFVLHKIESIDEANLGYSYSVVGGAALPDTAEKITFDSKLVAGPNGGSAGKLTVKYETKGDAEPNQDELKTGKAKADALFKAIEAYLLAHPDYN

SEQ ID NO: 13252 - protein, 148 aa, Glycine max
MRRTWDTATAWLGVLHCQTRRRRSHSTPNWLLVPMEGLLGSSLSNTKQKEMLSPTKTNSKLEKPRLMLSSRPLRLTFWPIPITTNPLQLTCHHFLAWRLIQSLCSQLKLPSNVSSLSFLLSFSHIIVRLMIYLYLTSSIINYNKDEQS

SEQ ID NO: 13253 - DNA, 908 bp, Glycine max
  misc_feature (54)..(54): n is a, c, g, or t
  misc_feature (662)..(662): n is a, c, g, or t
aattatcggaagatgacaaagtacggatttctataataatacgctccgacgacngcagatcataagcgcagttcgttccacgttgttgttcgctctgtgtctctcactctctctatatttgcatcattcatcggaaatggctctcgaggttgctgttaaggctgctgttggggctccaaatgttctcggagattgtccattttcccaaagggtcctcttaactttggaggagaagaaaattccttacaaactccacctcatcgatctcagtaacaaacccgaatggtttttgggtgtgaatcctgaagggaaggtgccagtggttctttttgatggcaaatgggtggctgattctgatgtaattgtggggatactagaggaaaagtacccagaaccctctctaatcactcctcctgaatttgcctccgtgggatcaaagatatttgggtcttttgtgagttttctgaagagcaaggatacaaacgatggaactgagcaagcattggttgctgaattgagtgccttggatgaacatctcaagacccatggtccatacattgctggggagaaagtcactgctgttgatctgagtttggcaccaaaactgtaccatcttgtggtagcactgggccacttcaagaattggaatattccagaaagtncggtacatgtgcacaattacactaagctgctgttctcccgagagtcatttgagaaaacaaagcctccaaaggaggaatatgttattgctggatgggcgcctaaggtgaatgcttgaagtaattttaaattatgaggcatctgaacatcagatatgtgatgtactgtgactgaacctggttaagaataggatggcgaactcatgatgtttaagagtattgttacccttttaataatgaataaacatg

SEQ ID NO: 13254 - protein, 213 aa, Glycine max
  misc_feature (176)..(176): Xaa can be any naturally occurring amino acid
MALEVAVKAAVGAPNVLGDCPFSQRVLLTLEEKKIPYKLHLIDLSNKPEWFLGVNPEGKVPVVLFDGKWVADSDVIVGILEEKYPEPSLITPPEFASVGSKIFGSFVSFLKSKDTNDGTEQALVAELSALDEHLKTHGPYIAGEKVTAVDLSLAPKLYHLVVALGHFKNWNIPESXVHVHNYTKLLFSRESFEKTKPPKEEYVIAGWAPKVNA

SEQ ID NO: 13255 - DNA, 500 bp, Glycine max
atcatcaaaacaataacaaccataaagagagatttaatttaatagaaaagaaagagatcaaagatggcaggaatcatcaacaagatcggtgatgctctccatatcggaggaggccacaaggaagacgagcacaagaaggaggaacacaagaaacacgccgacgagcacaagagtggtgagcacaaagagggtatcgttgataagatcaaagacaagatccacggcggagaaggccacagcagcggagaccacaaacatgacggtgagaagaaaaagaagaaggacaagaaggagaagaaacaccatgatgatggtcaccacagcagcagcagtgacagcgacagcgattaaggtaagaaagtgaggaagactatcaatgctgctgttgtctgttcctgtccttttactcttgatagagagggaggggtagatgaaaagagaagagtgcatctgtcttcctttgttatctaattttcttttaattgtcgttttcacctctt

SEQ ID NO: 13256 - protein, 95 aa, Glycine max
MAGIINKIGDALHIGGGHKEDEHKKEEHKKHADEHKSGEHKEGIVDKIKDKIHGGEGHSSGDHKHDGEKKKKKDKKEKKHHDDGHHSSSSDSDSD

SEQ ID NO: 13257 - protein, 90 aa, Glycine max
MLSISEEATRKTSTRRRNTRNTPTSTRVVSTKRVSLIRSKTRSTAEKATAAETTNMTVRRKRRRTRRRRNTMMMVTTAAAVTATAIKVRK

SEQ ID NO: 13258 - DNA, 1314 bp, Glycine max
atcctcttttcttacaggaaaagcttcatgaaaaagagatcaaggcttctaagaataaataaataaaatatctgcttacacaaccaaacttcaatatctcaaccgaaaaaaacatgaaatcacctcaatcaataaatacaaacaatggaaacttcaatattgtacaaaatctagtcaaataaaaaaaattcaatcttgagtggtacaaaaatcatagcctatcaattatcaatttgtaaaaaaaataaaaattcaattttattgttgcctccgtcgccgccgccgcggattcgcagatctgaagacaatctggaggtggcggctttctagtcgtggagcgtctccgtcgtcgttggggcggtgggaatgaatgcagagttagggctttttttattattagggtaaaatggtcttttgacatgttaaaaaaccatatttaattacgaaacataaaaacatccaccttcctctcttacgccgttctttgccctcatctctctctcgccggcgtcgctacgaaggaaagcaatttactgtgaagaacaatgaggaagctaaagtttcatgaaaagaagcttttgaagaaggttaattttttggaatggaagagggaagggggtcacagagagaacctcattatgcaacgctaccatgttactggacgggacgattacaaaaaatattcaggtttatgccatatggttcagaagttagtaaacatattgaaacagatggacccaaaggatccttttcgggttgatatgactgataagcttttggagaaactctacaacatgggtgtgattccaaccaggcaaagcatcacactatgcgaacgtttaactgtgtcatccttctgtaggcgtaggctctcaactgttttggtgagactaaaatttgctgagcacttgaaagaagctgtcacgtacattgagcaagggcatatacgagttggtccagagacagttacagacccggctttccttgtaactagaaacatggaagacttcgttacatgggtggattcatccaaaataaagagaaaggtgcttcagtacaatgacaaattggatgactatgatttaatgaattaagtggaaagctaaatgtcagcttattgtggtttactatatatgaatcatggacgagttttgtttccttaggcgggtagtttagacaggcttggattttaatgggattatttttaatttaaatgcataccagatgattaaggtgatgatgtaatgagcctggaaattactgaatcatgatagtgatgttaaatgtttaaatgtattttgcttttttccagtc

SEQ ID NO: 13259 - protein, 182 aa, Glycine max
MRKLKFHEKKLLKKVNFLEWKREGGHRENLIMQRYHVTGRDDYKKYSGLCHMVQKLVNILKQMDPKDPFRVDMTDKLLEKLYNMGVIPTRQSITLCERLTVSSFCRRRLSTVLVRLKFAEHLKEAVTYIEQGHIRVGPETVTDPAFLVTRNMEDFVTWVDSSKIKRKVLQYNDKLDDYDLMN

SEQ ID NO: 13260 - protein, 151 aa, Glycine max
MQRYHVTGRDDYKKYSGLCHMVQKLVNILKQMDPKDPFRVDMTDKLLEKLYNMGVIPTRQSITLCERLTVSSFCRRRLSTVLVRLKFAEHLKEAVTYIEQGHIRVGPETVTDPAFLVTRNMEDFVTWVDSSKIKRKVLQYNDKLDDYDLMN

SEQ ID NO: 13261 - protein, 131 aa, Glycine max
MVQKLVNILKQMDPKDPFRVDMTDKLLEKLYNMGVIPTRQSITLCERLTVSSFCRRRLSTVLVRLKFAEHLKEAVTYIEQGHIRVGPETVTDPAFLVTRNMEDFVTWVDSSKIKRKVLQYNDKLDDYDLMN

SEQ ID NO: 13262 - DNA, 486 bp, Glycine max
aaaaaactaagtcccccaaaacccaatcatatcatttcatttcttcctttgtcgtccatcccgtaaccatgtctcagactgttgtcctcaaagttggtatgtcatgtgaaggatgtgttggagcagtgaagagagttctaggaaaattggatggtgtggaatcatatgacattgatttgaaggaacaaaaggtggtagtgaaaggaaatgtccagccagacacagttctgcagaccgtttccaaaactgggaagaagactaccttctgggaaggtgaagcagcaacatctgaaactagcacagcaactgcctaaaacatttgcctctattctgtgcagaagaagtagctgtgtgaatcaaatactatttgatggtcttgaaataatgatgaaactttgttatctggtgtattttagtgtcaaaaaaaagactgatgtatattactgcttttcacgtcagtgatactgtattaatgtgcttttattg

SEQ ID NO: 13263 - protein, 103 aa, Glycine max
KTKSPKTQSYHFISSFVVHPVTMSQTVVLKVGMSCEGCVGAVKRVLGKLDGVESYDIDLKEQKVVVKGNVQPDTVLQTVSKTGKKTTFWEGEAATSETSTATA

SEQ ID NO: 13264 - protein, 84 aa, Glycine max
MSSQTQFCRPFPKLGRRLPSGKVKQQHLKLAQQLPKTFASILCRRSSCVNQILFDGLEIMMKLCYLVYFSVKKKTDVYYCFSRQ

SEQ ID NO: 13265 - protein, 81 aa, Glycine max
MSQTVVLKVGMSCEGCVGAVKRVLGKLDGVESYDIDLKEQKVVVKGNVQPDTVLQTVSKTGKKTTFWEGEAATSETSTATA

SEQ ID NO: 13266 - DNA, 1221 bp, Glycine max
aacgtgccctctctcacctcctgcacgttctccctcttttctctcaccatcagaaagcgctttttttttttttttttcttctacctccgtttctccgtctccacatttctccttcacgaactcccgatttttcttcctcttcaatctcgtccctctctgtctctccatccttaaatatacacaacatcttctaaggagaaaggggttccgaaagttacgataaaataaaaatggatccaaacgcggtgaagtccactctctccaatctggcgtttggaaacgtaatggcggcagctgcccgtgattatcagaaggaattgcatgctcaagagaagacacatgcatcaagttcagtacatcaggaggttgaccttgacgagttaatggatgatcctgagttggaaaaattgcatgcagataggattgcagctcttaagaaagaagcagagaaacgggaggaatggaagaagaaaggtcatggagaatttagggaagtaaccgagggtgatttcttaggcgaagtcacaggaagtgaaaaagtgatttgtcacttctaccataaggagttctatagatgcaagataatggataagcatttaaagtctcttgcaccaaagcatatcgatacaaagttcatcaagcttgatgcagagaatgcaccattctttgttacaaaactggctatcaagactttaccctgcgtcatactgttcagacaaggagtagcagtagatagattggtaggatttcaagatgtgggaggtaaagatgattttaccacaagaacgctggaggctctgctgataaagaaaggtataattgaggtgaagaaagctgaggatgatgaagatgatgaatatcaagacagtacacgtagagttgtaagatcctccatgattgctggttctgattctgattctgattaaaattaatcagctggtggcattaaaagaagaatcctctgtttatcttcttcatatccttttggatttcgggcttgtataatctttgctgcacttgtggtttgtttgcttttgggaagtggtttgatgaatccatagcaatcatacagaagctatactgcgctacaactgttgtatgaacctgtccctgtaggaaattgctaacgtttctcgcatccgaggggtatcaaaagttagaacttcatttgtaacagtagaaattgatataggttttctaaaatggatttaattattgttc

SEQ ID NO: 13267 - protein, 231 aa, Glycine max
MDPNAVKSTLSNLAFGNVMAAAARDYQKELHAQEKTHASSSVHQEVDLDELMDDPELEKLHADRIAALKKEAEKREEWKKKGHGEFREVTEGDFLGEVTGSEKVICHFYHKEFYRCKIMDKHLKSLAPKHIDTKFIKLDAENAPFFVTKLAIKTLPCVILFRQGVAVDRLVGFQDVGGKDDFTTRTLEALLIKKGIIEVKKAEDDEDDEYQDSTRRVVRSSMIAGSDSDSD

SEQ ID NO: 13268 - protein, 213 aa, Glycine max
MAAAARDYQKELHAQEKTHASSSVHQEVDLDELMDDPELEKLHADRIAALKKEAEKREEWKKKGHGEFREVTEGDFLGEVTGSEKVICHFYHKEFYRCKIMDKHLKSLAPKHIDTKFIKLDAENAPFFVTKLAIKTLPCVILFRQGVAVDRLVGFQDVGGKDDFTTRTLEALLIKKGIIEVKKAEDDEDDEYQDSTRRVVRSSMIAGSDSDSD

SEQ ID NO: 13269 - protein, 180 aa, Glycine max
MDDPELEKLHADRIAALKKEAEKREEWKKKGHGEFREVTEGDFLGEVTGSEKVICHFYHKEFYRCKIMDKHLKSLAPKHIDTKFIKLDAENAPFFVTKLAIKTLPCVILFRQGVAVDRLVGFQDVGGKDDFTTRTLEALLIKKGIIEVKKAEDDEDDEYQDSTRRVVRSSMIAGSDSDSD

SEQ ID NO: 13270 - DNA, 1194 bp, Glycine max
  misc_feature (1186)..(1186): n is a, c, g, or t
cttattatttttttaaaacaagaagcggcattaatgctttaagatttaaaacttaacttgtccttacctgcctcaacgggcagcccgaaacgcagcatttcccgtgttgtgacgctgcccgaactgcccgattcttggctgagaaattacgagcattcggtctgcagtacctgtgtgttttccttctgtctctctctgacctctgatatttctatattttggttctctgtgtctctacgatcaggatccaacggtccaaaatgttcggggcttgtgctgtttgttttcccaggttttagagctccaaaccttcagatccacctcattcgtctccagatcttccttcctggataacgttttcgggttcgagaaggcacttgtgttgtttttcgtacgaaatggagactaaacagagttcggtgacggttacgctcagttacggcgcgttgacgtgcgccgcggaatttctcgcgactttgctagcttctgctgtcgtcaaagcctcgcttttggccccggatctctaccggctgctattgatcaacacgcctactgccaaaggagagagcaaaattcagagtgaagacaagcaacgtgatgcagagggagaagatggtaacgatgatgaaggcgacgatgacgacgatggagatggtggatttggggagggtgaagaggagttgtcatctgaagatggaggtggatatggcaacaattccaacaacaagagcaactcaaagaaggcacccgaaggtggcgcaggaggggcagaagagaatggggaagaggatgaagatgaagatggtgatgatcaagatgacgacgatgaggatgacgatgatgatgacgaagaggacgaggcaggtgaagaagaggatgaagatggtgctgaggatgaggagaatgaagaggacgaggaagatgaggaagcattgcagcccccaaagaaaagaaagaagtgaatttagtttagtaaagcctcctctttgtattgttgtgtacgaatttggcttctaacttccatgtttttacttttttgggtactaaacttccatgttcttatttagtttataaggaggcttatgtaggacatgttttaattgatatctatgtttaccattgcgtaattagaatgctacattattgagcaggcaatgctagatttaagagaggaaaaactatgatnttagtttt

SEQ ID NO: 13271 - protein, 187 aa, Glycine max
METKQSSVTVTLSYGALTCAAEFLATLLASAVVKASLLAPDLYRLLLINTPTAKGESKIQSEDKQRDAEGEDGNDDEGDDDDDGDGGFGEGEEELSSEDGGGYGNNSNNKSNSKKAPEGGAGGAEENGEEDEDEDGDDQDDDDEDDDDDDEEDEAGEEEDEDGAEDEENEEDEEDEEALQPPKKRKK

SEQ ID NO: 13272 - protein, 139 aa, Glycine max
MQREKMVTMMKATMTTMEMVDLGRVKRSCHLKMEVDMATIPTTRATQRRHPKVAQEGQKRMGKRMKMKMVMIKMTTMRMTMMMTKRTRQVKKRMKMVLRMRRMKRTRKMRKHCSPQRKERSEFSLVKPPLCIVVYEFGF

SEQ ID NO: 13273 - protein, 134 aa, Glycine max
MVTMMKATMTTMEMVDLGRVKRSCHLKMEVDMATIPTTRATQRRHPKVAQEGQKRMGKRMKMKMVMIKMTTMRMTMMMTKRTRQVKKRMKMVLRMRRMKRTRKMRKHCSPQRKERSEFSLVKPPLCIVVYEFGF

SEQ ID NO: 13274 - DNA, 892 bp, Glycine max
gcagttcaattccaatatattccattctctctgtgtatttccctacctctcccttcaagatgcagatcttcgtcaagaccctcaccggcaagaccatcacccttgaggtggaaagctctgacaccatcgacaacgtcaagggcaagatccaggacaaggaaggaattcccccggaacagcaacgtctcattttcgccggaaagcaacttgaggacggccgtacccttgctgactacaacattcagaaggagagtactcttcacctcgtcctccgtctccgtggtggcatgcagatcttcgttaagacactcaccggcaagaccataaccctagaggttgaaagctccgacaccatcgataacgtcaaggccaagatccaggacaaggagggtatccccccggaccagcaacgtctcatcttcgccggaaagcagctcgaggacggccgcaccctcgccgactacaacatccagaaggagtcaactctccacttggtgttgcgtcttcgtggtggtatgcagattttcgtgaagactcttacgggtaagactattaccctcgaggtggagagctctgacaccattgacaatgtgaaggccaagattcaggacaaggaaggcatcccaccggaccagcagaggctgatttttgctggcaagcagctcgaggatggaaggaccctcgctgactacaacatccagaaggaatcaacccttcaccttgtcctccgtctccgtggggggttttaagctcgttgtgtaatgttggatgtgttcccaaaacatttgaagaactttgatgtttaatgggtctgtaataatgtcccttgaaaataagttcggtttgtgttgaactcaattgtgtcccattaataatagtactctaatatccc

SEQ ID NO: 13275 - protein, 248 aa, Glycine max
SSIPIYSILSVYFPTSPFKMQIFVKTLTGKTITLEVESSDTIDNVKGKIQDKEGIPPEQQRLIFAGKQLEDGRTLADYNIQKESTLHLVLRLRGGMQIFVKTLTGKTITLEVESSDTIDNVKAKIQDKEGIPPDQQRLIFAGKQLEDGRTLADYNIQKESTLHLVLRLRGGMQIFVKTLTGKTITLEVESSDTIDNVKAKIQDKEGIPPDQQRLIFAGKQLEDGRTLADYNIQKESTLHLVLRLRGGF

SEQ ID NO: 13276 - protein, 229 aa, Glycine max
MQIFVKTLTGKTITLEVESSDTIDNVKGKIQDKEGIPPEQQRLIFAGKQLEDGRTLADYNIQKESTLHLVLRLRGGMQIFVKTLTGKTITLEVESSDTIDNVKAKIQDKEGIPPDQQRLIFAGKQLEDGRTLADYNIQKESTLHLVLRLRGGMQIFVKTLTGKTITLEVESSDTIDNVKAKIQDKEGIPPDQQRLIFAGKQLEDGRTLADYNIQKESTLHLVLRLRGGF

SEQ ID NO: 13277 - protein, 153 aa, Glycine max; identical to SEQ ID NO: 9361

SEQ ID NO: 13278 - DNA, 994 bp, Glycine max
  misc_feature (851)..(851): n is a, c, g, or t
attggtaccagcgttattctgctctcaggccttttgttcgcaatttcatccctctttcttccaggattctcatggttggttgcggcaattctgttatgtcagaggatatggtcaaagatggttacgaggacatcgtcaatattgatatttcttcaattgcaattgacatgatgagtagaaaatatgagcacatcccacagctaaaatatgaatgtcagagatatgagcttgtttccagatgaatcttttgatggtgttattgataaagatactgatgctacttttgcacccatgctttgttgatgcttgatctaggaactcttgattcattgatgtgtggtactgatgctccaattagtgctgctcagatgcttgctgaagtttgtagactactaaaacctggagggacctatattttgattacatatggggatccaacagtaaggatgcctcatataagcagaccggtgttcaattggaaaattacgctgtataatatcccaagaccaggatttcaaaagcccgagagtagtacaccatcaagaaaatcatacttggagcccatcgctcttactgaaaagggcttactttcagcagatttcgttctggaagatccagattctcactatatatatgtttgtaaaaagataaatgacacagagatagacaataatacctgcataccaattaacagctgatgttttatagatctgacttacattgaagcactgatgaaggtagtatttatcctcttcacaaactttgatgtgcatcatagttatttaagtggttgcttttgtcatctgtaccactgggacaagttaccaccgtcaatgtgttgtttgcaatancattttattctcataaattagagtaatgaagttagcatgtagagattattggtattattagaatcttaaagaaatcagacaaattgactgattaatgtattgttttgcccgtgattttgtctggatgaatggattatggttgt

SEQ ID NO: 13279 - protein, 131 aa, Glycine max
MLDLGTLDSLMCGTDAPISAAQMLAEVCRLLKPGGTYILITYGDPTVRMPHISRPVFNWKITLYNIPRPGFQKPESSTPSRKSYLEPIALTEKGLLSADFVLEDPDSHYIYVCKKINDTEIDNNTCIPINS

SEQ ID NO: 13280 - protein, 121 aa, Glycine max
MCGTDAPISAAQMLAEVCRLLKPGGTYILITYGDPTVRMPHISRPVFNWKITLYNIPRPGFQKPESSTPSRKSYLEPIALTEKGLLSADFVLEDPDSHYIYVCKKINDTEIDNNTCIPINS

SEQ ID NO: 13281 - protein, 109 aa, Glycine max
MLAEVCRLLKPGGTYILITYGDPTVRMPHISRPVFNWKITLYNIPRPGFQKPESSTPSRKSYLEPIALTEKGLLSADFVLEDPDSHYIYVCKKINDTEIDNNTCIPINS

SEQ ID NO: 13282 - DNA, 673 bp, Glycine max
  misc_feature (464)..(464): n is a, c, g, or t
  misc_feature (475)..(475): n is a, c, g, or t
  misc_feature (630)..(630): n is a, c, g, or t
  misc_feature (649)..(649): n is a, c, g, or t
  misc_feature (652)..(652): n is a, c, g, or t
  misc_feature (664)..(664): n is a, c, g, or t
gttagaggtttcacagctgcggcagctacttcggctccatcttcttcgatctctcaaactctatcggcgcagaaccaatcctatatcactatggggaagacacatggaatgggagctgcccgcaagctgaagtctcaccgtaggagacaaaggtgggctgacaagtcatacaaaaagtctcatcttggaaatgaatggaagaagccttttgctggttcatcccatgcaaagggtattgttcttgaaaagataggtattgaggctaagcagcccaactctgccattcgaaaatgtgccagggttcaactcatcaaaaatgggaagaagattgctgcattcgtgccaaatgatggttgcttaaattacattgaagagaatgatgaagtcttgatagctggatttggacgaaagggtcatgccgtgggtgatattcctggagtcagattcaaggtcgtgaaggtttntggtgtgtctntcctggctctcttcaaggagaagaaagagaagcctaggtcttagtcttgtgggacgtgtcctctctagtttctccaaaaaattattatgaattttacttcatgagactggatgagttctatggacaattttgtatctctctggtagcaatttttntgaactaaatttggttcanatntcatacttgggntccattttt

SEQ ID NO: 13283 - protein, 172 aa, Glycine max
  misc_feature (155)..(155): Xaa can be any naturally occurring amino acid
  misc_feature (159)..(159): Xaa can be any naturally occurring amino acid
VRGFTAAAATSAPSSSISQTLSAQNQSYITMGKTHGMGAARKLKSHRRRQRWADKSYKKSHLGNEWKKPFAGSSHAKGIVLEKIGIEAKQPNSAIRKCARVQLIKNGKKIAAFVPNDGCLNYIEENDEVLIAGFGRKGHAVGDIPGVRFKVVKVXGVSXLALFKEKKEKPRS

SEQ ID NO: 13284 - protein, 142 aa, Glycine max
  misc_feature (125)..(125): Xaa can be any naturally occurring amino acid
  misc_feature (129)..(129): Xaa can be any naturally occurring amino acid
MGKTHGMGAARKLKSHRRRQRWADKSYKKSHLGNEWKKPFAGSSHAKGIVLEKIGIEAKQPNSAIRKCARVQLIKNGKKIAAFVPNDGCLNYIEENDEVLIAGFGRKGHAVGDIPGVRFKVVKVXGVSXLALFKEKKEKPRS

SEQ ID NO: 13285 - protein, 136 aa, Glycine max
  misc_feature (119)..(119): Xaa can be any naturally occurring amino acid
  misc_feature (123)..(123): Xaa can be any naturally occurring amino acid
MGAARKLKSHRRRQRWADKSYKKSHLGNEWKKPFAGSSHAKGIVLEKIGIEAKQPNSAIRKCARVQLIKNGKKIAAFVPNDGCLNYIEENDEVLIAGFGRKGHAVGDIPGVRFKVVKVXGVSXLALFKEKKEKPRS

SEQ ID NO: 13286 - DNA, 835 bp, Glycine max
  misc_feature (175)..(175): n is a, c, g, or t
  misc_feature (582)..(582): n is a, c, g, or t
  misc_feature (611)..(611): n is a, c, g, or t
aaaaaaaaaaactttttgtttggggttttctgattaactctttcttctcataactctgccgccgcaacagccccaaatccaatggcttcagagaagaaactttcgaacccaatgagggagataaaggtgcagaagctcgtcctcaatatctccgttggcgagagtggagatcgtntcaccagagccgctaaggttttggaacagcttagtggccaaacccctgtgttttccaaagcaaggtacacggttcgttcctttgggattagaagaaatgagaagattgcatgctatgtcactgtcagaggtgacaaggcgatgcaacttttggagagtggtttgaaggtgaaggaatatgaacttctcagaaggaacttcagtgatactggttgctttggctttggcattcaggagcatatcgatttgggaatcaagtatgatccttcaactggtatttatggaatggacttctttgttgttctggagcgtcctggctatcgtgtgggacgtcgccgaaggtgcaagtcccgtgttggaatccagcaccgtgtcacaaaggaggatgctatgaagtggttccaggtnaaatatgagggagtgatccttaacaagtntcaggcgattgtttagttagattgagttcatttcaggggagtgtttttatcagttttgtcaactatctttctgggatagtatcttaattttgaggcaggttttgaatcaatgtttctcatttcagttttgtgatgaagcacatgtattaacaatagcccttttaaacgacacttttattgcaacaagaacatgtgagacacttttaaatgcattctctttattg

SEQ ID NO: 13287 - protein, 181 aa, Glycine max
  misc_feature (32)..(32): Xaa can be any naturally occurring amino acid
  misc_feature (167)..(167): Xaa can be any naturally occurring amino acid
  misc_feature (177)..(177): Xaa can be any naturally occurring amino acid
MASEKKLSNPMREIKVQKLVLNISVGESGDRXTRAAKVLEQLSGQTPVFSKARYTVRSFGIRRNEKIACYVTVRGDKAMQLLESGLKVKEYELLRRNFSDTGCFGFGIQEHIDLGIKYDPSTGIYGMDFFVVLERPGYRVGRRRRCKSRVGIQHRVTKEDAMKWFQXKYEGVILNKXQAIV

SEQ ID NO: 13288 - protein, 171 aa, Glycine max
  misc_feature (22)..(22): Xaa can be any naturally occurring amino acid
  misc_feature (157)..(157): Xaa can be any naturally occurring amino acid
  misc_feature (167)..(167): Xaa can be any naturally occurring amino acid
MREIKVQKLVLNISVGESGDRXTRAAKVLEQLSGQTPVFSKARYTVRSFGIRRNEKIACYVTVRGDKAMQLLESGLKVKEYELLRRNFSDTGCFGFGIQEHIDLGIKYDPSTGIYGMDFFVVLERPGYRVGRRRRCKSRVGIQHRVTKEDAMKWFQXKYEGVILNKXQAIV

SEQ ID NO: 13289 - protein, 103 aa, Glycine max
  misc_feature (89)..(89): Xaa can be any naturally occurring amino acid
  misc_feature (99)..(99): Xaa can be any naturally occurring amino acid
MQLLESGLKVKEYELLRRNFSDTGCFGFGIQEHIDLGIKYDPSTGIYGMDFFVVLERPGYRVGRRRRCKSRVGIQHRVTKEDAMKWFQXKYEGVILNKXQAIV

SEQ ID NO: 13290 - DNA, 887 bp, Glycine max
gcctcttctctcgcgtcgctccgcaccagtttcaccgcacgaatatcttgttgtttggagcgatccgagaaaaactctgtaaacatgttggtttaccaggacctccttacaggtgatgagcttctctctgactccttccgttacaaggaaattgagaatggaatgctgtgggaagttgaggggaagtgggttgttaaaggagcagttgatgtagacattggtgcaaacccttctgctgagggtggaggagaagatgagggagttgatgatgcagctgttaaggttgttgacattgttgacacattcagacttcaggagcaacccgcattcgataagaagcagtttgttaccttcatgaagaggtttatcaagaatttgactcccaagctcgatgcagagcaacaggagttgtttaagaagcacatcgagggagcaactaaatacctgctctctaagattaaagatttccaattttttgttggtgagagcatgggtgatgatgcttgcttggtctttgcctactacaaggacggcgctgctgatccaacattcctgtactttgcatatgccttaaaggaggtcaagtgctaagtgacttaatgtaccgagctatctactcattttatctagtttttttttacgttctgtcctaagttacttgaactttgacctggtattttgattttaatggtgagacgtgtgctactgctacatcataattcccatcaaatttaattatcgatgggttagaatttcattaatttatgattttggtcgtgctagattcccggaagtttcttttgaagaatttttgggtgtgtactagaaatattttaatttggcttcatggttttattgataaggctttgaatacgacttgggaattt

SEQ ID NO: 13291 - protein, 196 aa, Glycine max
ASSLASLRTSFTARISCCLERSEKNSVNMLVYQDLLTGDELLSDSFRYKEIENGMLWEVEGKWVVKGAVDVDIGANPSAEGGGEDEGVDDAAVKVVDIVDTFRLQEQPAFDKKQFVTFMKRFIKNLTPKLDAEQQELFKKHIEGATKYLLSKIKDFQFFVGESMGDDACLVFAYYKDGAADPTFLYFAYALKEVKC

SEQ ID NO: 13292 - protein, 168 aa, Glycine max
MLVYQDLLTGDELLSDSFRYKEIENGMLWEVEGKWVVKGAVDVDIGANPSAEGGGEDEGVDDAAVKVVDIVDTFRLQEQPAFDKKQFVTFMKRFIKNLTPKLDAEQQELFKKHIEGATKYLLSKIKDFQFFVGESMGDDACLVFAYYKDGAADPTFLYFAYALKEVKC

SEQ ID NO: 13293 - protein, 142 aa, Glycine max
MLWEVEGKWVVKGAVDVDIGANPSAEGGGEDEGVDDAAVKVVDIVDTFRLQEQPAFDKKQFVTFMKRFIKNLTPKLDAEQQELFKKHIEGATKYLLSKIKDFQFFVGESMGDDACLVFAYYKDGAADPTFLYFAYALKEVKC

SEQ ID NO: 13294 - DNA, 971 bp, Glycine max
cttaaaccctatcgttcttctcgttttcgccgattctcgccatgccgaaagctaaatccgacgccaaagccgccgatagcaggttgaagcggaagggcgctggtgctgggaggaagcaatcgaggaaagctgctaaggaccctaacaagccgaagagacctccaagcgctttcttcgttttcatgtccgagttcagagagcagttcaagaaggagcatcctaacaacaaatccgtcgctgttgtcggcaaagctggtggtgaaaaatggaaatcgctatctgatgctgtgagaattatgattttgagaaatattttaatgataattttttgtgtgtggttgtatatgatttaatttaacgaatcatgtctactttttctgtaacctagtttgcgttaatttaatgtttcaggaaaaggcccctttcgttgctactgctgagaagaagaaacaggagtatgagaaaactatttcggcttacaataagcaattggagggaaagaattcagaggaagacgagtctgacaagtcaaagtctgaagtcaatgatgacgaggaagatgaggaggaggatgatgatgagtaaagatggtgatacatgatgaagcgtaggtggatgcgggaaaagaaaattgttttgcatagttgttgggtttagaatttcataggatggttccctacccacatccttttctgataattagtttctgaatttttattttgtcctccctcagtaggtttagattagtgcacaatcgtaattagggtttaatatcatgatcctgtacttaaagtcaatgttatgatacgtttctattctattctcgaagaaattccactgcctctttcaatttctacatttttgtttgtttgctgtcgttataatgtggcctttttgttgtttcttggttcagcgacacagaagaatctaaaattcagttgactttttaaaatgtggaagagtttggactt

SEQ ID NO: 13295 - protein, 103 aa, Glycine max
MPKAKSDAKAADSRLKRKGAGAGRKQSRKAAKDPNKPKRPPSAFFVFMSEFREQFKKEHPNNKSVAVVGKAGGEKWKSLSDAVRIMILRNILMIIFCVWLYMI

SEQ ID NO: 13296 - protein, 60 aa, Glycine max
MFQEKAPFVATAEKKKQEYEKTISAYNKQLEGKNSEEDESDKSKSEVNDDEEDEEEDDDE

SEQ ID NO: 13297 - protein, 56 aa, Glycine max
MSEFREQFKKEHPNNKSVAVVGKAGGEKWKSLSDAVRIMILRNILMIIFCVWLYMI

SEQ ID NO: 13298 - DNA, 561 bp, Glycine max
tagactggtctctcttctacgacgcacgcagcagcatcagcttctactcgtgtaatctctgcgtgggctacaatggattccggtgtccaaggttgcatcttagccactttaattctccacgacgaggaaatcccagtcaccgctgagaagatcaacgctctgttgaaggcttctaatgtctccgccgagtcttactggcccagcctcttcgccaagctcgcccagaataagaacatcgaagacctcattttgaacgccggcggtggtggggccgccgttgcagttgccgctcccgccggcggtggtggtggtgccgctgctgcagccgcacccgccgccgaggaaaagaaggaagaagtgaaggaagaaagtgacgatgacatgggtttcggcttgtttgattagatctttttatatagttgtagccagattttgagtctttgaattgaaatcttgttttgttctatataatttttattgaagggattcttagccaatctactatcataattgttgaattttggtggttttttaatatatttgtggcaactaaattcttat

SEQ ID NO: 13299 - protein, 110 aa, Glycine max
MDSGVQGCILATLILHDEEIPVTAEKINALLKASNVSAESYWPSLFAKLAQNKNIEDLILNAGGGGAAVAVAAPAGGGGGAAAAAAPAAEEKKEEVKEESDDDMGFGLFD

SEQ ID NO: 13300 - DNA, 2281 bp, Glycine max
  misc_feature (2195)..(2195): n is a, c, g, or t
  misc_feature (2209)..(2209): n is a, c, g, or t
aaacatttggaaccgggtgatgtacttgttcgtgtcaatggagaagtcattactcaattcctgaaactggagactctacttgatgacagtgtaaataagaatattgaattacaaattgaaaggggtggcacatcaaaaagtttaactttgttggtgcaagatttgcactcaataacgcctgattatttcttagaagttagtggggcagtaatacatcctctttcttatcagcaggctagaaacttccgtttccattgtgggcttgtttatgtggccgaaccaggatatatgctcttcagagcaggagttcctcgccatgcaataattaagaaatttgctggtgaagaaatatcatgtcttgacgaactgatatcagttctttctaagctatccaggggtgctcgagtaccattggaatatataagctacatggatcgtcatcgaaggaagtctgtgttagtgacggttgatcggcatgaatggtatgcaccacctcagatatacactcgtgatgacagtactggtcttctggaatgctaagcctgcttttaagcttgattcccccttcctatcattgggtgctaaagatgttgaaaatctatctagacagtcagtttcactaactggtgagcatgcttgtgggggacatgtgtgtggagataacagtcaggagttggttgatggtgtcactagcatggaaaccaattgtgaagatccctcagagtgtgtatctcaccacaatgcatctgatggtgtggtgaaaaaacgaaaagtggatgaagatttatcagctgatggaaatgttgttgctgatttttccttaaatgactcaagggaaactaagctagaaaaatcaagtattatacaggatgacatgttaattgactatcagggtgcaactgcagctacagcaaatgcatcagttgctgaacgtgtgatcgagcctacacttgtgatgtttgaggttcatgttcccccatcttgtatgcttgatggtgttcattcacagcacttttttggaactggtgtcataatttatcattcccaagatatgggattagttgcagttgacaagaatacagttgcaatatctgcttctgatgtaatgctatctttcgccgccttcccagttgaaattccaggagaggtggtatttctccatcctgttcacaattatgcccttatatcatatgatccctctgcattgggacctgttgggggttcagttgttcgtgctgcagagttacttccagagccagcattacgccggggggattctgtttatcttgtggggttgagtagaagtctgcaagcaacttctaggaaatcagttgttaccaatccttgtgctgcattaaatataggatctgctgattcccctcgctatagagcaaccaatatggaagtaattgagcttgatacagattttggcagtacattttcgggtgtgctaacagacgaacaaggaagggtccaagctatatggggaagcttctcaactcagctgaaatttggttgcagcacctcagaagatcatcaatttgtgaggggtattccaatttatgcaataagtcaggttcttgacaagattatatcaggtgcaaatgggtcacctcttcttataaatggtgtcgaaaggcctatgccacttgtgagaattctagaggttgaactttatccaacattgctttcaaaggctcggagttttggattaagtgatgattggattcaagcacttgttaagaaagatccagtaagacgtcaggttttacgtgttaaaggttgtttggctggatcaaaggctgagaatcttttagaacaaggggatatggttttagcaatcaacaaagaaccagtcacatgcttccgtgacattgaaaatgcttgccaagctttagacaaatccgacgccaatgatgggaagcttcacttgactattttccggcagggacaagaggttgaactttttgtgggaacagatgttagggatggaaatggtactgctcgtgcaattaattggtgtggttgtattgtccaagatccacatccagcagtgcgtgctcttggatttcttcccgaagaaggtcatggtgtatatgtggcaaggtggtgtcatgggagtcctgtacatagatatggtctatatgctcttcagtggatagttgaaattaatggaaaaccaactccaaatatangattctttcgttanatgtgacaaaggaactagaacatggcgagtttgttcgtgtaaagacaattcacctcaatgggaagccacgag

SEQ ID NO: 13301 - protein, 579 aa, Glycine max
  misc_feature (574)..(574): Xaa can be any naturally occurring amino acid
  misc_feature (578)..(578): Xaa can be any naturally occurring amino acid
MNGMHHLRYTLVMTVLVFWNAKPAFKLDSPFLSLGAKDVENLSRQSVSLTGEHACGGHVCGDNSQELVDGVTSMETNCEDPSECVSHHNASDGVVKKRKVDEDLSADGNVVADFSLNDSRETKLEKSSIIQDDMLIDYQGATAATANASVAERVIEPTLVMFEVHVPPSCMLDGVHSQHFFGTGVIIYHSQDMGLVAVDKNTVAISASDVMLSFAAFPVEIPGEVVFLHPVHNYALISYDPSALGPVGGSVVRAAELLPEPALRRGDSVYLVGLSRSLQATSRKSVVTNPCAALNIGSADSPRYRATNMEVIELDTDFGSTFSGVLTDEQGRVQAIWGSFSTQLKFGCSTSEDHQFVRGIPIYAISQVLDKIISGANGSPLLINGVERPMPLVRILEVELYPTLLSKARSFGLSDDWIQALVKKDPVRRQVLRVKGCLAGSKAENLLEQGDMVLAINKEPVTCFRDIENACQALDKSDANDGKLHLTIFRQGQEVELFVGTDVRDGNGTARAINWCGCIVQDPHPAVRALGFLPEEGHGVYVARWCHGSPVHRYGLYALQWIVEINGKPTPNIXFFRXM

SEQ ID NO: 13302 - protein, 576 aa, Glycine max
  misc_feature (571)..(571): Xaa can be any naturally occurring amino acid
  misc_feature (575)..(575): Xaa can be any naturally occurring amino acid
MHHLRYTLVMTVLVFWNAKPAFKLDSPFLSLGAKDVENLSRQSVSLTGEHACGGHVCGDNSQELVDGVTSMETNCEDPSECVSHHNASDGVVKKRKVDEDLSADGNVVADFSLNDSRETKLEKSSIIQDDMLIDYQGATAATANASVAERVIEPTLVMFEVHVPPSCMLDGVHSQHFFGTGVIIYHSQDMGLVAVDKNTVAISASDVMLSFAAFPVEIPGEVVFLHPVHNYALISYDPSALGPVGGSVVRAAELLPEPALRRGDSVYLVGLSRSLQATSRKSVVTNPCAALNIGSADSPRYRATNMEVIELDTDFGSTFSGVLTDEQGRVQAIWGSFSTQLKFGCSTSEDHQFVRGIPIYAISQVLDKIISGANGSPLLINGVERPMPLVRILEVELYPTLLSKARSFGLSDDWIQALVKKDPVRRQVLRVKGCLAGSKAENLLEQGDMVLAINKEPVTCFRDIENACQALDKSDANDGKLHLTIFRQGQEVELFVGTDVRDGNGTARAINWCGCIVQDPHPAVRALGFLPEEGHGVYVARWCHGSPVHRYGLYALQWIVEINGKPTPNIXFFRXM

SEQ ID NO: 13303 - protein, 567 aa, Glycine max
  misc_feature (562)..(562): Xaa can be any naturally occurring amino acid
  misc_feature (566)..(566): Xaa can be any naturally occurring amino acid
MTVLVFWNAKPAFKLDSPFLSLGAKDVENLSRQSVSLTGEHACGGHVCGDNSQELVDGVTSMETNCEDPSECVSHHNASDGVVKKRKVDEDLSADGNVVADFSLNDSRETKLEKSSIIQDDMLIDYQGATAATANASVAERVIEPTLVMFEVHVPPSCMLDGVHSQHFFGTGVIIYHSQDMGLVAVDKNTVAISASDVMLSFAAFPVEIPGEVVFLHPVHNYALISYDPSALGPVGGSVVRAAELLPEPALRRGDSVYLVGLSRSLQATSRKSVVTNPCAALNIGSADSPRYRATNMEVIELDTDFGSTFSGVLTDEQGRVQAIWGSFSTQLKFGCSTSEDHQFVRGIPIYAISQVLDKIISGANGSPLLINGVERPMPLVRILEVELYPTLLSKARSFGLSDDWIQALVKKDPVRRQVLRVKGCLAGSKAENLLEQGDMVLAINKEPVTCFRDIENACQALDKSDANDGKLHLTIFRQGQEVELFVGTDVRDGNGTARAINWCGCIVQDPHPAVRALGFLPEEGHGVYVARWCHGSPVHRYGLYALQWIVEINGKPTPNIXFFRXM

SEQ ID NO: 13304 - DNA, 577 bp, Glycine max
atcaattatcaaacagcttcggtgatcatcgtaactgcttctacatttgtttgcctatattttctttgctcgtgtccatgtctaacaccagcaacaatgtcgctggggtcgacaacacattcagaagaaaatttgatcgagaagagtatctggaacgagcacgggagcgcgagagacaggaggaagaaggtcgagcgaaacctaaaggtaaaggtcctcccgtgcagaggaagcccttgaaacatagagattatgaagtggaccttgaatcccgcttgggcaagactcaggttgttacgccggttgcaccgctaagtcagcaggctggatactactgctcagtttgtgagtgtgtggtaaaggactctgcaaactacttggatcatattaatggaaagaaacatcaaagagctttaggcatgtctatgcgagtagaacgtgcttctctcgaacaggttcaggaacgatttgaagttcttaagaagcgtaaagatgttggcagcttcacagagcaagatcttgatgagcggattttaaaacagcagcaagaagaggaagaaagaaagcgactgcgtcg

SEQ ID NO: 13305 - protein, 191 aa, Glycine max
QLSNSFGDHRNCFYICLPIFSLLVSMSNTSNNVAGVDNTFRRKFDREEYLERARERERQEEEGRAKPKGKGPPVQRKPLKHRDYEVDLESRLGKTQVVTPVAPLSQQAGYYCSVCECVVKDSANYLDHINGKKHQRALGMSMRVERASLEQVQERFEVLKKRKDVGSFTEQDLDERILKQQQEEEERKRLR

SEQ ID NO: 13306 - protein, 166 aa, Glycine max
MSNTSNNVAGVDNTFRRKFDREEYLERARERERQEEEGRAKPKGKGPPVQRKPLKHRDYEVDLESRLGKTQVVTPVAPLSQQAGYYCSVCECVVKDSANYLDHINGKKHQRALGMSMRVERASLEQVQERFEVLKKRKDVGSFTEQDLDERILKQQQEEEERKRLR

SEQ ID NO: 13307 - DNA, 1621 bp, Glycine max
  misc_feature (944)..(944): n is a, c, g, or t
  misc_feature (1015)..(1015): n is a, c, g, or t
  misc_feature (1018)..(1018): n is a, c, g, or t
ttagcaagtcaagggctgttgactacagcgatggagtatttaaaacttttgggttctgaagaactgtcgcctgaacttacaatcttaaaggatcgaattgcactttctacagaacctgagaaagacttcaaaactactgcttttgaaagttctcaatcacatagtgggtcctattatggtgccgataattccaattataatagtaattattatcaggagccagtaaccactcaagtgcagcatggtgtttctggaattcaatatcctgatagctatcaacagccatttgatcctagatatggaagaggctatggtgctcctactccaccccagcaacctcaacagcctaatttgtttgttccaccacagactactcaggttgtgcaaactccccagccgactttctcaaatactgctgttgcaccaccacctttgagaacttttgatcctcaaactcctcccatgcttagaaatgtggagcaatatcagcagcctacattgggatctcaattgtataatacaaccaatccaccttaccagcctacaccccctgttccatcacaagtggccttgagtcatggccagaacttgtcacaagttgtggcacctaccccaaatccaatgggatacatgccagtctctggttctggtggtgtccaaagacctggggtgggatcaatacaacctcccagtccccctcaagtgcaacctgtgcaaccacctgcagctcctcctcctactttgcagactgctgatacttcaaaagtacctgggcatcaaatgcctattgtcacaactttgacaaggcttttcaatgagacatcagacgcccttggaggttcacgtgcaaacccagctaagaggcgggagatagaagacaactcgaagagacttggtgggttgtttgccaagttaaatagtggagacatatcgaaaaatgcttntgacaagctccttcagctttgtcaggcattagacaatggtgattttggtactgccctacaaattcaggttnttnttactactactgagtgggacgaatgccaatcctggttaggttcactcaagcggatgatcaagacaaggcagagcgcgagactaggttaaaaaagctacagatttctttttgctgattttggaaaattttcgtgtgattagcatcttgcagtagtgattgctggtcctcgtatcaatgtacacagactactgccatctctagatttcaggtgcagggtttttgattctatgtgcttctacaattttcttgctgtgtctgcagctttcacatcgactgttattaaaagctgttaatgaaggtagttttcaggaaaagatcagaaattttagcagattgtttttcaaccaatatctgtaatatgaagaacggtgttttgtctgtctgtttgccctaaatttccagatggtttttcttcacaccccctggctccatggtgacgccccaaggtgttctaatgtcagttatagattaatgtttccttttcttttatttttatttttaaagagtattttgtatcacactagccgtataagtattgatttgatcgtcaaacaggtgaataatgtagcatcatgtttatttaatcatccatcatttaattcc

SEQ ID NO: 13308 - protein, 368 aa, Glycine max
  misc_feature (315)..(315): Xaa can be any naturally occurring amino acid
  misc_feature (339)..(340): Xaa can be any naturally occurring amino acid
LASQGLLTTAMEYLKLLGSEELSPELTILKDRIALSTEPEKDFKTTAFESSQSHSGSYYGADNSNYNSNYYQEPVTTQVQHGVSGIQYPDSYQQPFDPRYGRGYGAPTPPQQPQQPNLFVPPQTTQVVQTPQPTFSNTAVAPPPLRTFDPQTPPMLRNVEQYQQPTLGSQLYNTTNPPYQPTPPVPSQVALSHGQNLSQVVAPTPNPMGYMPVSGSGGVQRPGVGSIQPPSPPQVQPVQPPAAPPPTLQTADTSKVPGHQMPIVTTLTRLFNETSDALGGSRANPAKRREIEDNSKRLGGLFAKLNSGDISKNAXDKLLQLCQALDNGDFGTALQIQVXXTTTEWDECQSWLGSLKRMIKTRQSARLG

SEQ ID NO: 13309 - protein, 358 aa, Glycine max
  misc_feature (305)..(305): Xaa can be any naturally occurring amino acid
  misc_feature (329)..(330): Xaa can be any naturally occurring amino acid
MEYLKLLGSEELSPELTILKDRIALSTEPEKDFKTTAFESSQSHSGSYYGADNSNYNSNYYQEPVTTQVQHGVSGIQYPDSYQQPFDPRYGRGYGAPTPPQQPQQPNLFVPPQTTQVVQTPQPTFSNTAVAPPPLRTFDPQTPPMLRNVEQYQQPTLGSQLYNTTNPPYQPTPPVPSQVALSHGQNLSQVVAPTPNPMGYMPVSGSGGVQRPGVGSIQPPSPPQVQPVQPPAAPPPTLQTADTSKVPGHQMPIVTTLTRLFNETSDALGGSRANPAKRREIEDNSKRLGGLFAKLNSGDISKNAXDKLLQLCQALDNGDFGTALQIQVXXTTTEWDECQSWLGSLKRMIKTRQSARLG

SEQ ID NO: 13310 - protein, 214 aa, Glycine max
  misc_feature (161)..(161): Xaa can be any naturally occurring amino acid
  misc_feature (185)..(186): Xaa can be any naturally occurring amino acid
MLRNVEQYQQPTLGSQLYNTTNPPYQPTPPVPSQVALSHGQNLSQVVAPTPNPMGYMPVSGSGGVQRPGVGSIQPPSPPQVQPVQPPAAPPPTLQTADTSKVPGHQMPIVTTLTRLFNETSDALGGSRANPAKRREIEDNSKRLGGLFAKLNSGDISKNAXDKLLQLCQALDNGDFGTALQIQVXXTTTEWDECQSWLGSLKRMIKTRQSARLG

SEQ ID NO: 13311 - DNA, 1513 bp, Glycine max
  misc_feature (927)..(927): n is a, c, g, or t
tagatcatgagcgctttttcttgagccaacttcaaagcaggggttttttaaggtcttgctttacagccataagcaatgtttgcaatcaggatggtagtctttcactggactcattgcagagggcatgcacttttgaggctgaacttgctttactactaagaatcagtcacaagtatggaaaatccggagcacagattttattttccatgggcatattggagcatcttgcatctggcagagcaatcaatttacagggaagtttaaggtgggttgagacaagacttagaagagatatggctgtggatgttgatagacaacggatgattattactccagtcttgagattagtgttttcactaacttccttggttgatacatctgactttttggaggttaagaataaaattgtccgtgaagtaatcgattttatcaaagggcatcaatcactgtttgatcaagttctccgtttagacattgccgaggcagatgaactaagaacagagcaggtcaatttagttgttggtattcttagcaaggtttggccatatgaagagagcaatgagtacggttttgttcaagggctttttggtctgatgcatgctcttttctcacgtgattcaaagattcctagttttgctcaatcaagagtatcacctgagaatcagaggaattcagaactacagatgtttaatttgtgctacagcctgagctcttacttgtattttctagtcacaaagaaatccctgagattacagccttcagatgcctcttccagttacgctgcttctgttgaacttcaacaacccacattgagcttgcttaattctcttcttttttctgtcacaactgcttttgaaagggcagctgaggagaaatccttgttactgaataagattcgagacataaatgaactgtcaaggcaggaanttgatgaaatcatcaatatgtgtgtccggcaagactctgtttcatcttcagataacatacataaaaggaggtacattgcaatggtagaaatgtgtcgagttgttgctagtagggatcagctaatcattttattactgccactctctgaacatgtgctaaatatcatccttatccatcttcaagagagctctgttgcactcgattctaccttgagtacaaaaacaattgcatatggtgccaaatatgatgcacaacaggacgttgctatgttatatggaaagttagttccaacccttgagcgacttgagttgctgagtgaggagaaagtagggcacaatctcaaagtattccgcagattagcaacttctgccaaagatcttgcaattcaaaaattgattgtgtagattattaagtggcttcccaaattcaattactccacttaaattaactgattgtgcgctgtaaattatgtaaagttctaattatagtcttggaattgagttcaacctgtaagaaattaacttcaccctttatgtagtgcagatgcaagtcaactgtgcccttttaatgttatatctgtagttgc

SEQ ID NO: 13312 - protein, 442 aa, Glycine max
  misc_feature (309)..(309): Xaa can be any naturally occurring amino acid
DHERFFLSQLQSRGFLRSCFTAISNVCNQDGSLSLDSLQRACTFEAELALLLRISHKYGKSGAQILFSMGILEHLASGRAINLQGSLRWVETRLRRDMAVDVDRQRMIITPVLRLVFSLTSLVDTSDFLEVKNKIVREVIDFIKGHQSLFDQVLRLDIAEADELRTEQVNLVVGILSKVWPYEESNEYGFVQGLFGLMHALFSRDSKIPSFAQSRVSPENQRNSELQMFNLCYSLSSYLYFLVTKKSLRLQPSDASSSYAASVELQQPTLSLLNSLLFSVTTAFERAAEEKSLLLNKIRDINELSRQEXDEIINMCVRQDSVSSSDNIHKRRYIAMVEMCRVVASRDQLIILLLPLSEHVLNIILIHLQESSVALDSTLSTKTIAYGAKYDAQQDVAMLYGKLVPTLERLELLSEEKVGHNLKVFRRLATSAKDLAIQKLIV

SEQ ID NO: 13313 - protein, 374 aa, Glycine max
  misc_feature (241)..(241): Xaa can be any naturally occurring amino acid
MGILEHLASGRAINLQGSLRWVETRLRRDMAVDVDRQRMIITPVLRLVFSLTSLVDTSDFLEVKNKIVREVIDFIKGHQSLFDQVLRLDIAEADELRTEQVNLVVGILSKVWPYEESNEYGFVQGLFGLMHALFSRDSKIPSFAQSRVSPENQRNSELQMFNLCYSLSSYLYFLVTKKSLRLQPSDASSSYAASVELQQPTLSLLNSLLFSVTTAFERAAEEKSLLLNKIRDINELSRQEXDEIINMCVRQDSVSSSDNIHKRRYIAMVEMCRVVASRDQLIILLLPLSEHVLNIILIHLQESSVALDSTLSTKTIAYGAKYDAQQDVAMLYGKLVPTLERLELLSEEKVGHNLKVFRRLATSAKDLAIQKLIV

SEQ ID NO: 13314 - protein, 345 aa, Glycine max
  misc_feature (212)..(212): Xaa can be any naturally occurring amino acid
MAVDVDRQRMIITPVLRLVFSLTSLVDTSDFLEVKNKIVREVIDFIKGHQSLFDQVLRLDIAEADELRTEQVNLVVGILSKVWPYEESNEYGFVQGLFGLMHALFSRDSKIPSFAQSRVSPENQRNSELQMFNLCYSLSSYLYFLVTKKSLRLQPSDASSSYAASVELQQPTLSLLNSLLFSVTTAFERAAEEKSLLLNKIRDINELSRQEXDEIINMCVRQDSVSSSDNIHKRRYIAMVEMCRVVASRDQLIILLLPLSEHVLNIILIHLQESSVALDSTLSTKTIAYGAKYDAQQDVAMLYGKLVPTLERLELLSEEKVGHNLKVFRRLATSAKDLAIQKLIV

SEQ ID NO: 13315 - DNA, 1700 bp, Glycine max
aattcatcgttcccttgagctaataattttgcacttatattcctgcctttacttggattctgtcgcaaaaggcaaatacatagcatcttgagcagttgagcaattgagctatcatacaaaagcaagcgaaggtacgtaagattttatcatcctaatggattatgtgttgtgtgcaaaaatattctgtaaaactaaattttcaatctaaattttaatgtgcacacatactttttgaaagtaatcaaatgttatcacaaaatcaagtatacttataaattgagtttgaaagttgaaacagctttgagcccatcaacctaaataattcaacccacttatctaatggatcaataacgggttgggttggattaatcaactagattgagttttatgttctttttttgtaatttcaaaaatccatgattgaatattcttaaaatgggaagattaaaaaaagcttgtacttttattactgtaaattaatattcaacgaattaaattaatttttcttaattttttatttgaatatttttcatattttactctgtttaatacaaatcaagaatatacttgctagttaatttcaatctcatttttgttttgtgagaattgattataatttgcttgaaggtagaagagatcagttatgatgagcaattccaaacaaaagaagaaattgaaggcacacaagaaaaaggatgaatggttgaaggacatgaggggtaacctaagtttgctggctaccgtaattgcaactatgacctttcagagtgctattaatccaccaggtggcattaggccagcaagtgaaactggagaaatcacatgtccagatacaagcaaaaacattacggttccatgccctggagaagctgtcctatctgttcttaaagcagacacctacaacagcttcctttattgtaacacaatatgttttgcttcatctttagctgtttgtctcttgcttgtgagtggactccctcttaataaccgattcttcatctggttcttctcaatatgcatgtgcatcaccctcactgccctcacccttacctacttatatggtttgcaaatggtcaccccaaacgacgtttgggataattcattattcagcatggttggagtcgttatttttatttggatcatacttctaggaatcgtcgtaattttcctctccctacgcctacttttttggattgtcactaaatgccggaataaaaaacaaactgaacaaggagaagatcaaaaccaaagtaaacaagaagatccaaaacaaagtacaggagaagatgcaacctagttctgctcatccatcaggccatgcatcgcatatcaaccttccttacttgtggactattttacattgttaagcaatattattaatcatacataaataaacaaatttgtctttagtgtacgtctcatagcagatttgatttttcaactttcatattattgtataatgctttgttgggtatataaataattttgtagttttgaactctgtactttgtctagggattttcatacttcatatctgtataaaattatatgccataatatatatatatatatatatatatatatatatatatataaaatttatatttaaaatagtatccttctgatgagtgtgtaaaaaataatggtttaaattaaagaacatatgtataatatatattttataatttctttggagagtt

SEQ ID NO: 13316 - protein, 217 aa, Glycine max
MMSNSKQKKKLKAHKKKDEWLKDMRGNLSLLATVIATMTFQSAINPPGGIRPASETGEITCPDTSKNITVPCPGEAVLSVLKADTYNSFLYCNTICFASSLAVCLLLVSGLPLNNRFFIWFFSICMCITLTALTLTYLYGLQMVTPNDVWDNSLFSMVGVVIFIWIILLGIVVIFLSLRLLFWIVTKCRNKKQTEQGEDQNQSKQEDPKQSTGEDAT

SEQ ID NO: 13317 - protein, 216 aa, Glycine max
MSNSKQKKKLKAHKKKDEWLKDMRGNLSLLATVIATMTFQSAINPPGGIRPASETGEITCPDTSKNITVPCPGEAVLSVLKADTYNSFLYCNTICFASSLAVCLLLVSGLPLNNRFFIWFFSICMCITLTALTLTYLYGLQMVTPNDVWDNSLFSMVGVVIFIWIILLGIVVIFLSLRLLFWIVTKCRNKKQTEQGEDQNQSKQEDPKQSTGEDAT

SEQ ID NO: 13318 - protein, 194 aa, Glycine max
MRGNLSLLATVIATMTFQSAINPPGGIRPASETGEITCPDTSKNITVPCPGEAVLSVLKADTYNSFLYCNTICFASSLAVCLLLVSGLPLNNRFFIWFFSICMCITLTALTLTYLYGLQMVTPNDVWDNSLFSMVGVVIFIWIILLGIVVIFLSLRLLFWIVTKCRNKKQTEQGEDQNQSKQEDPKQSTGEDAT

SEQ ID NO: 13319 - DNA, 1018 bp, Glycine max
  misc_feature (955)..(955): n is a, c, g, or t
  misc_feature (996)..(996): n is a, c, g, or t
actaaaaactcactcattctctctgcaaattctaatcttcgcaaatcaacaacgtctctctctgttactctgaaaactgacttcaagttagtgtaactagctgccaagttgtgatggcattggtctctggaagaagttctgctctgaacccaaatgcacctatgttcatacctgctgcacttcgtcaggtggaggatttttcacctcaatggtgggatcttgtgaaatcttcaacatggtttcgtgattattggttgagccaacataaggaggaagaatttgaagaagttgccaatgactctactaatgatgatatggagaatatgctctcggaaacttttgatctaggcatggaagaagacttcaatgttctagaaaacgagtttgagcagttggtgatgttctctgaagctctagatcattctgttcaggatgatcctaatactggaaaagggtctcctcagagtaagcattgaagctaaatatctaattgattggataattgatactttatagaatcttttaaatattttcttacttgctagagtggttacatgacttcatttttgtttcaaatgctatgtaaaaagttactttgtttcaattatactatgttttatatgcttatatagtgtctttcactagtttataagcttgtgaaaaataaacctgttaacttagaggtagaccatattattcatttgtaatgcttattcttaatgatagaggtatcattcatgttgtatataatttacttacaacaagaattgctgcaaatctgcaattgaatggatctttccttttcaatcttacatctttcagctggtagttattttaagagaaaattaactactgtatctcaattgagttgtttcttaatcaggtcttaacaaggatgttaaagcttttcttattaacttggacaccaaaatcaccgagggaaaggggtcccaantctccttcagggcttgcaaagcaccttgagaagccagcacnagcacgtgaatgtgaagtgtgc

SEQ ID NO: 13320 - protein, 120 aa, Glycine max
MALVSGRSSALNPNAPMFIPAALRQVEDFSPQWWDLVKSSTWFRDYWLSQHKEEEFEEVANDSTNDDMENMLSETFDLGMEEDFNVLENEFEQLVMFSEALDHSVQDDPNTGKGSPQSKH

SEQ ID NO: 13321 - protein, 104 aa, Glycine max
MFIPAALRQVEDFSPQWWDLVKSSTWFRDYWLSQHKEEEFEEVANDSTNDDMENMLSETFDLGMEEDFNVLENEFEQLVMFSEALDHSVQDDPNTGKGSPQSKH

SEQ ID NO: 13322 - DNA, 1262 bp, Glycine max
  misc_feature (1100)..(1100): n is a, c, g, or t
gaaggtagtatttcctaaacaattagccatcacaacagagaaaaaaaaagagagagagaaatggagcttcaagaccatgatttcttggaggaattaatgtctctaagaagagaaacatgggataccaatccatgttcacaagaaaaccagcttttctctaatggctggagttttgattgttttgaggatcaaaactatcatcaagcttttcctccaaactctttctcttgccaacaagttcctcaaagttacaataacaaaggctacaactacaatgaaatttatagttccttactacatgaattctctgcaccccaagttatagattcatcatcctataacacccttgatacctctccttttctggctcaagaagattatccattgtccatgatggaagaagaagatccgggctttcttggggaagagcttcattgtttggaccttcaaaccacatgcaaaatggagccaagccattccactgaaatgcctattttcaacacaacttcatcatttgtggagagaaagaatagagcaaagaagcttcaggggcagccttcaaagaacctaatggcagagaggagaagaagaaagaggttaaatgacaggctctccatgctaagatcaattgtgcctaagataagtaagatggacagaacagctatacttggagacactatcgggttatatgaaggagctcttggaaaagattaataatttgaagcaagaaatagaagtggattcaaacatggctggcattttcaaggatgtgaagccaaacgaaatcatagtgagaaattctccaaagtttgatgtggagaggagaaatgtcaatacaagggtggagatctgctgtgcagggaagccaggcttgttgctggctaccgtaaacaccttggaaacattaggcgtcgagatccaacaatgcgtcattagctgtttcaatgatttcacagtgcaagcttcttgctcagaggaattgctgcagaagacaattctgagttctgaagatataaagcaagcactatttagaagcgcaggatatggtggacgatatttgtgaaaatagaagagaggtgcaaaataacacagaaagtgcnccatagctaggggagagtttttgagtttctgatcatagtgatatccattgatttacaagccaatctagccggatttcgtttttcttagtgtaagacaataattgatttcttcaacatgatgcctattgtaacattttcaaatggaatcgtaaaaaaaatgtt

SEQ ID NO: 13323 - protein, 217 aa, Glycine max
MELQDHDFLEELMSLRRETWDTNPCSQENQLFSNGWSFDCFEDQNYHQAFPPNSFSCQQVPQSYNNKGYNYNEIYSSLLHEFSAPQVIDSSSYNTLDTSPFLAQEDYPLSMMEEEDPGFLGEELHCLDLQTTCKMEPSHSTEMPIFNTTSSFVERKNRAKKLQGQPSKNLMAERRRRKRLNDRLSMLRSIVPKISKMDRTAILGDTIGLYEGALGKD

SEQ ID NO: 13324 - protein, 205 aa, Glycine max
MSLRRETWDTNPCSQENQLFSNGWSFDCFEDQNYHQAFPPNSFSCQQVPQSYNNKGYNYNEIYSSLLHEFSAPQVIDSSSYNTLDTSPFLAQEDYPLSMMEEEDPGFLGEELHCLDLQTTCKMEPSHSTEMPIFNTTSSFVERKNRAKKLQGQPSKNLMAERRRRKRLNDRLSMLRSIVPKISKMDRTAILGDTIGLYEGALGKD

SEQ ID NO: 13325 - protein, 124 aa, Glycine max
MKELLEKINNLKQEIEVDSNMAGIFKDVKPNEIIVRNSPKFDVERRNVNTRVEICCAGKPGLLLATVNTLETLGVEIQQCVISCFNDFTVQASCSEELLQKTILSSEDIKQALFRSAGYGGRYL

SEQ ID NO: 13326 - DNA, 1340 bp, Glycine max
  misc_feature (286)..(286): n is a, c, g, or t
  misc_feature (673)..(673): n is a, c, g, or t
  misc_feature (730)..(730): n is a, c, g, or t
  misc_feature (763)..(763): n is a, c, g, or t
  misc_feature (767)..(767): n is a, c, g, or t
  misc_feature (982)..(982): n is a, c, g, or t
atttctcttcactccttcgttcactcttcttctcttgcggctagggttttagcgcagcttcttctagatttaaggaagatgggtaaggaaaaggttcacatcagtattgtggttattggccatgttgactctgggaagtccactaccactggccacctgatctacaagcttggaggcattgacaagcgtgttattgagagatttgagaaggaagctgctgagatgaacaagaggtctttcaagtatgcctgggtgcttgataagcttaaggctgagcgtgaaagangaatcacaattgatattgccttgtggaagtttgaaaccaccaagtactattgcacagtcattgatgcccctggacacagggatttcatcaagaacatgatcactgggacatcccaagctgactgtgctgttcttatcattgattccactactggtggttttgaagctggaatttcaaaggatggacagactcgtgaacatgctctgctttcattcacccttggtgtgaaacagatgatttgttgctgtaacaagatggatgctactacaccaaagtactccaaggccaggtatgatgaaattgtgaaggaagtttcttcctatttgaagaaagtaggatacaaccctgacaagattccttttgttcctatatctggttttgaggganacaacatgattgagaggtccacaaaccttgactggtacaagggtcctactctgctanatgcacttgaccagatctctgagcccaagaggncttntgacaagcccctcaggctaccccttcaggatgtgtacaagattggagtgtattggaactgtgccagtgggacgtgttgagaccggtgtcttgaagcctggaatggtggtgacttttgcaccaactggactgacaactgaagtcaagtctgtggagatgcaccatgaatctcttacagaggcacatcctggtgacaatgtgggattcaatgttaanaatgttgctgttaaggatttgaagcgtggttatgttgcctcaaactcaaaggatgaccctgcaaaggaggctgctaacttcacagcccaagtcatcatcatgaaccaccctggtcagattggaaatggctatgcccctgtcctcgactgccacacttctcacattgctgtcaagtttgctgaactcatgaccaagattgacaggcgatccggcaaagagcttgagaaggagcccaagtttttgaagaacggtgatgctggttttgttaagatgattccaaccaaacccatggttgttgaaactttctccgagtatcctccacttggtaggtttgctgttagggacatgcgtcaaactg

SEQ ID NO: 13327 - protein, 281 aa, Glycine max
  misc_feature (96)..(96): Xaa can be any naturally occurring amino acid
  misc_feature (225)..(225): Xaa can be any naturally occurring amino acid
  misc_feature (244)..(244): Xaa can be any naturally occurring amino acid
  misc_feature (255)..(256): Xaa can be any naturally occurring amino acid
ISLHSFVHSSSLAARVLAQLLLDLRKMGKEKVHISIVVIGHVDSGKSTTTGHLIYKLGGIDKRVIERFEKEAAEMNKRSFKYAWVLDKLKAERERXITIDIALWKFETTKYYCTVIDAPGHRDFIKNMITGTSQADCAVLIIDSTTGGFEAGISKDGQTREHALLSFTLGVKQMICCCNKMDATTPKYSKARYDEIVKEVSSYLKKVGYNPDKIPFVPISGFEGXNMIERSTNLDWYKGPTLLXALDQISEPKRXXDKPLRLPLQDVYKIGVYWNCASGTC

SEQ ID NO: 13328 - protein, 255 aa, Glycine max
  misc_feature (70)..(70): Xaa can be any naturally occurring amino acid
  misc_feature (199)..(199): Xaa can be any naturally occurring amino acid
  misc_feature (218)..(218): Xaa can be any naturally occurring amino acid
  misc_feature (229)..(230): Xaa can be any naturally occurring amino acid
MGKEKVHISIVVIGHVDSGKSTTTGHLIYKLGGIDKRVIERFEKEAAEMNKRSFKYAWVLDKLKAERERXITIDIALWKFETTKYYCTVIDAPGHRDFIKNMITGTSQADCAVLIIDSTTGGFEAGISKDGQTREHALLSFTLGVKQMICCCNKMDATTPKYSKARYDEIVKEVSSYLKKVGYNPDKIPFVPISGFEGXNMIERSTNLDWYKGPTLLXALDQISEPKRXXDKPLRLPLQDVYKIGVYWNCASGTC

SEQ ID NO: 13329 - protein, 207 aa, Glycine max
  misc_feature (22)..(22): Xaa can be any naturally occurring amino acid
  misc_feature (151)..(151): Xaa can be any naturally occurring amino acid
  misc_feature (170)..(170): Xaa can be any naturally occurring amino acid
  misc_feature (181)..(182): Xaa can be any naturally occurring amino acid
MNKRSFKYAWVLDKLKAERERXITIDIALWKFETTKYYCTVIDAPGHRDFIKNMITGTSQADCAVLIIDSTTGGFEAGISKDGQTREHALLSFTLGVKQMICCCNKMDATTPKYSKARYDEIVKEVSSYLKKVGYNPDKIPFVPISGFEGXNMIERSTNLDWYKGPTLLXALDQISEPKRXXDKPLRLPLQDVYKIGVYWNCASGTC

SEQ ID NO: 13330 - DNA, 665 bp, Glycine max
attcgtcagcttcttctgtgtgccaccctttctttaatttttttttctttagcttttggagtttggattctcttgaaccatggctaagaatacaggagagttgaggattcatgagagtgtggatgagcttaggactgatttggcagactatgttgctgagttatcagaggcatctgtgaaagagcgaggagtctttgccattgctttatctggtggttctctcattggcttaatgggaaaactctgtgaagctccttataacaagacagtggactggtccaagtggtatatcttctgggctgatgagcgtgttgtggcgaaaaaccatgccgatagcaattataagcttgctaaagatggccttttgtccaaggttgtgccctcaattgaaacatatcatgtttctcatttctttatcctgtttatgtaaagaatgatttgttctcatagtaatttggaggaaagtgatgtagttgtagttttttagcattactctgttcttttgtaatttgccttctcatgctgattgctgcttaaaagggaaaaccaaacaacgtggatggatggcttttgtttcacttttgagcttatataaagaagcttctttcacgtgaaacattatatttttgcttcaaggtgcctaattttgaatatgtaccaaaatt

SEQ ID NO: 13331 - protein, 116 aa, Glycine max
MAKNTGELRIHESVDELRTDLADYVAELSEASVKERGVFAIALSGGSLIGLMGKLCEAPYNKTVDWSKWYIFWADERVVAKNHADSNYKLAKDGLLSKVVPSIETYHVSHFFILFM

SEQ ID NO: 13332 - protein, 65 aa, Glycine max
MGKLCEAPYNKTVDWSKWYIFWADERVVAKNHADSNYKLAKDGLLSKVVPSIETYHVSHFFILFM

SEQ ID NO: 13333 - DNA, 414 bp, Glycine max
atcattatcaagtaatgcatgccacacacacacacacacacatatatatatactctagttctacacatggtggagatttttcaatcacatctttgctatatctaattaatgttctatatatttgcggagaacaaggaagaagaaaagaaagaagagaccacagaggaaaagaaggaaaaagagcctccagagatagtgctcaaggttgatatgcactgtgaagcttgtgcaaggaaagttgcaaaagcattgaaaggatttgaaggagtggaggaggtgactgcagatagcaaggcaagcaaagtggtagtgaaaggaaaggcagcagaccccataaaggtgtgtgagagactacaaaagaaaagtggcaagaaagtagagctcatttcacctttgcctaaacctccagaggag

SEQ ID NO: 13334 - protein, 102 aa, Glycine max
MFYIFAENKEEEKKEETTEEKKEKEPPEIVLKVDMHCEACARKVAKALKGFEGVEEVTADSKASKVVVKGKAADPIKVCERLQKKSGKKVELISPLPKPPEE

SEQ ID NO: 13335 - protein, 68 aa, Glycine max
HYQVMHATHTHTHIYIYSSSTHGGDFSITSLLYLINVLYICGEQGRRKERRDHRGKEGKRASRDSAQG

SEQ ID NO: 13336 - protein, 68 aa, Glycine max
MHCEACARKVAKALKGFEGVEEVTADSKASKVVVKGKAADPIKVCERLQKKSGKKVELISPLPKPPEE

SEQ ID NO: 13337 - DNA, 1169 bp, Glycine max
  misc_feature (1011)..(1011): n is a, c, g, or t
  misc_feature (1154)..(1154): n is a, c, g, or t
atattctacttgctgataaagaacagaaaggtaaaaagagaaccagaaagtcagtccctagcaaatctcctggggaagcatctacagagacacctgccaagaagcaaaaacaaacttcccaatctgggaaaaagcaaaaaccgtcttctgatgatgaggaggatgataaagctgaactttcagatgcaaaagatgtttctcaggaagatgaagatgttgcagtaccgaacaatgaaagtgatgatgaaagaagtaaatcagaggaacagaaagagaaatcaaagtctcacaagcgtacttccaaaaaatctgttaaagagaattcagttagcaaagctgatagaacctcatctgccaagaagacccctgttaaagatgccaagagcattggaaaaaattaaaaaaaagacaacttcaaaaaagagtgttgctgagcatgacagtgcttctgcctccgttaagtcaaagcaacctgcatccaagaaacagaaaactgttagtgaaaagcaggacactaaggggaaaactgcaagcaaaaaacaaactgacaaatcttcaaaggctttggttaaggatcaagggaaaagtaaaagtaataagaaggccaaggcagaacccactaagcaggacatgcatgctgtagttgttgatattctgaaggaagtagatttcaatactgcaactttatccgatatcctcaggcaacttggtacccactttggtctggatttaatgcatagaaaagcagaggtgaaggatataattacagatgtaattaataacatgtctgatgaggaagatgaagaagctgagaatgatggtgatgcagataaagatgatgatggtgatgatgatgatgatgatgcatgattttagttgggcaaataatatttgacctgtgcagaaattaggggcatgtgggcatctcatagctaggttttatcttcattattctccggataagttaaggtagatatttggtttgagttgtgaccttcattatagatgctntaaattaggtttgtattttgtaccatattagatttaacccgttcccctgtattactgatgtgaccttttatttgtcatatttaatagtttgtttttttagcctgcttgtaaacattattgccttcgaatttagatcaatgttntttcttttatttgtt

SEQ ID NO: 13338 - protein, 289 aa, Glycine max
IFYLLIKNRKVKREPESQSLANLLGKHLQRHLPRSKNKLPNLGKSKNRLLMMRRMIKLNFQMQKMFLRKMKMLQYRTMKVMMKEVNQRNRKRNQSLTSVLPKNLLKRIQLAKLIEPHLPRRPLLKMPRALEKIKKKTTSKKSVAEHDSASASVKSKQPASKKQKTVSEKQDTKGKTASKKQTDKSSKALVKDQGKSKSNKKAKAEPTKQDMHAVVVDILKEVDFNTATLSDILRQLGTHFGLDLMHRKAEVKDIITDVINNMSDEEDEEAENDGDADKDDDGDDDDDDA

SEQ ID NO: 13339 - protein, 239 aa, Glycine max
MMRRMIKLNFQMQKMFLRKMKMLQYRTMKVMMKEVNQRNRKRNQSLTSVLPKNLLKRIQLAKLIEPHLPRRPLLKMPRALEKIKKKTTSKKSVAEHDSASASVKSKQPASKKQKTVSEKQDTKGKTASKKQTDKSSKALVKDQGKSKSNKKAKAEPTKQDMHAVVVDILKEVDFNTATLSDILRQLGTHFGLDLMHRKAEVKDIITDVINNMSDEEDEEAENDGDADKDDDGDDDDDDA

SEQ ID NO: 13340 - protein, 238 aa, Glycine max
MRRMIKLNFQMQKMFLRKMKMLQYRTMKVMMKEVNQRNRKRNQSLTSVLPKNLLKRIQLAKLIEPHLPRRPLLKMPRALEKIKKKTTSKKSVAEHDSASASVKSKQPASKKQKTVSEKQDTKGKTASKKQTDKSSKALVKDQGKSKSNKKAKAEPTKQDMHAVVVDILKEVDFNTATLSDILRQLGTHFGLDLMHRKAEVKDIITDVINNMSDEEDEEAENDGDADKDDDGDDDDDDA

SEQ ID NO: 13341 - DNA, 1471 bp, Glycine max
caccttacgtccttacgtttcgtcgtgtgtctcatgaaccattacataaactctttacctttgtttattcataactactatatatatatatagaccctccttaaacccttttcttcaacagccaacaaaaaacaagtctttttctgaaaacttaatttctctctgattttctccctcacttttatttctctctttctggattattctctctgtgtagattgtggcgtgttctcgatgatgatgatgatgagccgcagcggcgccaaccgggtagcgaacaccgcaatgtttgtggcgaagggtttaagcggcgaagttggtggtttaagagcattatatggcggtggtgtgaggagtgagagcactttggctttgtcagagaaggaaaagattgagaagaaggttggtttgtcttctgctggtgggaacaaagaagaaaaagtgatcgtaagttattggggcattcaaccctccaagatcacaaaaaaagatggcacagaatggaagtggaattgctttagcccatgggggacatacaaagcagatctttccatcgatctggagaagcacatgcctccaaccacgtttctggacaaaatggctttttggactgtcaaggttctcagataccccaccgatgtgtttttccagaggcgatatggatgccgagcaatgatgctagaaacagtggctgcagtccctgggatggtagcaggcatgctacttcactgcaaatccctaagaagatttgagcacagtggtggttggttcaaagcactgctggaagaagcagagaacgagcgtatgcacctaatgaccttcatggaagtggcaaagccaaagtggtatgagcgtgcactagtgataactgtgcaaggtgttttcttcaatgcatacttcttggggtatttgttgtcacctaaattcgcacaccgcatgtttggttacctggaggaggaagcaattcactcctacacagagttccttaaggagctggacaagggcaatatcgaaaatgtgccggctccagccattgccattgactactggcagctcccaccaggctccactttaagggatgttgtcatggttgtaagagctgatgaggcacaccatcgtgatgtcaaccactttgcatcggacattcactatcaagggcgagagttacgagaggctgctgctccaattggttatcactaatttttttttgcctcttctgatgttggagtgtggaaatttaagacaaattttggtgtcattttgactagaataaataaaattgctcgtgacagactatacagtgtttttttttttgttatgtctcatgatgccaatgtaaatagggtgtggtggagtctttatttgttcaaagtcatatttggagtatttgtaattctactgtgcactctgtatggtacgagtggagttatatgatatctcacacacctccaagatatagtttttgcctact

SEQ ID NO: 13342 - protein, 321 aa, Glycine max
MMMMMSRSGANRVANTAMFVAKGLSGEVGGLRALYGGGVRSESTLALSEKEKIEKKVGLSSAGGNKEEKVIVSYWGIQPSKITKKDGTEWKWNCFSPWGTYKADLSIDLEKHMPPTTFLDKMAFWTVKVLRYPTDVFFQRRYGCRAMMLETVAAVPGMVAGMLLHCKSLRRFEHSGGWFKALLEEAENERMHLMTFMEVAKPKWYERALVITVQGVFFNAYFLGYLLSPKFAHRMFGYLEEEAIHSYTEFLKELDKGNIENVPAPAIAIDYWQLPPGSTLRDVVMVVRADEAHHRDVNHFASDIHYQGRELREAAAPIGYH

SEQ ID NO: 13343 - protein, 320 aa, Glycine max
MMMMSRSGANRVANTAMFVAKGLSGEVGGLRALYGGGVRSESTLALSEKEKIEKKVGLSSAGGNKEEKVIVSYWGIQPSKITKKDGTEWKWNCFSPWGTYKADLSIDLEKHMPPTTFLDKMAFWTVKVLRYPTDVFFQRRYGCRAMMLETVAAVPGMVAGMLLHCKSLRRFEHSGGWFKALLEEAENERMHLMTFMEVAKPKWYERALVITVQGVFFNAYFLGYLLSPKFAHRMFGYLEEEAIHSYTEFLKELDKGNIENVPAPAIAIDYWQLPPGSTLRDVVMVVRADEAHHRDVNHFASDIHYQGRELREAAAPIGYH

SEQ ID NO: 13344 - protein, 319 aa, Glycine max
MMMSRSGANRVANTAMFVAKGLSGEVGGLRALYGGGVRSESTLALSEKEKIEKKVGLSSAGGNKEEKVIVSYWGIQPSKITKKDGTEWKWNCFSPWGTYKADLSIDLEKHMPPTTFLDKMAFWTVKVLRYPTDVFFQRRYGCRAMMLETVAAVPGMVAGMLLHCKSLRRFEHSGGWFKALLEEAENERMHLMTFMEVAKPKWYERALVITVQGVFFNAYFLGYLLSPKFAHRMFGYLEEEAIHSYTEFLKELDKGNIENVPAPAIAIDYWQLPPGSTLRDVVMVVRADEAHHRDVNHFASDIHYQGRELREAAAPIGYH

SEQ ID NO: 13345 - DNA, 1681 bp, Glycine max
agaaaattagaaagaaaatcaactaaagtcatttgggaacagcttaattaccaggttgacttggtccttgatatggtattatagcttctatgaataagtggtcaggagtttgatccatgctgcctccattcttcataattgtaactaaatttcagctgcagagttgtgcattgtctgtgcttttgcctattatttgtataattaaaatattgtcctaataatggaattgtattatttgatatgtatctcttttattttcaaacatttgtaggttctgattcagcattcttctaatttatatgctgccaatggtgctgcggtagtcttagctgaaaagggccattttgatgtgtcaaaggatatctttacccaggttcaagaagctgccagtggtagtgtttttgtccagatgcctgatgtttggataaatctggcgcatgtttattttgctcaggggaattttactttggctgtgaaaatgtatcaaaactgcttgcggaagttttatcacaacacagactctcaaatacttctatatttagctcgtacacattacgaggctgaacagtggcaagactgtataaaaactctactgagagccatacatttggcgccctcaaactataccttaaggtttgatgcaggggttgcaatgcaaaagttttcagcatcaacactacaaaaggcaaagaggactgcagatgaggtgagagcaactgttgcagagcttcaaaatgctgttcgtgtatttagtcagttgtctgctgcttccaacctacatattcacgggtttgatgagaagaaaattgacactcatgttggatactgcaaccacttactttcagctgcaaaagttcatcttgaagcagctgaacgtgaagagcagcaagtacggcagagacaagaacttgctcgtcaggttgcatttgctgaggaagcccgtcgaaaggctgaagagcaaaggaaatttcagatggaaaggagaaaacaagaggatgaactaaagcgagtgcaacaacaggaggaacattttaggcgtgttaaggagcaatggaagagcagcagtcattcaaaacggagagaaagatcagatgatgaagagggaggagggactggtgagaagaagagaaaaaaaggtggaaagcggagaaagaaggataagcactcaaaatcgcgctatgacacagaggaacccgaaaatgatatgatggatgaacaggaaatggaggatgaagaagctgacataaactacagagaggagccccaaactcagatgaatgatgatgctgaggaaaatgctcagggtcttcttgcagcagctgggcttgaagattccgatgcagatgaggaagcgcctgcaccttcctcaagcatagcccggcgaaggcaagcattatcagaatctgatgatgacgaaccattaatacaaaggcagtcaagtccagcaagagaaaactctgctgatatgcagttgagtgatggagaaatcagggatggggataagacaaatggagatgatggcagtgaagaggagaaacaatattagattttggaccctacaggttagtcttattatcagccaagtgattttgtacgagtgataacatttaaattttatgtatatatacttgaaaagttaaaaaggttttatttagaaaaagccaacttttttgttcgtggt

SEQ ID NO: 13346 - protein, 378 aa, Glycine max
MPDVWINLAHVYFAQGNFTLAVKMYQNCLRKFYHNTDSQILLYLARTHYEAEQWQDCIKTLLRAIHLAPSNYTLRFDAGVAMQKFSASTLQKAKRTADEVRATVAELQNAVRVFSQLSAASNLHIHGFDEKKIDTHVGYCNHLLSAAKVHLEAAEREEQQVRQRQELARQVAFAEEARRKAEEQRKFQMERRKQEDELKRVQQQEEHFRRVKEQWKSSSHSKRRERSDDEEGGGTGEKKRKKGGKRRKKDKHSKSRYDTEEPENDMMDEQEMEDEEADINYREEPQTQMNDDAEENAQGLLAAAGLEDSDADEEAPAPSSSIARRRQALSESDDDEPLIQRQSSPARENSADMQLSDGEIRDGDKTNGDDGSEEEKQY

SEQ ID NO: 13347 - protein, 355 aa, Glycine max
MYQNCLRKFYHNTDSQILLYLARTHYEAEQWQDCIKTLLRAIHLAPSNYTLRFDAGVAMQKFSASTLQKAKRTADEVRATVAELQNAVRVFSQLSAASNLHIHGFDEKKIDTHVGYCNHLLSAAKVHLEAAEREEQQVRQRQELARQVAFAEEARRKAEEQRKFQMERRKQEDELKRVQQQEEHFRRVKEQWKSSSHSKRRERSDDEEGGGTGEKKRKKGGKRRKKDKHSKSRYDTEEPENDMMDEQEMEDEEADINYREEPQTQMNDDAEENAQGLLAAAGLEDSDADEEAPAPSSSIARRRQALSESDDDEPLIQRQSSPARENSADMQLSDGEIRDGDKTNGDDGSEEEKQY

SEQ ID NO: 13348 - protein, 297 aa, Glycine max
MQKFSASTLQKAKRTADEVRATVAELQNAVRVFSQLSAASNLHIHGFDEKKIDTHVGYCNHLLSAAKVHLEAAEREEQQVRQRQELARQVAFAEEARRKAEEQRKFQMERRKQEDELKRVQQQEEHFRRVKEQWKSSSHSKRRERSDDEEGGGTGEKKRKKGGKRRKKDKHSKSRYDTEEPENDMMDEQEMEDEEADINYREEPQTQMNDDAEENAQGLLAAAGLEDSDADEEAPAPSSSIARRRQALSESDDDEPLIQRQSSPARENSADMQLSDGEIRDGDKTNGDDGSEEEKQY

SEQ ID NO: 13349 - DNA, 1816 bp, Glycine max
atgggttgtgggaaaacaacacaaaaatgacccatgttctgtttagaaattgctctttcactggtactttccagctacccatgcgtccccttcctaacatatgggaaattgatgtttctgacaatatcatagttggccaaatccctagcaacaatttcagttcaatttatccaaatttgcattttcttaacttgtctagaaacaacatccaaggttcaatccctcatgagttaggccaaatgaactcattatattcattggatctttctggcaatcaattgtctggagagataccaaaggacatatttggagttggtcaccaactcaggttcttgaaactatcaaacaataagcttgagggacctattttgaatatccctaatggtttggagaccttgttattgaaccataatagatttaccggtagactcccaagcaacatttttaacgcatccatcatttcattggatgtaaagaataatcatttggtgggaaagattccaagccttataaaaaacttgtcaggattgtacgaaatttgtttgtctaataaccattttgaaggatccattccattagaacttggagaacttgaagatttaacttctgtagatctctcccaaaataattttattggtcttgttccatcatttgcaaattcttccgtggcatttatccatttgaacaacaatcgtttaagtggattgcccaaaagaatgttccatggaaaatcttctttagtgatgttagaccttagctacaatgaaatatctaacaaccttcaagatctgatacataaccttagttataaaaggttaaattttctccttttaaaaggtaatcactttatgggggatataccaaagcagatatgccagttgatagatttaaacatgctagacctttctcataacaatttttctggtgttatccccaaatgcttaggtaaaatgccttttgagaataagtacctgaagagcttgttagcaagattttctacctttgatccagatcccaataaccttgcccaatctccggaccttgcccaatctccaacaccggtatcgggaccaactctaaatttgcaagagaaagcaaatttcactacaaaggaaagaactgacacttacatcgggagagtccttttttatatgtctggaattgacttatctcacaataaactgaagggaaatatcccatttgagcttggatacttgacaaaaattcgagcattgaacttatcccacaatgatttaactgggaaaattccagttacattctccttgttggcacaaacagagagtttggatctttcttttaacatgttaaacagtcaaattcctcctcaactgagcatgttaacatcacttgaagtatttagtgtggcacacaataacttatcaggtccaacacctgattttaaaggacaattttccacatttgatgaaagcagctatgagggtaatccgttcctttgtggtcctccactgccaaagagttgcaatcctccacctactattataccaaatgactcaaacactgatggagacaatgatagtttgttggatatgtatgttttctgtgtgagctttgccgtgtcatacatatcaacattgttggtaactgcagcagctttatacatcaatccttactggaggcaggcatggttttactacatggaattggtgagcatgaattgctactactttatcaaggataatctgagcaaggttttcaaaattggaaatatgtaatatatcaagttgtatgtctagaatgatttccatgtgtttttgctaagtttgatagaataaag

SEQ ID NO: 13350 - protein, 583 aa, Glycine max
GLWENNTKMTHVLFRNCSFTGTFQLPMRPLPNIWEIDVSDNIIVGQIPSNNFSSIYPNLHFLNLSRNNIQGSIPHELGQMNSLYSLDLSGNQLSGEIPKDIFGVGHQLRFLKLSNNKLEGPILNIPNGLETLLLNHNRFTGRLPSNIFNASIISLDVKNNHLVGKIPSLIKNLSGLYEICLSNNHFEGSIPLELGELEDLTSVDLSQNNFIGLVPSFANSSVAFIHLNNNRLSGLPKRMFHGKSSLVMLDLSYNEISNNLQDLIHNLSYKRLNFLLLKGNHFMGDIPKQICQLIDLNMLDLSHNNFSGVIPKCLGKMPFENKYLKSLLARFSTFDPDPNNLAQSPDLAQSPTPVSGPTLNLQEKANFTTKERTDTYIGRVLFYMSGIDLSHNKLKGNIPFELGYLTKIRALNLSHNDLTGKIPVTFSLLAQTESLDLSFNMLNSQIPPQLSMLTSLEVFSVAHNNLSGPTPDFKGQFSTFDESSYEGNPFLCGPPLPKSCNPPPTIIPNDSNTDGDNDSLLDMYVFCVSFAVSYISTLLVTAAALYINPYWRQAWFYYMELVSMNCYYFIKDNLSKVFKIGNM

SEQ ID NO: 13351 - protein, 575 aa, Glycine max
MTHVLFRNCSFTGTFQLPMRPLPNIWEIDVSDNIIVGQIPSNNFSSIYPNLHFLNLSRNNIQGSIPHELGQMNSLYSLDLSGNQLSGEIPKDIFGVGHQLRFLKLSNNKLEGPILNIPNGLETLLLNHNRFTGRLPSNIFNASIISLDVKNNHLVGKIPSLIKNLSGLYEICLSNNHFEGSIPLELGELEDLTSVDLSQNNFIGLVPSFANSSVAFIHLNNNRLSGLPKRMFHGKSSLVMLDLSYNEISNNLQDLIHNLSYKRLNFLLLKGNHFMGDIPKQICQLIDLNMLDLSHNNFSGVIPKCLGKMPFENKYLKSLLARFSTFDPDPNNLAQSPDLAQSPTPVSGPTLNLQEKANFTTKERTDTYIGRVLFYMSGIDLSHNKLKGNIPFELGYLTKIRALNLSHNDLTGKIPVTFSLLAQTESLDLSFNMLNSQIPPQLSMLTSLEVFSVAHNNLSGPTPDFKGQFSTFDESSYEGNPFLCGPPLPKSCNPPPTIIPNDSNTDGDNDSLLDMYVFCVSFAVSYISTLLVTAAALYINPYWRQAWFYYMELVSMNCYYFIKDNLSKVFKIGNM

SEQ ID NO: 13352 - protein, 557 aa, Glycine max
MRPLPNIWEIDVSDNIIVGQIPSNNFSSIYPNLHFLNLSRNNIQGSIPHELGQMNSLYSLDLSGNQLSGEIPKDIFGVGHQLRFLKLSNNKLEGPILNIPNGLETLLLNHNRFTGRLPSNIFNASIISLDVKNNHLVGKIPSLIKNLSGLYEICLSNNHFEGSIPLELGELEDLTSVDLSQNNFIGLVPSFANSSVAFIHLNNNRLSGLPKRMFHGKSSLVMLDLSYNEISNNLQDLIHNLSYKRLNFLLLKGNHFMGDIPKQICQLIDLNMLDLSHNNFSGVIPKCLGKMPFENKYLKSLLARFSTFDPDPNNLAQSPDLAQSPTPVSGPTLNLQEKANFTTKERTDTYIGRVLFYMSGIDLSHNKLKGNIPFELGYLTKIRALNLSHNDLTGKIPVTFSLLAQTESLDLSFNMLNSQIPPQLSMLTSLEVFSVAHNNLSGPTPDFKGQFSTFDESSYEGNPFLCGPPLPKSCNPPPTIIPNDSNTDGDNDSLLDMYVFCVSFAVSYISTLLVTAAALYINPYWRQAWFYYMELVSMNCYYFIKDNLSKVFKIGNM

SEQ ID NO: 13353 - DNA, 1375 bp, Glycine max
acctagaacatcctaatcgaaaataaacacccacatgacatggaaaagacgctaacgccacccgtcttcgagcattaaaacccgcgaaacttccaagcagggttacacgccgcattgctctcagcttcacaacaccatggaccacgttagggaaacctctgcttgggtagctagccgctcctcccacgttctcgttgactctgcaggaattgagaaagtggtgagcaccattgattccattcccaaggttgagtgggatttcgaagggattcactactttgataatggaccactcaccgttcagtacctgtttgtgttggacgctttaaatttttgcttctggcctgataaggatttgaattatgatgatttggcatctgggctaaaggcagctcttcaaaatgataaatctgcatttgatgctgatcgtctgcaaaagtacactggtccacaactgcgtgagcttttgaggtggcctagaccccttcctctggaagatgaacgagttaggttactacatgaggttgggattgaattagaaagaaactttgagggtaaagcatccaatcttgtggagtgctgtggaaaatcagccatgaatcttgttgctcttgttgcacgccattttcctggttttagagaccatacagtgtacaaaggacgccaggtatttttatataaaagggctcagatatttgcagcagatttgtttggtgcatttaggggccaaggatatggtgagttcaaagacattggctctctaactataatggcagactatattgtcccagctgtgcttcgacagcttggtgttttaaaatatagtccaacacttgccagtactattgaggccagtggagaaataggtccagggactgaagaggaagttgaactgcgtgcttgctctgtacatgcagtggagaaaatgagggagctaataagtgtaaagtcaggaagacaggtgctcagtgtggagctggatctttggctctgggcttctggtgttcagtccacatctctgcagcaccaccgtacactttcaatatattactgagcacatgatatatggtaacttctagctatcaacaatttagttgttgaacaagaaaattttggctgttttaaggtaattatttaggataatgtgtgaataactacctccttttgcactaaagttttggaatcagcttttgtaattttggaaaagtgatacttaaccagatgctttcaaacttaattttgaatagccatggtattcggattttaggaccttaaatagtttacagggtgaacaattaggctcatggttgttttacaatgggaggttgttaatatttactttgtcaaatataactgttggtatagccgaggttgt

SEQ ID NO: 13354 - protein, 305 aa, Glycine max
MDHVRETSAWVASRSSHVLVDSAGIEKVVSTIDSIPKVEWDFEGIHYFDNGPLTVQYLFVLDALNFCFWPDKDLNYDDLASGLKAALQNDKSAFDADRLQKYTGPQLRELLRWPRPLPLEDERVRLLHEVGIELERNFEGKASNLVECCGKSAMNLVALVARHFPGFRDHTVYKGRQVFLYKRAQIFAADLFGAFRGQGYGEFKDIGSLTIMADYIVPAVLRQLGVLKYSPTLASTIEASGEIGPGTEEEVELRACSVHAVEKMRELISVKSGRQVLSVELDLWLWASGVQSTSLQHHRTLSIYY

SEQ ID NO: 13355 - protein, 152 aa, Glycine max
MNLVALVARHFPGFRDHTVYKGRQVFLYKRAQIFAADLFGAFRGQGYGEFKDIGSLTIMADYIVPAVLRQLGVLKYSPTLASTIEASGEIGPGTEEEVELRACSVHAVEKMRELISVKSGRQVLSVELDLWLWASGVQSTSLQHHRTLSIYY

SEQ ID NO: 13356 - DNA, 1241 bp, Glycine max
gctgaaataactaaatgattctgaattcttgttccatgagtccacaacctctgtcacctcacaatttcagagacctcttcgattccgtcgaagcttttctcttcgactgcgacggtgtgatttggaagggcgacgaactcatcgatggtgttccgcaaactctggacatgcttcgcgccaagggcaagaagctcgtcttcgtcaccaacaattcctggaagtcgcgttctcagtacgccgacaagttccgatcgttgggaatttcggtttcgcaggatgagatattctcctcgtcttttgcggctgctatgtacttgaaggtcaacaatttcccatcacaaaacaaggtttatgtaattggtggagagggtatactggaggagttgcagcttgcaggcattacagcttttggtggtccagacgatgcaaataaaacaatagacctgaagcagaactgctttgttgaacatgataagagtgttggagctgtcgtggttggtatagatccaaacattaactattataagcttcagtatggaaccctttgcatacgtgaaaatccaggatgccttttcattgccaccaaccgtgatgcagttggacatatgactgctttgcaagaatggcctggtgcggggtgtatggttgctgctatatgtggatcaacccagaaggagcctgttgtggtggggaaaccgtcaacctttatgatggagtttttacttaagaaattcaatgtaagttgctccaagatgtgcatggtgggtgatagactagatactgatatattgtttggacaaaatgctggttgcaaaacacttctagttctttcagggttgcacaactcaatcagctctacaagatccttcaaataatattcaacctgactattatactagtaaaatttctgacatgcttgacttatcaggagcatgaattggttcttcccaatttagacattctttgatgatccattgagactatacaataatgctctacatacacacacttatatttaattttcacaatctaattatagctgatctcatctggatttctgatacatcactttggtgtgaggttgatgtacaccaaacattattaaaggctataatagttgttctcccctgtgaatcagaatcatataattgcaatgtactcagatttcgttacagaatatcagtcatgaccagggtgaaattacactttctgccatttcaataatatggcaccatgattat

SEQ ID NO: 13357 - protein, 286 aa, Glycine max
MILNSCSMSPQPLSPHNFRDLFDSVEAFLFDCDGVIWKGDELIDGVPQTLDMLRAKGKKLVFVTNNSWKSRSQYADKFRSLGISVSQDEIFSSSFAAAMYLKVNNFPSQNKVYVIGGEGILEELQLAGITAFGGPDDANKTIDLKQNCFVEHDKSVGAVVVGIDPNINYYKLQYGTLCIRENPGCLFIATNRDAVGHMTALQEWPGAGCMVAAICGSTQKEPVVVGKPSTFMMEFLLKKFNVSCSKMCMVGDRLDTDILFGQNAGCKTLLVLSGLHNSISSTRSFK

SEQ ID NO: 13358 - protein, 279 aa, Glycine max
MSPQPLSPHNFRDLFDSVEAFLFDCDGVIWKGDELIDGVPQTLDMLRAKGKKLVFVTNNSWKSRSQYADKFRSLGISVSQDEIFSSSFAAAMYLKVNNFPSQNKVYVIGGEGILEELQLAGITAFGGPDDANKTIDLKQNCFVEHDKSVGAVVVGIDPNINYYKLQYGTLCIRENPGCLFIATNRDAVGHMTALQEWPGAGCMVAAICGSTQKEPVVVGKPSTFMMEFLLKKFNVSCSKMCMVGDRLDTDILFGQNAGCKTLLVLSGLHNSISSTRSFK

SEQ ID NO: 13359 - protein, 235 aa, Glycine max
MLRAKGKKLVFVTNNSWKSRSQYADKFRSLGISVSQDEIFSSSFAAAMYLKVNNFPSQNKVYVIGGEGILEELQLAGITAFGGPDDANKTIDLKQNCFVEHDKSVGAVVVGIDPNINYYKLQYGTLCIRENPGCLFIATNRDAVGHMTALQEWPGAGCMVAAICGSTQKEPVVVGKPSTFMMEFLLKKFNVSCSKMCMVGDRLDTDILFGQNAGCKTLLVLSGLHNSISSTRSFK

SEQ ID NO: 13360 - DNA, 1070 bp, Glycine max
  misc_feature (487)..(487): n is a, c, g, or t
  misc_feature (532)..(532): n is a, c, g, or t
atttgacctaagatatgttgctgttgggaatgaagattgcggaaaaaagaactatcgaggaaactacctgaaattctacagtgcaataaaaagtgcttatccagatatccaaattatttcaaattgtgatggttcttctcgacctttagatcatccagctgatatgtatgattatcatgtttatacaaatgcgaatgacatgttttctagagctaatgcatttgatcatacatctcgaaatggtccaaaggcttttgtaagtgagtatgctgtgactggaaaagatgctgggacaggaagcctcttggcagccctagctgaagctgggttccttattggactggaaaagaacagtgatgttatccaaatggccagctatgctccactttttgttaatgccaatgataggaggtggaacccagatgcaattgtattcaactcctttcagctctatggaactcctagctattgggtgcaactatttttntcagagtcaagtggagcaacacttctaagtacatcacttcaagcnccttcctcaaattcacttgttgcatcagcaattacatttcaaaattctgtagataagaaaaattacatacgaataaaggttgtgaacttcggtaccactgccgtgaacctcaaaatctctcttgatggactggaaccaaactcattgcagttatctgggtcaacaaagactgtgcttacatctgcaaatgtaatggatgagaactccttctcacagccaaagaaggtggtgccaatccaaagtctacttcagaatgttgagaaggacatgaatgtcacagtcccacctcgttcgttcacatcatttgatctgctgaaacaatccagtaatttgaagatggcagggagcgattcttccacgtggtcttctatttaacgttattaaaaatttgaccaaaagcagaaaaaataaataaagggaaaggatgggatgtatgcaatagctgcaattaactatataataagtttgacaccttggtctactttgccatgtaattaaacaatgttgtgctgtaaataacatttatgtggtttaattt

SEQ ID NO: 13361 - protein, 301 aa, Glycine max
  misc_feature (162)..(162): Xaa can be any naturally occurring amino acid
  misc_feature (177)..(177): Xaa can be any naturally occurring amino acid
FDLRYVAVGNEDCGKKNYRGNYLKFYSAIKSAYPDIQIISNCDGSSRPLDHPADMYDYHVYTNANDMFSRANAFDHTSRNGPKAFVSEYAVTGKDAGTGSLLAALAEAGFLIGLEKNSDVIQMASYAPLFVNANDRRWNPDAIVFNSFQLYGTPSYWVQLFXSESSGATLLSTSLQXPSSNSLVASAITFQNSVDKKNYIRIKVVNFGTTAVNLKISLDGLEPNSLQLSGSTKTVLTSANVMDENSFSQPKKVVPIQSLLQNVEKDMNVTVPPRSFTSFDLLKQSSNLKMAGSDSSTWSSI

SEQ ID NO: 13362 - protein, 247 aa, Glycine max
  misc_feature (108)..(108): Xaa can be any naturally occurring amino acid
  misc_feature (123)..(123): Xaa can be any naturally occurring amino acid
MYDYHVYTNANDMFSRANAFDHTSRNGPKAFVSEYAVTGKDAGTGSLLAALAEAGFLIGLEKNSDVIQMASYAPLFVNANDRRWNPDAIVFNSFQLYGTPSYWVQLFXSESSGATLLSTSLQXPSSNSLVASAITFQNSVDKKNYIRIKVVNFGTTAVNLKISLDGLEPNSLQLSGSTKTVLTSANVMDENSFSQPKKVVPIQSLLQNVEKDMNVTVPPRSFTSFDLLKQSSNLKMAGSDSSTWSSI

SEQ ID NO: 13363 - protein, 235 aa, Glycine max
  misc_feature (96)..(96): Xaa can be any naturally occurring amino acid
  misc_feature (111)..(111): Xaa can be any naturally occurring amino acid
MFSRANAFDHTSRNGPKAFVSEYAVTGKDAGTGSLLAALAEAGFLIGLEKNSDVIQMASYAPLFVNANDRRWNPDAIVFNSFQLYGTPSYWVQLFXSESSGATLLSTSLQXPSSNSLVASAITFQNSVDKKNYIRIKVVNFGTTAVNLKISLDGLEPNSLQLSGSTKTVLTSANVMDENSFSQPKKVVPIQSLLQNVEKDMNVTVPPRSFTSFDLLKQSSNLKMAGSDSSTWSSI

SEQ ID NO: 13364 - DNA, 1219 bp, Glycine max
  misc_feature (804)..(804): n is a, c, g, or t
  misc_feature (855)..(855): n is a, c, g, or t
  misc_feature (965)..(965): n is a, c, g, or t
  misc_feature (1091)..(1091): n is a, c, g, or t
taagaatgccactaccttatcgtatctaacagcagaacaagcacttgctgatttttccgttctcatcacttatctcaagcataattactccgccaaggattgccccgttgtcttgtttggaggatcatatggtggaatgttggctgcatggatgagactcaagtatcctcatattgctgttggggcactagcttcttccgctccgattcttcaatttgaagacattgtgccacctgaaactttctatgaccttgtttccaatgcttttaagcgtgaaagtttcacttgctttaactatataaaacagtcatggaatgagatagcatctacaggccaaacaaataacgggctggagcttctgaccaaaactttcaacttatgaaattgaagaggactaaagatctgtatgactgggcagaggctgcgtatagttatttggcgatggtgaactacccatatcctgctgaattcatgatgactttgcctgaacaccccatcagggaggtttgtagaaggattgatgggggtcctgctgggactagtattctagagcgcatatatgaaggagtgaatgtctactacaattatactggagaagctaaatgttttgaactggatgatgatcctcatggcatgagcggttgggaatggcaggcttgcactgaaatggttatgccaatgtctagcagccaggagtccagcatgtttcccccatatgagtataattacacttctatccaagcggagtgcttaaagaaatttggagtgaagccaaggccaagatggattactacagaattcggngggcatgatatccatgccaccttgaagaaatttggaagcaatataattttntcaaatggcctcttggatccatggagtggtggcggcgttttgcagaatatatctgaaagtgtggtttcacttgtcactgaagaaggtgcacaccacatagatttacgttnttcaacaaaaaatgatcctgattggttggtagagcagagggagactgagataaagctgatagaaggttggatcagtgactaccaccagaaaaatgaagctatgtttgatatgtaacagaatctttntactgtttgcttcagcactgttctgtatatatagctcagtaaaacacgtttgttaggtttgacaaaccttatgttcttgtttggttttgtaattgctcgggacaatatttgcaagcaatttttctttg

SEQ ID NO: 13365 - protein, 233 aa, Glycine max
  misc_feature (142)..(142): Xaa can be any naturally occurring amino acid
  misc_feature (159)..(159): Xaa can be any naturally occurring amino acid
  misc_feature (196)..(196): Xaa can be any naturally occurring amino acid
MKLKRTKDLYDWAEAAYSYLAMVNYPYPAEFMMTLPEHPIREVCRRIDGGPAGTSILERIYEGVNVYYNYTGEAKCFELDDDPHGMSGWEWQACTEMVMPMSSSQESSMFPPYEYNYTSIQAECLKKFGVKPRPRWITTEFXGHDIHATLKKFGSNIIXSNGLLDPWSGGGVLQNISESVVSLVTEEGAHHIDLRXSTKNDPDWLVEQRETEIKLIEGWISDYHQKNEAMFDM

SEQ ID NO: 13366 - protein, 212 aa, Glycine max
  misc_feature (121)..(121): Xaa can be any naturally occurring amino acid
  misc_feature (138)..(138): Xaa can be any naturally occurring amino acid
  misc_feature (175)..(175): Xaa can be any naturally occurring amino acid
MVNYPYPAEFMMTLPEHPIREVCRRIDGGPAGTSILERIYEGVNVYYNYTGEAKCFELDDDPHGMSGWEWQACTEMVMPMSSSQESSMFPPYEYNYTSIQAECLKKFGVKPRPRWITTEFXGHDIHATLKKFGSNIIXSNGLLDPWSGGGVLQNISESVVSLVTEEGAHHIDLRXSTKNDPDWLVEQRETEIKLIEGWISDYHQKNEAMFDM

SEQ ID NO: 13367 - protein, 202 aa, Glycine max
  misc_feature (111)..(111): Xaa can be any naturally occurring amino acid
  misc_feature (128)..(128): Xaa can be any naturally occurring amino acid
  misc_feature (165)..(165): Xaa can be any naturally occurring amino acid
MMTLPEHPIREVCRRIDGGPAGTSILERIYEGVNVYYNYTGEAKCFELDDDPHGMSGWEWQACTEMVMPMSSSQESSMFPPYEYNYTSIQAECLKKFGVKPRPRWITTEFXGHDIHATLKKFGSNIIXSNGLLDPWSGGGVLQNISESVVSLVTEEGAHHIDLRXSTKNDPDWLVEQRETEIKLIEGWISDYHQKNEAMFDM

SEQ ID NO: 13368 - DNA, 998 bp, Glycine max
  misc_feature (567)..(567): n is a, c, g, or t
  misc_feature (578)..(578): n is a, c, g, or t
aacgcgtctatactatttgcatctcataaaacacagagctgagaaaggaagaaaaaaagcgtttgtgagtgtgagagagtcataacaatggttgtggaagatgcccaaaaatcagccatcacggaggaccaaaaccctagcagggtcgccaacgacaacaacgacgacgaagatctcgaagagggggagatcctcgacgacggtgacgacggcgcctccgccacatcaaagcctccgtccgccctcgtccgcaacccccaccctctcgagaattcctggaccttctggttcgacaacccttccgccaagtccaaacaagccgcatggggcagctccatccgacccatctacactttcgccaccgtcgaagagttttggagcatttacaataacattcaccacccgagcaagttgggtgtgggggcggactttcattgcttcaagcacaagattgagcccaagtgggaggatcctatctgcgctaatgggggaaagtggactatgaccttccaaaggggaaaatctgataccagttggttatatacgttgttggcaatgattggagancagtttgatcncggagatgaaatatgcggagctgttgtgaatgtcagaagtaggcagaaaaaaattgctatttggactaagaacgcttcaaatgaagctgctcaggtgagcattggaaagcagtggaaggagtttcttgattacaatgacacaattggctttatatttcatgaggatgcaaagaagcttgacagaggtgctaaaaataaatacgttgtatgaagtttatagcgttcttaactggaagcaaatgaaggaatgcagtacattccttgaatgaagtcgcattttgatgcctggtctttcctctcctacatgtagctgagcttcttagcccttttgacctcatcttattagtactttcatattcgatgtggacggagaatatttcatactgagatgtttcatcaataatatagagtgatttagct

SEQ ID NO: 13369 - protein, 233 aa, Glycine max
  misc_feature (160)..(160): Xaa can be any naturally occurring amino acid
  misc_feature (164)..(164): Xaa can be any naturally occurring amino acid
MVVEDAQKSAITEDQNPSRVANDNNDDEDLEEGEILDDGDDGASATSKPPSALVRNPHPLENSWTFWFDNPSAKSKQAAWGSSIRPIYTFATVEEFWSIYNNIHHPSKLGVGADFHCFKHKIEPKWEDPICANGGKWTMTFQRGKSDTSWLYTLLAMIGXQFDXGDEICGAVVNVRSRQKKIAIWTKNASNEAAQVSIGKQWKEFLDYNDTIGFIFHEDAKKLDRGAKNKYVV

SEQ ID NO: 13370 - protein, 134 aa, Glycine max
MPKNQPSRRTKTLAGSPTTTTTTKISKRGRSSTTVTTAPPPHQSLRPPSSATPTLSRIPGPSGSTTLPPSPNKPHGAAPSDPSTLSPPSKSFGAFTITFTTRASWVWGRTFIASSTRLSPSGRILSALMGESGL

SEQ ID NO: 13371 - DNA, 1230 bp, Glycine max
  misc_feature (1083)..(1083): n is a, c, g, or t
  misc_feature (1202)..(1202): n is a, c, g, or t
  misc_feature (1227)..(1227): n is a, c, g, or t
ttggagacaagactgttgcatttctcctaatggatgaagaaatgtattctggcatgtctagcttggttgatgcttctcctattgttgagcgagggattgctcttcagaagatgatacacttcataacaatggcattaggtggagagggctaccttaatttcatgggcaatgagtttggccatccagagtggattgatttcccaagagaaggcaatggatggagttatgagaagtgcaggcgtcagtggaatctggtggatacagatcacttgagatataagttcatgaatgcatttgacagagcaatgaacttgcttgatgataaattctcattccttgcatcaacaaaacagattgtgagcagtgcagatgatgatgacaaggttatagtctttgagcgaggagatctgatatttgtattcaattttcatccagagaatacatatgaagggtataaagttggatgtgacttacctggaaagtatagagttgcattggatagtgatgcttgggaatttggaggacgtggaagagtggggcatgatgtagaccacttcacatccccagaaggcataccaggagtccctgaaacaaattttaataatcgccccaattcattcaaggtcctctcccctgctcgtacttgtgtggcatattatagagtggaagaaagtcaagaagacgacgataataacagtttggttggggtagaagagacttctgctgcagcagatgttgcaaaaattcctgatgaatccgcttctacagaaagtgaagatatcaaattggatggggtgaaagagacattagctgcagcagatgttgcaaaaattcctgatgaatctgcccctttagaaagtgaagatagcaatttggatgtggtgaaagagccgttagctgcagcaaatgctgaagttacaaaaatttctggtgaattggtttctgtagaaactgaaggtatcaatttggataagttggaagagacaatagtagcagcttctgttgaaagtgaggtagttcgagacaaaccagaagatgcagccaactgagaatcttttttccttgtgaatattaagtgttttnttggcttcaagagcatgaaaatccagctggtggataggcaggcttttggatatcgttgaataaattttggataaatgttcgtcaaattatcgtcgtgtatgtatattatacatattatntagaagatgcagacaactgaaaatnttt

SEQ ID NO: 13372 - protein, 348 aa, Glycine max
GDKTVAFLLMDEEMYSGMSSLVDASPIVERGIALQKMIHFITMALGGEGYLNFMGNEFGHPEWIDFPREGNGWSYEKCRRQWNLVDTDHLRYKFMNAFDRAMNLLDDKFSFLASTKQIVSSADDDDKVIVFERGDLIFVFNFHPENTYEGYKVGCDLPGKYRVALDSDAWEFGGRGRVGHDVDHFTSPEGIPGVPETNFNNRPNSFKVLSPARTCVAYYRVEESQEDDDNNSLVGVEETSAAADVAKIPDESASTESEDIKLDGVKETLAAADVAKIPDESAPLESEDSNLDVVKEPLAAANAEVTKISGELVSVETEGINLDKLEETIVAASVESEVVRDKPEDAAN

SEQ ID NO: 13373 - protein, 339 aa, Glycine max
MDEEMYSGMSSLVDASPIVERGIALQKMIHFITMALGGEGYLNFMGNEFGHPEWIDFPREGNGWSYEKCRRQWNLVDTDHLRYKFMNAFDRAMNLLDDKFSFLASTKQIVSSADDDDKVIVFERGDLIFVFNFHPENTYEGYKVGCDLPGKYRVALDSDAWEFGGRGRVGHDVDHFTSPEGIPGVPETNFNNRPNSFKVLSPARTCVAYYRVEESQEDDDNNSLVGVEETSAAADVAKIPDESASTESEDIKLDGVKETLAAADVAKIPDESAPLESEDSNLDVVKEPLAAANAEVTKISGELVSVETEGINLDKLEETIVAASVESEVVRDKPEDAAN

SEQ ID NO: 13374 - protein, 335 aa, Glycine max
MYSGMSSLVDASPIVERGIALQKMIHFITMALGGEGYLNFMGNEFGHPEWIDFPREGNGWSYEKCRRQWNLVDTDHLRYKFMNAFDRAMNLLDDKFSFLASTKQIVSSADDDDKVIVFERGDLIFVFNFHPENTYEGYKVGCDLPGKYRVALDSDAWEFGGRGRVGHDVDHFTSPEGIPGVPETNFNNRPNSFKVLSPARTCVAYYRVEESQEDDDNNSLVGVEETSAAADVAKIPDESASTESEDIKLDGVKETLAAADVAKIPDESAPLESEDSNLDVVKEPLAAANAEVTKISGELVSVETEGINLDKLEETIVAASVESEVVRDKPEDAAN

SEQ ID NO: 13375 - DNA, 1246 bp, Glycine max
acggcgcgaatacaaagacacaggaaaaggaaaagcaaagcagaggagttcaatccaaataaaccacgtcgtctaaagtccagtccatatcgcgttatcaaagttgtttttttttctttttctgagagcgacagaaagtggagaagaaaaagatggagaaaatagagcacaaaacggtgaggacgaatggaataaacatgcacgtggcatccattgggtcaggcccagttgtactgttcctccacggcttcccggagctttggtacacgtggcgccaccagcttctgtccctctccgccgtgggctaccgggccatcgcccccgacctccgcggctacggcgacaccgacgccccgcccgacgcttcctcgtactccgccctccacatcgtcgccgacctcgtcgggcttctcgacgctttgggaatcgagcgagtttttctggtgggccatgactggggagcctccatagcctggcatttctgcttgctgaggcccgatcgtgtgaaggccctcgtcaacatgagcgtcgtgttccgccccagaaaccctaatcgaaagcccattcagagcctcagggccatcatgggcgacgattactatatctgcaggttccagaaacctggggaggttgaagaagagtttgcacgtgctggtgctgcgagaattataaagacatttattgcatctcgcgatccacgaccaccttgtgtgcctaaggagataggatttggtggttcacctgaccttcgtattgatctaccttcgtggctgaccgaagaagatgtcaattattatgccagcaaatttgaacagaaaggtttcactggcggcctaaactactatcgcgctatggacctaacctgggagctcacagcagcatggactggagtacagattaaggtaccagtcaagtttattgtgggagaccttgacattacatacaacactccaggtgttaaggagtatatacataatggtggctttaagagagacgtaccattcttgcaagaattggttgtgatggaaggagtagctcactttataaatcaggaaaggccccaagagatcagcgcgcatatatacgacttcatcaagaaattctaatccacgttattatccttcagaagtataccgtgcacaagtcattaataattcctgtaatcctgacttggatgcactgtttctcaagcttgtatcaatgtcatctacacaacttctggcgtaatgccaaggtttcttttctt

SEQ ID NO: 13376 - protein, 317 aa, Glycine max
MEKIEHKTVRTNGINMHVASIGSGPVVLFLHGFPELWYTWRHQLLSLSAVGYRAIAPDLRGYGDTDAPPDASSYSALHIVADLVGLLDALGIERVFLVGHDWGASIAWHFCLLRPDRVKALVNMSVVFRPRNPNRKPIQSLRAIMGDDYYICRFQKPGEVEEEFARAGAARIIKTFIASRDPRPPCVPKEIGFGGSPDLRIDLPSWLTEEDVNYYASKFEQKGFTGGLNYYRAMDLTWELTAAWTGVQIKVPVKFIVGDLDITYNTPGVKEYIHNGGFKRDVPFLQELVVMEGVAHFINQERPQEISAHIYDFIKKF

SEQ ID NO: 13377 - protein, 302 aa, Glycine max
MHVASIGSGPVVLFLHGFPELWYTWRHQLLSLSAVGYRAIAPDLRGYGDTDAPPDASSYSALHIVADLVGLLDALGIERVFLVGHDWGASIAWHFCLLRPDRVKALVNMSVVFRPRNPNRKPIQSLRAIMGDDYYICRFQKPGEVEEEFARAGAARIIKTFIASRDPRPPCVPKEIGFGGSPDLRIDLPSWLTEEDVNYYASKFEQKGFTGGLNYYRAMDLTWELTAAWTGVQIKVPVKFIVGDLDITYNTPGVKEYIHNGGFKRDVPFLQELVVMEGVAHFINQERPQEISAHIYDFIKKF

SEQ ID NO: 13378 - protein, 194 aa, Glycine max
MSVVFRPRNPNRKPIQSLRAIMGDDYYICRFQKPGEVEEEFARAGAARIIKTFIASRDPRPPCVPKEIGFGGSPDLRIDLPSWLTEEDVNYYASKFEQKGFTGGLNYYRAMDLTWELTAAWTGVQIKVPVKFIVGDLDITYNTPGVKEYIHNGGFKRDVPFLQELVVMEGVAHFINQERPQEISAHIYDFIKKF

SEQ ID NO: 13379 - DNA, 1757 bp, Glycine max
gagtatagaaaacaaataatgcaactgccacccaaaccgtgagtgcaaaatctaccaatctcaaacagtgcaaaaacactgcgaaatattttcaaccgcaaaacaaataacattcaatttccaaaattgccataatcaaccatagctgaacagaagaagtcagtaaccatcgtcgtgagcgaagatccataataatacagttacaaattgcaataacacactcattgtggttatcgaaatttgatcgcagcgtcgagaagaatggggagtttgggagcgattctgaaacatccagatgacttttaccctctgctgaagctgaaaatggcggcgaggaacgccgagaagcagatcccgccggagccgcactgggcgttctgctacacaatgctccacaaggtttctcgaagtttcgccctcgtcattcagcaactcggcatcgagcttcgcaacgccgtttgcatattttatttggttctgcgagctctcgacaccgttgaggatgatactagcatagaaacagatgtcaaggtgccaatactgatagcctttcaccgtcatatttatgatcgtgattggcacttttcatgtggcacaaaggagtacaaagttctaatggaccagtttcatcatgtttcaactgcttttctggaacttggaaagaactaccaggaagcaattgaggacattaccaaaagaatgggtgctggaatggccaaatttatttgcaaggaggtagaaacaattgatgactatgatgaatattgtcactatgtggcaggacttgttgggctgggtttatcaaagcttttccatgcatctggttcagaagatctggctccagatgacctttccaattcaatgggcttgtttctacagaaaacaaacattattcgagattatctggaagacatcaatgagatccccaagtcacgcatgttttggccacgacagatttggagtgaatatgttaacaaacttgaggatttgaaatatgaggagaactctgttaaggcagtgcaatgcttaaatgacatggtcactaatgccctgatgcatcctgaagattgcttaaaatacatggctgctttacgtgacccgcctatatttcgcttttgtgctataccccagataatggcaattggaacacttgcattatgctacaacaacattgaggtcttcagaggtgtagttaaaatgaggcgaggtttaactgccaaagtgattgaccgaacaaagactatggctgatgtctacggtgctttttttgattttgcttctatgttggagcccaaggttgacaaaaacgatcccaatgcaacaaaaacattgagcaggctggaagctatacagaaaacttgcagagaatctggtctcttaagtaaaaggaaatcttacattgtgaatgatgaaagtggatatggctcaaccatgattgtcatattggtcatcatggtttccatcatttttgcttatctgtctgctaaccaccataatagctagttagtgaaacactgatagcacgcctcgttcatggaatgcgaatttgcatgcatgcaagcaatagtatgatggctgcagttgactatcgtgtattttaattgaaaaatagtcgaatatagcgtcaagagcttcttgtgtttagtttggatttaactctatccctacgttcatcccgaaaattatcattattatgtgtgttataagttgattgtattaacatttcacggataaagttggaataccagatgagtggt

SEQ ID NO: 13380 - protein, 413 aa, Glycine max
MGSLGAILKHPDDFYPLLKLKMAARNAEKQIPPEPHWAFCYTMLHKVSRSFALVIQQLGIELRNAVCIFYLVLRALDTVEDDTSIETDVKVPILIAFHRHIYDRDWHFSCGTKEYKVLMDQFHHVSTAFLELGKNYQEAIEDITKRMGAGMAKFICKEVETIDDYDEYCHYVAGLVGLGLSKLFHASGSEDLAPDDLSNSMGLFLQKTNIIRDYLEDINEIPKSRMFWPRQIWSEYVNKLEDLKYEENSVKAVQCLNDMVTNALMHPEDCLKYMAALRDPPIFRFCAIPQIMAIGTLALCYNNIEVFRGVVKMRRGLTAKVIDRTKTMADVYGAFFDFASMLEPKVDKNDPNATKTLSRLEAIQKTCRESGLLSKRKSYIVNDESGYGSTMIVILVIMVSIIFAYLSANHHNS

SEQ ID NO: 13381 - protein, 392 aa, Glycine max
MAARNAEKQIPPEPHWAFCYTMLHKVSRSFALVIQQLGIELRNAVCIFYLVLRALDTVEDDTSIETDVKVPILIAFHRHIYDRDWHFSCGTKEYKVLMDQFHHVSTAFLELGKNYQEAIEDITKRMGAGMAKFICKEVETIDDYDEYCHYVAGLVGLGLSKLFHASGSEDLAPDDLSNSMGLFLQKTNIIRDYLEDINEIPKSRMFWPRQIWSEYVNKLEDLKYEENSVKAVQCLNDMVTNALMHPEDCLKYMAALRDPPIFRFCAIPQIMAIGTLALCYNNIEVFRGVVKMRRGLTAKVIDRTKTMADVYGAFFDFASMLEPKVDKNDPNATKTLSRLEAIQKTCRESGLLSKRKSYIVNDESGYGSTMIVILVIMVSIIFAYLSANHHNS

SEQ ID NO: 13382 - protein, 371 aa, Glycine max
MLHKVSRSFALVIQQLGIELRNAVCIFYLVLRALDTVEDDTSIETDVKVPILIAFHRHIYDRDWHFSCGTKEYKVLMDQFHHVSTAFLELGKNYQEAIEDITKRMGAGMAKFICKEVETIDDYDEYCHYVAGLVGLGLSKLFHASGSEDLAPDDLSNSMGLFLQKTNIIRDYLEDINEIPKSRMFWPRQIWSEYVNKLEDLKYEENSVKAVQCLNDMVTNALMHPEDCLKYMAALRDPPIFRFCAIPQIMAIGTLALCYNNIEVFRGVVKMRRGLTAKVIDRTKTMADVYGAFFDFASMLEPKVDKNDPNATKTLSRLEAIQKTCRESGLLSKRKSYIVNDESGYGSTMIVILVIMVSIIFAYLSANHHNS

SEQ ID NO: 13383 - DNA, 1110 bp, Glycine max
  misc_feature (542)..(542): n is a, c, g, or t
  misc_feature (941)..(941): n is a, c, g, or t
aatatatctctttctctctctcactctaaagacacaagctggggagttcttccacggagatcatcatcttcacttcaattcagtttactcatcgtgtgatttcatccaaagttagcaacatgagcttcttgaggccttctgcgttgtacaactttctgatcagttatcctgcgctgcgatggctgccatgtcagagttggggcttccttcgatggcccggccttgatgggttcttcaggcttttcgtggttgtgcttctgtggtctacactatccgagcttcgcttcataccctcatcttctatgtaccccacccttcgtgttggcgaccgaattattgtcgaaaaggcttcatattacatcaggagtccagctatacatgatattgtaacatttaaggatccaacacagtcctctggggaaaacacagatgctgtttttatcaagagaattgttgcaaaagcaggagacactgttgaggttaatcatggggcactctacatcaatggtgttgctcagcaggaagatttcatagccgagccnccagcatacgcaatgcaattaactcatgtgcccaatggtcatgtttatgtgttgggggataatcgtaacaatagttatgactcccatgtgtggggaccgcttcctgtgaagaacatagttggaagatatgtcacgtgctatcatagaccaagaaacatttgacagagatatcattgagatgtattgaaggaactggtgttcttttactatggtctgaccagtgggacggcatactaggccatgtcatgtgatttccatgaagagttccctccagctgttccataaatgatgcacatcatttagccattctttatgggattggattctcatatgcatgtagtgaggtttccctcgttcagagcatgaaatgaatctactgaaaaaatgtcatgtgatttntgaagggttcactgttagttgagtaacgatgcttgccctttgccaataaatattcgtgtaggtatccaagtttctttagcagtattgaaataacattgctttcattgagagttgaactcaagacctcccgcttactaaacgggtgctctgaaagctttgcttctttgtt

SEQ ID NO: 13384 - protein, 194 aa, Glycine max
  misc_feature (141)..(141): Xaa can be any naturally occurring amino acid
MSFLRPSALYNFLISYPALRWLPCQSWGFLRWPGLDGFFRLFVVVLLWSTLSELRFIPSSSMYPTLRVGDRIIVEKASYYIRSPAIHDIVTFKDPTQSSGENTDAVFIKRIVAKAGDTVEVNHGALYINGVAQQEDFIAEXPAYAMQLTHVPNGHVYVLGDNRNNSYDSHVWGPLPVKNIVGRYVTCYHRPRNI

SEQ ID NO: 13385 - protein, 133 aa, Glycine max
  misc_feature (80)..(80): Xaa can be any naturally occurring amino acid
MYPTLRVGDRIIVEKASYYIRSPAIHDIVTFKDPTQSSGENTDAVFIKRIVAKAGDTVEVNHGALYINGVAQQEDFIAEXPAYAMQLTHVPNGHVYVLGDNRNNSYDSHVWGPLPVKNIVGRYVTCYHRPRNI

SEQ ID NO: 13386 - DNA, 1323 bp, Glycine max
ttctttctctcactgtttctctggagtttgtgatctgagtataaagatggagctgagtagcatcaaagatgcatttgatcgtgtagccaagaagcaaaaattatcctcttccaagtctcaagaagttgttgaccaggtggggtgtgaaattgagcaagcattggcaacaattcagtcatcacatgacccctcagctcctgttgaccagaaatctgttctcacagaacttaagtttaagcttaatgctattggaccacttcaacagttggaaggatcaaataaggaattgaacataagtcttaccaagtatcaaaaactccttgaaaaattgttaaaccctgacatatcaaaggcatacagaaatgtggactttgatactcatattgtcaatcagataattgcaaaccacttttaccgtcaaggtttgtttgatcttggagatagcatcataaatgaggctggagagcctgatgcagctgcacttagatctcaatttttggaaatgcatcagattattggagctatgagagagagaaaccttcagcctgctctcacatgggtgtctgctaatcgagagaaacttgtccagattggttccaatcttgagcttaagattcacacgctgcagtttgtagaggtcctgcaaaatggaacccgagctgatgccttaaaatatgcccgaacttaccttgctccttttgcttccctcaacaagggtgagttcccaaagcttatgggttgcctcttgtatgcaggaaggctggagagctctccttattctgagctgttgtccccaattcattgggagatgacaaccgaagagctcgcacgacagttctgcactctcttgggtcagtcctatgagaacccactgagtgtagcagttgcagcaggagttgaggggttgcctatactgttaaagctggcaaatgtaatggcagcaaagaagcaggagtggcaggaaatgaagcagttgccggtgccggttgaattgggtaaggagtttcagttccattcgatttttgtttgccctgtgagtagggatcaaggaagtgaagaaaatcctccaatgctgctgccatgcttacatgtcctttgcaaacaatcaattatgaagctatcaaaaaacagcacccgaacattcaagtgtccatactgtccagccgaagctactgttgcaaactgcaaacagctgtatttctgatgatgtttatgtattttatctcttccatacatttcatttgtgcaaatacagcatttacagctttctggttgtatataaatattctaaaaatcttttacattttgataagaccaacgagt

SEQ ID NO: 13387 - protein, 400 aa, Glycine max
SFSHCFSGVCDLSIKMELSSIKDAFDRVAKKQKLSSSKSQEVVDQVGCEIEQALATIQSSHDPSAPVDQKSVLTELKFKLNAIGPLQQLEGSNKELNISLTKYQKLLEKLLNPDISKAYRNVDFDTHIVNQIIANHFYRQGLFDLGDSIINEAGEPDAAALRSQFLEMHQIIGAMRERNLQPALTWVSANREKLVQIGSNLELKIHTLQFVEVLQNGTRADALKYARTYLAPFASLNKGEFPKLMGCLLYAGRLESSPYSELLSPIHWEMTTEELARQFCTLLGQSYENPLSVAVAAGVEGLPILLKLANVMAAKKQEWQEMKQLPVPVELGKEFQFHSIFVCPVSRDQGSEENPPMLLPCLHVLCKQSIMKLSKNSTRTFKCPYCPAEATVANCKQLYF

SEQ ID NO: 13388 - protein, 385 aa, Glycine max
MELSSIKDAFDRVAKKQKLSSSKSQEVVDQVGCEIEQALATIQSSHDPSAPVDQKSVLTELKFKLNAIGPLQQLEGSNKELNISLTKYQKLLEKLLNPDISKAYRNVDFDTHIVNQIIANHFYRQGLFDLGDSIINEAGEPDAAALRSQFLEMHQIIGAMRERNLQPALTWVSANREKLVQIGSNLELKIHTLQFVEVLQNGTRADALKYARTYLAPFASLNKGEFPKLMGCLLYAGRLESSPYSELLSPIHWEMTTEELARQFCTLLGQSYENPLSVAVAAGVEGLPILLKLANVMAAKKQEWQEMKQLPVPVELGKEFQFHSIFVCPVSRDQGSEENPPMLLPCLHVLCKQSIMKLSKNSTRTFKCPYCPAEATVANCKQLYF

SEQ ID NO: 13389 - protein, 233 aa, Glycine max
MHQIIGAMRERNLQPALTWVSANREKLVQIGSNLELKIHTLQFVEVLQNGTRADALKYARTYLAPFASLNKGEFPKLMGCLLYAGRLESSPYSELLSPIHWEMTTEELARQFCTLLGQSYENPLSVAVAAGVEGLPILLKLANVMAAKKQEWQEMKQLPVPVELGKEFQFHSIFVCPVSRDQGSEENPPMLLPCLHVLCKQSIMKLSKNSTRTFKCPYCPAEATVANCKQLYF

SEQ ID NO: 13390 - DNA, 846 bp, Glycine max
  misc_feature (32)..(32): n is a, c, g, or t
  misc_feature (228)..(228): n is a, c, g, or t
tattttaatttgcattttttagtaagctggtntctggacctaatagtgcttggtaatcttcatgtgcaatttataaattgtctttacttttgtatttacaggcagatgcaaagaagagtgggtggtcagtctccttcaattactcccattcaagaattggcaactgataacagtctaaaagaagagtcagcagaaagcatggaaggtagacatagatcatcccctggntgttaaggatataagggagtccagtgtggaggagaaggatattgaacttgaggatactgggacagctgatggaagttccagattggaaaaggaggaaacagtagacaaagtagatgcccttgaggatggggtagcaaagagacagaagttgacatctcgagttgagccacctttgcttgatgaagttgatgatgattgggaggactcaaaagctgcaaaaagtagtgataacagcaaagcaagatcagccagcagtagggataaccaaaagcggcgagagggttttgaagaggaagtagttcaagatccacgatcagcacaactgagtagcatcagacagcacccggatgaaattgagcagggattttatagaagagagcatgatgcaaagcaagaacccggaagaaatctcatgatgcttaaaggcagagagagaccatacccttacaaggaccggcatcctagctcagctactcagttgaacacaaatgctgatggatttgatggacaaaaagaaagggacaattctgaaatggattggtcacgaagagatgatgatctctataacagaagggttagaaatgatgaacctagaaagagggatagggctaaggttcg

SEQ ID NO: 13391 - protein, 77 aa, Glycine max
  misc_feature (11)..(11): Xaa can be any naturally occurring amino acid
  misc_feature (76)..(76): Xaa can be any naturally occurring amino acid
YFNLHFLVSWXLDLIVLGNLHVQFINCLYFCIYRQMQRRVGGQSPSITPIQELATDNSLKEESAESMEGRHRSSPXC

SEQ ID NO: 13392 - protein, 68 aa, Glycine max
MMLKGRERPYPYKDRHPSSATQLNTNADGFDGQKERDNSEMDWSRRDDDLYNRRVRNDEPRKRDRAKV

SEQ ID NO: 13393 - protein, 67 aa, Glycine max
MLKGRERPYPYKDRHPSSATQLNTNADGFDGQKERDNSEMDWSRRDDDLYNRRVRNDEPRKRDRAKV

SEQ ID NO: 13394 - protein, 42 aa, Glycine max
  misc_feature (41)..(41): Xaa can be any naturally occurring amino acid
MQRRVGGQSPSITPIQELATDNSLKEESAESMEGRHRSSPXC

SEQ ID NO: 13395 - DNA, 2220 bp, Glycine max
  misc_feature (416)..(416): n is a, c, g, or t
ggagagggttcatttccattgacaggcgatagctgcgagtaactcaacctcctcttcagagcttcagcaatggcggcgaagaagcaggacgccggggacaccaaaaagagaaagcgactcaatactgaagctcccaaggcttcgaagctcgttgcctcaaagaagcacaaaccagactccgttgctaaagacaacaagaacaagaagacggcccctcttaccggccgagaacgtcgtcttcatgccaaggaactagcagatgctagaaaaaagaagagaaagcgacatttcactcttgagcaagagcttgcacgtctgtgggaaaagatgagacgtcacaagattgctaaagaggacagagctaagctagtgactgaagctttacgaaagatgaaggggaagattccagagattgngggctctcacatctcatctcgggttcttcagacttgtgtcaagcattgttcacaagctgaaagagatgcagtatttgaagagcttcggccacattttctaactctagcattcagcgcttatgctgttcacttagtgaagaagatgctcgacaacgcttccaagaaacaactagcaggctttatctccactctccgtggtcatgttgctcctcttcttcgccatatggttggatcgattgttgttgagcatgcttatgagttagcaaatgctgcacagaagcaagaactgctttcggaattatactccacagaacttcagttgtttaaggatctagtctcattgaaagagagcagattatcagatgtgatgtccaagttgggtctacagaaaggttcagttctgcgacacatgacgtcagtgattcagccaattttagagaaagggatagttgaccactctattttacacagagtcttaatggaatattttagcattgctgataagtcatctgtcacagatataatccaacagttatcaagtccactcattgttagaatgattggtacaagggatggagccaaaattggaattctttgtgtaaaatatgggaatgccaaggaaaggaagaagattatcaaaggattaaaggggcacatagacaaaacagcttatcatcaatatgggtgcatggtgctggtttgcatcctttctgttgttgacgacacaaaactgattacaaaggttatcattcgtgagcttcagtctattctaaaggagcttgttctggataagaatggaaggcgtctcttactccaattactacatcctaatagttcacgctatttcagtcctgatgatcttgcttctctgaatttatctataccttctctgtctctcaaggatcagtcagaagcaagctttctgacagaaacttcaaaggtttcacttggtgacaaggaatccaaggaagacatagaggtggcagtggatgaagttaataaagataaaacttctgcggatgattctgacctagctgagagtgggaaaaaagacccatttgtcagaaggcaggagctattgatcaagagtggacttgcagatagtcttcttgatatatgtatcgagagcgtgggagaactgatacggtcaaatttgggcaaagaggtcttgtatgaggttgcaacagggggttctgatggcataatgcacccagttttggatgataagataaattctctccacaacgctgtagcttctcttgcagcactgcctaaatcagaagattcacaagaggagcatgtccttgaaaatttccattcaagtcgcaccattagaaaactgattttggattgccccaactttgcttccaccttatgggaaaaagctttaaaagggaaaagtgagttatgggtgcatggccacagctgtaaggttatttctgcatttttggaatcaccagatccgactgtactaaaacttgttaaaaaagagctacagcctttaattgacattggaattctcaagaaccctaagcctatagaacaagcaaaccaataattgtcatgtatggagaagggagctatatctcaaagggacaggtttggcccaagttatcagtggctaagttatgatgtggaggcagtagctagcttcttttctggatttgtagataatgagttaaaaggctcaaactaaatttgatcgagaaagctgctgtggtaattttgacaaccagaagaaacagtaaaaattacttgatgtaatgatctacttttgcatatttttaaaatgcagcaattttgc

SEQ ID NO: 13396 - protein, 634 aa, Glycine max
  misc_feature (116)..(116): Xaa can be any naturally occurring amino acid
MAAKKQDAGDTKKRKRLNTEAPKASKLVASKKHKPDSVAKDNKNKKTAPLTGRERRLHAKELADARKKKRKRHFTLEQELARLWEKMRRHKIAKEDRAKLVTEALRKMKGKIPEIXGSHISSRVLQTCVKHCSQAERDAVFEELRPHFLTLAFSAYAVHLVKKMLDNASKKQLAGFISTLRGHVAPLLRHMVGSIVVEHAYELANAAQKQELLSELYSTELQLFKDLVSLKESRLSDVMSKLGLQKGSVLRHMTSVIQPILEKGIVDHSILHRVLMEYFSIADKSSVTDIIQQLSSPLIVRMIGTRDGAKIGILCVKYGNAKERKKIIKGLKGHIDKTAYHQYGCMVLVCILSVVDDTKLITKVIIRELQSILKELVLDKNGRRLLLQLLHPNSSRYFSPDDLASLNLSIPSLSLKDQSEASFLTETSKVSLGDKESKEDIEVAVDEVNKDKTSADDSDLAESGKKDPFVRRQELLIKSGLADSLLDICIESVGELIRSNLGKEVLYEVATGGSDGIMHPVLDDKINSLHNAVASLAALPKSEDSQEEHVLENFHSSRTIRKLILDCPNFASTLWEKALKGKSELWVHGHSCKVISAFLESPDPTVLKLVKKELQPLIDIGILKNPKPIEQANQ

SEQ ID NO: 13397 - protein, 548 aa, Glycine max
  misc_feature (30)..(30): Xaa can be any naturally occurring amino acid
MRRHKIAKEDRAKLVTEALRKMKGKIPEIXGSHISSRVLQTCVKHCSQAERDAVFEELRPHFLTLAFSAYAVHLVKKMLDNASKKQLAGFISTLRGHVAPLLRHMVGSIVVEHAYELANAAQKQELLSELYSTELQLFKDLVSLKESRLSDVMSKLGLQKGSVLRHMTSVIQPILEKGIVDHSILHRVLMEYFSIADKSSVTDIIQQLSSPLIVRMIGTRDGAKIGILCVKYGNAKERKKIIKGLKGHIDKTAYHQYGCMVLVCILSVVDDTKLITKVIIRELQSILKELVLDKNGRRLLLQLLHPNSSRYFSPDDLASLNLSIPSLSLKDQSEASFLTETSKVSLGDKESKEDIEVAVDEVNKDKTSADDSDLAESGKKDPFVRRQELLIKSGLADSLLDICIESVGELIRSNLGKEVLYEVATGGSDGIMHPVLDDKINSLHNAVASLAALPKSEDSQEEHVLENFHSSRTIRKLILDCPNFASTLWEKALKGKSELWVHGHSCKVISAFLESPDPTVLKLVKKELQPLIDIGILKNPKPIEQANQ

SEQ ID NO: 13398 - protein, 527 aa, Glycine max
  misc_feature (9)..(9): Xaa can be any naturally occurring amino acid
MKGKIPEIXGSHISSRVLQTCVKHCSQAERDAVFEELRPHFLTLAFSAYAVHLVKKMLDNASKKQLAGFISTLRGHVAPLLRHMVGSIVVEHAYELANAAQKQELLSELYSTELQLFKDLVSLKESRLSDVMSKLGLQKGSVLRHMTSVIQPILEKGIVDHSILHRVLMEYFSIADKSSVTDIIQQLSSPLIVRMIGTRDGAKIGILCVKYGNAKERKKIIKGLKGHIDKTAYHQYGCMVLVCILSVVDDTKLITKVIIRELQSILKELVLDKNGRRLLLQLLHPNSSRYFSPDDLASLNLSIPSLSLKDQSEASFLTETSKVSLGDKESKEDIEVAVDEVNKDKTSADDSDLAESGKKDPFVRRQELLIKSGLADSLLDICIESVGELIRSNLGKEVLYEVATGGSDGIMHPVLDDKINSLHNAVASLAALPKSEDSQEEHVLENFHSSRTIRKLILDCPNFASTLWEKALKGKSELWVHGHSCKVISAFLESPDPTVLKLVKKELQPLIDIGILKNPKPIEQANQ

SEQ ID NO: 13399 - DNA, 869 bp, Glycine max
acgaccatttgagcctctatatataggtgtctcgtatgctcaaacatgacaagccagtgatagttgctttcagataactgatagttgtgtgcaattatttgaattcaagaatgtctcaacccgactcgttggtggctgagattgaggtgaaaacctctgctgatcacttttacgacaccttgaagggtaagaaacagcatcgtattcatgatgttgcccctcatcatatccataaggtggaagttcatgaaggtgagtgggataaatctggcaatatcaaggtgcttacattcgctgatggggacactgttgagaccttaaaggagagagttgattttgatgatgaaaacaagaagataacctacaccatattggagggtgtcatgttgaagtactataagagctacaaggttatcgttcatgttttaccaaaaggtgatgagcacagccttgtgaagtggactttcttgtatgagaaggtggatcacactgcccctgagccaaccaagtacaaagatttggtggttaaactcaccaagaacgtggaggctcatcttgttgaggctcgttaaaatgatccctaagtggttcacgctaaataaagttgtgatgtgtgtggtgtgttgcatgtggccccttggttaattatcagccattatgtttgctttaaattgccgtgcgtaatatgttgttggttaacttgttaaaaatattggttctcaaccataagttgtgtaatgtgttgttggtttattcaaaatattggccggggatcacagggagggctacatgcctttgtatgtctgtgatttgtaatcttcgaccagctattgattaattgatgttaagggggatttatccttgtttgt

SEQ ID NO: 13400 - protein, 153 aa, Glycine max
MSQPDSLVAEIEVKTSADHFYDTLKGKKQHRIHDVAPHHIHKVEVHEGEWDKSGNIKVLTFADGDTVETLKERVDFDDENKKITYTILEGVMLKYYKSYKVIVHVLPKGDEHSLVKWTFLYEKVDHTAPEPTKYKDLVVKLTKNVEAHLVEAR

SEQ ID NO: 13401 - DNA, 945 bp, Glycine max
aatgtttttcttagtattctagcattttccaaacctcaatataaaacaacaaacttgtaagaaactaagaatagttatttattatctgaagttgcgagagtgaagaaatggcgcaagacttggcattggatttggaggagcttcgccgcctccacagcatcgccaaaagacctcgaaccctctctcttctctcctccgaaattcgtaacctcgaaaagttatcgtcagaggaagcttctgcgcagattccggcgccgatttcgaccggaactaaagtggcgccttcacctgcgctgaagtatgcggcactcgcgtcgttcagttgggaccaggatagtgacaaagttaagatatatgtgttaatggagggaatcgatgagaataaggttgaatccgagtttaagtcgatgtcattcgatgttaagttccatgatgttcaagggaagaactaccgatgtgcaatatcaaaattgcacaatgagatagtaccggagaaatgcaaggttgtggtcaagcctaaaagggcaatcatcacattggtgaaggcttccaaaggaaactggctagatttgcacttcaaagaagacaagcttaagccaaatctggacaaagagaaagacccaatggcgggaattatggacatgatgaagaatatgtatgaggatggggacgatgagatgaagaaaaccattgcaaaagcatggactgatgctagaactgggaaaactgctgaccctttaagtagctaccgttgagcgaccaaaagaggttcagatgcttagttcctgtttctagagaatgatttgctctatttaattacattatcttgttttaaaatgaatgtttggcctgtgttcatggtacttgtagaagattagatgtgcagttattgttaccaaagttatactttgatataatgatgcgattttcgtctgtggttgctcg

SEQ ID NO: 13402 - protein, 215 aa, Glycine max
MAQDLALDLEELRRLHSIAKRPRTLSLLSSEIRNLEKLSSEEASAQIPAPISTGTKVAPSPALKYAALASFSWDQDSDKVKIYVLMEGIDENKVESEFKSMSFDVKFHDVQGKNYRCAISKLHNEIVPEKCKVVVKPKRAIITLVKASKGNWLDLHFKEDKLKPNLDKEKDPMAGIMDMMKNMYEDGDDEMKKTIAKAWTDARTGKTADPLSSYR

SEQ ID NO: 13403 - protein, 130 aa, Glycine max
MEGIDENKVESEFKSMSFDVKFHDVQGKNYRCAISKLHNEIVPEKCKVVVKPKRAIITLVKASKGNWLDLHFKEDKLKPNLDKEKDPMAGIMDMMKNMYEDGDDEMKKTIAKAWTDARTGKTADPLSSYR

SEQ ID NO: 13404 - protein, 115 aa, Glycine max
MSFDVKFHDVQGKNYRCAISKLHNEIVPEKCKVVVKPKRAIITLVKASKGNWLDLHFKEDKLKPNLDKEKDPMAGIMDMMKNMYEDGDDEMKKTIAKAWTDARTGKTADPLSSYR

SEQ ID NO: 13405 - DNA, 1209 bp, Glycine max
aaaaaccgcacacacactctctctttctctctcttcaaatcaaaacccatcacaattcacaacaacatacaaatcccaaatcctatcttttctcttctcatataaaagaacccttctttcgaatccttcccgctcttttccctctgatttaattcatgcgcagatccaaaccctaatccatctctccgagctctttgatttttgagttaataaaaaaaaaaaattagggtttgatggctgaccaaggattggaagggagccagccggtggatctacagaagcatccttctgggatcgtgcctacccttcaaaatattgtgtccacagtcaatttggactgtaagttggacctcaaaacaattgcacttcaagctcgtaatgcagagtacaatcccaagcgttttgctgctgtcattatgaggataagagatcccaaaacaactgcacttatttttgcttctggcaagatggtttgtactggagctaagagtgaacaacagtctaaattggcagcaaggaagtatgctcgtattatccaaaagcttggcttcccagccaaatttaaggatttcaaaattcagaacattgtcggctcttgtgatgtcaagttccccatacggctggagggtcttgcatattcccatggtgctttctcaagttatgaaccagagctgtttccagggctaatctaccgtatgaagcaacctaaaatagttttgcttatatttgtctctggaaaaattgttctaacaggagccaaggtgagagatgagacttacactgcctttgaaaacatatatcccgtgcttactgagttcaggaaaaaccaacaatgattgtaattcaagaaagagcaggagcagtggtttggcagagaagttcgtggaactgtaaatattaagacaaaggatataatctagattgatataaattaaagacagccgtttgtgttgccccttgactttgtttttttgatttgtcttgatgtagtaaagtggcagacgttgtctattgaattgacatttttgaaaaaaaaaaaagaggaaagaggattttgaggtgtcagaaatgaggaaaaaaaagtggagctaaatgggaaaagtagcacattgagtcctgacagtagcttgaaaatgttttgataacttctactatcaattgaccgtagtgtgatctaactactgagtagcattgaatatcttgatcaac

SEQ ID NO: 13406 - protein, 200 aa, Glycine max
MADQGLEGSQPVDLQKHPSGIVPTLQNIVSTVNLDCKLDLKTIALQARNAEYNPKRFAAVIMRIRDPKTTALIFASGKMVCTGAKSEQQSKLAARKYARIIQKLGFPAKFKDFKIQNIVGSCDVKFPIRLEGLAYSHGAFSSYEPELFPGLIYRMKQPKIVLLIFVSGKIVLTGAKVRDETYTAFENIYPVLTEFRKNQQ

SEQ ID NO: 13407 - protein, 139 aa, Glycine max
MRIRDPKTTALIFASGKMVCTGAKSEQQSKLAARKYARIIQKLGFPAKFKDFKIQNIVGSCDVKFPIRLEGLAYSHGAFSSYEPELFPGLIYRMKQPKIVLLIFVSGKIVLTGAKVRDETYTAFENIYPVLTEFRKNQQ

SEQ ID NO: 13408 - protein, 122 aa, Glycine max; identical to SEQ ID NO: 12754

SEQ ID NO: 13409 - DNA, 1725 bp, Glycine max
  misc_feature (775)..(775): n is a, c, g, or t
  misc_feature (842)..(842): n is a, c, g, or t
  misc_feature (850)..(850): n is a, c, g, or t
  misc_feature (860)..(860): n is a, c, g, or t
attttcaagtgataagaaggaagctgacagttggatagcaggaaatgctgccaacatgcacggttcccagtcagtaggtacagacatttggttgggtgatgatgcaaaaatgtctcctgattgggattacagggtgagatcttccagctgtattgaagaaaagcatgaacaaaataagcatgggataacgcagggttttatgtatttagccacctctgaacatgacagaatacaaattgctccaggacaagattttaatcagaatgcagagagttttaatcctttgcattcttcaagctgccaagtagttggacaaactcaagtagcagctcccattctaccttcaaagggtggaattgttgatggtatgctgaaacaggaagtctccactgagaaaaagtacactgctgaaccaaatatcatggatgctgcttatcacaagttagttcaagaaatcctcctccaaccgcgaacgtggtaggcaaagaacagcttgctcagcttaccaatctctcagcctcgctggctcatatcctcgggacagggcaacagctgccacaactttatgctgctttaaattctcatgatgcaaaggacatatcctccctagcaaaaactgaggtgcctgctatgcctgtttccaacacattcatcaggccagatcctactgttggactcctgaagcaatatgatccaatgtgtgacagtgttgagccaaagggtgctgttgcaagtggggtacccccagccattcctccaagtcaaaaagttgcanatgtagtggaaattccgtcacagtccaacacaggaagacaaaattgtggtgattcttccaaggctgntggctcanaagaacttgncaagagtgatcctctaatccagttgcagccaggtcaaaacactggggttaataaggataataacaaggaaatgttacctgaggaaactctaaaatctaaagatgatcctaaaagtaccaaagagagtggtccttttgaaaacatggagcaaactgatggtcctgatgaggcaaagaaaataaagggtatgaaggggaatcgtgcatttaaatttgcattggttgagtttgttaaggagcttctaaaaccaacatggaaagatggtcaaatcaccaaagaagattataaaacaattgtgaagaaagttgttgataaagtaactggttccatgcagggggtcaatattcctcagacacaggagaaaattgatcactatttgtcattttcaaaaccaaagcttaacaaacttgtacaggcgtatgtggaaaaggttcagaaggcttagtgcaattgttgaaatttgactgccaaccctatcgtttatattttactcagcactgttgtcttcaatatgtattctcttctttatctctggatttttttgttttgtcttggccatttgtttgcgtactttagctcctttgcagctattgcatacaaacaatctgggagcattttttgggcctttaatttttttttcttcgtttctttggggaaaattattaggtgtttgtgccattagacaatagttaggcagttatgtgggatttaatttatttttccagtttattgtaattataggagacagctgtttgcttttcagaacagtgagacagaatggaaccaaaacatgctcaagtccaatgcttgattatttcaaactggacggaggaggtttcaatgtctatttttaattataaattct

SEQ ID NO: 13410 - protein, 224 aa, Glycine max
  misc_feature (49)..(49): Xaa can be any naturally occurring amino acid
  misc_feature (71)..(71): Xaa can be any naturally occurring amino acid
  misc_feature (74)..(74): Xaa can be any naturally occurring amino acid
  misc_feature (77)..(77): Xaa can be any naturally occurring amino acid
MPVSNTFIRPDPTVGLLKQYDPMCDSVEPKGAVASGVPPAIPPSQKVAXVVEIPSQSNTGRQNCGDSSKAXGSXELXKSDPLIQLQPGQNTGVNKDNNKEMLPEETLKSKDDPKSTKESGPFENMEQTDGPDEAKKIKGMKGNRAFKFALVEFVKELLKPTWKDGQITKEDYKTIVKKVVDKVTGSMQGVNIPQTQEKIDHYLSFSKPKLNKLVQAYVEKVQKA

SEQ ID NO: 13411 - protein, 202 aa, Glycine max
  misc_feature (27)..(27): Xaa can be any naturally occurring amino acid
  misc_feature (49)..(49): Xaa can be any naturally occurring amino acid
  misc_feature (52)..(52): Xaa can be any naturally occurring amino acid
  misc_feature (55)..(55): Xaa can be any naturally occurring amino acid
MCDSVEPKGAVASGVPPAIPPSQKVAXVVEIPSQSNTGRQNCGDSSKAXGSXELXKSDPLIQLQPGQNTGVNKDNNKEMLPEETLKSKDDPKSTKESGPFENMEQTDGPDEAKKIKGMKGNRAFKFALVEFVKELLKPTWKDGQITKEDYKTIVKKVVDKVTGSMQGVNIPQTQEKIDHYLSFSKPKLNKLVQAYVEKVQKA

SEQ ID NO: 13412 - protein, 159 aa, Glycine max
FSSDKKEADSWIAGNAANMHGSQSVGTDIWLGDDAKMSPDWDYRVRSSSCIEEKHEQNKHGITQGFMYLATSEHDRIQIAPGQDFNQNAESFNPLHSSSCQVVGQTQVAAPILPSKGGIVDGMLKQEVSTEKKYTAEPNIMDAAYHKLVQEILLQPRTW

SEQ ID NO: 13413 - DNA, 1366 bp, Glycine max
gcctaatttacgctttacacccctacacttcccacaatttgttcctggagaagacgccgttccatcacaccctcagcggtcagagcatggcggcggaaccggtgagtgacggcggagccgcggcggagaaattgatcagcgggagagaagaatttggtgattcgtccaacttgttcagcgcgattctagcaatggtgctgtggctgggagctattcatttcaacatcgccctgatcctcctcgccgtgttcttccttcctctctccaaatcgctcttggttttcggttttctctttgggtttatggtgcttcctatcaacgagaagagcagatttggccgaagattgtcgaggttcatatgcaagcacgcttgcaattactttccgatcacgcttcacgtagaggatatgaaagcctttgatcctaaccgtgcttatgtttttgggtatgaaccacattcagtgttgccaattggcattgttgcattggctgaccacacaggtttcatgcctcttccaaaagttaaagttcttgctagcagcacggtgttctacacaccatttttgagacacttatggacatggttgggtcttacaccagcaacaaagaaaaattttatctccctgttagcatctggccatagttgcattttaatacctggtggagtgcaagaagcatttcacatgcagcatggcactgagattgctttccttaaggcaagaagaggatttgtccgcgtagcaatggtgaaaggcaaacctttggttccagtcttctgctttggtcagtcaaatgtctataagtggtggaaaccaggtgggaagttatttctgaaatttgcaagggctatcaagttcaccccaatatgtttttggggaatttttgggtctccattaccgttcagacatccaatgcatgtggttgtgggtagaccaattgaggttgacaaaaaccgagaaccaaccaccgaggaggttgccaagatacatggtctgtttgtggaagcacttcaagatctctttgaaaggcacaaagctcgggctggctatccaaaccttgagttaagaatagtttgacaaggccttaatattgtaccatattttcattggtttattttatttatttattttattccttttggggatggagttggtgaatgaaaatgaccaactatcatcttgggaatgaaatagaataataatgagaaatagggcagtagctacctttcgttagggtatctatttcagttcatggacacatttatatgcctagcctttatatgctggatgttgtcaaagtatttcagtctgggaacctttgccacggctagcagaataataagaaatgataatacaaagtagtggtg

SEQ ID NO: 13414 - protein, 357 aa, Glycine max
LIYALHPYTSHNLFLEKTPFHHTLSGQSMAAEPVSDGGAAAEKLISGREEFGDSSNLFSAILAMVLWLGAIHFNIALILLAVFFLPLSKSLLVFGFLFGFMVLPINEKSRFGRRLSRFICKHACNYFPITLHVEDMKAFDPNRAYVFGYEPHSVLPIGIVALADHTGFMPLPKVKVLASSTVFYTPFLRHLWTWLGLTPATKKNFISLLASGHSCILIPGGVQEAFHMQHGTEIAFLKARRGFVRVAMVKGKPLVPVFCFGQSNVYKWWKPGGKLFLKFARAIKFTPICFWGIFGSPLPFRHPMHVVVGRPIEVDKNREPTTEEVAKIHGLFVEALQDLFERHKARAGYPNLELRIV

SEQ ID NO: 13415 - protein, 329 aa, Glycine max
MAAEPVSDGGAAAEKLISGREEFGDSSNLFSAILAMVLWLGAIHFNIALILLAVFFLPLSKSLLVFGFLFGFMVLPINEKSRFGRRLSRFICKHACNYFPITLHVEDMKAFDPNRAYVFGYEPHSVLPIGIVALADHTGFMPLPKVKVLASSTVFYTPFLRHLWTWLGLTPATKKNFISLLASGHSCILIPGGVQEAFHMQHGTEIAFLKARRGFVRVAMVKGKPLVPVFCFGQSNVYKWWKPGGKLFLKFARAIKFTPICFWGIFGSPLPFRHPMHVVVGRPIEVDKNREPTTEEVAKIHGLFVEALQDLFERHKARAGYPNLELRIV

SEQ ID NO: 13416 - protein, 294 aa, Glycine max
MVLWLGAIHFNIALILLAVFFLPLSKSLLVFGFLFGFMVLPINEKSRFGRRLSRFICKHACNYFPITLHVEDMKAFDPNRAYVFGYEPHSVLPIGIVALADHTGFMPLPKVKVLASSTVFYTPFLRHLWTWLGLTPATKKNFISLLASGHSCILIPGGVQEAFHMQHGTEIAFLKARRGFVRVAMVKGKPLVPVFCFGQSNVYKWWKPGGKLFLKFARAIKFTPICFWGIFGSPLPFRHPMHVVVGRPIEVDKNREPTTEEVAKIHGLFVEALQDLFERHKARAGYPNLELRIV

SEQ ID NO: 13417 - DNA, 945 bp, Glycine max
agagcgagagagaaaaaaatgttggggatcttcagcagttccgtggtgtcgccgccggaggagctggtggctgccggcagcagaacgccgtcgccgaagacgacggcggggaagctgctgaaccggttcgtggagaacaaggcgtcggcggtgtcgctgcaggtgggagaacacgtgcagttggcttacacgcaccacaacgagtcaccgtggcatcccagatcatttgctgttaaggatgagatattctgcttgtttgagggggctctagacaatttgggcagcctgagacaacagtatggactggccaagtcagccaatgaagtggttttggtgattgaggcttacaaagctttacgtgatcgagcaccataccctgccaatcgtgttgtatgccatctcagtgggagctttgctttcatagtttttgacaagtccacttctaccctttttgtggcttctgatcaagctggtaaggttcctctttattggggaattactgctgatggctacgtagcatttgccgatgatgcagatttgcttaaaggtgcttgtggcaagtcacttgcttctttccctcaaggatgtttctactctacagctgttggaggattgatgtgctatgagaatcctaaaaataagattactgcagttcctgctaatgaggaggaaatctggggagcgactttcaaggtggaagggccagcagttgtcgtagccagacaatagattttcctttctgctggtgagatgccatatgatgattagtggaggagactgtaaaaggcatccatgagggccaatgtaattaaatggcatggggagtgatcactggaattgggaaatattaggggtgtaactttgttcattaaatagagaatttgctgtttctatcaatgtacagttacgcttttcaatctaataaagtctggttttggattctct

SEQ ID NO: 13418 - protein, 242 aa, Glycine max
RAREKKMLGIFSSSVVSPPEELVAAGSRTPSPKTTAGKLLNRFVENKASAVSLQVGEHVQLAYTHHNESPWHPRSFAVKDEIFCLFEGALDNLGSLRQQYGLAKSANEVVLVIEAYKALRDRAPYPANRVVCHLSGSFAFIVFDKSTSTLFVASDQAGKVPLYWGITADGYVAFADDADLLKGACGKSLASFPQGCFYSTAVGGLMCYENPKNKITAVPANEEEIWGATFKVEGPAVVVARQ

SEQ ID NO: 13419 - protein, 236 aa, Glycine max
MLGIFSSSVVSPPEELVAAGSRTPSPKTTAGKLLNRFVENKASAVSLQVGEHVQLAYTHHNESPWHPRSFAVKDEIFCLFEGALDNLGSLRQQYGLAKSANEVVLVIEAYKALRDRAPYPANRVVCHLSGSFAFIVFDKSTSTLFVASDQAGKVPLYWGITADGYVAFADDADLLKGACGKSLASFPQGCFYSTAVGGLMCYENPKNKITAVPANEEEIWGATFKVEGPAVVVARQ

SEQ ID NO: 13420 - DNA, 1061 bp, Glycine max
  misc_feature (733)..(733): n is a, c, g, or t
aactgccattacaaatggtgttaggaaaggggcggttctgtgtacatcaacgtgttcacttatgaaccaaactttttggccccattcccatgcttcatcgtcaatggttttgggatgagatggttccatccaagacttaaaagacttcatggcccccatcttgcacacacgtactagtactacacatacacttttttcctttttccaaaatccctttgttgttgtagctacccttcagagcaaagagagagagagagagagagatgtctcttccaagacccagtgagggtaaagccccttctcagctgaaagaaggagtagcacctgctgctgctgaagcctcaacctcttcttcatggaataataggctaaacacttttcctcctttatctctacacaacaagaatagcaaaattgaagacagtgatgaggatatgttcacagttccagatgtggaagccacaccaattaatgttcattctgcagtgactcttcaaaatagtaaccttaatcaacgtaatgtaacagaccctcaatttcaatctggctttcctggaaagcgccgcaggggaagaaatcctgcagataaggaacatagacgcctcaagaggttgttgcggaatagggtctctgctcaacaagcccgcgaaagaaagaaggtttatgtgaatgacttggaatcaagagctaaagagatgcaagataaaaacgctatcttagaagagcgtatctntactttaatcaatgagaacaccatgctgcggaaggtttttatgaatgcgaggccaaaaaatgatgacagcattgaacaaaagcaagaccagttaagtaagagctaacaagcaaagctagagggtgcgtcaaagtaaggcattcaagagatgcatttatgatttattttagacactagaaattataaatttataaatatattattactttatttctttactcgttattatacttccctcaagactatagatttgaattaaaaagaaactttattgtgatgtaaagttttagtcagactatatataaaaagccatttacaatttgtcatt

SEQ ID NO: 13421 - protein, 191 aa, Glycine max
  misc_feature (157)..(157): Xaa can be any naturally occurring amino acid
MSLPRPSEGKAPSQLKEGVAPAAAEASTSSSWNNRLNTFPPLSLHNKNSKIEDSDEDMFTVPDVEATPINVHSAVTLQNSNLNQRNVTDPQFQSGFPGKRRRGRNPADKEHRRLKRLLRNRVSAQQARERKKVYVNDLESRAKEMQDKNAILEERIXTLINENTMLRKVFMNARPKNDDSIEQKQDQLSKS

SEQ ID NO: 13422 - protein, 134 aa, Glycine max
  misc_feature (100)..(100): Xaa can be any naturally occurring amino acid
MFTVPDVEATPINVHSAVTLQNSNLNQRNVTDPQFQSGFPGKRRRGRNPADKEHRRLKRLLRNRVSAQQARERKKVYVNDLESRAKEMQDKNAILEERIXTLINENTMLRKVFMNARPKNDDSIEQKQDQLSKS

SEQ ID NO: 13423 - DNA, 1468 bp, Glycine max
  misc_feature (160)..(160): n is a, c, g, or t
  misc_feature (382)..(382): n is a, c, g, or t
  misc_feature (505)..(505): n is a, c, g, or t
  misc_feature (521)..(521): n is a, c, g, or t
  misc_feature (1222)..(1222): n is a, c, g, or t
  misc_feature (1371)..(1371): n is a, c, g, or t
atctgtgcaagcatgttggattcattaaatgaatgcttacagatctctgggatgcttttggatgaaagccaggtcagatccatcgtggatgagataaaacaggtgatcacagctagttcaagtagaaaacgagagagagcagagaggacccgagctgaanattttgatgctgaagagggggaactgattaaagaggaaaatgaacaagaggaggaagtttttgatcaagtgggtgagatattgggaactttgatcaaaaccttcaaagccaacttcttgcctttctttgatgaactatcatcatatctgacacctatgtggggaagggacaagactccagaagagagaagaattgcaatttgtatttttgatgatgttgcanagcagtgtcgtgaagctgctgttaagtattatgatacctatctcccattcctgttggaggcttgtaatgatgagactcctgatgtcagacaggcagccgtgtatggtctcggtgtttgtgcanagtttggtggatctgngttcaaacctctggttggagaggctctttcgaggttaaatgctgtgatccagcatcctaatgctcttcattcagataatgtaatggcatatgacaatgctgtttccgctttgggaaaaatttgccaatttcatcgtgacagtattgattctgcccaggtagttcctgcatggctaaactgtttgccaataaaaggtgatttgattgaggccaaagttgtgcatgatcaactttgttcaatggctgagaggtctgacagtgagctgttgggcccaaacaatcagtaccttccaaaaatagtttcagtgtttgctgaggttttatgtgctggtaaagaccttgctacagaacaaacagctggtcgtatggttaatttactcagacagctccagcaaactttaccaccctctacactcgcttctacttggtcatctttgcagccgcagcaacaacttgcattgcaatctatcctttctacatagttgtcattgctttgctgcatatccatcatttcttcatagcatctggcttggcagttggtgtcttgctctttttgggaacaagctttttccagtttggtggtctctatatttgtacccattctttttgccataagatggtttccatcattcattcttgcatggtgttctatatcagttttgagaatgcagagtcaattgtgattggaaagggaactttctntagaatgtgtatattatgagtgttaatagtgcgattgagtccaaaagaggaggttagggaattgtggcgtgggaacttctcgttctattcctcaattgttttttcttaccatattgcgtgagaatatagggttgtctgtggggcaattnttgcagttttggcctattgtattggttttatttccttatcagacagcatgaagttgtaccatatgaaattttaatgctatttatttattaagtttgc

SEQ ID NO: 13424 - protein, 333 aa, Glycine max
  misc_feature (54)..(54): Xaa can be any naturally occurring amino acid
  misc_feature (128)..(128): Xaa can be any naturally occurring amino acid
  misc_feature (169)..(169): Xaa can be any naturally occurring amino acid
  misc_feature (174)..(174): Xaa can be any naturally occurring amino acid
ICASMLDSLNECLQISGMLLDESQVRSIVDEIKQVITASSSRKRERAERTRAEXFDAEEGELIKEENEQEEEVFDQVGEILGTLIKTFKANFLPFFDELSSYLTPMWGRDKTPEERRIAICIFDDVAXQCREAAVKYYDTYLPFLLEACNDETPDVRQAAVYGLGVCAXFGGSXFKPLVGEALSRLNAVIQHPNALHSDNVMAYDNAVSALGKICQFHRDSIDSAQVVPAWLNCLPIKGDLIEAKVVHDQLCSMAERSDSELLGPNNQYLPKIVSVFAEVLCAGKDLATEQTAGRMVNLLRQLQQTLPPSTLASTWSSLQPQQQLALQSILST

SEQ ID NO: 13425 - protein, 329 aa, Glycine max
  misc_feature (50)..(50): Xaa can be any naturally occurring amino acid
  misc_feature (124)..(124): Xaa can be any naturally occurring amino acid
  misc_feature (165)..(165): Xaa can be any naturally occurring amino acid
  misc_feature (170)..(170): Xaa can be any naturally occurring amino acid
MLDSLNECLQISGMLLDESQVRSIVDEIKQVITASSSRKRERAERTRAEXFDAEEGELIKEENEQEEEVFDQVGEILGTLIKTFKANFLPFFDELSSYLTPMWGRDKTPEERRIAICIFDDVAXQCREAAVKYYDTYLPFLLEACNDETPDVRQAAVYGLGVCAXFGGSXFKPLVGEALSRLNAVIQHPNALHSDNVMAYDNAVSALGKICQFHRDSIDSAQVVPAWLNCLPIKGDLIEAKVVHDQLCSMAERSDSELLGPNNQYLPKIVSVFAEVLCAGKDLATEQTAGRMVNLLRQLQQTLPPSTLASTWSSLQPQQQLALQSILST

SEQ ID NO: 13426 - protein, 316 aa, Glycine max
  misc_feature (37)..(37): Xaa can be any naturally occurring amino acid
  misc_feature (111)..(111): Xaa can be any naturally occurring amino acid
  misc_feature (152)..(152): Xaa can be any naturally occurring amino acid
  misc_feature (157)..(157): Xaa can be any naturally occurring amino acid
MLLDESQVRSIVDEIKQVITASSSRKRERAERTRAEXFDAEEGELIKEENEQEEEVFDQVGEILGTLIKTFKANFLPFFDELSSYLTPMWGRDKTPEERRIAICIFDDVAXQCREAAVKYYDTYLPFLLEACNDETPDVRQAAVYGLGVCAXFGGSXFKPLVGEALSRLNAVIQHPNALHSDNVMAYDNAVSALGKICQFHRDSIDSAQVVPAWLNCLPIKGDLIEAKVVHDQLCSMAERSDSELLGPNNQYLPKIVSVFAEVLCAGKDLATEQTAGRMVNLLRQLQQTLPPSTLASTWSSLQPQQQLALQSILST

SEQ ID NO: 13427 - DNA, 1478 bp, Glycine max
cagctacgtaggccccccccccagatttgaatttatttaagagagaatcgtatgttgtggaattgggactattaagtaaggttccacatgcaagattggtcccaatcctgggccactgcttggacaatgaaaatgagaaattcatagtttacaagtacatgccaaatcgagatttagctacttccttgcacagagtcaccggttcagatggtaaattacagtccctggattggatcacgagattgaaaattgcaataggagctgctgaaggcatagcttacctacatgagtgcagccctccccttgtccacagagatatccaagctagcagtatactacttgatgataaatttgaagtgcgacttggaagtttgagtgaggttactgcccaaggagatcttcaacaaggagtcatctcaagggttttcagcaagccaccatcttccaatcaagcagattctggtaaatcatcagtgacatgtgcctatgatatctactgttttggcaagattttacttgagctcattaccggtaacattgaagtcagcaagttagatgatgcctctacaaaggagtggttagagcaaaccttgccttacatcactatatacgataaagaacgggtgactaagattattgacccatcattgatcgtggatgaggacctgttggaagaggtatgggctatggcaattgtggccaatgcatgcttgaatcccaagccttccaaacgccctcctatgaggcatgtcctgaaagcattggaaaatccattgaagattgtgagagaagaaaatactagctcagcaaggttgagatcaaactcttctaggaaatcttggagcactgcattctttggtagctggagacacagctcatcagacagtgttgttgccacaaacaaagagggttctagtgacactaaaaaatcaggaaaagtaggttctcaaagtagtggaaacgatcactcttcttccaataaaagatcgtccaatgaaattttccccgaaccattggaaatactagatgtggagacaggagtggcaagataagcacttgtgaaatggatttggttattctttagtctgtgaggttttttttttaccactttctcagataactggtggtgccatagcaattgcttgttattagcacatcaaactcactacccagcatccattatggtccgtattgaagcaatggaaaaccttaatactgctagtgatagcttttgctttccaaagctcagattaagcagtacagattgaaatgtctggtatgagaactccgaaaaaaactgaataattttactcattcaatagattgtttgaaacacacagccctcccctaggttaaaagttgtgtgacaaaatgtaaaataatgagagggttttcatttttacgagtaattgtaggtgggaaaaacgttgttactcactcgaggttttctttggtaggttatatgtatttagcattgt

SEQ ID NO: 13428 - protein, 297 aa, Glycine max
MPNRDLATSLHRVTGSDGKLQSLDWITRLKIAIGAAEGIAYLHECSPPLVHRDIQASSILLDDKFEVRLGSLSEVTAQGDLQQGVISRVFSKPPSSNQADSGKSSVTCAYDIYCFGKILLELITGNIEVSKLDDASTKEWLEQTLPYITIYDKERVTKIIDPSLIVDEDLLEEVWAMAIVANACLNPKPSKRPPMRHVLKALENPLKIVREENTSSARLRSNSSRKSWSTAFFGSWRHSSSDSVVATNKEGSSDTKKSGKVGSQSSGNDHSSSNKRSSNEIFPEPLEILDVETGVAR

SEQ ID NO: 13429 - DNA, 1763 bp, Glycine max
  misc_feature (178)..(178): n is a, c, g, or t
  misc_feature (1755)..(1755): n is a, c, g, or t
  misc_feature (1760)..(1760): n is a, c, g, or t
ttgatttctccatatttaccaaagaaatagtagaatggagtagaggacatgggtaaaaaaattgtcactcaagaatcaccaagagagctggggaagcaagtagattacagttagtggaagctataatccaagttttggaagacaacaccgcgagtgagactcatgaatgggaactagngaaattgaaatcatatgccttgatttctccatatttaccaaagaaataatagaatggaatagaaaggccttcaagaggatgtaaaacctcaaacacttaatattagaaatggcaaattttccaaaggtcccagataccttccaaatagtttgagaatattggaatggtggagatatccttcgaattgtttaccatctgattttaatccgaaaaaacttgtcatatgcaagtcacccaatagttgctttacgtcatctgagttggatggcttatccaaggcaagtttaaagagtacattttcctcaccacggaatattttcctcatggatctactcgacattccgtaatgagtgagcttttgtatccgtatcgaagaatccggttatctactcggcagctattgaatcagcaaccgctggtacagtaagcggtgttcaaatagccgttgttgggatcttctccgctgctagctcttcttcttactaggttttgcttagcaagcatcttcagaaaattagagggattccgccaaatttaaggtttttctttgcaataaactgtaaatccttgacttccttgggtacaagcatgttcctaaatcaggaactgcatgaggctgctggaaccactgtgtttcatttcccggaagcaaggattctagagtggtttgatcaccaaagcagggcaccttcaagttctttctcttgttattgcacctgtgggtaataacagttctggattgtttagtcccaaacccatggtgttcatcaatgtcaaagctcatgaatctgtcattagttggggtgatgaaatggttacatatgtgggtgtgataaagacttcaatccttaaagcaagcggagtccatgtaatcaaacaggaaagaagcacggaggatattcaatttgctggactagagtgttcatttggggtgcatgtaggagttcaaattgttgtttcagtggtgacaaaaaaaacaaatttgcttgtgttcgagaaactgaatgctataggattgtgaattagtagtaaattattttcacttcatactttgaaatagcatattcagcttaatagtaatcctaataggctgtgaaattgtttgaagaaatgggaaaatgggtattagtaatattggatagtgaagacaatcgttttgtttataaagtgttttgagagacaggaacttgttggttgtttggaagattcataatttcttttcccttctttaaaatgggagaaatgagaaactattatcagtagacgtggcagcatctggagcagtgtaagcatatttttcgtgggcatgttgctttgaagttccattagttatgggaaaagcatttttaatgtctcagtcaatacatatttacatcatctgaaacttttttttcttttgcaggttcaagtttttccttctaattgctagtatgatcagactgctggctatgataaataatttgatcaggaaggaggaagacttaaaccagttaaactttgtaaatataatgcttaggttttatcatactactacatcaactgcttacgacacttaggtagaaaattattacatttgngttgntgt

SEQ ID NO: 13430 - protein, 87 aa, Glycine max
MVFINVKAHESVISWGDEMVTYVGVIKTSILKASGVHVIKQERSTEDIQFAGLECSFGVHVGVQIVVSVVTKKTNLLVFEKLNAIGL

SEQ ID NO: 13431 - protein, 69 aa, Glycine max
MVTYVGVIKTSILKASGVHVIKQERSTEDIQFAGLECSFGVHVGVQIVVSVVTKKTNLLVFEKLNAIGL

SEQ ID NO: 13432 - protein, 45 aa, Glycine max
MFLNQELHEAAGTTVFHFPEARILEWFDHQSRAPSSSFSCYCTCG

SEQ ID NO: 13433 - DNA, 1372 bp, Glycine max
accttaaacttttgcattgacattgcaaactgtttttctctcttagcttaaaagttctctcttgctatccctcctccattaaccccattaataataagcaccatcaatttccttaattgcttcatatataggaaaatacaatgaccaagatctttgtgctgttatgtctgctcttcttagcttcttctgggtttgtccatggctcttctaagaaggatcatattaggttatttgagctcaagaaaggtgatttttctataaaggtcaccaattggggtgcaacacttgtgtccgtaatacttcccgataagaatgggaagttgggtgatattgttcttggatatgattctcccaaggcatacacaaatgatacatcatactttggagctactgtgggccgggttgctaacagaattggaggagctcagttcactctaaatggaatccattacaaattagttgctaatgaaggaaacaacacacttcattctggacccaaagcattcagtgatgttctttggaaagtgacaaggtacataaaagatgatgacaaacccagaatcaccttcagttatcacagttatgatggtgaaggaggatttcctggggacctcctagtaactgtgagctacattcttgggaaaaactcattaagcataatcatgaaagcaaaagctctgaacaagcctaccccagtgaacatggtgaaccatgcttactggaacctaggaaaccacaacagtggcaacattctagatgaagtggttcagatctttggatcccaagtcacactatttgatgacaatctcattcccacaggccaatatgcctcagttagaggaaccccaaatgatttccttgagccacacattgttggagaaaggatcaaccaattgcctaagacaaatggctataacatcaactatgtgcttgatggtgaaaaaggcaatgcagagattaagctggcagctatagcggtggataagaagtcagggagagtgatgaagctcttcacaaatgctcctggtttgcagttttacactgctaattttgtcaagaatgacaagggaaaaggagggtttgtttatcagccacgttcagcactttgtttggagagtcaagcatttcctgactccgtgaatcaccctaattttccatcaactattgtgaccccagataagccttacaagcatgtcatgttgcttaagttttccaccaaagttccatatgctttttcacagttctaattagaattgtgtgctttgatgaaccactttttatgtgtttggtatcaatgtatagcacgactctttttgtgctcttgcaaaacttggcttgggttcattaaaatgaataatgagatattttaatt

SEQ ID NO: 13434 - protein, 368 aa, Glycine max
MTKIFVLLCLLFLASSGFVHGSSKKDHIRLFELKKGDFSIKVTNWGATLVSVILPDKNGKLGDIVLGYDSPKAYTNDTSYFGATVGRVANRIGGAQFTLNGIHYKLVANEGNNTLHSGPKAFSDVLWKVTRYIKDDDKPRITFSYHSYDGEGGFPGDLLVTVSYILGKNSLSIIMKAKALNKPTPVNMVNHAYWNLGNHNSGNILDEVVQIFGSQVTLFDDNLIPTGQYASVRGTPNDFLEPHIVGERINQLPKTNGYNINYVLDGEKGNAEIKLAAIAVDKKSGRVMKLFTNAPGLQFYTANFVKNDKGKGGFVYQPRSALCLESQAFPDSVNHPNFPSTIVTPDKPYKHVMLLKFSTKVPYAFSQF

SEQ ID NO: 13435 - protein, 194 aa, Glycine max
MKAKALNKPTPVNMVNHAYWNLGNHNSGNILDEVVQIFGSQVTLFDDNLIPTGQYASVRGTPNDFLEPHIVGERINQLPKTNGYNINYVLDGEKGNAEIKLAAIAVDKKSGRVMKLFTNAPGLQFYTANFVKNDKGKGGFVYQPRSALCLESQAFPDSVNHPNFPSTIVTPDKPYKHVMLLKFSTKVPYAFSQF

SEQ ID NO: 13436 - DNA, 1396 bp, Glycine max
  misc_feature (1317)..(1317): n is a, c, g, or t
cttttccctcactttgtggcgccccaacgctcacggcggtcaccaccaccattcctccactctccaacctctcgccaatcgcaaccagaagttctcccatcacattcgtgcttcacccttggaggaatgggaagggaggatgaatgttggcatgtctaattctgtgaccacagcaattcgtggaagtgttcgagacatggccattgggaagactaaaactactgagaaagcagaccgggctactgttgagcaggcaattgatcctagaactcgcatggttttatttaagatgctgaacagaggtgtctttcatgatatcaatggatgcatttcaactggaaaggaagcaaatgtttatcatgcaactaaatctgatggtcaagaacttgcaattaaagtatacaaaacatctgttttggtattcaaggatagagatagatatgtgcaaggagacttccgatttcgaaatggatactgcaagcataatcccaggaaaatggtaaaaacatgggcagagaaagaaatgagaaatcttatgaggcttaaggcagcaggaattaggtgtcctacgccatatcttctgaggctacatgttctggttatggaatttataggaaaatctggttgggctgcccctcgtcttaaagatgcagctttatctttagacaagttgcgggaaggctatgttgagattattattgcaatgcggacattgtatcagaaatgcaaattggtgcacggtgatctcagtgaatataatatactttattttgagggtcacttgtacattattgatgtttctcaagctgttgatcctgaacatcctcatgcccttgattttctgcgtgaagattgcgttcatgtgtctgacttctttaaaaagcatggtgtagcagtcatgacaataagagaattgtttgaatttattgtcgatgcatccattactgatgatgccgtggatagttacttggaagagatgcaacaaaaaattttgacgaggggagatatatctgcagaggatgagattgcagactctgtatttgtgcagtcctatattccgaagacactagaggatgtgaagaatgctgaggaggatgtacaacggataacaagtgggaaggacaccaaagatttatactatcagaccattactggacttaaacatgctctgtcattaacacagccttcccagcaaaaaacccaacagaaatcaagtcccacaaaggattcaccggctgtttctgatgataaatctaaactcttagaggatgatgctgagggtcaatctgacgaggatgaagatgatgaaagcaattntgaagaggattcaccctcagaaagtgaagtagatgatcctgcagataaaaaagctgctagaaaagaggttaggaaagag

SEQ ID NO: 13437 - protein, 465 aa, Glycine max
  misc_feature (439)..(439): Xaa can be any naturally occurring amino acid
FSLTLWRPNAHGGHHHHSSTLQPLANRNQKFSHHIRASPLEEWEGRMNVGMSNSVTTAIRGSVRDMAIGKTKTTEKADRATVEQAIDPRTRMVLFKMLNRGVFHDINGCISTGKEANVYHATKSDGQELAIKVYKTSVLVFKDRDRYVQGDFRFRNGYCKHNPRKMVKTWAEKEMRNLMRLKAAGIRCPTPYLLRLHVLVMEFIGKSGWAAPRLKDAALSLDKLREGYVEIIIAMRTLYQKCKLVHGDLSEYNILYFEGHLYIIDVSQAVDPEHPHALDFLREDCVHVSDFFKKHGVAVMTIRELFEFIVDASITDDAVDSYLEEMQQKILTRGDISAEDEIADSVFVQSYIPKTLEDVKNAEEDVQRITSGKDTKDLYYQTITGLKHALSLTQPSQQKTQQKSSPTKDSPAVSDDKSKLLEDDAEGQSDEDEDDESNXEEDSPSESEVDDPADKKAARKEVRKE

SEQ ID NO: 13438 - protein, 419 aa, Glycine max
  misc_feature (393)..(393): Xaa can be any naturally occurring amino acid
MNVGMSNSVTTAIRGSVRDMAIGKTKTTEKADRATVEQAIDPRTRMVLFKMLNRGVFHDINGCISTGKEANVYHATKSDGQELAIKVYKTSVLVFKDRDRYVQGDFRFRNGYCKHNPRKMVKTWAEKEMRNLMRLKAAGIRCPTPYLLRLHVLVMEFIGKSGWAAPRLKDAALSLDKLREGYVEIIIAMRTLYQKCKLVHGDLSEYNILYFEGHLYIIDVSQAVDPEHPHALDFLREDCVHVSDFFKKHGVAVMTIRELFEFIVDASITDDAVDSYLEEMQQKILTRGDISAEDEIADSVFVQSYIPKTLEDVKNAEEDVQRITSGKDTKDLYYQTITGLKHALSLTQPSQQKTQQKSSPTKDSPAVSDDKSKLLEDDAEGQSDEDEDDESNXEEDSPSESEVDDPADKKAARKEVRKE

SEQ ID NO: 13439 - protein, 415 aa, Glycine max
  misc_feature (389)..(389): Xaa can be any naturally occurring amino acid
MSNSVTTAIRGSVRDMAIGKTKTTEKADRATVEQAIDPRTRMVLFKMLNRGVFHDINGCISTGKEANVYHATKSDGQELAIKVYKTSVLVFKDRDRYVQGDFRFRNGYCKHNPRKMVKTWAEKEMRNLMRLKAAGIRCPTPYLLRLHVLVMEFIGKSGWAAPRLKDAALSLDKLREGYVEIIIAMRTLYQKCKLVHGDLSEYNILYFEGHLYIIDVSQAVDPEHPHALDFLREDCVHVSDFFKKHGVAVMTIRELFEFIVDASITDDAVDSYLEEMQQKILTRGDISAEDEIADSVFVQSYIPKTLEDVKNAEEDVQRITSGKDTKDLYYQTITGLKHALSLTQPSQQKTQQKSSPTKDSPAVSDDKSKLLEDDAEGQSDEDEDDESNXEEDSPSESEVDDPADKKAARKEVRKE

SEQ ID NO: 13440 - DNA, 2328 bp, Glycine max
  misc_feature (349)..(349): n is a, c, g, or t
  misc_feature (431)..(431): n is a, c, g, or t
gaataatcactcaatacaatacaaaaccccaaattcagaatttacgattattttcacttcatttgattccttttctttatcttaggtctcacacactagatccatttttgaaggaacttccactttttctcaggtgatgtaataattataataataataagccttgcaggaactgtaatggctcacagcagctctgatgaggatactgatattagtgaatctgaaattagtgagtatgaagataaatcctatgaagaactgaaaagtggaagccaggatgtgaaaacatcggatgagactttcacttgtccctactggcctaaaaagagaaaacgggattatttatacnaggagctccttcaacatgcttctggggtgggtcagagtagttcccaaaagagaaaagcaagagacaaggctaatcatttggntttactgaaatatttggaaaaggatctcatgaatgtagatgttccatcaaatgattcaaaacctgaagatgaaagtgatccttctgttaattctaatgatcagtttgtgtggccttggattggagttgtagttaatattccaactagacggacagaagatggacgctgtgttggtgagagcggttccaggctgagggatgagtacagaagcaggggtttcaatccatttcgagtcaatcctttgtggaatttccgtggccactctggaactgctcttgtggaattcaataaaaactggccaggcttacataatgcattggcatttgaaagagcatatgaattagatcatcatggaaaaaaggattggtttactaattctgggctgaagtctggcctttatgcatgggttgcccgggcagatgactacaagatcaatagtatctatggagaacatctgcgaaggatgggcgatgtcaaaaccatatctgagcttatggaagaagaagctcgaaggcaagataagcttgtctcgaatttaactaacattattcaggtaaaaaataagcacttaaaagagatagaagtgagatgccacgagactacagacaaaatgaaccttgttatgaaggataaagatcaactcattcaagcttataatgaagagatacagaaaatacagttaagtgccagggatcacttccaaaggatttttactgaccatgaaaagctcaaattgcaactggaatctcacaaaaatgagcttgagttgcggaaagttgaattggaaaaacgcgaagcacataacgaaagtgaaaggaaaaagttggcagaggaaattgaggagaatgcatcgaaaaatagctctcttcagatggctgctttagagcaaatgaaagctgatgaaaatgttatgaaactggctgaagatcaaaagaggcaaaaagaacaactccatgctaaaatcattcagcttcaaaaacaacttgatgtgaaacaagagctggagttggagattcagcaattaaaaggttcattaagtgtgttgaagcacatggaagatgacgaagatgctgaaattctgaacaaggtagatacactacaaaaggatttaagagacaaggagcagtcacttcaagacttagatgcattgaaccaaacactaatcattaaagagcgcgagagtaatgatgagctgcaggaagctcgacaggcattggttgatgccattaaagagttacaatctcatggaaatattcgtttgaagagaatgggggaacttgatactagaccattccttgaagcaatgaagcaaagatataatgaggaggatgctgaagagagagcttcagagctgtgttcattgtgggaagaatatctaaaggacccagattggcatccattcaaagttatcatggttgaaggaaaagaaaaggaaattattagagatgacgatgaaaagctgaatgggttgaaaaatgacttgggtgaaggggcatataaagcagtggtggaagctttgttagaaataaatgaacataatcctagtgggcgatacttaacctcggtgttatggaactataaacaaggaagaagagcaactctgaaagaaggagtacaatttatatcgaatcaatggaaagtccttaaacgcaagaagggaatgacatgaaggttgatgttggttttggcgagagaattatgcattgcagcctggtagcatgcatccgtattgggagagcagcaaacctagcggttgtgttttaggttaagtgatttatgataatgtcaagctatttaatttcacttggcactttgtaatcttgtgtggccgaagacattgaagttaaacttgtatatgactatatcatttggcttttaattttaacatgcttctttg

SEQ ID NO: 13441 - protein, 640 aa, Glycine max
  misc_feature (58)..(58): Xaa can be any naturally occurring amino acid
  misc_feature (85)..(85): Xaa can be any naturally occurring amino acid
MAHSSSDEDTDISESEISEYEDKSYEELKSGSQDVKTSDETFTCPYWPKKRKRDYLYXELLQHASGVGQSSSQKRKARDKANHLXLLKYLEKDLMNVDVPSNDSKPEDESDPSVNSNDQFVWPWIGVVVNIPTRRTEDGRCVGESGSRLRDEYRSRGFNPFRVNPLWNFRGHSGTALVEFNKNWPGLHNALAFERAYELDHHGKKDWFTNSGLKSGLYAWVARADDYKINSIYGEHLRRMGDVKTISELMEEEARRQDKLVSNLTNIIQVKNKHLKEIEVRCHETTDKMNLVMKDKDQLIQAYNEEIQKIQLSARDHFQRIFTDHEKLKLQLESHKNELELRKVELEKREAHNESERKKLAEEIEENASKNSSLQMAALEQMKADENVMKLAEDQKRQKEQLHAKIIQLQKQLDVKQELELEIQQLKGSLSVLKHMEDDEDAEILNKVDTLQKDLRDKEQSLQDLDALNQTLIIKERESNDELQEARQALVDAIKELQSHGNIRLKRMGELDTRPFLEAMKQRYNEEDAEERASELCSLWEEYLKDPDWHPFKVIMVEGKEKEIIRDDDEKLNGLKNDLGEGAYKAVVEALLEINEHNPSGRYLTSVLWNYKQGRRATLKEGVQFISNQWKVLKRKKGMT

SEQ ID NO: 13442 - protein, 546 aa, Glycine max
MNVDVPSNDSKPEDESDPSVNSNDQFVWPWIGVVVNIPTRRTEDGRCVGESGSRLRDEYRSRGFNPFRVNPLWNFRGHSGTALVEFNKNWPGLHNALAFERAYELDHHGKKDWFTNSGLKSGLYAWVARADDYKINSIYGEHLRRMGDVKTISELMEEEARRQDKLVSNLTNIIQVKNKHLKEIEVRCHETTDKMNLVMKDKDQLIQAYNEEIQKIQLSARDHFQRIFTDHEKLKLQLESHKNELELRKVELEKREAHNESERKKLAEEIEENASKNSSLQMAALEQMKADENVMKLAEDQKRQKEQLHAKIIQLQKQLDVKQELELEIQQLKGSLSVLKHMEDDEDAEILNKVDTLQKDLRDKEQSLQDLDALNQTLIIKERESNDELQEARQALVDAIKELQSHGNIRLKRMGELDTRPFLEAMKQRYNEEDAEERASELCSLWEEYLKDPDWHPFKVIMVEGKEKEIIRDDDEKLNGLKNDLGEGAYKAVVEALLEINEHNPSGRYLTSVLWNYKQGRRATLKEGVQFISNQWKVLKRKKGMT

SEQ ID NO: 13443 - protein, 401 aa, Glycine max
MGDVKTISELMEEEARRQDKLVSNLTNIIQVKNKHLKEIEVRCHETTDKMNLVMKDKDQLIQAYNEEIQKIQLSARDHFQRIFTDHEKLKLQLESHKNELELRKVELEKREAHNESERKKLAEEIEENASKNSSLQMAALEQMKADENVMKLAEDQKRQKEQLHAKIIQLQKQLDVKQELELEIQQLKGSLSVLKHMEDDEDAEILNKVDTLQKDLRDKEQSLQDLDALNQTLIIKERESNDELQEARQALVDAIKELQSHGNIRLKRMGELDTRPFLEAMKQRYNEEDAEERASELCSLWEEYLKDPDWHPFKVIMVEGKEKEIIRDDDEKLNGLKNDLGEGAYKAVVEALLEINEHNPSGRYLTSVLWNYKQGRRATLKEGVQFISNQWKVLKRKKGMT

SEQ ID NO: 13444 - DNA, 1672 bp, Glycine max
  misc_feature (934)..(934): n is a, c, g, or t
  misc_feature (966)..(966): n is a, c, g, or t
  misc_feature (997)..(997): n is a, c, g, or t
  misc_feature (1072)..(1072): n is a, c, g, or t
tcatatatctgagaatgataaaatggatgaagacactgaggttaaggaaacaattgaaggtaaacaagaaaatgaaaaagtgcaagctgagaaaccagaagtagatgctatggaagtagagggtggcattcaggaggaggagagtgatgaaaaggagaaaaaagatgtggcgatggaggaggatgaagatgaggataaggacaatattgataagtcaaaagaagaagagaagacagaagatagtaagggtaagaaaggatcaaaaaaacgtgggagagggaaaatcgatggggagaaagtgaaagaaaaaagaaaggaaccaaagaaaacagagccaaggactcctactattgatcgccctgtgcgggaaaggaagtcagtggagaggttggtagcatcaattgataaagatgcaaccaaagaatttcacattgaaaagggtcgtggtacacctttaaaaaatataccaaatgtggcatttaagttatctagaaggaagactgatgataccttcaaattgctccatacaattctctttggaaggagagggaaggcagttgagatcaagagtaatatattaaggttttctggtttcgtgtggcgtgacaatgaggaaaagcaaatgattaaagtaaaagaaaaacttgacaagtgtaataaagagaagttactggaattctgtgatgtgcttgacataacaattaacaaggcaacatcgaggaaggaagatattattgctaagcttatagattttttagttgcccctcatgcaaccacaactgtgttacttgcagaaaaagagaagcccagtaagggaacaaagcgcaagcgtgttgtaaaatggggttcatcaagatctgggacaacttcaagacgttctgtgaagagtcagaagaaaaatgaagattctaccgtagtgcggagaaagagtgcntctgacacagatgagtcagaggaagacaaganagatgaagaaaacgaggaaaatgaaaatggnggttgctgacaaatctgaggatgaaacaccagagaaatctgaaagtgaagacaaaagtgattctgggagtgaatntgaagatataaaagaaaagaaaaaacattctaaaacatcatccacaaagaaagaatctgctaagaaaagtaaaattgagaaaattgcagttcctaataaatctcgctcaccaccaaaaagagcacctaagaaaccatcattcaacctctcaaagtctgatgaggatagtgatgaaagtccaaaggtattttcaaggaagaagaaaaatgagaaaggaggaaagcaaaagacgtcaacaccgactaagtctgcctccgaagagaaaactgaaaaggttactagaggaaaaggcaagaagaaagagaagtcgaggcccagtgataatcagttgcgtgatgcgatatgtgaaattcttaaagaagttgacttcaatacggccacatttaccgacattctgaagaaacttgctaaacaatttgatatggatctcactccgagaaaggcatctataaaattcatgattcaggaagagctgacaaaactagctgatgaagcaaacgacgacggagaagaggatgctgagaaagatgaagccccatctacaggccaagaggttgaagcctgattgaagagtagacttgactgcttggagataggttt

SEQ ID NO: 13445 - protein, 334 aa, Glycine max
  misc_feature (311)..(311): Xaa can be any naturally occurring amino acid
  misc_feature (322)..(322): Xaa can be any naturally occurring amino acid
  misc_feature (332)..(332): Xaa can be any naturally occurring amino acid
HISENDKMDEDTEVKETIEGKQENEKVQAEKPEVDAMEVEGGIQEEESDEKEKKDVAMEEDEDEDKDNIDKSKEEEKTEDSKGKKGSKKRGRGKIDGEKVKEKRKEPKKTEPRTPTIDRPVRERKSVERLVASIDKDATKEFHIEKGRGTPLKNIPNVAFKLSRRKTDDTFKLLHTILFGRRGKAVEIKSNILRFSGFVWRDNEEKQMIKVKEKLDKCNKEKLLEFCDVLDITINKATSRKEDIIAKLIDFLVAPHATTTVLLAEKEKPSKGTKRKRVVKWGSSRSGTTSRRSVKSQKKNEDSTVVRRKSXSDTDESEEDKXDEENEENENXGC

SEQ ID NO: 13446 - protein, 327 aa, Glycine max
  misc_feature (304)..(304): Xaa can be any naturally occurring amino acid
  misc_feature (315)..(315): Xaa can be any naturally occurring amino acid
  misc_feature (325)..(325): Xaa can be any naturally occurring amino acid
MDEDTEVKETIEGKQENEKVQAEKPEVDAMEVEGGIQEEESDEKEKKDVAMEEDEDEDKDNIDKSKEEEKTEDSKGKKGSKKRGRGKIDGEKVKEKRKEPKKTEPRTPTIDRPVRERKSVERLVASIDKDATKEFHIEKGRGTPLKNIPNVAFKLSRRKTDDTFKLLHTILFGRRGKAVEIKSNILRFSGFVWRDNEEKQMIKVKEKLDKCNKEKLLEFCDVLDITINKATSRKEDIIAKLIDFLVAPHATTTVLLAEKEKPSKGTKRKRVVKWGSSRSGTTSRRSVKSQKKNEDSTVVRRKSXSDTDESEEDKXDEENEENENXGC

SEQ ID NO: 13447 - protein, 298 aa, Glycine max
  misc_feature (275)..(275): Xaa can be any naturally occurring amino acid
  misc_feature (286)..(286): Xaa can be any naturally occurring amino acid
  misc_feature (296)..(296): Xaa can be any naturally occurring amino acid
MEVEGGIQEEESDEKEKKDVAMEEDEDEDKDNIDKSKEEEKTEDSKGKKGSKKRGRGKIDGEKVKEKRKEPKKTEPRTPTIDRPVRERKSVERLVASIDKDATKEFHIEKGRGTPLKNIPNVAFKLSRRKTDDTFKLLHTILFGRRGKAVEIKSNILRFSGFVWRDNEEKQMIKVKEKLDKCNKEKLLEFCDVLDITINKATSRKEDIIAKLIDFLVAPHATTTVLLAEKEKPSKGTKRKRVVKWGSSRSGTTSRRSVKSQKKNEDSTVVRRKSXSDTDESEEDKXDEENEENENXGC

SEQ ID NO: 13448 - DNA, 956 bp, Glycine max
  misc_feature (882)..(882): n is a, c, g, or t
  misc_feature (886)..(886): n is a, c, g, or t
  misc_feature (902)..(902): n is a, c, g, or t
  misc_feature (906)..(906): n is a, c, g, or t
agttcatcttttcaacggcattagatggaaagataaaagcatggttgtatgataatttgggatctcgtgttgattatgaagctcctggacgatggtgtacaaccatggcctatagtgctgatggtacaagactcttctcatgtgggacaagtaaggaaggggaatcctctattgttgagtggaatgaaagtgaaggagctgtgaaaaggacttatcaaggatttcggaaacgatctttgggtgttgtacaatttgatacaaccaaaaatcgatatttggctgcaggcgatgatttctccattaaattctgggatatggacaatattcagcttttgacaactgttgatgctgatgggggtctccctgcaagcccacgaatccgttttaacaaggatggagctcttttagctgtttctgcaaatgagaatggaattaaaatcttagccaatgcagatggtattcgtttgttacgcacattagaaaattctttatatgatacatcaagaacatcggaagccttgacaaagcctataattaatccaatttctgctgctgccgctgctgcaaccagtgctgcactggcagagagggcttcatctgtagtagctattgctggaatgaatggggatacccgaaacttgggtgatgttaaacctagaataagtgaagaatctaatgacaagtcaaagatatggaagctcactgaaatcaacgaacaatctcaatgtagatccttgaagctaccggagaatgtaagagtaaccaagatatcaaggttgatatatacaaattcaggtaatgctattctggcattagcatcaaatgccattcacctactctggaaatggcagcgaaatgagcgtaactcatctggcaaggccnctgntaccttgcagcctcanttgnggcaaccatcgagtggcatcctgatgacaaatgacattgctgatagcaat

SEQ ID NO: 13449 - protein, 318 aa, Glycine max
  misc_feature (294)..(295): Xaa can be any naturally occurring amino acid
  misc_feature (300)..(300): Xaa can be any naturally occurring amino acid
  misc_feature (302)..(302): Xaa can be any naturally occurring amino acid
FIFSTALDGKIKAWLYDNLGSRVDYEAPGRWCTTMAYSADGTRLFSCGTSKEGESSIVEWNESEGAVKRTYQGFRKRSLGVVQFDTTKNRYLAAGDDFSIKFWDMDNIQLLTTVDADGGLPASPRIRFNKDGALLAVSANENGIKILANADGIRLLRTLENSLYDTSRTSEALTKPIINPISAAAAAATSAALAERASSVVAIAGMNGDTRNLGDVKPRISEESNDKSKIWKLTEINEQSQCRSLKLPENVRVTKISRLIYTNSGNAILALASNAIHLLWKWQRNERNSSGKAXXTLQPXLXQPSSGILMTNDIADSN

SEQ ID NO: 13450 - protein, 284 aa, Glycine max
  misc_feature (260)..(261): Xaa can be any naturally occurring amino acid
  misc_feature (266)..(266): Xaa can be any naturally occurring amino acid
  misc_feature (268)..(268): Xaa can be any naturally occurring amino acid
MAYSADGTRLFSCGTSKEGESSIVEWNESEGAVKRTYQGFRKRSLGVVQFDTTKNRYLAAGDDFSIKFWDMDNIQLLTTVDADGGLPASPRIRFNKDGALLAVSANENGIKILANADGIRLLRTLENSLYDTSRTSEALTKPIINPISAAAAAATSAALAERASSVVAIAGMNGDTRNLGDVKPRISEESNDKSKIWKLTEINEQSQCRSLKLPENVRVTKISRLIYTNSGNAILALASNAIHLLWKWQRNERNSSGKAXXTLQPXLXQPSSGILMTNDIADSN

SEQ ID NO: 13451 - protein, 214 aa, Glycine max
  misc_feature (190)..(191): Xaa can be any naturally occurring amino acid
  misc_feature (196)..(196): Xaa can be any naturally occurring amino acid
  misc_feature (198)..(198): Xaa can be any naturally occurring amino acid
MDNIQLLTTVDADGGLPASPRIRFNKDGALLAVSANENGIKILANADGIRLLRTLENSLYDTSRTSEALTKPIINPISAAAAAATSAALAERASSVVAIAGMNGDTRNLGDVKPRISEESNDKSKIWKLTEINEQSQCRSLKLPENVRVTKISRLIYTNSGNAILALASNAIHLLWKWQRNERNSSGKAXXTLQPXLXQPSSGILMTNDIADSN

SEQ ID NO: 13452 - DNA, 1118 bp, Glycine max
atgcaaataaatatataccctgtcttgtgccgtgtcccctttaagccaattgcaatcaaacaaagtttcggttattggtgttcatttttcttcctccatctttctctaaaacattaattgaactctccattccttaaattttaccaacgagctagttccgacacagacaaagcaatggcaaagactgagttagaggtgactgttgagagcaagaacaaagaactaaagcacctgggatttgtgaggattgctgctattcaaacttttgtgattgtgtcaaatctgtatgagtacgcaaagcagaattctgggcctttgagatccgctgttggaacggttgagaacactgtaaccaccgttcttggtcctgtctgcaacaaattcaaggacttccctgatgatgtcctggtttatgttgacaaaaaggtggatgaagcttcccacaagttcgatgagcatgctccttcctttgccaagcaccttgcggatcaagccaagggtgtgattcagaaagtgacttgtgaggcagggaaagttgcaagtgaagctcaatctggggggtcaagagctgctgttcattttgttgctacagagtcaaagcattttgtgttgataaattcggtgaagttgtggaatggactcacccactatccaccattccatgcattggcagagatagcagttcccactgctgctcactggtcagagaagtacaaccatgtgatcaaggccatgactcaaaagggttatagtttcatcgggtatctacctttgattcccgttgaagagatagccaaggcattcaaacagggagaggcgaacttaaaaggagataatgcagcctctgaggaacaaagattagaatctgcatctgattctgattaaattcagctttacttcttcaaaaaaatttgcttatgagtgaacttgttttgtgggttgtgacattctaggcaatgtggtggttgtgactagacatacttttaagcttgttaagcatggtaagactatgtaattaatccatgtagaagatacgatttatgtaaatggtgcggataatgctcataaaggttgcttcctccttttgtatgcatataaaatattgcttagtgctcttc

SEQ ID NO: 13453 - protein, 236 aa, Glycine max
MAKTELEVTVESKNKELKHLGFVRIAAIQTFVIVSNLYEYAKQNSGPLRSAVGTVENTVTTVLGPVCNKFKDFPDDVLVYVDKKVDEASHKFDEHAPSFAKHLADQAKGVIQKVTCEAGKVASEAQSGGSRAAVHFVATESKHFVLINSVKLWNGLTHYPPFHALAEIAVPTAAHWSEKYNHVIKAMTQKGYSFIGYLPLIPVEEIAKAFKQGEANLKGDNAASEEQRLESASDSD

SEQ ID NO: 13454 - DNA, 1541 bp, Glycine max
  misc_feature (1502)..(1502): n is a, c, g, or t
  misc_feature (1512)..(1512): n is a, c, g, or t
  misc_feature (1525)..(1525): n is a, c, g, or t
agttgtacacatgtaactctgtcaacattttcagaccaaatccaacgttgtttctggcaaaaatggatgcattccgtttatcacattcatttatgctcagcaccaacatccacagcccctcctctctctgcacccttcgttccctctccaccaatccccgcaacaggtggttcaaggtggaagccaccgccggcggcagccagaagaagaacaataacaaggccttcgacgcggcggcgttcgaggcggagcgacttgccctcgacgcagaggcccggcgaaccatggcggacgccgccgacccgaaggcctggaaatggataatccggaagagaatatgggatatgatggaagctcgcaactttgccaacaaccctcggccggttcaccaccgcattcccaatttcgttggcgcctctgttgctgctgaaaagatgagggagctagatgtgtttcaggatgcacaatgtgtaaaggttaatccagactctcctcagaaacaagtcaggtttctcactctttcagatggcaagaagttgttgactcctcaacctcggctgagaacaggtttcttctctgtacttgattccaatatgttaactttggataccatcaaggaagcctgcacttctgttggggttgccaagcatggacggccgattgggttagacgaaaagataaaggtggatcttattgttattggatctgttgctgttgatccaaagacaggtgctcgattgggaaagggagagggatttgcagaacttgaatatggtatgctgaggtacatgggagccatcgatgattcaacacgagttgttacatctgtgcatgactgccaattggtggatgatattccagttgaaaagctgttaatccatgatgtaccagtggatatcatttgtaccccgacacaggtcatttttacaaatacatctatcccaaagcctcaaggaatttattgggacaagttgtctcctgagaagttgggacaagttcgtatactgagggagctcaagaagaggattgaacaagagactggacagaagcttcctactggtccatcggagaaattaccccctactgctcaacgaagtagaaggggttgattatgtacataatgatgggtcatgagtggaaggatattgcttttgttcagaagtcaaacgtgtagagttatatacaataaattacagatttccttggtccccatgaaaggaaagaagttccacgaaatggttcatttgtccactccaaaccgactgtggaatatcattgggtgtcttttactacgacttggatttcttttaagatcttatcgcataagtcaaatgtgatgtggatacaaacacgtgaatcaattaaaaaatttcatgttgtgagttctagagatggaatgttattcaagtctttttcaaatatcattgcccactgtgtttaagttgtacaatgaaaatgtatattggtttcgtttgtgatggcaaccacaatcaggcttttgnaggataagtntggaataaagtangaaagactcactactt

SEQ ID NO: 13455 - protein, 368 aa, Glycine max
LYTCNSVNIFRPNPTLFLAKMDAFRLSHSFMLSTNIHSPSSLCTLRSLSTNPRNRWFKVEATAGGSQKKNNNKAFDAAAFEAERLALDAEARRTMADAADPKAWKWIIRKRIWDMMEARNFANNPRPVHHRIPNFVGASVAAEKMRELDVFQDAQCVKVNPDSPQKQVRFLTLSDGKKLLTPQPRLRTGFFSVLDSNMLTLDTIKEACTSVGVAKHGRPIGLDEKIKVDLIVIGSVAVDPKTGARLGKGEGFAELEYGMLRYMGAIDDSTRVVTSVHDCQLVDDIPVEKLLIHDVPVDIICTPTQVIFTNTSIPKPQGIYWDKLSPEKLGQVRILRELKKRIEQETGQKLPTGPSEKLPPTAQRSRRG

SEQ ID NO: 13456 - protein, 348 aa, Glycine max
MDAFRLSHSFMLSTNIHSPSSLCTLRSLSTNPRNRWFKVEATAGGSQKKNNNKAFDAAAFEAERLALDAEARRTMADAADPKAWKWIIRKRIWDMMEARNFANNPRPVHHRIPNFVGASVAAEKMRELDVFQDAQCVKVNPDSPQKQVRFLTLSDGKKLLTPQPRLRTGFFSVLDSNMLTLDTIKEACTSVGVAKHGRPIGLDEKIKVDLIVIGSVAVDPKTGARLGKGEGFAELEYGMLRYMGAIDDSTRVVTSVHDCQLVDDIPVEKLLIHDVPVDIICTPTQVIFTNTSIPKPQGIYWDKLSPEKLGQVRILRELKKRIEQETGQKLPTGPSEKLPPTAQRSRRG

SEQ ID NO: 13457 - protein, 338 aa, Glycine max
MLSTNIHSPSSLCTLRSLSTNPRNRWFKVEATAGGSQKKNNNKAFDAAAFEAERLALDAEARRTMADAADPKAWKWIIRKRIWDMMEARNFANNPRPVHHRIPNFVGASVAAEKMRELDVFQDAQCVKVNPDSPQKQVRFLTLSDGKKLLTPQPRLRTGFFSVLDSNMLTLDTIKEACTSVGVAKHGRPIGLDEKIKVDLIVIGSVAVDPKTGARLGKGEGFAELEYGMLRYMGAIDDSTRVVTSVHDCQLVDDIPVEKLLIHDVPVDIICTPTQVIFTNTSIPKPQGIYWDKLSPEKLGQVRILRELKKRIEQETGQKLPTGPSEKLPPTAQRSRRG

SEQ ID NO: 13458 - DNA, 1561 bp, Glycine max
attcaatccctttggtttaatctctctagggttattttctctctcttggattccattcctgcgtcttcatcagagccaatggaagcggcggctacggcaacggcaacagttctcgcaccaccgtcggctttcctcggaagaccctccgtactcgccttccgttccaatcttcgcttctccactaagttaagcacttctgtagctatctccaagcatggtcatgggagacactgtgttggaactagaaggggttttgtagttagagctgcatcatttacaccagagtcatccgaaccgagttccaagattgctccacttaagctggagtctccaattgggcagtttctgtctcagattttgataagtcacccgcatcttgtgccagctgcagtagagcagcagcttgagcaattccaaactgatcttgatggtgataaacaaaagaaagagccttctgcttcaggcaccgacttagttttgtacaggagaattgctgaggttaaggctaaagagaggaaaacagctctagaagagatattgtatgcattggtggtgcaaaagttcatggatgccagtatttctctgataccctccttaactccaaaccattctggtcaggttgattcatggccaagtgaagatggaaaactggaggagcttcactcaccggaagcctatgagatgatccaaaaccacttggctctcattttgggcaaccgtttaggggattcaacatctgttgctcagatcagcaaaatcagggtaggacaggtttatgcagcttcaataatgtacgggtactttctcaagcgagttgtgcaaaggttccagctggagaggacaatgaagattcttcctaatgcaacagaagagaatagcattcaacaaactgttgtagatgattcaagaatcagaggcggagagggccattctcatgttatgtcccatcctgaagtttctactttgcctggtggtggcatcagctctgggggatttggctatggttcaaaagtgtccaggttgcgtacctatgtgatgtcctttgatagcgagactttacagagatatgcaacaataagatccaaagaggctctcagcatcattgagaagcacaccgaagcattgtttggaagacctgaaattgttgtaacaccgcagggggtaattgattcttccacagatgataacatcaaaattagctttggtggtttgaagagacttgttttagaagctattacttttggttcttttctctgggatgttgagagctacgtcgactcaaggtaccattttgtcctgaactgagccctgctcactcccatgcaccccaaggcaaagtctgtacggactgaaagtacaaatatttttcacctgtttgatcagtgacattagaattggttttcactattgagaggatatcttaaaattagatatttgcacatttgtttgtccttcgttatcgtgatttttgttggagtattaagtgtgaaacagatatagaccaaaattcaaattacaaatgactgttgttggagcactttataataagtatggctgatgt

SEQ ID NO: 13459 - protein, 434 aa, Glycine max
IQSLWFNLSRVIFSLLDSIPASSSEPMEAAATATATVLAPPSAFLGRPSVLAFRSNLRFSTKLSTSVAISKHGHGRHCVGTRRGFVVRAASFTPESSEPSSKIAPLKLESPIGQFLSQILISHPHLVPAAVEQQLEQFQTDLDGDKQKKEPSASGTDLVLYRRIAEVKAKERKTALEEILYALVVQKFMDASISLIPSLTPNHSGQVDSWPSEDGKLEELHSPEAYEMIQNHLALILGNRLGDSTSVAQISKIRVGQVYAASIMYGYFLKRVVQRFQLERTMKILPNATEENSIQQTVVDDSRIRGGEGHSHVMSHPEVSTLPGGGISSGGFGYGSKVSRLRTYVMSFDSETLQRYATIRSKEALSIIEKHTEALFGRPEIVVTPQGVIDSSTDDNIKISFGGLKRLVLEAITFGSFLWDVESYVDSRYHFVLN

SEQ ID NO: 13460 - protein, 408 aa, Glycine max
MEAAATATATVLAPPSAFLGRPSVLAFRSNLRFSTKLSTSVAISKHGHGRHCVGTRRGFVVRAASFTPESSEPSSKIAPLKLESPIGQFLSQILISHPHLVPAAVEQQLEQFQTDLDGDKQKKEPSASGTDLVLYRRIAEVKAKERKTALEEILYALVVQKFMDASISLIPSLTPNHSGQVDSWPSEDGKLEELHSPEAYEMIQNHLALILGNRLGDSTSVAQISKIRVGQVYAASIMYGYFLKRVVQRFQLERTMKILPNATEENSIQQTVVDDSRIRGGEGHSHVMSHPEVSTLPGGGISSGGFGYGSKVSRLRTYVMSFDSETLQRYATIRSKEALSIIEKHTEALFGRPEIVVTPQGVIDSSTDDNIKISFGGLKRLVLEAITFGSFLWDVESYVDSRYHFVLN

SEQ ID NO: 13461 - protein, 246 aa, Glycine max
MDASISLIPSLTPNHSGQVDSWPSEDGKLEELHSPEAYEMIQNHLALILGNRLGDSTSVAQISKIRVGQVYAASIMYGYFLKRVVQRFQLERTMKILPNATEENSIQQTVVDDSRIRGGEGHSHVMSHPEVSTLPGGGISSGGFGYGSKVSRLRTYVMSFDSETLQRYATIRSKEALSIIEKHTEALFGRPEIVVTPQGVIDSSTDDNIKISFGGLKRLVLEAITFGSFLWDVESYVDSRYHFVLN

SEQ ID NO: 13462 - DNA, 1798 bp, Glycine max
gtgataacaacagtcaagaacatgatgaagcaatagctgatgagacaattctttttgataactcaaaagatgctctaagtatgatacaaggcaaaatagaagaaacaaatggcaaacttgattctcaagtacagaaacaaaatggtgatttcactgggtacagaccagtgacaagtgaacctgtttatgaggcgtcatctgatgaaggttggcaagaagccaattcaaaagggcggtcaggaaatgctgctaaccgcaagtttgggcacaaaaagcgacatcatctatcaaagctcagcattaatggttcaaataattacatttacagggaaggcagttctaggaatgagattacttcgccaccacaaagaggagttccaaaagtcatgttagacatgtcatctccatctagacaatcaaaatctagaaacttaactttgaatgaggattctgttaatcattcaacaaaagcttctgtgtccaaaatttcatctccggcatctctgagttccttggcttcaaagtctatatcttacaaagaagtggctttagcaccaccaggaactgttttaaagccattgttggaaaaggctgacatggaaagggttaatgctggagatgagatatgctgcaatcctgctgtgacatcaataagtgaaggtagttgccaaagttccataactaatacagtttgtcagcatgatgaaacagaggaaactcatgaaaatgaacctcaacaagaaagttctggatcggaacttgagaaggtttctgatcaggcaaaatctacagcagaaacaaatggcagtaagctttcagctgcggccaaacctttcaatccaggaatgttgtccatgtctcaccatttaaattcagcttccttcacaagcatgtatgatacagatgttagtcaaggcatgcacgtggagactgtgcttccccctgctgttgctagggtcccttgtgggcctagatcgcctctgtattatagaaccaactatacttttcgcatgaaacatggttctactaaaggtcaaacctctatcagagaaagaagtggatttgggtctccaagaataatgaatccacatgcgcctgagtttgttcccagaaatgcttctcaaatagaagccaatgatgccaattcaaatgtttccaatgagcataactctttgtctgacataggcatgtcagaagaaaacaagctagatgaaaattttgttgaaatcaatgggagttccaacaaaaacagtatttctgaatctgagaagtccgagatagctaggcagatactgctcagttttctagtgaaatctgtcaaggaaaatattgattctgtggatgagtctaaggatggtgaaggaaaaattgagatcttggaaagttgttctgatgaaatagccaaagacagtgctgtcataaacattatgtatggaaatgaagaaaagaataagacagtgcctcattccagtgatagtgatgagcaagagaaattaggtgttactgaaaaaaagaatggagatggtgaagggtttatagttgtctcgaagaggaggaaaaacaggcagaagatcacaaatggagtcacagaattgtacaaccaacagtccatttgtgcttcagttcgttgaatagagttatgaaataaataacggatattgtctctacatctgagtgtttgtctggccgaagctctggacatcatattgttaatagtttataacttcatggcctagaatttttggtcattcaattcattttgttttttgtcgatataataagtgcattcgggatttgt

SEQ ID NO: 13463 - protein, 542 aa, Glycine max
DNNSQEHDEAIADETILFDNSKDALSMIQGKIEETNGKLDSQVQKQNGDFTGYRPVTSEPVYEASSDEGWQEANSKGRSGNAANRKFGHKKRHHLSKLSINGSNNYIYREGSSRNEITSPPQRGVPKVMLDMSSPSRQSKSRNLTLNEDSVNHSTKASVSKISSPASLSSLASKSISYKEVALAPPGTVLKPLLEKADMERVNAGDEICCNPAVTSISEGSCQSSITNTVCQHDETEETHENEPQQESSGSELEKVSDQAKSTAETNGSKLSAAAKPFNPGMLSMSHHLNSASFTSMYDTDVSQGMHVETVLPPAVARVPCGPRSPLYYRTNYTFRMKHGSTKGQTSIRERSGFGSPRIMNPHAPEFVPRNASQIEANDANSNVSNEHNSLSDIGMSEENKLDENFVEINGSSNKNSISESEKSEIARQILLSFLVKSVKENIDSVDESKDGEGKIEILESCSDEIAKDSAVINIMYGNEEKNKTVPHSSDSDEQEKLGVTEKKNGDGEGFIVVSKRRKNRQKITNGVTELYNQQSICASVR

SEQ ID NO: 13464 - protein, 516 aa, Glycine max
MIQGKIEETNGKLDSQVQKQNGDFTGYRPVTSEPVYEASSDEGWQEANSKGRSGNAANRKFGHKKRHHLSKLSINGSNNYIYREGSSRNEITSPPQRGVPKVMLDMSSPSRQSKSRNLTLNEDSVNHSTKASVSKISSPASLSSLASKSISYKEVALAPPGTVLKPLLEKADMERVNAGDEICCNPAVTSISEGSCQSSITNTVCQHDETEETHENEPQQESSGSELEKVSDQAKSTAETNGSKLSAAAKPFNPGMLSMSHHLNSASFTSMYDTDVSQGMHVETVLPPAVARVPCGPRSPLYYRTNYTFRMKHGSTKGQTSIRERSGFGSPRIMNPHAPEFVPRNASQIEANDANSNVSNEHNSLSDIGMSEENKLDENFVEINGSSNKNSISESEKSEIARQILLSFLVKSVKENIDSVDESKDGEGKIEILESCSDEIAKDSAVINIMYGNEEKNKTVPHSSDSDEQEKLGVTEKKNGDGEGFIVVSKRRKNRQKITNGVTELYNQQSICASVR

SEQ ID NO: 13465 - protein, 414 aa, Glycine max
MLDMSSPSRQSKSRNLTLNEDSVNHSTKASVSKISSPASLSSLASKSISYKEVALAPPGTVLKPLLEKADMERVNAGDEICCNPAVTSISEGSCQSSITNTVCQHDETEETHENEPQQESSGSELEKVSDQAKSTAETNGSKLSAAAKPFNPGMLSMSHHLNSASFTSMYDTDVSQGMHVETVLPPAVARVPCGPRSPLYYRTNYTFRMKHGSTKGQTSIRERSGFGSPRIMNPHAPEFVPRNASQIEANDANSNVSNEHNSLSDIGMSEENKLDENFVEINGSSNKNSISESEKSEIARQILLSFLVKSVKENIDSVDESKDGEGKIEILESCSDEIAKDSAVINIMYGNEEKNKTVPHSSDSDEQEKLGVTEKKNGDGEGFIVVSKRRKNRQKITNGVTELYNQQSICASVR

SEQ ID NO: 13466 - DNA, 1546 bp, Glycine max
gactgtagagaagagtatgaaaaaatatgctgacaacctaatgcggtttctagagggaattagttcaaggctatcacaattggaattatactgttacaatcttgacaaatctattggagaaatgaaatctgatataaatcgtgaccatgtggagcaagattcaaggctgaaatctcttgaaaaacatgttcaagaagttcacaggtctgtacaaattttaagagacaagcaagagctagctgagacacagaaagaattagccaagcttcaacttgctcagaaagaatcatcttcctccagccattcacagtccaatgaggagaggtcgtcacccaccacagatcctaaaaaaactgacaacgcatctgatgcaaacaaccagcagttggctcttgccctgcctcatcaaatagctcctcagccgcagcctgccgcaccctcagctcaggctgctgcatcaaatgtgactcaagcccctcaacagcctccttattacattccacccacccctatgccgaattcagccttgccccagcacccccagaatcagtacttaccatccgatcaacaatatcgaacaccccaacttgtggctccacaaccaacaccgtctcaagtaaccccatccccacctgtgcaacaattttctcactatcagcagccacaacaacagcagcagccgccgcagcagcagcaacagcaatggtcacagcaggtgcagccttcacagccacccccaatgcaatctcaagtaagaccctcctctccaaatgtgtaccctccgtaccagccaaatcaagcaacaaacccatcacctgcagaaacactgccaaacagcatggccatgcaaatgccatactcgggagttccaccacagggatctaaccgtgccgatgccataccttatggatatggaggagctggaagaacagttccacagcagcctccaccccagcagatgaagagctcttttcctgcaccaccaggtgaaatgtatggacctaccgggtccctcccggcgcttcctccaccgagtagtgcatacatgatgtatgatggtgagggaggaagatcacatcatccaccccaacctcctcattttgctcaacctggatatcccccaacaagtgcttcccttcagaaccccccacaagggcataacctcatggtccgaaatccgaaccagtcacaatttgtccgcaaccatccctacaatgagttgattgagaaactggtgagcatgggattcaggggtgaccatgttgcaagtgtgatccagaggatggaggagagtggacaggccgttgatttcaactcagtacttgacaggttgagctctgtgggtcctcagagaggaggatggtcagggtgatgaagaacttttttgaacagttactttgtctaccaaactaaatactctgttcaaaccctcaaaatcattgcgtgttttattatgcatggaataaaagtttttatgtaatgtgacggtttaccatcgtatgtaaaaaatgtcttgagatgtgaggattatctagtatttttatgc

SEQ ID NO: 13467 - protein, 456 aa, Glycine max
TVEKSMKKYADNLMRFLEGISSRLSQLELYCYNLDKSIGEMKSDINRDHVEQDSRLKSLEKHVQEVHRSVQILRDKQELAETQKELAKLQLAQKESSSSSHSQSNEERSSPTTDPKKTDNASDANNQQLALALPHQIAPQPQPAAPSAQAAASNVTQAPQQPPYYIPPTPMPNSALPQHPQNQYLPSDQQYRTPQLVAPQPTPSQVTPSPPVQQFSHYQQPQQQQQPPQQQQQQWSQQVQPSQPPPMQSQVRPSSPNVYPPYQPNQATNPSPAETLPNSMAMQMPYSGVPPQGSNRADAIPYGYGGAGRTVPQQPPPQQMKSSFPAPPGEMYGPTGSLPALPPPSSAYMMYDGEGGRSHHPPQPPHFAQPGYPPTSASLQNPPQGHNLMVRNPNQSQFVRNHPYNELIEKLVSMGFRGDHVASVIQRMEESGQAVDFNSVLDRLSSVGPQRGGWSG

SEQ ID NO: 13468 - protein, 451 aa, Glycine max
MKKYADNLMRFLEGISSRLSQLELYCYNLDKSIGEMKSDINRDHVEQDSRLKSLEKHVQEVHRSVQILRDKQELAETQKELAKLQLAQKESSSSSHSQSNEERSSPTTDPKKTDNASDANNQQLALALPHQIAPQPQPAAPSAQAAASNVTQAPQQPPYYIPPTPMPNSALPQHPQNQYLPSDQQYRTPQLVAPQPTPSQVTPSPPVQQFSHYQQPQQQQQPPQQQQQQWSQQVQPSQPPPMQSQVRPSSPNVYPPYQPNQATNPSPAETLPNSMAMQMPYSGVPPQGSNRADAIPYGYGGAGRTVPQQPPPQQMKSSFPAPPGEMYGPTGSLPALPPPSSAYMMYDGEGGRSHHPPQPPHFAQPGYPPTSASLQNPPQGHNLMVRNPNQSQFVRNHPYNELIEKLVSMGFRGDHVASVIQRMEESGQAVDFNSVLDRLSSVGPQRGGWSG

SEQ ID NO: 13469 - protein, 443 aa, Glycine max
MRFLEGISSRLSQLELYCYNLDKSIGEMKSDINRDHVEQDSRLKSLEKHVQEVHRSVQILRDKQELAETQKELAKLQLAQKESSSSSHSQSNEERSSPTTDPKKTDNASDANNQQLALALPHQIAPQPQPAAPSAQAAASNVTQAPQQPPYYIPPTPMPNSALPQHPQNQYLPSDQQYRTPQLVAPQPTPSQVTPSPPVQQFSHYQQPQQQQQPPQQQQQQWSQQVQPSQPPPMQSQVRPSSPNVYPPYQPNQATNPSPAETLPNSMAMQMPYSGVPPQGSNRADAIPYGYGGAGRTVPQQPPPQQMKSSFPAPPGEMYGPTGSLPALPPPSSAYMMYDGEGGRSHHPPQPPHFAQPGYPPTSASLQNPPQGHNLMVRNPNQSQFVRNHPYNELIEKLVSMGFRGDHVASVIQRMEESGQAVDFNSVLDRLSSVGPQRGGWSG

SEQ ID NO: 13470 - DNA, 1392 bp, Glycine max
gttgccagttcaggaaaacaaataaagttctcctttgaaacttctctgggctatgttattttgaaagaagttacttcgcatcaataatgggttcaggtgattggtttaagacaataattagcttaagaaaatcaaaagaaggcagatcaaagaaagcaaagggtatcttaactcaagagaaactaaatgcatcaaagtcaaacaattatccaggaaaagaatccagtggtttaacaaatggtattaaaagtgaaaaccttgtgtcagctggggtgtcagttgaaactattgctgcaacaaggatccagactgcatttcgagcttataaggctagaaaagctttacgtcgcatgaaaggatttacaaaactgaagatcctaacagaaggcttttctgttaaaaagcaagctagtacagctgtaacataccttcattcatggagcaagatacaagctgagattagagctcgtcgaatctgtatggtaacagaagacaggatcaggaggaagaaactagagtctcaactaaaactggaggcaaagcttcatgatctggaggttgaatggtgtggtggttctgaaaccatggaggaaatccttggaaggatacatcacagggaagaagcagcagttaagcgcgaaagagccatggcatatgcctttttcccatcagtggagggccaactctagtcagaaccaactgcttggtaattatgaacttagcaaagctaattggggttggagctggaaggaatgctggattgctgctcgtccatgggaaagccgtatccctagcttatccgtcaccccggagaaagctcaacataagcagccaagcccaagcaaagttcagaaggataagaacacatcaacaccaaaaactcccgtctcatttaaacctccttcagccaatgcaaaagggactcctccctcggccaacgcaaaaggcacttcaaaagctaggagattgtcttatccaacaactgagaaaactctggtccaaagagtgcaatgagtcctcagcatggtttgctaagacagcacaatttttaagtataaagcctttttggataattcgaattgaactgagtcaaattgattttcaattggttacagtccataaaaaggcaactaaaaagccaacttatttatttattgattgcttccaatttgtgcatatgagcgtgactgaaattcaagccactgcagagaatgtgttaacagacctgcttgtgggtgtgatttgttgatgcttctgtttattatctttttcaatcttgtacattcaaattcaaggaagagacagattgtagataggacaatatatctattttttcctcttctctgctgtaatagaaaatttccaagatgtgatcaagttgttgacttcgcc

SEQ ID NO: 13471 - protein, 200 aa, Glycine max
MGSGDWFKTIISLRKSKEGRSKKAKGILTQEKLNASKSNNYPGKESSGLTNGIKSENLVSAGVSVETIAATRIQTAFRAYKARKALRRMKGFTKLKILTEGFSVKKQASTAVTYLHSWSKIQAEIRARRICMVTEDRIRRKKLESQLKLEAKLHDLEVEWCGGSETMEEILGRIHHREEAAVKRERAMAYAFFPSVEGQL

SEQ ID NO: 13472 - protein, 178 aa, Glycine max
MNLAKLIGVGAGRNAGLLLVHGKAVSLAYPSPRRKLNISSQAQAKFRRIRTHQHQKLPSHLNLLQPMQKGLLPRPTQKALQKLGDCLIQQLRKLWSKECNESSAWFAKTAQFLSIKPFWIIRIELSQIDFQLVTVHKKATKKPTYLFIDCFQFVHMSVTEIQATAENVLTDLLVGVIC

SEQ ID NO: 13473 - protein, 155 aa, Glycine max
MIWRLNGVVVLKPWRKSLEGYITGKKQQLSAKEPWHMPFSHQWRANSSQNQLLGNYELSKANWGWSWKECWIAARPWESRIPSLSVTPEKAQHKQPSPSKVQKDKNTSTPKTPVSFKPPSANAKGTPPSANAKGTSKARRLSYPTTEKTLVQRVQ

SEQ ID NO: 13474 - DNA, 1053 bp, Glycine max
  misc_feature (974)..(974): n is a, c, g, or t
agctaaaagaagaaattagaaggttaaagtcattttgtatggaaggtgaacgagaacggatgagtgaacaaatcatggtattggaaaacaagttgttggaagcactagattggaaatttatgcatgaaacagatctgaaaacaaattctgatttgatgatggaagatgtacataatgatggtaatctcatctccaaacaggagtcaagtccaaaatcacgatggcagtctttgcttagggaggaaaatgagtttctcaagattcaggctatacaaaaccaggcagaaatggatacaatttgcaaaaagctagaggtttgccttgaagagaaagaaaaattaaaaagccatgttgatgatttgatggcaaaattagaacaagagaaatgccaaacaattaatgaaggaaaggaacgaatggatcttccatcaacaactgatatgcctgtcattaacagcaatgaccaactggagttgaaagcaatggttgatgctatagcttcagctagtcaaagagaagcagaggctcatgagacagcaattatgctggcaaaggagaatgatgaactcaagatgaagcttaaagccttgattgaggataatagtaaactaattgaattgtatgaacaagctgctgctgagaaaaataatagaaatgttaataaaggggagggtgctcaagaaattggttctgagattgacaatggttgctattctcttgaaacaacaaaagaggagactgagttgaaaggagtggttgagaatctccagcatcagttaatggaaatgaatgaagaaaatgaaaagctgttgagtttgtatgaaagagccatgcaggagaaggatgaaataaaaagaactcttgcatgttttggacatgaaagagttgaaaccaaaggagatatggactgcccagagaagcttgttgaagttgatggtggggaaagagactcgagagtacaaactgtctctcangaagtgcagggtagagatgaaagtaaatgtgaatcttctacatctggatctgatgtggacttcgagtgtgatgctcatg

SEQ ID NO: 13475 - protein, 350 aa, Glycine max
  misc_feature (324)..(324): Xaa can be any naturally occurring amino acid
LKEEIRRLKSFCMEGERERMSEQIMVLENKLLEALDWKFMHETDLKTNSDLMMEDVHNDGNLISKQESSPKSRWQSLLREENEFLKIQAIQNQAEMDTICKKLEVCLEEKEKLKSHVDDLMAKLEQEKCQTINEGKERMDLPSTTDMPVINSNDQLELKAMVDAIASASQREAEAHETAIMLAKENDELKMKLKALIEDNSKLIELYEQAAAEKNNRNVNKGEGAQEIGSEIDNGCYSLETTKEETELKGVVENLQHQLMEMNEENEKLLSLYERAMQEKDEIKRTLACFGHERVETKGDMDCPEKLVEVDGGERDSRVQTVSXEVQGRDESKCESSTSGSDVDFECDAH

SEQ ID NO: 13476 - protein, 338 aa, Glycine max
  misc_feature (312)..(312): Xaa can be any naturally occurring amino acid
MEGERERMSEQIMVLENKLLEALDWKFMHETDLKTNSDLMMEDVHNDGNLISKQESSPKSRWQSLLREENEFLKIQAIQNQAEMDTICKKLEVCLEEKEKLKSHVDDLMAKLEQEKCQTINEGKERMDLPSTTDMPVINSNDQLELKAMVDAIASASQREAEAHETAIMLAKENDELKMKLKALIEDNSKLIELYEQAAAEKNNRNVNKGEGAQEIGSEIDNGCYSLETTKEETELKGVVENLQHQLMEMNEENEKLLSLYERAMQEKDEIKRTLACFGHERVETKGDMDCPEKLVEVDGGERDSRVQTVSXEVQGRDESKCESSTSGSDVDFECDAH

SEQ ID NO: 13477 - protein, 331 aa, Glycine max
  misc_feature (305)..(305): Xaa can be any naturally occurring amino acid
MSEQIMVLENKLLEALDWKFMHETDLKTNSDLMMEDVHNDGNLISKQESSPKSRWQSLLREENEFLKIQAIQNQAEMDTICKKLEVCLEEKEKLKSHVDDLMAKLEQEKCQTINEGKERMDLPSTTDMPVINSNDQLELKAMVDAIASASQREAEAHETAIMLAKENDELKMKLKALIEDNSKLIELYEQAAAEKNNRNVNKGEGAQEIGSEIDNGCYSLETTKEETELKGVVENLQHQLMEMNEENEKLLSLYERAMQEKDEIKRTLACFGHERVETKGDMDCPEKLVEVDGGERDSRVQTVSXEVQGRDESKCESSTSGSDVDFECDAH

SEQ ID NO: 13478 - DNA, 1063 bp, Glycine max
tttctctctttttttgtgtgtccaaaatggctcctagttctgctcacaacaatgggttctatgtgcttatgctagttgggatagtggttagcactatggttgctacctgtgctggtagcttctaccaagactttgatctaacatggggtggtgaccgtgctaagatattcaatggtggccagcttctatcactttccctagacaaagtctctggctctggcttcaaatcaaagaaagaatacctatttgggaggattgatatgcagctcaagctcgttgccggcaactctgctggcactgtcactgcttactacttgtcatcccaagggccaacacatgatgagattgatttcgagtttttgggaaacctaagtggggacccttatattctccacacaaacatcttcacccaaggcaaaggcaacagggagcaacagttctatctctggttcgaccccaccagaaacttccacacttactctatcatttggaagccccagcacatcatattcttggttgataacacacccataagggtattcaagaatgctgaacctcttggtgttccttttccaaagaaccagcccatgagaatctattctagcctctggaatgctgatgactgggccaccagaggaggattggtgaaaactgattggtccaaagcaccctttacagcatactaccgcaatttcaaggccattgagttctcatccaagtcttccatttcaaattctggggctgaatatgaggcaaatgagcttgatgcttatagcagaagaagactgagatgggttcagaagtacttcatgatctataactactgcagtgatctcaagcgattcccacaaggtcttcctgctgaatgtaaacgttgaaggttctaagagatgaagagaatggtcactttctgagttggatttgaatggtctatgtaaaatatgctatgtttatgtcttagattctttactgacttctgtccttttttttaagtatctattttatagttgctaatgtatatgtgtattaaggggccttaataataaatcatattctttgttcc

SEQ ID NO: 13479 - protein, 291 aa, Glycine max
SLFFCVSKMAPSSAHNNGFYVLMLVGIVVSTMVATCAGSFYQDFDLTWGGDRAKIFNGGQLLSLSLDKVSGSGFKSKKEYLFGRIDMQLKLVAGNSAGTVTAYYLSSQGPTHDEIDFEFLGNLSGDPYILHTNIFTQGKGNREQQFYLWFDPTRNFHTYSIIWKPQHIIFLVDNTPIRVFKNAEPLGVPFPKNQPMRIYSSLWNADDWATRGGLVKTDWSKAPFTAYYRNFKAIEFSSKSSISNSGAEYEANELDAYSRRRLRWVQKYFMIYNYCSDLKRFPQGLPAECKR

SEQ ID NO: 13480 - protein, 283 aa, Glycine max
MAPSSAHNNGFYVLMLVGIVVSTMVATCAGSFYQDFDLTWGGDRAKIFNGGQLLSLSLDKVSGSGFKSKKEYLFGRIDMQLKLVAGNSAGTVTAYYLSSQGPTHDEIDFEFLGNLSGDPYILHTNIFTQGKGNREQQFYLWFDPTRNFHTYSIIWKPQHIIFLVDNTPIRVFKNAEPLGVPFPKNQPMRIYSSLWNADDWATRGGLVKTDWSKAPFTAYYRNFKAIEFSSKSSISNSGAEYEANELDAYSRRRLRWVQKYFMIYNYCSDLKRFPQGLPAECKR

SEQ ID NO: 13481 - protein, 269 aa, Glycine max
MLVGIVVSTMVATCAGSFYQDFDLTWGGDRAKIFNGGQLLSLSLDKVSGSGFKSKKEYLFGRIDMQLKLVAGNSAGTVTAYYLSSQGPTHDEIDFEFLGNLSGDPYILHTNIFTQGKGNREQQFYLWFDPTRNFHTYSIIWKPQHIIFLVDNTPIRVFKNAEPLGVPFPKNQPMRIYSSLWNADDWATRGGLVKTDWSKAPFTAYYRNFKAIEFSSKSSISNSGAEYEANELDAYSRRRLRWVQKYFMIYNYCSDLKRFPQGLPAECKR

SEQ ID NO: 13482 - DNA, 809 bp, Glycine max
gagaagggaagatgatgatggctcattctcattatcttcttcacattccatcgttatcatctttatctgcatctctcacttccccgcctcgctcgcttcttcctgttcggacattacaacctaagacgctgtcgtgtcgtgtcccttcatttccaacacgcaccccgtggcacttcaagcctcttcattttgctctctctggggcactctcacttgggttattattcggaggaattggcgtggctgaggctgcaaaagttggtgtgaacaagccagagttgctccccaaggagtttagtactgtcattgatgttgctgggttcctatccgatggacaggaggaaagactagcagaagagattgctgctcttgaagcggatactggattcaagttaagagttttggcccagaactatcctgttacgccaggtttggctattaaagatttctggcaagtagatgacagaacagttgtttttgttgctgatcccacatttggcaatatattgaatttcaatgttggtgctacggttgatttggatgtcccacgtagcttttggaatcgcttggctgggaagtatgggaacattttctattggaaagaaaagggggaagatgcatctattgaagcagcagttatggcaatttctagttgcttgagagaaccagttgggcctaataattgttctgaggtgaattaatttcattgatcagtattatttggtcatgtgataccataggtgtacagatatgaactaaaatatttaggagaatctgtttcatgttttaagtatattattctgttctct

SEQ ID NO: 13483 - protein, 232 aa, Glycine max
EGKMMMAHSHYLLHIPSLSSLSASLTSPPRSLLPVRTLQPKTLSCRVPSFPTRTPWHFKPLHFALSGALSLGLLFGGIGVAEAAKVGVNKPELLPKEFSTVIDVAGFLSDGQEERLAEEIAALEADTGFKLRVLAQNYPVTPGLAIKDFWQVDDRTVVFVADPTFGNILNFNVGATVDLDVPRSFWNRLAGKYGNIFYWKEKGEDASIEAAVMAISSCLREPVGPNNCSEVN

SEQ ID NO: 13484 - protein, 229 aa, Glycine max
MMMAHSHYLLHIPSLSSLSASLTSPPRSLLPVRTLQPKTLSCRVPSFPTRTPWHFKPLHFALSGALSLGLLFGGIGVAEAAKVGVNKPELLPKEFSTVIDVAGFLSDGQEERLAEEIAALEADTGFKLRVLAQNYPVTPGLAIKDFWQVDDRTVVFVADPTFGNILNFNVGATVDLDVPRSFWNRLAGKYGNIFYWKEKGEDASIEAAVMAISSCLREPVGPNNCSEVN

SEQ ID NO: 13485 - protein, 228 aa, Glycine max
MMAHSHYLLHIPSLSSLSASLTSPPRSLLPVRTLQPKTLSCRVPSFPTRTPWHFKPLHFALSGALSLGLLFGGIGVAEAAKVGVNKPELLPKEFSTVIDVAGFLSDGQEERLAEEIAALEADTGFKLRVLAQNYPVTPGLAIKDFWQVDDRTVVFVADPTFGNILNFNVGATVDLDVPRSFWNRLAGKYGNIFYWKEKGEDASIEAAVMAISSCLREPVGPNNCSEVN

SEQ ID NO: 13486 - DNA, 1055 bp, Glycine max
gatcaatacatcttcaaatccacctctcatctctctcgccctctctctcacatcatcaccatttcacctatttttctctctctctctctctctctctcgcatcacaatttcatcaaaaccttttaagtcttcatagttttccttctttctttctttgtgaaaaaacaaaaagtccaaaccatggctcagaaaaccgagaaagaagaaaccgacttcaaggttcccgaaacgattacgctttgcgttaacaactgcggcgtcaccggaaaccctgctacgaataacatgtgtcagaagtgcttcaccgccttcaccacctctaccgccaccacgtccggcgccggaggtgccggaatagcttctccggctaccagatccggcatctccgcgcgtccactgaagagatcttttcccgaggagccctcgccgccggcggatcctccgtcttcagaccagacgaccccgtcggaggcgaagcgcgtggtgaaccgctgctccggctgcaggaggaaggtcggactcaccggatttcggtgccgatgcggcgagctcttctgcgccgagcaccggtactccgaccgccacgactgcagctacgactacaaagccgccggaagagaagccatcgcgagggagaatccggtgattagagccgcgaagatcgtcaaagtctgaaaaaaaacaaaaaagaaggaaaaaacccgaacggaacggaatctcaaaacgacgtcgttgacggttgacctttcgcgcgatcgggttcaggtcacgggtttcgctttttttcttttcagatttatatatagagagaagaaaaaaaaagtagcagataacaggtttgagagagagagagagagagtgtgaggttttagattgagagagagagcgagagagagagattgttgctgaaaagaagatgaagaagaatttatctgaatttctcttgtgttcatcgatcaaactctgatcgtttaatttttttttaaattttctcttctaattttatgtttaatttcttcctgatttgatcttgaaatgataaattattgttgttt

SEQ ID NO: 13487 - protein, 164 aa, Glycine max
MAQKTEKEETDFKVPETITLCVNNCGVTGNPATNNMCQKCFTAFTTSTATTSGAGGAGIASPATRSGISARPLKRSFPEEPSPPADPPSSDQTTPSEAKRVVNRCSGCRRKVGLTGFRCRCGELFCAEHRYSDRHDCSYDYKAAGREAIARENPVIRAAKIVKV

SEQ ID NO: 13488 - protein, 129 aa, Glycine max
MCQKCFTAFTTSTATTSGAGGAGIASPATRSGISARPLKRSFPEEPSPPADPPSSDQTTPSEAKRVVNRCSGCRRKVGLTGFRCRCGELFCAEHRYSDRHDCSYDYKAAGREAIARENPVIRAAKIVKV

SEQ ID NO: 13489 - DNA, 1334 bp, Glycine max
  misc_feature (1145)..(1145): n is a, c, g, or t
  misc_feature (1148)..(1148): n is a, c, g, or t
agagaagagcagcatctagatactatcttttcaattttgtgaatatatttcttgggaacatacttaccgggacagcatttgaacagctggactctttcattcaccaagcagccaatgaatatcccataacaattggcactgcaattcctttgaaagcaagtttcttcatcacttatataatggttgatggatgggctggtatagctgcagaggttttgatgttgaaacccctaatcatatatcacttgaagaattttttcttggtgaagactgaaaaggatagggaagaggctatggatcctgggagtattggtttcaacactggagaacctcgaatacaattgtactttttgctgggtctagtctatgcttcagttacacctactgttcttcctttcataatagttttctttgggctcgcctatgttgtgttccgtcatcagattatcaatgtttataatcaagagtacgagagtggtgcagcattctggcctgatgtccattttcgtgtcattattgcactgatagtgtcacagatagttcttatgggacttcttaccactaaaaaggctgcttcatcaactccatttctaattgtactcccagtactgacgatatggttccatatatactgcaaaggccgtttcgaacctgcatttgttagatatcccttacaggaagcgatgatgaaagacacattggaacgagctacagatcccaactttaacttgaaagcttaccttcagaatgcatatgttcatccagttttcaaagctagcctttttgatgaggacgaagaggacgaagaggtaatgagtctaaagttggaaactgagagtgtaactgtgcccacaaaacggcaatcaagaaggaacacaccattggctagcagaattagtggtgcatcatctccttctctgcctgatcatggcatccgaaatcataatccagagccataaatcatggaccaaggattcatatcattgttattggaccgaccacatatgtaacatacaatgggctacacatgcttccagcataaactgagagaagcaagctagtgtgatcggcacaaactgtaaggtagagattctttgatatattattatttccgattttgttaatagtgaatttgttcccttacnccncggaatgctgtaaattatcccagaacttgtcatggtttagatcgtgtgtatatttttttcttcttttttttaccttatgcttttccttcggattcagctcagtttatatgaggaaaaaaagtgtgtttgcacttgtgcacgtttttaagttttaacacaatcaatgaacgactttcctttacgttt

SEQ ID NO: 13490 - protein, 318 aa, Glycine max
RRAASRYYLFNFVNIFLGNILTGTAFEQLDSFIHQAANEYPITIGTAIPLKASFFITYIMVDGWAGIAAEVLMLKPLIIYHLKNFFLVKTEKDREEAMDPGSIGFNTGEPRIQLYFLLGLVYASVTPTVLPFIIVFFGLAYVVFRHQIINVYNQEYESGAAFWPDVHFRVIIALIVSQIVLMGLLTTKKAASSTPFLIVLPVLTIWFHIYCKGRFEPAFVRYPLQEAMMKDTLERATDPNFNLKAYLQNAYVHPVFKASLFDEDEEDEEVMSLKLETESVTVPTKRQSRRNTPLASRISGASSPSLPDHGIRNHNPEP

SEQ ID NO: 13491 - protein, 259 aa, Glycine max
MVDGWAGIAAEVLMLKPLIIYHLKNFFLVKTEKDREEAMDPGSIGFNTGEPRIQLYFLLGLVYASVTPTVLPFIIVFFGLAYVVFRHQIINVYNQEYESGAAFWPDVHFRVIIALIVSQIVLMGLLTTKKAASSTPFLIVLPVLTIWFHIYCKGRFEPAFVRYPLQEAMMKDTLERATDPNFNLKAYLQNAYVHPVFKASLFDEDEEDEEVMSLKLETESVTVPTKRQSRRNTPLASRISGASSPSLPDHGIRNHNPEP

SEQ ID NO: 13492 - protein, 246 aa, Glycine max
MLKPLIIYHLKNFFLVKTEKDREEAMDPGSIGFNTGEPRIQLYFLLGLVYASVTPTVLPFIIVFFGLAYVVFRHQIINVYNQEYESGAAFWPDVHFRVIIALIVSQIVLMGLLTTKKAASSTPFLIVLPVLTIWFHIYCKGRFEPAFVRYPLQEAMMKDTLERATDPNFNLKAYLQNAYVHPVFKASLFDEDEEDEEVMSLKLETESVTVPTKRQSRRNTPLASRISGASSPSLPDHGIRNHNPEP

SEQ ID NO: 13493 - DNA, 1790 bp, Glycine max
gatgcatcacttttcttacctacaaatgaaaaagagaataatacaagagaaaataatgttgctaagattaaagttgtggtacgcaaaagaccattaaataagaaggaacttgctaagaaggaggatgatattgtaactgtatatgacaatgcatatttgacagtccatgaacccaaactaaaggttgatttgacagcttatgtggagaaacatgagttttgttttgatgctgttcttgacgagaatgttaccaatgatgaagtatatcgagttactgtagaaccaattattcctacaatttttgagaaaactaaagctacttgttttgcttatggtcagacaggaagtggcaaaacatacacaatgcaaccattgccgctcagagctgcagaagaccttgttagacagttgcatcgaccagtatatcgaaatcagagatttaaattgtggcttagctactttgagatatatggtggaaaactttttgatcttcttagtgacagaaaaaaactctgcatgagagaagatggacggcagcaagtgtgtattgtaggactgcaagaatttgaagtttctgatgtacagattgtcaaagaattcattgaaaaggggaatgcagcaagaagtacagggtcaaccggtgcgaatgaggagtcctccaggtcacatgctatcttacaactggttgtaaagaggcacaatgaggtaaaagagagcaggcggaaaaataatgatgtaaatgaggcaaaaagtgggaaggttgtggggaagatttcttttattgatcttgctggaagcgaaagaggtgctgatactactgacaatgatcgtcagacaaggattgaaggtgctgaaatcaataagagccttttggctttgaaggaatgcattcgtgctttggacaatgatcagatccatattccttttcgtggaagcaagcttacagaagtgctccgtgactcctttgttggaaattcgaaaactgttatgatctcttgtatatccccaaatgctgggtcatgtgaacacacacttaataccttgagatatgcagaccgagttaaaagtctatccaagagtggaaatcctagaaaggaccaggccacaaatccagtaccaccagcaattaaagaggtttcatccacatcttcacttccagctagtgttggtgcagatgattttaatggtcaatgtcaagaggtaaaaacaatggacatgggcaggaaagttgtcgaaaaggaaagttctttgtacagctccgctgctgatgttgacaaacaatcaagtttttcttctagttatccattcaatgggcgagaggaaaaaagctcaacttctgccccaatagacagggaaaggtttgaagtaaagaattcttacggtggtgattctaccagtcaaaagatgaactcttattccatagatgttacaaatgagaaagtgcaaagggtgtctcccccacgcagaaaagggactaaggaggagaaatctgaaagatctgtaaattgggtaaaacgggatgccaatggttctgatcattccactgcaagctccaagcagcagagcacaggaaattatagcattaccactggatcggggcagtctgaaacagaatcctcttctgatgtgaatatcagtgcaatacttgaggaggaagaagcactaattgctgctcataggaaggaaattgaagacacaatggagattgttcgtgaagaaatgaaactactggcagaagtggaccagccaggaagtcttattgacaactacgtaacccagttgagtttcgt

SEQ ID NO: 13494 - protein, 596 aa, Glycine max
DASLFLPTNEKENNTRENNVAKIKVVVRKRPLNKKELAKKEDDIVTVYDNAYLTVHEPKLKVDLTAYVEKHEFCFDAVLDENVTNDEVYRVTVEPIIPTIFEKTKATCFAYGQTGSGKTYTMQPLPLRAAEDLVRQLHRPVYRNQRFKLWLSYFEIYGGKLFDLLSDRKKLCMREDGRQQVCIVGLQEFEVSDVQIVKEFIEKGNAARSTGSTGANEESSRSHAILQLVVKRHNEVKESRRKNNDVNEAKSGKVVGKISFIDLAGSERGADTTDNDRQTRIEGAEINKSLLALKECIRALDNDQIHIPFRGSKLTEVLRDSFVGNSKTVMISCISPNAGSCEHTLNTLRYADRVKSLSKSGNPRKDQATNPVPPAIKEVSSTSSLPASVGADDFNGQCQEVKTMDMGRKVVEKESSLYSSAADVDKQSSFSSSYPFNGREEKSSTSAPIDRERFEVKNSYGGDSTSQKMNSYSIDVTNEKVQRVSPPRRKGTKEEKSERSVNWVKRDANGSDHSTASSKQQSTGNYSITTGSGQSETESSSDVNISAILEEEEALIAAHRKEIEDTMEIVREEMKLLAEVDQPGSLIDNYVTQLSF

SEQ ID NO: 13495 - protein, 475 aa, Glycine max
MQPLPLRAAEDLVRQLHRPVYRNQRFKLWLSYFEIYGGKLFDLLSDRKKLCMREDGRQQVCIVGLQEFEVSDVQIVKEFIEKGNAARSTGSTGANEESSRSHAILQLVVKRHNEVKESRRKNNDVNEAKSGKVVGKISFIDLAGSERGADTTDNDRQTRIEGAEINKSLLALKECIRALDNDQIHIPFRGSKLTEVLRDSFVGNSKTVMISCISPNAGSCEHTLNTLRYADRVKSLSKSGNPRKDQATNPVPPAIKEVSSTSSLPASVGADDFNGQCQEVKTMDMGRKVVEKESSLYSSAADVDKQSSFSSSYPFNGREEKSSTSAPIDRERFEVKNSYGGDSTSQKMNSYSIDVTNEKVQRVSPPRRKGTKEEKSERSVNWVKRDANGSDHSTASSKQQSTGNYSITTGSGQSETESSSDVNISAILEEEEALIAAHRKEIEDTMEIVREEMKLLAEVDQPGSLIDNYVTQLSF

SEQ ID NO: 13496 - protein, 424 aa, Glycine max
MREDGRQQVCIVGLQEFEVSDVQIVKEFIEKGNAARSTGSTGANEESSRSHAILQLVVKRHNEVKESRRKNNDVNEAKSGKVVGKISFIDLAGSERGADTTDNDRQTRIEGAEINKSLLALKECIRALDNDQIHIPFRGSKLTEVLRDSFVGNSKTVMISCISPNAGSCEHTLNTLRYADRVKSLSKSGNPRKDQATNPVPPAIKEVSSTSSLPASVGADDFNGQCQEVKTMDMGRKVVEKESSLYSSAADVDKQSSFSSSYPFNGREEKSSTSAPIDRERFEVKNSYGGDSTSQKMNSYSIDVTNEKVQRVSPPRRKGTKEEKSERSVNWVKRDANGSDHSTASSKQQSTGNYSITTGSGQSETESSSDVNISAILEEEEALIAAHRKEIEDTMEIVREEMKLLAEVDQPGSLIDNYVTQLSF

SEQ ID NO: 13497 - DNA, 2074 bp, Glycine max
  misc_feature (1093)..(1093): n is a, c, g, or t
  misc_feature (1160)..(1160): n is a, c, g, or t
  misc_feature (1187)..(1187): n is a, c, g, or t
  misc_feature (1763)..(1763): n is a, c, g, or t
  misc_feature (1778)..(1778): n is a, c, g, or t
  misc_feature (1850)..(1850): n is a, c, g, or t
  misc_feature (1881)..(1881): n is a, c, g, or t
  misc_feature (1896)..(1896): n is a, c, g, or t
gcgaaccactctgaagccgctcacgttatccacaacactctcaaccctccttaaaccctaaccaatccaaccatggcttcttcttccaccttcactgcaatgtccgcctgcaagctctcctcctccgccgccatctcctccttcccctcccgccgccgctccaacgccgtcgttctgtcgaggcgcagccgcgccgccagggtctccgccatggccaaggagttgcacttcaacaaagacggcaccgcaattaagaagctccagagcggtgtgaacaagctcgcggatctggttggggtcacgcttggtcccaagggaagaaatgttgttctcgagagcaagtatggctcgccgaaaatcgttaacgacggtgtcactgtcgctaaagaggttgagttggaggatcccgttgagaatattggtgccaagttggtgagacaagcggctgccaagacaaacgacttggctggtgatggaaccacgacttcggttgttctagctcagggtcttattgccgaaggcgttaaggttgttgcaggctggggccaaccctgtgctcatcacccggggcattgagaagacggcaaaagctcttgtttctgagcttaaactgatgtcaaaagaggttgaagatagtgagttggcagatgtggcagcagtcagtgctgggaacaattatgaagtgggaaatatgatagctgaagcattgagcagagttggtagaaagggtgttgtgacccttgaggagggtaagagtgctgataacagtctatatgttgtcgaggggatgcaatttgaccgtggttatatttctccatactttgttactgacagtgagaaaatggccgttgaatatgagaactgtaagttgctgttagttgacaaaaagataaccaatgcaagggatcttatcaacatactggaggatgctattagaagtggataccctatattaattattgctgaggatattgaacaagaagctttagcaactcttgtggtgaacaaacttagaggatcactgaaaattgcagcactgaaggcccctgggtttggagagcgcaagagccagtaccttgatgatattgccatncttgatggaggtactgtaatcagagaagaggttggccttactttggacaaagctgggaaagaggttntcggatatgcctccaaggtggtgctcnccaaggatacaaccacaattgttggtgatggaagtacccaggaagcagtgaacaagagagttgcacaaattaggaacctaattgaggctgctgagcaagagtatgagaaagaaaagctgaatgagagaattgctaaattgtctggtggtgtggctgtgatacaggttggcgcacaaactgagacagagctcaaggaaaagaaattgagagttgaagacgctcttaatgctacaaaggcagctgtagaggaaggtattgttgttggtggtggttgcactcttctgagacttgcatcaaaggtggatgcaatcaaggatagccttgataatgatgaagaaaaagttggagctgatattgtgaaaagagctcttagttaccctttgaaattaattgccaagaatgctggtgtcaatggtagtgttgtcagtgagaaggtattgtccagtgacaatccaagatatggatataatgctgccactggtaaatatgaagatttgatgtctgcttgggatcattgatccaacaaaggtggtcagatgttgcctggagcatgcagcctctgtagccaaaaccttnttaatgtcagattgngtggttgttgagataaaggaacctgaggccatacctgctggaaaccccatggacaattcaggatatggactntagagcaacgagcaacggctgcttcagtganaagagtattttgttntccctcggatgaaatgcaaaatttggtggccatttagcaatgagtccaaatgtattgttagtgtggtgaactagatagtgatgcaccctttcctcccttatttttttcaagttaataataatttttttttgcttattacttccatatttatttattttataataattgttttttgctc

SEQ ID NO: 13498 - protein, 363 aa, Glycine max
  misc_feature (160)..(160): Xaa can be any naturally occurring amino acid
  misc_feature (183)..(183): Xaa can be any naturally occurring amino acid
  misc_feature (192)..(192): Xaa can be any naturally occurring amino acid
MSKEVEDSELADVAAVSAGNNYEVGNMIAEALSRVGRKGVVTLEEGKSADNSLYVVEGMQFDRGYISPYFVTDSEKMAVEYENCKLLLVDKKITNARDLINILEDAIRSGYPILIIAEDIEQEALATLVVNKLRGSLKIAALKAPGFGERKSQYLDDIAXLDGGTVIREEVGLTLDKAGKEVXGYASKVVLXKDTTTIVGDGSTQEAVNKRVAQIRNLIEAAEQEYEKEKLNERIAKLSGGVAVIQVGAQTETELKEKKLRVEDALNATKAAVEEGIVVGGGCTLLRLASKVDAIKDSLDNDEEKVGADIVKRALSYPLKLIAKNAGVNGSVVSEKVLSSDNPRYGYNAATGKYEDLMSAWDH

SEQ ID NO: 13499 - protein, 337 aa, Glycine max
  misc_feature (134)..(134): Xaa can be any naturally occurring amino acid
  misc_feature (157)..(157): Xaa can be any naturally occurring amino acid
  misc_feature (166)..(166): Xaa can be any naturally occurring amino acid
MIAEALSRVGRKGVVTLEEGKSADNSLYVVEGMQFDRGYISPYFVTDSEKMAVEYENCKLLLVDKKITNARDLINILEDAIRSGYPILIIAEDIEQEALATLVVNKLRGSLKIAALKAPGFGERKSQYLDDIAXLDGGTVIREEVGLTLDKAGKEVXGYASKVVLXKDTTTIVGDGSTQEAVNKRVAQIRNLIEAAEQEYEKEKLNERIAKLSGGVAVIQVGAQTETELKEKKLRVEDALNATKAAVEEGIVVGGGCTLLRLASKVDAIKDSLDNDEEKVGADIVKRALSYPLKLIAKNAGVNGSVVSEKVLSSDNPRYGYNAATGKYEDLMSAWDH

SEQ ID NO: 13500 - protein, 305 aa, Glycine max
  misc_feature (102)..(102): Xaa can be any naturally occurring amino acid
  misc_feature (125)..(125): Xaa can be any naturally occurring amino acid
  misc_feature (134)..(134): Xaa can be any naturally occurring amino acid
MQFDRGYISPYFVTDSEKMAVEYENCKLLLVDKKITNARDLINILEDAIRSGYPILIIAEDIEQEALATLVVNKLRGSLKIAALKAPGFGERKSQYLDDIAXLDGGTVIREEVGLTLDKAGKEVXGYASKVVLXKDTTTIVGDGSTQEAVNKRVAQIRNLIEAAEQEYEKEKLNERIAKLSGGVAVIQVGAQTETELKEKKLRVEDALNATKAAVEEGIVVGGGCTLLRLASKVDAIKDSLDNDEEKVGADIVKRALSYPLKLIAKNAGVNGSVVSEKVLSSDNPRYGYNAATGKYEDLMSAWDH

SEQ ID NO: 13501 - DNA, 1332 bp, Glycine max
aaatacttcatttttgggtacatgtaggccattaaggagaagaagttgtttatgttagactaccatgatttattcttaccatatgtaagaaaagtgagagaaatcaagggaaccacattatatggatcacgaactctattctttctaactgaacaaagcacattaaaaccattagctattgagctcacaagaccagatatggaaggtaagccacaatggaagcaagtcttcacacctgctactcattcaagttctcatgcaaccaaactctggctttggaggcttgccaaagctcatgttcttgctcatgattctggttatcatgaactagtaagccattggttaaggactcattgtgcagtagaacccttcatcattgcaacaaatagacaactaagcaccatgcaccctatctatagattactgcatccacatatgagatataccatggagatcaattcactagcccgcgaggtgcttatcagtgcaaatggggtcattgaaagttcgttctctcctagaaaatattcaatggaaataagctctgtggcatacgatcaactctggcaatttgatttgcaagcactccccaatgatcttatttttagaggaatggctgtggcggatccaaatgcaccacatggcctaaagctaacaattgaagattaccctttcgccaatgatggtctccttatatgggatgccatcaaagaatgggtatctgagtatgttaaccattactatccaagctcaagcacaatagagtttgaccaagagctccaagcatggtggacagaaattagaacagttggtcatggagacaaatctgaagaaccatggtggccaaatcttaaaacaccaaaggaccttattgaaatcattacaactatagcatgggtatcatctgctcatcatgcagctgttaactttgcccaatatacttatggaggctatttccctaataggccaacaattgttagaaataacattcctacagaggacccctcgaaggaagagttggaaaaactcataaacaacccggagaaaacatttttggagtctttaccatcacaaattcaagcaactttggtgatggtagttttgaatttattatcgaatcattcgccagatgaagagtacattgggcaatatgtggaacaatcgtgggttgagaatcaaactataaaggcagcctttgaaaggtttagtacgaaattgaaggagattgaaggtattatagactcaaggaatgcaaattgtgatttgaaaaataggaatggagctggggtggtgccttatgaactaatgaagccattctcagggcctggagtc

SEQ ID NO: 13502 - protein, 427 aa, Glycine max
MLDYHDLFLPYVRKVREIKGTTLYGSRTLFFLTEQSTLKPLAIELTRPDMEGKPQWKQVFTPATHSSSHATKLWLWRLAKAHVLAHDSGYHELVSHWLRTHCAVEPFIIATNRQLSTMHPIYRLLHPHMRYTMEINSLAREVLISANGVIESSFSPRKYSMEISSVAYDQLWQFDLQALPNDLIFRGMAVADPNAPHGLKLTIEDYPFANDGLLIWDAIKEWVSEYVNHYYPSSSTIEFDQELQAWWTEIRTVGHGDKSEEPWWPNLKTPKDLIEIITTIAWVSSAHHAAVNFAQYTYGGYFPNRPTIVRNNIPTEDPSKEELEKLINNPEKTFLESLPSQIQATLVMVVLNLLSNHSPDEEYIGQYVEQSWVENQTIKAAFERFSTKLKEIEGIIDSRNANCDLKNRNGAGVVPYELMKPFSGPGV

SEQ ID NO: 13503 - protein, 378 aa, Glycine max
MEGKPQWKQVFTPATHSSSHATKLWLWRLAKAHVLAHDSGYHELVSHWLRTHCAVEPFIIATNRQLSTMHPIYRLLHPHMRYTMEINSLAREVLISANGVIESSFSPRKYSMEISSVAYDQLWQFDLQALPNDLIFRGMAVADPNAPHGLKLTIEDYPFANDGLLIWDAIKEWVSEYVNHYYPSSSTIEFDQELQAWWTEIRTVGHGDKSEEPWWPNLKTPKDLIEIITTIAWVSSAHHAAVNFAQYTYGGYFPNRPTIVRNNIPTEDPSKEELEKLINNPEKTFLESLPSQIQATLVMVVLNLLSNHSPDEEYIGQYVEQSWVENQTIKAAFERFSTKLKEIEGIIDSRNANCDLKNRNGAGVVPYELMKPFSGPGV

SEQ ID NO: 13504 - protein, 310 aa, Glycine max
MHPIYRLLHPHMRYTMEINSLAREVLISANGVIESSFSPRKYSMEISSVAYDQLWQFDLQALPNDLIFRGMAVADPNAPHGLKLTIEDYPFANDGLLIWDAIKEWVSEYVNHYYPSSSTIEFDQELQAWWTEIRTVGHGDKSEEPWWPNLKTPKDLIEIITTIAWVSSAHHAAVNFAQYTYGGYFPNRPTIVRNNIPTEDPSKEELEKLINNPEKTFLESLPSQIQATLVMVVLNLLSNHSPDEEYIGQYVEQSWVENQTIKAAFERFSTKLKEIEGIIDSRNANCDLKNRNGAGVVPYELMKPFSGPGV

SEQ ID NO: 13505 - DNA, 1449 bp, Glycine max
  misc_feature (547)..(547): n is a, c, g, or t
aacaaattcaaaccccagcacaaagactatgtttttactatcattttctgtttggcctgcaaaaaagtaactgtttttattgtaaataaatgaaaggggtgaagaagaatggatgctataaggaagcaagcaagtaaattgagggagcaagttgccaggcaacagcaggttatacttagacagttgggccaaattagcaatgaaccgctcatgattgatgaatccgaaattgaatgtcaccagcaacttcaaaagttgtacacttcgacaaagacagctaagcattttcagcggcatattgttcgtgcaattgaaggattcgtttctgtttgctccaagcaaatggagatagtgaggaggatggctagggactgttgtaagtatgggacagagaatcttggtagtagttacctccttgcaagggcttctcttcaatttggtaacacatatgatacaatggaaaatgagagagagactctgctcgggatcttaggcgatcagatctctgagccactacgggcacagataacaggagctcctttggagnatgcacgccacctcactcgccgctatgacaaacttcatcaagaggtagaagcccaggctgctgaagttttgaggcgtcgatcaaagttgaggaattcttctgtttctgcagagagttccgcgaggcttcaaaatgcagaaacaaggttgaaagaacttaaatctgccttggcagcacttggtagagaagcaacctctgctatgttgtctgtcgaagaacagcagcaacagatgactctccagagccttcgtacaatggtggatgctgagagatcctatcatcagcatgtccttgttattctagagaaactatatactgagataattgaggacagacaaccaaaagaggctacatcatttacactgccaaaagatggatataatcaacctgcagatgagaatgctaattcaagtggcattgattataaacacaacagtcaaacagccacatacttttttgcaaaggtcgtacatccatttgatgctcaagctgagggggagttaagcctatcagttgatgattttgttgtagttcgtcaggttggacccaatggatggtctgaaggagaatgcaaaggcaatgctggatggtttccctctgcttatgtagagagacaggacatgataccagccagcaagataacagaataacttcacaggataccaacattggtcttttgattaggtgaggcaaaaattgtatattataatcacggaatagatgcagcatttgaaaagccatagcatgtgcttgccattatttttgggtggttctatcatctcatctgtgcaatatgttgtatatgcgagtcataattgaaataggaaatagcactggcagtttgaatatgtaattgatatgtttattattggcatttgctttggccctttggtcaggaactt

SEQ ID NO: 13506 - protein, 362 aa, Glycine max
  misc_feature (147)..(147): Xaa can be any naturally occurring amino acid
MDAIRKQASKLREQVARQQQVILRQLGQISNEPLMIDESEIECHQQLQKLYTSTKTAKHFQRHIVRAIEGFVSVCSKQMEIVRRMARDCCKYGTENLGSSYLLARASLQFGNTYDTMENERETLLGILGDQISEPLRAQITGAPLEXARHLTRRYDKLHQEVEAQAAEVLRRRSKLRNSSVSAESSARLQNAETRLKELKSALAALGREATSAMLSVEEQQQQMTLQSLRTMVDAERSYHQHVLVILEKLYTEIIEDRQPKEATSFTLPKDGYNQPADENANSSGIDYKHNSQTATYFFAKVVHPFDAQAEGELSLSVDDFVVVRQVGPNGWSEGECKGNAGWFPSAYVERQDMIPASKITE

SEQ ID NO: 13507 - protein, 328 aa, Glycine max
  misc_feature (113)..(113): Xaa can be any naturally occurring amino acid
MIDESEIECHQQLQKLYTSTKTAKHFQRHIVRAIEGFVSVCSKQMEIVRRMARDCCKYGTENLGSSYLLARASLQFGNTYDTMENERETLLGILGDQISEPLRAQITGAPLEXARHLTRRYDKLHQEVEAQAAEVLRRRSKLRNSSVSAESSARLQNAETRLKELKSALAALGREATSAMLSVEEQQQQMTLQSLRTMVDAERSYHQHVLVILEKLYTEIIEDRQPKEATSFTLPKDGYNQPADENANSSGIDYKHNSQTATYFFAKVVHPFDAQAEGELSLSVDDFVVVRQVGPNGWSEGECKGNAGWFPSAYVERQDMIPASKITE

SEQ ID NO: 13508 - protein, 284 aa, Glycine max
  misc_feature (69)..(69): Xaa can be any naturally occurring amino acid
MEIVRRMARDCCKYGTENLGSSYLLARASLQFGNTYDTMENERETLLGILGDQISEPLRAQITGAPLEXARHLTRRYDKLHQEVEAQAAEVLRRRSKLRNSSVSAESSARLQNAETRLKELKSALAALGREATSAMLSVEEQQQQMTLQSLRTMVDAERSYHQHVLVILEKLYTEIIEDRQPKEATSFTLPKDGYNQPADENANSSGIDYKHNSQTATYFFAKVVHPFDAQAEGELSLSVDDFVVVRQVGPNGWSEGECKGNAGWFPSAYVERQDMIPASKITE

SEQ ID NO: 13509 - DNA, 1978 bp, Glycine max
gtttttaaaaaatacactcccttgtttacctataaaaggggagtggataagtgaatatagcaagttccttttttttatcctcaatttttctcttaataaaaaaaaacatttttttcttcttaatggtcaaggatagtggcagcaggctttcactctcctgaaatcttgttaacatggtggcccctgaaattaaggcgcgttcatagtttgtcattactcactattactacagcgttttatttcacagttcacacacatcttcactgatgtgcattgtgccactttccctaatattggaaacttttcaacacccccgcatcagatcttgatcccaaaccaattcaagtaggcaacaaaacaacgtgtgtacgatgaaacccactttaagattcatcgttttcctcctcacccttctcctggtactgaggtttaacgttgccacagaggttaaggatgagttggaggaattgttagcagtggacgaggaagtagaacgggaagccgaaaagggtggcgagaaattatccgaagcagaggttttgagcaaagcccaaaggatcgtaatttgagctcaagaacgagaacacagagagggttgtgaatgggaacgagtttgttcttgttctggggtatgcaccttggtgtccaaggagtgctgagctaatgccccattttgcagaggctgcaacttctctcaaggaattgggaagccctcttattatggccaaacttgatgctgacaggtatcccaagccagcttctttccttggtgtcaaaggcttccccactttgcttctctttgtcaatggcacctctcagccctactctggcggtttcacagcagatgatatagtgatatgggcacaaaaaaagactagtactcctgtcattcggataagttcagtggcagaagcagaaaagtttctgacaaagtatcaaacatttcttattggtcggtttgaaaattttgagggacctgattatgaagaatttgtgagtgctgcaaagtctgataatgaaatccagtttgtggaaacgagtcaggtagagcttgctcaagttctttatccagatatcaagcctaccgatcgttttcttggaattgttaagagtgaacccgaaagatacagtgcttatgatggagctttcatactgaataaaatactggaatttgtagactacaacaagtttccattagttacaaagctgactgaaatgaattctgtcagagtctactccagtcccatcaagcttcaggttttagtctttgcaaacattgatgacttcaagaatcttcttgatactcttcaagatgttgcaaaaacattcaagtcaaagataatgtttatatatgtggatattaatgacgagaaccttgcaaagcccttcttaacattgtttggtcttgaggaatcaaaaaatactgtggagttctgcaataatctcatgcaaggttctttgtcgccatacttcaagtcacagccaattccagataacacagaagcaagtgttcgtgctattgtcgggaaaacatttgatgatgaaatcttgagcagcaagaaggatgtgctcttggaggtatttacgccttggtgtatgaactgtgaggccacaagcaagcaagtagagaagttggcaaagcactacaaaggatcaagtaatctaatatttgcaaggacagatgcttcagcaaatgaacatccaaaactgcaagtgaatgactaccccacgcttctattttacagagcagatgataaggcaaacccgatcaaactttctacaaaatctagtttgaaagagttggctgcatccatcaacaaatatctaaaagtcaagaatcaagtactcaaagatgagttatagaacatatcaaaaaagttttgggagaaaaacacttaaccatctagaaagtaaacattatggaaagaaacaaatactatgattgtcttgcgtaagcattttctaatttttataaccc

SEQ ID NO: 13510 - protein, 399 aa, Glycine max
MPHFAEAATSLKELGSPLIMAKLDADRYPKPASFLGVKGFPTLLLFVNGTSQPYSGGFTADDIVIWAQKKTSTPVIRISSVAEAEKFLTKYQTFLIGRFENFEGPDYEEFVSAAKSDNEIQFVETSQVELAQVLYPDIKPTDRFLGIVKSEPERYSAYDGAFILNKILEFVDYNKFPLVTKLTEMNSVRVYSSPIKLQVLVFANIDDFKNLLDTLQDVAKTFKSKIMFIYVDINDENLAKPFLTLFGLEESKNTVEFCNNLMQGSLSPYFKSQPIPDNTEASVRAIVGKTFDDEILSSKKDVLLEVFTPWCMNCEATSKQVEKLAKHYKGSSNLIFARTDASANEHPKLQVNDYPTLLFYRADDKANPIKLSTKSSLKELAASINKYLKVKNQVLKDEL

SEQ ID NO: 13511 - protein, 380 aa, Glycine max
MAKLDADRYPKPASFLGVKGFPTLLLFVNGTSQPYSGGFTADDIVIWAQKKTSTPVIRISSVAEAEKFLTKYQTFLIGRFENFEGPDYEEFVSAAKSDNEIQFVETSQVELAQVLYPDIKPTDRFLGIVKSEPERYSAYDGAFILNKILEFVDYNKFPLVTKLTEMNSVRVYSSPIKLQVLVFANIDDFKNLLDTLQDVAKTFKSKIMFIYVDINDENLAKPFLTLFGLEESKNTVEFCNNLMQGSLSPYFKSQPIPDNTEASVRAIVGKTFDDEILSSKKDVLLEVFTPWCMNCEATSKQVEKLAKHYKGSSNLIFARTDASANEHPKLQVNDYPTLLFYRADDKANPIKLSTKSSLKELAASINKYLKVKNQVLKDEL

SEQ ID NO: 13512 - protein, 215 aa, Glycine max
MNSVRVYSSPIKLQVLVFANIDDFKNLLDTLQDVAKTFKSKIMFIYVDINDENLAKPFLTLFGLEESKNTVEFCNNLMQGSLSPYFKSQPIPDNTEASVRAIVGKTFDDEILSSKKDVLLEVFTPWCMNCEATSKQVEKLAKHYKGSSNLIFARTDASANEHPKLQVNDYPTLLFYRADDKANPIKLSTKSSLKELAASINKYLKVKNQVLKDEL

SEQ ID NO: 13513 - DNA, 769 bp, Glycine max
gatagggtttttgtcgttgcgactaagagttgctgcttcttccgccactcagcacttcgctccctctgtgcttcaccaaccatggccgaaatcgaagctaccgttccagatccctctcaaatcgacgtcaaacttttcaaccgctggagcttcgacgacgttgaggttactgatatgtctctggctgattacattggagtgtccccgtcaaagcatgctacatatgttcctcacactgctggtaggtactcagtgaagcggttcaggaaggcgcagtgccccattgttgagagactcaccaactctctcatgatgcacggtagaaacaatggcaagaaactcttggctgttaggatcatcaagcatgctatggagattattcatttgttgactgaccagaaccccattcaggttattgttgatgctgtcatcaacagtggtcctcgtgaagatgcaacaagaattggttctgctggagttgtaaggaggcaggctgtggatatttcaccccttcggcgtgtgaatcaggctatatatcttctaacaactggtgcacgcgaagctgctttcagaaatattaagacaattgctgaatgcttggctgatgaacttattaatgcagcaaaagggtcgtccaacagctatgctatcaagaaaaaggatgaaattgagagagttgccaaggcaaaccgttgagcagcttgtggaagcaatatttgcgattgtgaagattttgttttggtctatgttattcatttaatgatatttt

SEQ ID NO: 13514 - protein, 231 aa, Glycine max
DRVFVVATKSCCFFRHSALRSLCASPTMAEIEATVPDPSQIDVKLFNRWSFDDVEVTDMSLADYIGVSPSKHATYVPHTAGRYSVKRFRKAQCPIVERLTNSLMMHGRNNGKKLLAVRIIKHAMEIIHLLTDQNPIQVIVDAVINSGPREDATRIGSAGVVRRQAVDISPLRRVNQAIYLLTTGAREAAFRNIKTIAECLADELINAAKGSSNSYAIKKKDEIERVAKANR

SEQ ID NO: 13515 - protein, 204 aa, Glycine max
MAEIEATVPDPSQIDVKLFNRWSFDDVEVTDMSLADYIGVSPSKHATYVPHTAGRYSVKRFRKAQCPIVERLTNSLMMHGRNNGKKLLAVRIIKHAMEIIHLLTDQNPIQVIVDAVINSGPREDATRIGSAGVVRRQAVDISPLRRVNQAIYLLTTGAREAAFRNIKTIAECLADELINAAKGSSNSYAIKKKDEIERVAKANR

SEQ ID NO: 13516 - protein, 173 aa, Glycine max
MSLADYIGVSPSKHATYVPHTAGRYSVKRFRKAQCPIVERLTNSLMMHGRNNGKKLLAVRIIKHAMEIIHLLTDQNPIQVIVDAVINSGPREDATRIGSAGVVRRQAVDISPLRRVNQAIYLLTTGAREAAFRNIKTIAECLADELINAAKGSSNSYAIKKKDEIERVAKANR

SEQ ID NO: 13517 - DNA, 1971 bp, Glycine max
  misc_feature (1899)..(1899): n is a, c, g, or t
  misc_feature (1941)..(1941): n is a, c, g, or t
aaagcttccaatgcaagcttaaggttagtttgttgttcttttcgtgcgtgagtgagtgcgtgacccatcatcaaagtgaacacacacttaccagtacagttcacagttcccagttcccagtagtggtggaagcgcgcgaagactgaagagggaaaattcaggtaattagggttttgaaagtggcgatggaagaggcaaaagtggaaactccgatgacagcgtcgagaggcaacattggcagtggtggtgacaattgctcgcagagtttgagccctagagcgcgcattgtctccgtcgcctccaacatcgcctcgcagcctcttcacaactccgatcctcaagtttggggcgttctcactgctatctccaacaatgcccgcaaaaggcaccagggaattaacattttattaactgctgatgagcattgtattggtcgattggtagaggatgtgcgtttccagattgattcaaattctgttagtgcaaatcattgccgaatatacaggatgaaagttactaatgaaaatatggagaataccacatcaatattcttgaaagatacaagcacaaatggaacttaccttaactgggagaaattgaaaaagaatggtgctgctgtgaaagtctgccatggtgatattatatcatttgctgctcctccgcagcatgatctggcatttgcttttgtatatcgagaggtgcttgtgtccagccccatgccagataatgcagttgctaaacgaaaagctgaggattttgtttctgaaaacaagagattgaaaggtttaggcattggtgctcctgagggtcccatatctctagatgattttcgaagtcttcaaagatcaaacatggaattgagaaagcaattggagaatcaggtggttacaattgatactttgcgtagtgacaatcgtgcagctgttgaacgccatgaaagtgaattaaaatcagtcaaagagtcagttgaaaaatgttaccttgatcaattaaaagaattacagcaaatggtggatctcaaacagaaggaattaggggatcttaacagagcatctgctgaacaaaaacatgccattgaagaccttgatgagaggcttagtgcttctatacagtcatgtgctgaagcaaattctataataatcaaaaggtaaatatagctgtactgaaggaacaattggatgaagagcggactcaacgaaaagaagagcgagaaaaggctgctggtgatttaaaagctgctgttcatagagcccagtctgaggctcaggaggaattaaaacgactctcagatgcttccttaagaagagaaagagagctacaagaaacaataaataagctacaggagtcagagagagaaatgtctctgctggttgaaaccttgaggttcaaactggaagataccaggcaaaaattggttgcatctgataataaggttcgccaattggagacccaagtacatgaagagaagcttgccactgaaaatgagatgaagaaagtagaacttgaacaacaggaaacaagaagattaaggaaagagcttgagagcgaaaaggcagctcgagaagaagcttgggctaaagtttctgttcttgagcttgagataaatgctgcaatgcgagatcttgattttgagaggcggaggttaaaaggtgccagggaaagacttatgcttcgggaaacacagcttcgagcattttattccactactgaagagatacaaatattgtttgctaagcaacaggaacaattgaagtctatgcagagaactctagaagatgatgaaaattatgagaatacttctgtagaaatggatggagtcattgttggaacctctggcagagaaaaagaagttgatggattccatggccaaaattgtgccaaggcagggtcaactacttntgcacaaaggctcaacgtagttcatgttgaaacgtcgagcantgaagcaagtgtcactgagaagcatgactg

SEQ ID NO: 13518 - protein, 321 aa, Glycine max
MEEAKVETPMTASRGNIGSGGDNCSQSLSPRARIVSVASNIASQPLHNSDPQVWGVLTAISNNARKRHQGINILLTADEHCIGRLVEDVRFQIDSNSVSANHCRIYRMKVTNENMENTTSIFLKDTSTNGTYLNWEKLKKNGAAVKVCHGDIISFAAPPQHDLAFAFVYREVLVSSPMPDNAVAKRKAEDFVSENKRLKGLGIGAPEGPISLDDFRSLQRSNMELRKQLENQVVTIDTLRSDNRAAVERHESELKSVKESVEKCYLDQLKELQQMVDLKQKELGDLNRASAEQKHAIEDLDERLSASIQSCAEANSIIIKR

SEQ ID NO: 13519 - protein, 312 aa, Glycine max
MTASRGNIGSGGDNCSQSLSPRARIVSVASNIASQPLHNSDPQVWGVLTAISNNARKRHQGINILLTADEHCIGRLVEDVRFQIDSNSVSANHCRIYRMKVTNENMENTTSIFLKDTSTNGTYLNWEKLKKNGAAVKVCHGDIISFAAPPQHDLAFAFVYREVLVSSPMPDNAVAKRKAEDFVSENKRLKGLGIGAPEGPISLDDFRSLQRSNMELRKQLENQVVTIDTLRSDNRAAVERHESELKSVKESVEKCYLDQLKELQQMVDLKQKELGDLNRASAEQKHAIEDLDERLSASIQSCAEANSIIIKR

SEQ ID NO: 13520 - protein, 214 aa, Glycine max
MKVTNENMENTTSIFLKDTSTNGTYLNWEKLKKNGAAVKVCHGDIISFAAPPQHDLAFAFVYREVLVSSPMPDNAVAKRKAEDFVSENKRLKGLGIGAPEGPISLDDFRSLQRSNMELRKQLENQVVTIDTLRSDNRAAVERHESELKSVKESVEKCYLDQLKELQQMVDLKQKELGDLNRASAEQKHAIEDLDERLSASIQSCAEANSIIIKR

SEQ ID NO: 13521 - DNA, 1617 bp, Glycine max
gggcacttccaaagggattctagaaattgccaagttcggcgtctatgtcaccgctcatgtacactttcgccgacaatcccagcaacctccgcaagttcatgggacatgaagcaaatcagagagtttgattgggaagtatggtgtggaagcttttgggagcacgccctctctgctcatattcttcttctttgcttctcacacccctcttatttcgcagcaaaataagcttggttcatggccaggaacctatttttgggcacctctgttacatgaaaccatctcctttcttggggaacgtaagctttcattcatatccatttctaaagtttaacgataaggttgtagagcaacaacatcaggattctcaaaaggcctcaagtgctaatgttgatggtgatggtaatgccaaagtaaagaggaacaaattaaaggggaaaagagcagttgtaagatggctcaagttctttagatttaagaagaagaaagagtatgaaaggatgacagcagaggaaaaaaatttatacaaattgttaaaggctcgaaaaaaagaagagagactttgtgaagctctgaaaaagattgagcctgcagaatcttcagaaacaacccatgatcctgagatattaaccccagaagagcactttttcttcttaaagatgggcctcaaaagcaaaaattacgtgccagttggaagacgaggaatttaccaaggtgtaattttgaacatgcatctgcattggaaaaagcatcaaactttgaaagtggtggtgaagacattttcagcagaggaggttaaggaaattgctgctgagctggcaagattgagcggaggtatagtgcttgacattcatgaagataacacaataataatgtacagagggaaaaactactctcaaccaccaacagagatcatgtctccacgagtctctctttcaagaaagaaggcattggataaatccaaatacagggatgccctccgagctgtgaggagatatattccaaggcttgaacaagagcttgaaattcttcgtgctcaatttaaaagttcagctgaaagtaatacagatgctgctgaggcaatccagaacagtggcagagagagtattgagtctgggagcatctcaaatttccagctacagaattcatataaagaccgtgaaatgatgaatgttaacattgggagcacagaggatgagacagatatgaactctgaattggattctgattctgataagttatcagatatatttgagactgattcagatactgagaatttcgtaaaggaggagaaacctctttacttggacgagtttgataattttccagagcaaagcgatggagaaatgaatgattttgaggagcatatgcgacaaatgtctctgaaatcaaaaaacatggaaaaggacgataacttacctaagttggacgaagttgacaagatttttctgcaagctacttcctttttaaagaaaaagataaaatgagaaatatgcaaaagacaagtgtaatcattgtattggatataaacagtgtagtttgggagaaattacaacgtacaacaatgaagtaacattgtgtttgactcgtttttaacacaatagataaaaatttaattgt

SEQ ID NO: 13522 - protein, 448 aa, Glycine max
MVWKLLGARPLCSYSSSLLLTPLLFRSKISLVHGQEPIFGHLCYMKPSPFLGNVSFHSYPFLKFNDKVVEQQHQDSQKASSANVDGDGNAKVKRNKLKGKRAVVRWLKFFRFKKKKEYERMTAEEKNLYKLLKARKKEERLCEALKKIEPAESSETTHDPEILTPEEHFFFLKMGLKSKNYVPVGRRGIYQGVILNMHLHWKKHQTLKVVVKTFSAEEVKEIAAELARLSGGIVLDIHEDNTIIMYRGKNYSQPPTEIMSPRVSLSRKKALDKSKYRDALRAVRRYIPRLEQELEILRAQFKSSAESNTDAAEAIQNSGRESIESGSISNFQLQNSYKDREMMNVNIGSTEDETDMNSELDSDSDKLSDIFETDSDTENFVKEEKPLYLDEFDNFPEQSDGEMNDFEEHMRQMSLKSKNMEKDDNLPKLDEVDKIFLQATSFLKKKIK

SEQ ID NO: 13523 - protein, 404 aa, Glycine max
MKPSPFLGNVSFHSYPFLKFNDKVVEQQHQDSQKASSANVDGDGNAKVKRNKLKGKRAVVRWLKFFRFKKKKEYERMTAEEKNLYKLLKARKKEERLCEALKKIEPAESSETTHDPEILTPEEHFFFLKMGLKSKNYVPVGRRGIYQGVILNMHLHWKKHQTLKVVVKTFSAEEVKEIAAELARLSGGIVLDIHEDNTIIMYRGKNYSQPPTEIMSPRVSLSRKKALDKSKYRDALRAVRRYIPRLEQELEILRAQFKSSAESNTDAAEAIQNSGRESIESGSISNFQLQNSYKDREMMNVNIGSTEDETDMNSELDSDSDKLSDIFETDSDTENFVKEEKPLYLDEFDNFPEQSDGEMNDFEEHMRQMSLKSKNMEKDDNLPKLDEVDKIFLQATSFLKKKIK

SEQ ID NO: 13524 - protein, 328 aa, Glycine max
MTAEEKNLYKLLKARKKEERLCEALKKIEPAESSETTHDPEILTPEEHFFFLKMGLKSKNYVPVGRRGIYQGVILNMHLHWKKHQTLKVVVKTFSAEEVKEIAAELARLSGGIVLDIHEDNTIIMYRGKNYSQPPTEIMSPRVSLSRKKALDKSKYRDALRAVRRYIPRLEQELEILRAQFKSSAESNTDAAEAIQNSGRESIESGSISNFQLQNSYKDREMMNVNIGSTEDETDMNSELDSDSDKLSDIFETDSDTENFVKEEKPLYLDEFDNFPEQSDGEMNDFEEHMRQMSLKSKNMEKDDNLPKLDEVDKIFLQATSFLKKKIK

SEQ ID NO: 13525 - DNA, 2006 bp, Glycine max
  misc_feature (434)..(434): n is a, c, g, or t
  misc_feature (1958)..(1958): n is a, c, g, or t
ttttcaccttattcatctcaaagatttctcctctctctcctttcctctctctttctgccttctggtgtgttttcaaaacgcgcttaaaaccgtgatgggtgccgtcgtcgagtgttacccacagccgcgcacggcggtgctgtccctgaacaccttgccgttagggttccgtttccgtcccaccgatgaggagcttattgactactacctccgctcgaagatcaacggaaatggtgatgatgtttgggttattcgtgagattgatgtctgcaaatgggagccttgggacttgcctgatttgtcagtggtacggaacaaggatccagagtggttcttcttctgtccgcaggaccggaagtatccgaacgggcacaggttgaaccgagctacgagtcatggctattggaaggcaacgggaaaggatcggaggattnagtctggctccaccttgattggaatgaagaagactcttgttttctataccggtcgtgctcccaaggggaagaggaccaattgggttatgcatgagtacaggcctacgctgaaggagcttgatggtaccaatcctggacagaatccatatgtcctttgtcgattatttaagaaacaagatgagagtcttgaagcttcaaacggtgatgatgtggatcggactgcttcaactcctatgactgccaattactctccagacgaaatacaatctgattcagctctggttccagcatcttcctcacaggttactgaagatgataagcctctaccagttatttctgagaactctgaggaagcaatatccaacattataacccctggtgagattcatagtgacggatgtaatgctcctgatgcacaagatcaaattgtagaaccagttgcagaggaggatcagccgttgaacgtggacatattttatgacccaacaaatctgccattagacgacaaattattctcccctgtccatgcacatttcccaacagatttttattatcaagctaacaatcaatcagaacttcagtatggtacaaatgagaatatttcagaattttttgactcggttgttaattgggatgcgttctctcatgatactagcagtctagatctgagctcatccttccttattaataatacggacaatggatcaggcagtgactcggatgttgaaatgaccaatatgccacatctgcaagcattacataattatcctaaggaggcagttgagcagaagagcaatgtgggattatttcagaacaatttccagatggcgttgtcaaatgatagtactatgggccaagtgcacaatatggtcaactattgcgagcaaccaagaaactttgatgcatttgttagtgctgatactggaatcagaataaggactcgtccaggaagaaatgaacagccaaacatggacacgatggtacaatcacaaggtattgcaccaaggagaatacgattgggagttgttaggcgtccgcttggttcccaggatgggagttgtgcttgtgccccagaagaccataattcaaaaaccatcattactgcagagaaaaaagcttcagaatcagaaaaccatgctgccgatgggagttccactgtttctgacatgagttccactgttacagatgatgtggatgaaccagaggaggcatctcccgagtcaaccgacctaagaaacattagtgagaaacatgttgcaactgcagaatccgtcgcagggtcgaaagtccttctagtgaacagaagggtccactacacctcaaaggtttcctctaaccgtgccacgtggtctaatgttctcgcagtttctgccgctgtattggtctcagcaatactccttgttaatatatgggcatatgtcagatcttaaactgcttacatgtagtggaagatcatttcttttgtgcgaaatttgcctccattgcttttttgcccggttaaggaggcgtgtaggattgacttgntctgacttgttgataacaatgttgtacaatatatatgtgcatatgtat

SEQ ID NO: 13526 - protein, 620 aa, Glycine max
  misc_feature (145)..(145): Xaa can be any naturally occurring amino acid
FHLIHLKDFSSLSFPLSFCLLVCFQNALKTVMGAVVECYPQPRTAVLSLNTLPLGFRFRPTDEELIDYYLRSKINGNGDDVWVIREIDVCKWEPWDLPDLSVVRNKDPEWFFFCPQDRKYPNGHRLNRATSHGYWKATGKDRRIXSGSTLIGMKKTLVFYTGRAPKGKRTNWVMHEYRPTLKELDGTNPGQNPYVLCRLFKKQDESLEASNGDDVDRTASTPMTANYSPDEIQSDSALVPASSSQVTEDDKPLPVISENSEEAISNIITPGEIHSDGCNAPDAQDQIVEPVAEEDQPLNVDIFYDPTNLPLDDKLFSPVHAHFPTDFYYQANNQSELQYGTNENISEFFDSVVNWDAFSHDTSSLDLSSSFLINNTDNGSGSDSDVEMTNMPHLQALHNYPKEAVEQKSNVGLFQNNFQMALSNDSTMGQVHNMVNYCEQPRNFDAFVSADTGIRIRTRPGRNEQPNMDTMVQSQGIAPRRIRLGVVRRPLGSQDGSCACAPEDHNSKTIITAEKKASESENHAADGSSTVSDMSSTVTDDVDEPEEASPESTDLRNISEKHVATAESVAGSKVLLVNRRVHYTSKVSSNRATWSNVLAVSAAVLVSAILLVNIWAYVRS

SEQ ID NO: 13527 - protein, 589 aa, Glycine max
  misc_feature (114)..(114): Xaa can be any naturally occurring amino acid
MGAVVECYPQPRTAVLSLNTLPLGFRFRPTDEELIDYYLRSKINGNGDDVWVIREIDVCKWEPWDLPDLSVVRNKDPEWFFFCPQDRKYPNGHRLNRATSHGYWKATGKDRRIXSGSTLIGMKKTLVFYTGRAPKGKRTNWVMHEYRPTLKELDGTNPGQNPYVLCRLFKKQDESLEASNGDDVDRTASTPMTANYSPDEIQSDSALVPASSSQVTEDDKPLPVISENSEEAISNIITPGEIHSDGCNAPDAQDQIVEPVAEEDQPLNVDIFYDPTNLPLDDKLFSPVHAHFPTDFYYQANNQSELQYGTNENISEFFDSVVNWDAFSHDTSSLDLSSSFLINNTDNGSGSDSDVEMTNMPHLQALHNYPKEAVEQKSNVGLFQNNFQMALSNDSTMGQVHNMVNYCEQPRNFDAFVSADTGIRIRTRPGRNEQPNMDTMVQSQGIAPRRIRLGVVRRPLGSQDGSCACAPEDHNSKTIITAEKKASESENHAADGSSTVSDMSSTVTDDVDEPEEASPESTDLRNISEKHVATAESVAGSKVLLVNRRVHYTSKVSSNRATWSNVLAVSAAVLVSAILLVNIWAYVRS

SEQ ID NO: 13528 - protein, 468 aa, Glycine max
MKKTLVFYTGRAPKGKRTNWVMHEYRPTLKELDGTNPGQNPYVLCRLFKKQDESLEASNGDDVDRTASTPMTANYSPDEIQSDSALVPASSSQVTEDDKPLPVISENSEEAISNIITPGEIHSDGCNAPDAQDQIVEPVAEEDQPLNVDIFYDPTNLPLDDKLFSPVHAHFPTDFYYQANNQSELQYGTNENISEFFDSVVNWDAFSHDTSSLDLSSSFLINNTDNGSGSDSDVEMTNMPHLQALHNYPKEAVEQKSNVGLFQNNFQMALSNDSTMGQVHNMVNYCEQPRNFDAFVSADTGIRIRTRPGRNEQPNMDTMVQSQGIAPRRIRLGVVRRPLGSQDGSCACAPEDHNSKTIITAEKKASESENHAADGSSTVSDMSSTVTDDVDEPEEASPESTDLRNISEKHVATAESVAGSKVLLVNRRVHYTSKVSSNRATWSNVLAVSAAVLVSAILLVNIWAYVRS

SEQ ID NO: 13529 - DNA, 1550 bp, Glycine max
acagtgcttgaaaccgttcaatcagtgtaatggcgaaggaagatgtgtttgagttcctcgggaacgttcctctgctacagaggcttcctggctcgtctgtgcggaagatatctgagcttgtgattctcaaacactttgagccaggagagtatgttgttcgtgagggagaacgtggggacggtctttacttcatctgggagggagaggctgaggttgttggctctgtcaatgcggatgatgataatcatccagagtttcaattgaaaagatatgactattttggttttggtttgtcaaatgaagttcaccatgctgatgtcatagctttgacaaagctatcatgcttggtgctgccccatgagcactcagcattgctgcagccaaagtctatctggagtgcagaaaaatctcatgatacatgctcacttgtggagcatatattgcatttggaacctatagaggtagacatcttccgaggaatcactcctacaaatgctccaacatttgggaaggtatttggtggacaaatagttggacaggcactggctgcggcatcaaaatctgttgattgtcttaaagttgttcatagcttgcatgtctattttcttcttgtgggggattttaacatacccattatatatcaagttaagcgtctccgtgatgggaagagttttgctactaggaaagtggatgcaattcaaaagggaaatgtcatattcactttgctggcttcatttcacaaggaagaagtagggtttcaccaccaggaagtgtctatcccatcagtccctgctccagatacgcttttatcgttggaagagcttcgggaacaacgtcttactgaccctcgtctcccaagaacttaccggaacaaggttgctacaattgaattcattccctggcccatagagatacggttctgtgaacctaaaatttcaacaaatcagaccaaatctcctcctagtttgagatattggtttagagcaaggggaaaactttcagatgatgaagccttgcataggtgtgtggtagcatatacttcagatctaatctttcttcaagtgagtttaaaccccaaccgtaggaagggcaggaaggcacgtgctgtgagtctggaccactccatgtggtttcacagacctttacgagctgatgactggatactatttgtgatctttagtcctactgccaataatgcacgtggctatgtcactggccaaatgttcaatcagaagggagagctacttgtatcagtggttcaagaaggtgtaatgagggaagttatttctgcaaagtcagccatcaaatctaatttgtgaaaatctgaaaatgcatagaactagtggttttctttttagttctgtcttgttttatagtgcatggtgaggacatctcttttgttttccttctatggtgaaccatataattggtggtgcccagtttatcaccatcatatagtgtatatttatttttaatcaacggttcaaaattgtgattgacaagtaattgatgtgttggatttatttacattaactagttttaaaatttgc

SEQ ID NO: 13530 - protein, 429 aa, Glycine max
MAKEDVFEFLGNVPLLQRLPGSSVRKISELVILKHFEPGEYVVREGERGDGLYFIWEGEAEVVGSVNADDDNHPEFQLKRYDYFGFGLSNEVHHADVIALTKLSCLVLPHEHSALLQPKSIWSAEKSHDTCSLVEHILHLEPIEVDIFRGITPTNAPTFGKVFGGQIVGQALAAASKSVDCLKVVHSLHVYFLLVGDFNIPIIYQVKRLRDGKSFATRKVDAIQKGNVIFTLLASFHKEEVGFHHQEVSIPSVPAPDTLLSLEELREQRLTDPRLPRTYRNKVATIEFIPWPIEIRFCEPKISTNQTKSPPSLRYWFRARGKLSDDEALHRCVVAYTSDLIFLQVSLNPNRRKGRKARAVSLDHSMWFHRPLRADDWILFVIFSPTANNARGYVTGQMFNQKGELLVSVVQEGVMREVISAKSAIKSNL

SEQ ID NO: 13531 - DNA, 1695 bp, Glycine max
  misc_feature (204)..(205): n is a, c, g, or t
  misc_feature (210)..(211): n is a, c, g, or t
  misc_feature (213)..(214): n is a, c, g, or t
  misc_feature (217)..(218): n is a, c, g, or t
  misc_feature (1259)..(1259): n is a, c, g, or t
  misc_feature (1364)..(1364): n is a, c, g, or t
  misc_feature (1486)..(1486): n is a, c, g, or t
  misc_feature (1524)..(1524): n is a, c, g, or t
  misc_feature (1674)..(1674): n is a, c, g, or t
tctttgtgcgtagcgtagaaatgactccatctttgcgattctcaactttctctctctaaaaaacccatcagagcatgaggagagagaaacttccctgcccttccatttccctctcgattccttcgcctttgctttcgatcctttgctagaagagaaccttattcctctctgtctctcccccttcaaattcccttccttttcttnnatatnnannctnncttcctaaccgcccgatgcactttggttttgcaaactaattcgttggctaaattactccgattgtgaactgtttaaattccaggttctgttggaatatccaaaatggcaaaaggtagcaggggaagacacaggattgcttctcgtcaattcagagtgactccatacccactggcttcttgcaaaagggacatttgtgaggacatgtgccaaaagaaatgttctaaggctttggaaaagaaagagttggaagatgttacgtgttctgtgtgcatggaatatccacacaatgctgttcttcttctttgttcttctcatgacaagggttgccgtccctatatgtgtggaactagctttcgtcattctaactgtcttgatcagtacaagaaagcttatactaaagtaatttcacctaataggcaacctatgcaaggcactccaggtgtgctacaagattcaaacttgcctcttgagaagagtgaagccacagagcttgcatgtcctctatgcaggggtcaggtgaaaggttggactgttgtggaacctgttcgggactatctgaatgcaaagaaaagaggctgcatgcaggatgactgcttgtatgttgggagctataaggagttgaagaagcatgtgcgggcagagcatccgtcggcacggccacggatggtggatcctgctgatgaacagaaatggagatggctcgagtgggagcgtgaaagagaagatgttatcagcacagttacatcagcaatgcctggggcagtagtttttggagattatgttatagaaggtcatcataatgactttgatacagatgaagaggagggttcaggtaatgcagaaagaaatggaagatttcagatgggtttagaggcaatgaatttcttcctcctgttgcatgcagttcggcaagggaatgagcttaacaaccttggtagacggctgaggcctgagctgacccacaacaacagggttgcaggtcagaatgcagctgccgtgctggatatttcagatgaagacaatgataatgatggcaggtncaatgaagataataatagcaggtacaatgaagatactgatggcggtgtatctttggttagccgtctccaccgccatggtggtggcagagttttattgggtcgttntggtaggaggcggagatgtagagaagcacgtgcaaggattggagatagttgaagatcgtgcatgaaacaggaggttggcaaaggacaagtttcgtaggcatatcagattagaaaattcagcnccatgtagtggtggcttaataacatttgaagggctttntcccccaaaacaggaaaatcaaaagatgggcatttttatttttttaaaatcttgtaatttcgtttacatgtacatccctaccttcctcctattgcttttgcacattccaatgtgaattcacttgtgtaaacatttgatttttatgaaatntttgacaagaagttgattgtt

SEQ ID NO: 13532 - protein, 364 aa, Glycine max
  misc_feature (313)..(313): Xaa can be any naturally occurring amino acid
  misc_feature (348)..(348): Xaa can be any naturally occurring amino acid
MAKGSRGRHRIASRQFRVTPYPLASCKRDICEDMCQKKCSKALEKKELEDVTCSVCMEYPHNAVLLLCSSHDKGCRPYMCGTSFRHSNCLDQYKKAYTKVISPNRQPMQGTPGVLQDSNLPLEKSEATELACPLCRGQVKGWTVVEPVRDYLNAKKRGCMQDDCLYVGSYKELKKHVRAEHPSARPRMVDPADEQKWRWLEWEREREDVISTVTSAMPGAVVFGDYVIEGHHNDFDTDEEEGSGNAERNGRFQMGLEAMNFFLLLHAVRQGNELNNLGRRLRPELTHNNRVAGQNAAAVLDISDEDNDNDGRXNEDNNSRYNEDTDGGVSLVSRLHRHGGGRVLLGRXGRRRRCREARARIGDS

SEQ ID NO: 13533 - protein, 331 aa, Glycine max
  misc_feature (280)..(280): Xaa can be any naturally occurring amino acid
  misc_feature (315)..(315): Xaa can be any naturally occurring amino acid
MCQKKCSKALEKKELEDVTCSVCMEYPHNAVLLLCSSHDKGCRPYMCGTSFRHSNCLDQYKKAYTKVISPNRQPMQGTPGVLQDSNLPLEKSEATELACPLCRGQVKGWTVVEPVRDYLNAKKRGCMQDDCLYVGSYKELKKHVRAEHPSARPRMVDPADEQKWRWLEWEREREDVISTVTSAMPGAVVFGDYVIEGHHNDFDTDEEEGSGNAERNGRFQMGLEAMNFFLLLHAVRQGNELNNLGRRLRPELTHNNRVAGQNAAAVLDISDEDNDNDGRXNEDNNSRYNEDTDGGVSLVSRLHRHGGGRVLLGRXGRRRRCREARARIGDS

SEQ ID NO: 13534 - protein, 308 aa, Glycine max
  misc_feature (257)..(257): Xaa can be any naturally occurring amino acid
  misc_feature (292)..(292): Xaa can be any naturally occurring amino acid
MEYPHNAVLLLCSSHDKGCRPYMCGTSFRHSNCLDQYKKAYTKVISPNRQPMQGTPGVLQDSNLPLEKSEATELACPLCRGQVKGWTVVEPVRDYLNAKKRGCMQDDCLYVGSYKELKKHVRAEHPSARPRMVDPADEQKWRWLEWEREREDVISTVTSAMPGAVVFGDYVIEGHHNDFDTDEEEGSGNAERNGRFQMGLEAMNFFLLLHAVRQGNELNNLGRRLRPELTHNNRVAGQNAAAVLDISDEDNDNDGRXNEDNNSRYNEDTDGGVSLVSRLHRHGGGRVLLGRXGRRRRCREARARIGDS

SEQ ID NO: 13535 - DNA, 2379 bp, Glycine max
aatttttgggaaaagagtgagagagagagaggagtgggaaatcgagaaaccctagtggagccggaagtggaagtgaagagagtaaatgacgatccattcggtggtgatacagaagctgcttagcaccaatgctcaggtgggtcgacgtgttgccgctcaccatttgaaggagttcacctatggcttccgcaacaaaatggccaccatcgactccgacaagaccctcatttgcatgcgcagtgcctgcaacttcatggcctccctcgcccgccacaacggccgcttcatgttcatcaacaccaaccctctcttcgacgaaatcttcgacctcatgaccaagaaggtgggctcctacagcccctccaccaactctctctggcgcaccggcggcttcctcaccaatagcctcagccccaagaagttccgctctcgcaacaagaagctcgtcttcggccccacccagcctcccgattgcatcttcatcgtcgacaccgagcgtaagtcttctgtcatcaacgaggctttcaagcttcaaattcccgtcgtcgccttggtcgactccgccatgcccctcgacgtctataagcgcattgcctatcctgttcccgccaatcattctgtccaattcgtttatttgttctgtaatttgattaccaaaaccttgcttcacgagaaggccaagtctgatgctgccaatcccgatattgatgctcaaatggaagaagctccgcgcaagggcaagggcaagacctatttggataaggtcgacgtaaccgtagttctctacgataatttagctcccttacctcaagatatagaagaaactaagaagcttttggacaagcttgttgttttgaagtttaatggttctcaaggaagaaatatgtgttttgacggtcccaaatctgcaattgatatttgtgatggactgacatatctggatttgatcattaaccagattgagaccctcaattccaagtatggaagcagggttccattgcttcttttcaataaagatgacattcatgatagttctctaaaggttttggagaagtattctaaatcaagtgttgaagtgcacacttttaaacagggtgaagatcgagagttgaaatcattgggtgaatattatagcaaggaggaagtgcatccatttgatgatgttgatgtgttccgtttactaatgactggtggaacccttgattcattattatcacagggtaaggagtatatcctagtgttgaagtcggacaatgtggcaacagtccttgatccaaacatactaaatcatttgatgataaatgatattgaatattgcatggaggtgacaccaagcaattcgtttaatttaatgttacccacaacgaaatttaagcttcgggagattggtggagaccaagataaacacttgaaggacaatttcaaactcatcgatacaacaaacatgtgggtgagtttaagagccatcaagaggtttgttgacactgttgaagtaaggcagaagaagccctcattttcaaaggacacagcagctggaccagcaataaagttctttgataatgtatttggtgtctccgtgcccgaatctcgctttcttcccttggatgcaacatcagatctattacttcttcagtcagatctatacacttgtagagaaggtgttttaactcgaaatccagctagaactaaccctttaaatcctgtgatagacttgggacctgaatttgaaaagtttggtgactttcaaagtcgcttcagatccattccaagcatcattgagttggacagtttgatggtgagaggtgatgtgtggtttggggctaatattactttgaaggggcaagtgactattgctgcaaaacctggcttgaaattggaaattcctgatggggtgacgattgagaataaggagatcaacgaccctgcagatatctaaggatgaatgttgtcgaagttgctgagatttggttccagtgaatacatgactgctgaactttaatttgcagtgctatacaatttagtttgtcacattagcagccagccatcttttagcttttctatttgctgggaactaaaaggttgcagaagcaaatagttccttacacatttttttttcaagcggcatgatagtggtgaaataattgtctgctcatctatttattcatcctgtaactcttagggcaaggcttgatatagtcacagctgagagcctgagaagctgagacaaggaataggaatagtttcagttttgctggtctttttgccttagatactattagaatcacaccaattgtttactgtaccaatgagttggagcatacattacagaaaagacatttttaaggcatatttgtcattgacttatataagctaccccct

SEQ ID NO: 13536 - protein, 616 aa, Glycine max
MTIHSVVIQKLLSTNAQVGRRVAAHHLKEFTYGFRNKMATIDSDKTLICMRSACNFMASLARHNGRFMFINTNPLFDEIFDLMTKKVGSYSPSTNSLWRTGGFLTNSLSPKKFRSRNKKLVFGPTQPPDCIFIVDTERKSSVINEAFKLQIPVVALVDSAMPLDVYKRIAYPVPANHSVQFVYLFCNLITKTLLHEKAKSDAANPDIDAQMEEAPRKGKGKTYLDKVDVTVVLYDNLAPLPQDIEETKKLLDKLVVLKFNGSQGRNMCFDGPKSAIDICDGLTYLDLIINQIETLNSKYGSRVPLLLFNKDDIHDSSLKVLEKYSKSSVEVHTFKQGEDRELKSLGEYYSKEEVHPFDDVDVFRLLMTGGTLDSLLSQGKEYILVLKSDNVATVLDPNILNHLMINDIEYCMEVTPSNSFNLMLPTTKFKLREIGGDQDKHLKDNFKLIDTTNMWVSLRAIKRFVDTVEVRQKKPSFSKDTAAGPAIKFFDNVFGVSVPESRFLPLDATSDLLLLQSDLYTCREGVLTRNPARTNPLNPVIDLGPEFEKFGDFQSRFRSIPSIIELDSLMVRGDVWFGANITLKGQVTIAAKPGLKLEIPDGVTIENKEINDPADI

SEQ ID NO: 13537 - protein, 579 aa, Glycine max
MATIDSDKTLICMRSACNFMASLARHNGRFMFINTNPLFDEIFDLMTKKVGSYSPSTNSLWRTGGFLTNSLSPKKFRSRNKKLVFGPTQPPDCIFIVDTERKSSVINEAFKLQIPVVALVDSAMPLDVYKRIAYPVPANHSVQFVYLFCNLITKTLLHEKAKSDAANPDIDAQMEEAPRKGKGKTYLDKVDVTVVLYDNLAPLPQDIEETKKLLDKLVVLKFNGSQGRNMCFDGPKSAIDICDGLTYLDLIINQIETLNSKYGSRVPLLLFNKDDIHDSSLKVLEKYSKSSVEVHTFKQGEDRELKSLGEYYSKEEVHPFDDVDVFRLLMTGGTLDSLLSQGKEYILVLKSDNVATVLDPNILNHLMINDIEYCMEVTPSNSFNLMLPTTKFKLREIGGDQDKHLKDNFKLIDTTNMWVSLRAIKRFVDTVEVRQKKPSFSKDTAAGPAIKFFDNVFGVSVPESRFLPLDATSDLLLLQSDLYTCREGVLTRNPARTNPLNPVIDLGPEFEKFGDFQSRFRSIPSIIELDSLMVRGDVWFGANITLKGQVTIAAKPGLKLEIPDGVTIENKEINDPADI

SEQ ID NO: 13538 - protein, 567 aa, Glycine max
MRSACNFMASLARHNGRFMFINTNPLFDEIFDLMTKKVGSYSPSTNSLWRTGGFLTNSLSPKKFRSRNKKLVFGPTQPPDCIFIVDTERKSSVINEAFKLQIPVVALVDSAMPLDVYKRIAYPVPANHSVQFVYLFCNLITKTLLHEKAKSDAANPDIDAQMEEAPRKGKGKTYLDKVDVTVVLYDNLAPLPQDIEETKKLLDKLVVLKFNGSQGRNMCFDGPKSAIDICDGLTYLDLIINQIETLNSKYGSRVPLLLFNKDDIHDSSLKVLEKYSKSSVEVHTFKQGEDRELKSLGEYYSKEEVHPFDDVDVFRLLMTGGTLDSLLSQGKEYILVLKSDNVATVLDPNILNHLMINDIEYCMEVTPSNSFNLMLPTTKFKLREIGGDQDKHLKDNFKLIDTTNMWVSLRAIKRFVDTVEVRQKKPSFSKDTAAGPAIKFFDNVFGVSVPESRFLPLDATSDLLLLQSDLYTCREGVLTRNPARTNPLNPVIDLGPEFEKFGDFQSRFRSIPSIIELDSLMVRGDVWFGANITLKGQVTIAAKPGLKLEIPDGVTIENKEINDPADI

SEQ ID NO: 13539 - DNA, 1680 bp, Glycine max
ttcggcggtggttcgctatcggatccggattctggaagcaccgacacggtggcgctagttccgttcgttcgtttatttgttcgtttcggtgtttttttttctttttctttaacagtgattcgttcgatccagaaattggagtttgattgattggtacgatggcgtatcggcggagacagcagcaagggttttcgaagccttctttttcgactttcgaagaagaagcggcgactcggaaccctaacaatccctttccgcctccaaacgacgacgttgaaggttccgcttcgtcgtcgtcttcgtcttcgcttgctgccaaagctatcagagcttcttcggcgcgtcgcgactcttcgctttcctctctctacggtctctcctctgcttcttcttctccggtttctccttctcaacctactccaactcctcctccttcctccaaggattcaagaccctatgaatatacatctatgaagaacatgaatgagtccaagaatggattttggggtgttctggccagaaaagccaaatcaattattgaagatgataatataccccagcaatctgaaatgtctgagacggggaggtcacaatttcctggtgtagcatctaggagcaagttccaaaattcaaatcacttagaggagagcaatctcaaaagggacagtccagcatttataaagggattagatgctttcacatcttctcttactcatattggtggtaccatcggtaaatccttggaggaaggtttaacaattgttgagaatcggacttcagatatcattcaggaaactcgtaaacatattaggaagaagcctggaaactctgtaggacaaaatcaggagacaaaccattctactacagtgcatcaatcccaattgcggaaccagatgtcaccaaagcaaacagatcaagaacttcaactgaaggcatctcgcgacgttgcaatggcaatggctgccaaagccaaactactccttcgggagttgaagactgtcaaagctgatctggcttttgcaaaggatcgatgtgctcagctagaggaagaaaataaaatcctccgtgagaatcgtgaaaggggagatagccatgatgatgatgatttgatacgacttcaacttgaatctcttctggctgaaaaagctcgcctggcacacgagaactcagtttatgcccgcgagaatcgctttctaagggaggttgtcgagtatcaccaacttacaatgcaggatgttgtctactttgacgagagcaatgaggaagtcactgaagttaatcatcttaaccttcccccagtgcctaagatgtccctggattctattactccatcaacaacctccctttcactgtctccagaaccgaaccttggcatggcttcagaattaaccagaggcatctcatctaccatgcccggaaaggatgccaagatgaggtgactgtaaaggattcacggagttctgaagcgactagaagtatctcttctatcacaggacatgatgcaaaataacatgaaattcttctgttacaatttacaatggtgatgcaccgttttttgatacttcatttgttataatttatgtgctgctcgtttcatgtatcttgggtgacattaccttgatgtaattttataccgtatgttgtgtaactcgagttttatttatttatttattatttttc

SEQ ID NO: 13540 - protein, 426 aa, Glycine max
MAYRRRQQQGFSKPSFSTFEEEAATRNPNNPFPPPNDDVEGSASSSSSSSLAAKAIRASSARRDSSLSSLYGLSSASSSPVSPSQPTPTPPPSSKDSRPYEYTSMKNMNESKNGFWGVLARKAKSIIEDDNIPQQSEMSETGRSQFPGVASRSKFQNSNHLEESNLKRDSPAFIKGLDAFTSSLTHIGGTIGKSLEEGLTIVENRTSDIIQETRKHIRKKPGNSVGQNQETNHSTTVHQSQLRNQMSPKQTDQELQLKASRDVAMAMAAKAKLLLRELKTVKADLAFAKDRCAQLEEENKILRENRERGDSHDDDDLIRLQLESLLAEKARLAHENSVYARENRFLREVVEYHQLTMQDVVYFDESNEEVTEVNHLNLPPVPKMSLDSITPSTTSLSLSPEPNLGMASELTRGISSTMPGKDAKMR

SEQ ID NO: 13541 - protein, 322 aa, Glycine max
MKNMNESKNGFWGVLARKAKSIIEDDNIPQQSEMSETGRSQFPGVASRSKFQNSNHLEESNLKRDSPAFIKGLDAFTSSLTHIGGTIGKSLEEGLTIVENRTSDIIQETRKHIRKKPGNSVGQNQETNHSTTVHQSQLRNQMSPKQTDQELQLKASRDVAMAMAAKAKLLLRELKTVKADLAFAKDRCAQLEEENKILRENRERGDSHDDDDLIRLQLESLLAEKARLAHENSVYARENRFLREVVEYHQLTMQDVVYFDESNEEVTEVNHLNLPPVPKMSLDSITPSTTSLSLSPEPNLGMASELTRGISSTMPGKDAKMR

SEQ ID NO: 13542 - protein, 319 aa, Glycine max
MNESKNGFWGVLARKAKSIIEDDNIPQQSEMSETGRSQFPGVASRSKFQNSNHLEESNLKRDSPAFIKGLDAFTSSLTHIGGTIGKSLEEGLTIVENRTSDIIQETRKHIRKKPGNSVGQNQETNHSTTVHQSQLRNQMSPKQTDQELQLKASRDVAMAMAAKAKLLLRELKTVKADLAFAKDRCAQLEEENKILRENRERGDSHDDDDLIRLQLESLLAEKARLAHENSVYARENRFLREVVEYHQLTMQDVVYFDESNEEVTEVNHLNLPPVPKMSLDSITPSTTSLSLSPEPNLGMASELTRGISSTMPGKDAKMR

SEQ ID NO: 13543 - DNA, 2086 bp, Glycine max
  misc_feature (1965)..(1965): n is a, c, g, or t
aacacagtaactgaaaactttccctgaaacagcacataatatcttgctgccagtgtgcactgcttccacattcagtgttaaaagcctaattccatattcaccactcacttgttcattctacatttagtgtcaaaaagccttttggattaccatacccatttggtgaaagaccccatctttggttgaaagaatgggaagtagcaaacccagatccttcattctccttctatttgtgttcctttgtgtttttgcaacggcacaagaacaacagcaaccaataaaaaccgttgttgttctggtcatggagaaccgttcctttgaccacatgctgggttggatgaaagagagtatcaacacactaatcaatggggtcacaggagatgaatgcaacccggtttccaccaaaagtccaagaaaagattcaatttgcttcaccgatgatgcagagttcgtggatccggatccgggccactcgttcgaggatgtgttgcaacaggtattcggttccagttccggttccggctcaattccttccatgaatggatttgtggaacaagcattgtccatgtcttctccgaacctctctgagactgtcatgaaagggtttaaaccggactctgtgccggtttatgctgctttggttaaggaatttgctgtttttgataggtggttttcttcaattccgggtccaacacaacccaataggctttttgtgtactcagcaacctctcatggctcaacaagtcatatcaagaggcagttagcgaaagggtatcctcaaaaaacaatctttgattcaatgcatgagaatggcctagactttgggatttactttcagaacataccaacaactctgttctataggaatcttaggaaattgaagtacatatggaagttccatcagtatgatttgaagttcaagagggatgctagagatgggaagcttccacccttgactgtgattgagcctaggtactttgatttgaagggcataccggcgaacgatgatcacccgtctcatgatgttgcacatgggcaaatgctggttaaggaggtttatgaggctctaagagcaagtcctcaatggaatgaaacgctttttgttattacatatgatgaacatggtggattttttgatcatgtgaagaccccttttgtcaacattcctaatccagatgggaacaccggacctgctccctatttcttcaagtttgataggttaggggttcgggtgccaactattatggtctctccttggatcaagaaagggactgtgataagtggcgccaaaggaccggctgaaaactcagaatttgagcactcttctattcctgcaaccataaagatgattttcaacctttcctctaactttctgactcacagagatgcatgggctgggacatttgagcatgttgttggggagttaagttcacccagaacagattgcccagtgactatgccagacgtgacacctctaaggagcactgaagcaaaagaaaatgctggcctttctgagtttcagagagaggtagttcaattggcagctgttcttaatggggaccattttttgagcagtttccctgatgaaatgagcaagaagatgagtgtgaaggaagctcacgagtacgtgcgaggagctgtttcaagattcataagagccagcaaggaggccatcaaactaggggctgatgagtctgctattgtggatatgagatcctctctcactactagatcttcagttcataattaatacaaaacaaaactcataaacagacaagagcaaagaaagttgtgtgcctatctctgtatctaactattatagtttttaggttatctgataattcttgtgctagattttgttaggtttgtgaaagtgaaatgcagtagaatggcgtgtttgatagaaggccgtgcaaggacgggaggtttctcaaggtctctgtttgaaagaatataagggaattnaaaaaaaaaaaaaaaaaaagagaatgatggtttggctagtgagtaatttcgaatggaaaactccaatgctgttgtacaaagtacaaacacattataaatgcagctccataattttgttttc

SEQ ID NO: 13544 - protein, 519 aa, Glycine max
MGSSKPRSFILLLFVFLCVFATAQEQQQPIKTVVVLVMENRSFDHMLGWMKESINTLINGVTGDECNPVSTKSPRKDSICFTDDAEFVDPDPGHSFEDVLQQVFGSSSGSGSIPSMNGFVEQALSMSSPNLSETVMKGFKPDSVPVYAALVKEFAVFDRWFSSIPGPTQPNRLFVYSATSHGSTSHIKRQLAKGYPQKTIFDSMHENGLDFGIYFQNIPTTLFYRNLRKLKYIWKFHQYDLKFKRDARDGKLPPLTVIEPRYFDLKGIPANDDHPSHDVAHGQMLVKEVYEALRASPQWNETLFVITYDEHGGFFDHVKTPFVNIPNPDGNTGPAPYFFKFDRLGVRVPTIMVSPWIKKGTVISGAKGPAENSEFEHSSIPATIKMIFNLSSNFLTHRDAWAGTFEHVVGELSSPRTDCPVTMPDVTPLRSTEAKENAGLSEFQREVVQLAAVLNGDHFLSSFPDEMSKKMSVKEAHEYVRGAVSRFIRASKEAIKLGADESAIVDMRSSLTTRSSVHN

SEQ ID NO: 13545 - protein, 482 aa, Glycine max
MENRSFDHMLGWMKESINTLINGVTGDECNPVSTKSPRKDSICFTDDAEFVDPDPGHSFEDVLQQVFGSSSGSGSIPSMNGFVEQALSMSSPNLSETVMKGFKPDSVPVYAALVKEFAVFDRWFSSIPGPTQPNRLFVYSATSHGSTSHIKRQLAKGYPQKTIFDSMHENGLDFGIYFQNIPTTLFYRNLRKLKYIWKFHQYDLKFKRDARDGKLPPLTVIEPRYFDLKGIPANDDHPSHDVAHGQMLVKEVYEALRASPQWNETLFVITYDEHGGFFDHVKTPFVNIPNPDGNTGPAPYFFKFDRLGVRVPTIMVSPWIKKGTVISGAKGPAENSEFEHSSIPATIKMIFNLSSNFLTHRDAWAGTFEHVVGELSSPRTDCPVTMPDVTPLRSTEAKENAGLSEFQREVVQLAAVLNGDHFLSSFPDEMSKKMSVKEAHEYVRGAVSRFIRASKEAIKLGADESAIVDMRSSLTTRSSVHN

SEQ ID NO: 13546 - protein, 474 aa, Glycine max
MLGWMKESINTLINGVTGDECNPVSTKSPRKDSICFTDDAEFVDPDPGHSFEDVLQQVFGSSSGSGSIPSMNGFVEQALSMSSPNLSETVMKGFKPDSVPVYAALVKEFAVFDRWFSSIPGPTQPNRLFVYSATSHGSTSHIKRQLAKGYPQKTIFDSMHENGLDFGIYFQNIPTTLFYRNLRKLKYIWKFHQYDLKFKRDARDGKLPPLTVIEPRYFDLKGIPANDDHPSHDVAHGQMLVKEVYEALRASPQWNETLFVITYDEHGGFFDHVKTPFVNIPNPDGNTGPAPYFFKFDRLGVRVPTIMVSPWIKKGTVISGAKGPAENSEFEHSSIPATIKMIFNLSSNFLTHRDAWAGTFEHVVGELSSPRTDCPVTMPDVTPLRSTEAKENAGLSEFQREVVQLAAVLNGDHFLSSFPDEMSKKMSVKEAHEYVRGAVSRFIRASKEAIKLGADESAIVDMRSSLTTRSSVHN

SEQ ID NO: 13547 - DNA, 1395 bp, Glycine max
  misc_feature (1043)..(1043): n is a, c, g, or t
  misc_feature (1181)..(1181): n is a, c, g, or t
aactaaaaaaatgccctaaaaaaactaaaaaagaaaatgtgaaaagccctggttcaagatgagatgaaaacagagggttacaaattccttggaatcgctctaaccctaacccattctgattcatctcgcatttagtctttgcatctccgtcgcattcaaaatcgaaaatccctttgcggtcacacatcgtagaagctctggcagtgccttccgtttggtgttaaagttctcgcacaggtgcgagaagatggctgattgtgatgatgaacacgttaatcgaattggcgacttaccgatgaatgtgattgttagcatcctacaacgcctgcccttccaagacttagtgaagaccagtgtactggcaagggcatggaggtatatgtggtcgtcgaccccacggcgtgaatttagagatgacttttttgagaagtgtaaccatcttggataccttgaaacttccgccattattacggaagctcttcttctccacaccggccccatacacgtctttgctgtcatccctcctccgcactatcctatcaaattagaatgcctcaacaagtggattctgtttttgtcgaggaaaggggttaaatatattgggcttgcgagtgaacaagaagatccctattgaatgccaactcatattttctcttgtagggacttgatttaccttttacttaataattttagattctcagttgcagctactttccgtggctttccaagtatgattgaacttcacttatttggcattatatttgagtcaggtgcacttgagagtcttatatctggttgtcccttacttacgaacctccagctttcttactgttctggttttgaacatattgatgtctctgctccttttctccaattcctaatgatagaaggtgatgaggttatcaagtcaatttgtttgaaggaaccacatgatttgaattttatccaactctttgctgatggtcctggggataacattgatagagcttgggtagctgatctgttggaagactcgccgaatgttgagaggttatttttgggancaagttacattaagattttgtctgcaggcttctatccgcaagtggagcttagagctataaaatatctggaatggatggtgtggatttcaatgaagcaagagaacttttgttaactatttgtttattacatggaagttnttctaacctagagacatttactataaaggtgaccaagaagacctatgcttcttagtttgttcttgtaattgtcatattttgatttagttttctttgtttgtttcatagtgcaatagcatggcagtggagctacaacagattttggatgtgtttgactatagtaactgttactttaatctgcttcaagatgtgaaaatcacagttaaaacttcct

SEQ ID NO: 13548 - protein, 173 aa, Glycine max
  misc_feature (137)..(137): Xaa can be any naturally occurring amino acid
MPTHIFSCRDLIYLLLNNFRFSVAATFRGFPSMIELHLFGIIFESGALESLISGCPLLTNLQLSYCSGFEHIDVSAPFLQFLMIEGDEVIKSICLKEPHDLNFIQLFADGPGDNIDRAWVADLLEDSPNVERLFLGXSYIKILSAGFYPQVELRAIKYLEWMVWISMKQENFC

SEQ ID NO: 13549 - protein, 141 aa, Glycine max
  misc_feature (105)..(105): Xaa can be any naturally occurring amino acid
MIELHLFGIIFESGALESLISGCPLLTNLQLSYCSGFEHIDVSAPFLQFLMIEGDEVIKSICLKEPHDLNFIQLFADGPGDNIDRAWVADLLEDSPNVERLFLGXSYIKILSAGFYPQVELRAIKYLEWMVWISMKQENFC

SEQ ID NO: 13550 - protein, 128 aa, Glycine max
MADCDDEHVNRIGDLPMNVIVSILQRLPFQDLVKTSVLARAWRYMWSSTPRREFRDDFFEKCNHLGYLETSAIITEALLLHTGPIHVFAVIPPPHYPIKLECLNKWILFLSRKGVKYIGLASEQEDPY

SEQ ID NO: 13551 - DNA, 1530 bp, Glycine max
  misc_feature (1042)..(1042): n is a, c, g, or t
  misc_feature (1054)..(1054): n is a, c, g, or t
  misc_feature (1063)..(1063): n is a, c, g, or t
  misc_feature (1150)..(1150): n is a, c, g, or t
  misc_feature (1208)..(1208): n is a, c, g, or t
  misc_feature (1238)..(1238): n is a, c, g, or t
  misc_feature (1431)..(1431): n is a, c, g, or t
  misc_feature (1454)..(1454): n is a, c, g, or t
aaaactctctctctctctctctacgctaattaaggttcattgggcattggcggattctatttccttttctcaaaacccaatttgcttcttcttcatggaagcactctccttcatcatccccaaagactcttgttctcttctccttcgcactccttcttcatattcctcttcgtctgtcagaactccgccgccgccacttgctttcttcaaaaccacccaacactctcactcgcctcaccttctccgtcttcgcgtttttgccctccctaaccccgacgccgatgaacccaccaacgacttcgctttagcgtctcatcctcaggaaaatttaagccattctgagactgagagttccgaagatgatcaagatgctccaccacaaatggacatgtcgtggtcaacgatcacagccccagctggaagtggatccggtggtggcaccagggctggacttttcagaacacccatttctggtggcgtgcagagtgccacctcagctcacggtttacctagaccggctttagcagtacgcaatttgatggagcaggcaagatttgctcatttgtgcactgtaatgtctcgtatgcaccaccgacgagaaggatatccatttggttctctggttgattttgcaccagactcaacgggtcatccaatattttcattttctcctcttgcgattcacacaaggaatttgttggctgacccaagatgcacactggttgtccagatacctggatggagtggcttgtccaatgcaagggtaactatttttggggatgtctatccacttccagaagatcaacaggaatgggctcataagcagtatattgcgaagcatcaacagggtccttctcaacaatggggcaacttctactattttaggatgcagaatataagggacatatatttcattggaggctttggtactgttgcttgggtggatgtaaaggaatatgaaacccttcaacctgataagattgcagtcgatggtggtgaacagtatttaaaggaactcaatgctatcttctcaaagcccctnaagaaacttttnttttatganaccgaggtagatgacgctgcactcatatctatagacagcaaaggaactgatattagggtccgtcaaggtgcccagttcaacattcanaggatatcatttgatgaaggacagagtgtagaaacattggaagaagctaaagctgctnttcggaaattaatacacaaaggaaaagtgnacaatttgcagaaataagatgttggatgtcctcttcccctttgactagagtagacaacaagatatggaaccatgcgagtttctaatcggactttagaatggttaattttatacattttgcctggttgacatgcaccagacagtgtattatatccatgcatctgcaagcatatttgctaaagtctgatcgtganaggactttttgtgggctataccnccatagtcaaactagaaataatatatcagaactcaataaataatagtatgcttctcccccctaaattcctcacttg

SEQ ID NO: 13552 - protein, 417 aa, Glycine max
  misc_feature (347)..(347): Xaa can be any naturally occurring amino acid
  misc_feature (351)..(351): Xaa can be any naturally occurring amino acid
  misc_feature (354)..(354): Xaa can be any naturally occurring amino acid
  misc_feature (383)..(383): Xaa can be any naturally occurring amino acid
  misc_feature (403)..(403): Xaa can be any naturally occurring amino acid
  misc_feature (413)..(413): Xaa can be any naturally occurring amino acid
KLSLSLSTLIKVHWALADSISFSQNPICFFFMEALSFIIPKDSCSLLLRTPSSYSSSSVRTPPPPLAFFKTTQHSHSPHLLRLRVFALPNPDADEPTNDFALASHPQENLSHSETESSEDDQDAPPQMDMSWSTITAPAGSGSGGGTRAGLFRTPISGGVQSATSAHGLPRPALAVRNLMEQARFAHLCTVMSRMHHRREGYPFGSLVDFAPDSTGHPIFSFSPLAIHTRNLLADPRCTLVVQIPGWSGLSNARVTIFGDVYPLPEDQQEWAHKQYIAKHQQGPSQQWGNFYYFRMQNIRDIYFIGGFGTVAWVDVKEYETLQPDKIAVDGGEQYLKELNAIFSKPXKKLXFYXTEVDDAALISIDSKGTDIRVRQGAQFNIXRISFDEGQSVETLEEAKAAXRKLIHKGKVXNLQK

SEQ ID NO: 13553 - protein, 386 aa, Glycine max
  misc_feature (316)..(316): Xaa can be any naturally occurring amino acid
  misc_feature (320)..(320): Xaa can be any naturally occurring amino acid
  misc_feature (323)..(323): Xaa can be any naturally occurring amino acid
  misc_feature (352)..(352): Xaa can be any naturally occurring amino acid
  misc_feature (372)..(372): Xaa can be any naturally occurring amino acid
  misc_feature (382)..(382): Xaa can be any naturally occurring amino acid
MEALSFIIPKDSCSLLLRTPSSYSSSSVRTPPPPLAFFKTTQHSHSPHLLRLRVFALPNPDADEPTNDFALASHPQENLSHSETESSEDDQDAPPQMDMSWSTITAPAGSGSGGGTRAGLFRTPISGGVQSATSAHGLPRPALAVRNLMEQARFAHLCTVMSRMHHRREGYPFGSLVDFAPDSTGHPIFSFSPLAIHTRNLLADPRCTLVVQIPGWSGLSNARVTIFGDVYPLPEDQQEWAHKQYIAKHQQGPSQQWGNFYYFRMQNIRDIYFIGGFGTVAWVDVKEYETLQPDKIAVDGGEQYLKELNAIFSKPXKKLXFYXTEVDDAALISIDSKGTDIRVRQGAQFNIXRISFDEGQSVETLEEAKAAXRKLIHKGKVXNLQK

SEQ ID NO: 13554 - protein, 290 aa, Glycine max
  misc_feature (220)..(220): Xaa can be any naturally occurring amino acid
  misc_feature (224)..(224): Xaa can be any naturally occurring amino acid
  misc_feature (227)..(227): Xaa can be any naturally occurring amino acid
  misc_feature (256)..(256): Xaa can be any naturally occurring amino acid
  misc_feature (276)..(276): Xaa can be any naturally occurring amino acid
  misc_feature (286)..(286): Xaa can be any naturally occurring amino acid
MDMSWSTITAPAGSGSGGGTRAGLFRTPISGGVQSATSAHGLPRPALAVRNLMEQARFAHLCTVMSRMHHRREGYPFGSLVDFAPDSTGHPIFSFSPLAIHTRNLLADPRCTLVVQIPGWSGLSNARVTIFGDVYPLPEDQQEWAHKQYIAKHQQGPSQQWGNFYYFRMQNIRDIYFIGGFGTVAWVDVKEYETLQPDKIAVDGGEQYLKELNAIFSKPXKKLXFYXTEVDDAALISIDSKGTDIRVRQGAQFNIXRISFDEGQSVETLEEAKAAXRKLIHKGKVXNLQK

SEQ ID NO: 13555 - DNA, 1841 bp, Glycine max
agatctgaagaagccacataaccctaagcttcaaacgggtaagtgtcgctgggacttcaatggcagtgaccgaagctcaaaatcctcttcttggagaaaacacatgtggttccttgttaaaaaagcttcaggaaatatgggatgaggttggtgagagcgatgagcaacgagacaagatgcttcttcagttagaacaggagtgcttggatgtgtacaagagaaaggttgagcaggctgcaaagtcaagggcgcagctacttcaagctctgtctgatgctaagcttgagctttccactcttctatcagcacttggagaaaagagctttgctggaattcctgagaatacttctggaactatcaaagaacagcttgcagctatagcaccagtacttgaacagttatggcaacaaaaagaagaaagaattaaggagttctcagatgtacagtcacagatccaacaaatatgtggagagatagccgggaacttgaaccttaatgatgtttcacctgcagttgatgagtctgacctgtccctgaagaagttagatgaatatcaatctgagctccaagaacttcaaaaggaaaagagcgagaggttgcacaaggttctttcttgaatttgtgagtactgtgcatgatgtatgtgctgtccttggtatggacttcttcagtactgcaactgaggttcatccaagtctaaatgactctactggtggtcaattaaagagcataagtaatgacaccctagcaaggctggctaagaccgtcttaacgctgaaagaagataaaaaaaacagaggctgcacaagctccaagaattagcttctcagttgattgatctttgtaatctaatggatactcatcccgaggaaaggagactatttgaccatgttacctgtaatatgtcagcttctgttgatgaagtcactgttcctggtgcccttgctctggatctgattgagcaggctgaagtggaagttgagagacttgatcagctgaaagccagcaggatgaaggaaattgctttcaagaagcaagcagagctcgaagagatatttgcccgtgctcatatagaagtagatccagatgctgcccgggagaagattatggcattgattgattcaggaaacattgaactaactgaattactggctaacatggacaatcagatagcaaaagcaaaagaagaagctgtaagccaaaaagatatattggacaaggttgagaaatggatgtcagcatgtgatgaagagagttggcttgaagactataaccgggatgagaacaggtataatgcaagcagaggtgcacacataaacctcaaacgtgcagagaaagcacggatattggtcaacaaaattccagctttggttgatacattggttgctaaaactcgtgcatgggaagaagacgatggtatgtcatgtacatatgatggcgttgctcttcttgccatgttagatgaatatgccatgctcagacatgagcgggaagaggaaaaacggaggatgagggatcagaaaaagcaccacgagcagcgaaacacggaacaagaaaccatctttggttcaagacccagccctgctaggccagttagttccagtaagtcaggaggtcctcgtgctaacggaggagtcaatgctactcctaaccgacggctatcgcttaatgctcatcaaaatggaaacaggtccacatcaaaagatggaaaaagggaaaacagactatctgctcccgtgaattatgtggccatatcaaaagaagatgctgcttctcatgtttctggtactgaacccatcccggcatcaccctataattgccctgcttttactttcttttgc

SEQ ID NO: 13556 - protein, 330 aa, Glycine max
MDTHPEERRLFDHVTCNMSASVDEVTVPGALALDLIEQAEVEVERLDQLKASRMKEIAFKKQAELEEIFARAHIEVDPDAAREKIMALIDSGNIELTELLANMDNQIAKAKEEAVSQKDILDKVEKWMSACDEESWLEDYNRDENRYNASRGAHINLKRAEKARILVNKIPALVDTLVAKTRAWEEDDGMSCTYDGVALLAMLDEYAMLRHEREEEKRRMRDQKKHHEQRNTEQETIFGSRPSPARPVSSSKSGGPRANGGVNATPNRRLSLNAHQNGNRSTSKDGKRENRLSAPVNYVAISKEDAASHVSGTEPIPASPYNCPAFTFFC

SEQ ID NO: 13557 - protein, 313 aa, Glycine max
MSASVDEVTVPGALALDLIEQAEVEVERLDQLKASRMKEIAFKKQAELEEIFARAHIEVDPDAAREKIMALIDSGNIELTELLANMDNQIAKAKEEAVSQKDILDKVEKWMSACDEESWLEDYNRDENRYNASRGAHINLKRAEKARILVNKIPALVDTLVAKTRAWEEDDGMSCTYDGVALLAMLDEYAMLRHEREEEKRRMRDQKKHHEQRNTEQETIFGSRPSPARPVSSSKSGGPRANGGVNATPNRRLSLNAHQNGNRSTSKDGKRENRLSAPVNYVAISKEDAASHVSGTEPIPASPYNCPAFTFFC

SEQ ID NO: 13558 - protein, 277 aa, Glycine max
MKEIAFKKQAELEEIFARAHIEVDPDAAREKIMALIDSGNIELTELLANMDNQIAKAKEEAVSQKDILDKVEKWMSACDEESWLEDYNRDENRYNASRGAHINLKRAEKARILVNKIPALVDTLVAKTRAWEEDDGMSCTYDGVALLAMLDEYAMLRHEREEEKRRMRDQKKHHEQRNTEQETIFGSRPSPARPVSSSKSGGPRANGGVNATPNRRLSLNAHQNGNRSTSKDGKRENRLSAPVNYVAISKEDAASHVSGTEPIPASPYNCPAFTFFC

SEQ ID NO: 13559 - DNA, 1280 bp, Glycine max
aggctgttcactttagcgaaggatcaaaaaccctgtgaaagtgtgtttgtttggtcgagttgattgaattcgctggcagcttacagctatgatcatcaacaacgccccttttcctctatgattgattcgattcgattgaagtcgattccgtagagagtgagaaatcagatcacaataatcatcgatgggtaatttgttcgtgaagaagcccaaggtagcagacgttgataaagcaatcctcgcactcaagacccagagacgcaaactcgcccaatatcaacaaaagctagatgctgttattgaagcagaaaagcaagctgcacgagacttgattcgtgaaaagaagaaggacagggccttgttagcactaaagaaaaaaaagacacaagaagaattgttgaagcaagttgatgcttggcttataaatgttgagcagcaagtagtattttaatttttatcgtattaacctgtcatatttttactttgcttccttgttttgtttctttctgtccagtagtaataattgtattgttacctgtttgcatcttttgatggctttacaactgtctgtttctatgtcctaattcagttcttttcccatctggtgtcttgtactcatgtttagaggagataattgtgcattgacctttctttctcttaactcaattgtacacctaaaacaaatacatgcacattttcagttagcagatattgaactggctagcaagcagaaggctgtgtttgaaagtttgaaggctggtaatgatgcaatgaaagccatacaaagtgagataaacattgaagatgttcagaaacttatggatgacactgctgaagctaaagcttatcaagatgaaattaatgaaataatgggggagaagttatcagcagaagacgaggaggagattttagcagaatttgaggacttggaaatccagcttacagtccaagatcttcctgaagttcctccctcagctaatgaagaaattgaagaaaagttggaccttcctgatgtcccaaccaaagcacctgttaccagtgatgctgaagtatctacgaaaagaaaagttatggaggaaccattggcagcttgaagaacattgcgacccaaaacatgtcaattgctttgcaaaccaaggcataagatctgactttgtgtttgcctgtatccttcaaattctgttgcaaaattcgtgcagttactggagtttgattggttttaccatttgcagtgacattgaatttgtacagatttgcatgtataataatacatcagtttt

SEQ ID NO: 13560 - protein, 158 aa, Glycine max
MFRGDNCALTFLSLNSIVHLKQIHAHFQLADIELASKQKAVFESLKAGNDAMKAIQSEINIEDVQKLMDDTAEAKAYQDEINEIMGEKLSAEDEEEILAEFEDLEIQLTVQDLPEVPPSANEEIEEKLDLPDVPTKAPVTSDAEVSTKRKVMEEPLAA

SEQ ID NO: 13561 - protein, 107 aa, Glycine max
MKAIQSEINIEDVQKLMDDTAEAKAYQDEINEIMGEKLSAEDEEEILAEFEDLEIQLTVQDLPEVPPSANEEIEEKLDLPDVPTKAPVTSDAEVSTKRKVMEEPLAA

SEQ ID NO: 13562 - protein, 100 aa, Glycine max
MKKLKKSWTFLMSQPKHLLPVMLKYLRKEKLWRNHWQLEEHCDPKHVNCFANQGIRSDFVFACILQILLQNSCSYWSLIGFTICSDIEFVQICMYNNTSV

SEQ ID NO: 13563 - DNA, 1731 bp, Glycine max
  misc_feature (1251)..(1251): n is a, c, g, or t
  misc_feature (1262)..(1262): n is a, c, g, or t
  misc_feature (1298)..(1298): n is a, c, g, or t
  misc_feature (1303)..(1303): n is a, c, g, or t
  misc_feature (1305)..(1305): n is a, c, g, or t
  misc_feature (1309)..(1309): n is a, c, g, or t
  misc_feature (1319)..(1319): n is a, c, g, or t
  misc_feature (1367)..(1367): n is a, c, g, or t
  misc_feature (1421)..(1421): n is a, c, g, or t
  misc_feature (1480)..(1480): n is a, c, g, or t
  misc_feature (1497)..(1497): n is a, c, g, or t
  misc_feature (1499)..(1499): n is a, c, g, or t
  misc_feature (1551)..(1551): n is a, c, g, or t
  misc_feature (1627)..(1627): n is a, c, g, or t
  misc_feature (1636)..(1636): n is a, c, g, or t
  misc_feature (1705)..(1705): n is a, c, g, or t
aaaaccatcacccagaaaaattaaaccaaccatactacaccagacactccttctaaccttcaataattctcttctcacccttataaaaagaaactcattttaactcagactttgcatttcaccttatctatctatcttttctaacatggctgctgggactggactctttgcagagattttggatggagatgtgtacaagtactatgctgatggagaatggaagaaatctgcttctgggaaaagtgttgccatcatcaaccccactaccagaaagactcaatacaaagttcaagcttgttcacaagaggaggttaacaaggtcatggacttggcaaaatctgcccaaaagttatgggcaaagaccccactatggaaacgtgctgaacttcttcacaaggcagctgctatccttaaagagcacaaagcaccaattgcagagtgcctggtgaaagaaatagcaaagccagccaaagatgctgttacagaggttgtaagatctggggatctggtttcttatactgctgaagaaggtgtaaggattctgggagagggaaagttcttggtgtcggatagcttttttggaaatgaaaggacgaaatattgcctcacatccaagattccacttggagtgattttagccattccaccttttaactatcccgtcaatcttgctgtttccaaaattgctcctgcgctgattgctggaaactccattgtgctcaagcctccaactcagggagctgtttctgctcttcatatggttcactgctttcacttggctggttttcccaaaggcctaatcaactgtgtcactggcaaaggctcagaaattggtgacttccttacaatgcatccaggagtgaactgtataagctttactggtggtgatactggcattgcaatttcaaagaaggcaggcatgattcctctgcaaatggagttgggaggaaaagatgcctgcattgtacttgaagatgctgacctggatttggttgctgcaaacattataaagggaggtttttcatacagtggtcagagatgcactgctgttaaggttgtcctggtaatggagtccgctgctgatgctttggttgagaaagtgaaggctaaggtggcaaaactaactgttggaccaccagaggatgactgtgatatcaccccggttgtgtcagaatcatccgccaatttcattgaaggcctggtcttggatgctaaggagaaaggagcaacattttgccaggagtacaaaanagaaggcaatnttatttggcctttgctactggacaatgttaggccanacatnanaatngcatgggaanagccatttggaccagttttaccagtaattaggatcaattcagttgaanaaggaatccatcattgcaatgctagcaactttggacttcagggatgtgttttcncaaaggatgtcaacaaagcaataatgatcagtgatgcaatggaaacgggaacagttcanataaattccgccccggntngtgggccagatcattttccctttcagggtataaaggacagtggcattggatntcaagggattaccaacagcataaacatgatgaccaaggtcaaaacgactgtgatcaacttacccagcccttcctanactatgggntagtagtgtaatagttatacacatacatgcatggaggaaaatcaatttatatcatgttccataaatcanagtgaacgttcaaaacgtatgagttc

SEQ ID NO: 13564 - protein, 497 aa, Glycine max
  misc_feature (369)..(369): Xaa can be any naturally occurring amino acid
  misc_feature (373)..(373): Xaa can be any naturally occurring amino acid
  misc_feature (385)..(388): Xaa can be any naturally occurring amino acid
  misc_feature (392)..(392): Xaa can be any naturally occurring amino acid
  misc_feature (408)..(408): Xaa can be any naturally occurring amino acid
  misc_feature (426)..(426): Xaa can be any naturally occurring amino acid
  misc_feature (445)..(445): Xaa can be any naturally occurring amino acid
  misc_feature (451)..(452): Xaa can be any naturally occurring amino acid
  misc_feature (469)..(469): Xaa can be any naturally occurring amino acid
  misc_feature (494)..(494): Xaa can be any naturally occurring amino acid
  misc_feature (497)..(497): Xaa can be any naturally occurring amino acid
MAAGTGLFAEILDGDVYKYYADGEWKKSASGKSVAIINPTTRKTQYKVQACSQEEVNKVMDLAKSAQKLWAKTPLWKRAELLHKAAAILKEHKAPIAECLVKEIAKPAKDAVTEVVRSGDLVSYTAEEGVRILGEGKFLVSDSFFGNERTKYCLTSKIPLGVILAIPPFNYPVNLAVSKIAPALIAGNSIVLKPPTQGAVSALHMVHCFHLAGFPKGLINCVTGKGSEIGDFLTMHPGVNCISFTGGDTGIAISKKAGMIPLQMELGGKDACIVLEDADLDLVAANIIKGGFSYSGQRCTAVKVVLVMESAADALVEKVKAKVAKLTVGPPEDDCDITPVVSESSANFIEGLVLDAKEKGATFCQEYKXEGNXIWPLLLDNVRPXXXXAWEXPFGPVLPVIRINSVEXGIHHCNASNFGLQGCVFXKDVNKAIMISDAMETGTVXINSAPXXGPDHFPFQGIKDSGIGXQGITNSINMMTKVKTTVINLPSPSXTMX

SEQ ID NO: 13565 - protein, 438 aa, Glycine max
  misc_feature (310)..(310): Xaa can be any naturally occurring amino acid
  misc_feature (314)..(314): Xaa can be any naturally occurring amino acid
  misc_feature (326)..(329): Xaa can be any naturally occurring amino acid
  misc_feature (333)..(333): Xaa can be any naturally occurring amino acid
  misc_feature (349)..(349): Xaa can be any naturally occurring amino acid
  misc_feature (367)..(367): Xaa can be any naturally occurring amino acid
  misc_feature (386)..(386): Xaa can be any naturally occurring amino acid
  misc_feature (392)..(393): Xaa can be any naturally occurring amino acid
  misc_feature (410)..(410): Xaa can be any naturally occurring amino acid
  misc_feature (435)..(435): Xaa can be any naturally occurring amino acid
  misc_feature (438)..(438): Xaa can be any naturally occurring amino acid
MDLAKSAQKLWAKTPLWKRAELLHKAAAILKEHKAPIAECLVKEIAKPAKDAVTEVVRSGDLVSYTAEEGVRILGEGKFLVSDSFFGNERTKYCLTSKIPLGVILAIPPFNYPVNLAVSKIAPALIAGNSIVLKPPTQGAVSALHMVHCFHLAGFPKGLINCVTGKGSEIGDFLTMHPGVNCISFTGGDTGIAISKKAGMIPLQMELGGKDACIVLEDADLDLVAANIIKGGFSYSGQRCTAVKVVLVMESAADALVEKVKAKVAKLTVGPPEDDCDITPVVSESSANFIEGLVLDAKEKGATFCQEYKXEGNXIWPLLLDNVRPXXXXAWEXPFGPVLPVIRINSVEXGIHHCNASNFGLQGCVFXKDVNKAIMISDAMETGTVXINSAPXXGPDHFPFQGIKDSGIGXQGITNSINMMTKVKTTVINLPSPSXTMX

SEQ ID NO: 13566 - protein, 293 aa, Glycine max
  misc_feature (165)..(165): Xaa can be any naturally occurring amino acid
  misc_feature (169)..(169): Xaa can be any naturally occurring amino acid
  misc_feature (181)..(184): Xaa can be any naturally occurring amino acid
  misc_feature (188)..(188): Xaa can be any naturally occurring amino acid
  misc_feature (204)..(204): Xaa can be any naturally occurring amino acid
  misc_feature (222)..(222): Xaa can be any naturally occurring amino acid
  misc_feature (241)..(241): Xaa can be any naturally occurring amino acid
  misc_feature (247)..(248): Xaa can be any naturally occurring amino acid
  misc_feature (265)..(265): Xaa can be any naturally occurring amino acid
  misc_feature (290)..(290): Xaa can be any naturally occurring amino acid
  misc_feature (293)..(293): Xaa can be any naturally occurring amino acid
MVHCFHLAGFPKGLINCVTGKGSEIGDFLTMHPGVNCISFTGGDTGIAISKKAGMIPLQMELGGKDACIVLEDADLDLVAANIIKGGFSYSGQRCTAVKVVLVMESAADALVEKVKAKVAKLTVGPPEDDCDITPVVSESSANFIEGLVLDAKEKGATFCQEYKXEGNXIWPLLLDNVRPXXXXAWEXPFGPVLPVIRINSVEXGIHHCNASNFGLQGCVFXKDVNKAIMISDAMETGTVXINSAPXXGPDHFPFQGIKDSGIGXQGITNSINMMTKVKTTVINLPSPSXTMX

SEQ ID NO: 13567 - DNA, 1650 bp, Glycine max
aaaaaaaaagcctacaccaccctcttcttccctattcccttctacttctggcgccatttgcagcttcaaaactccatctttatttttcttctctccttccattattagaaacaccctcatggaatcagcagcaacagcattgaacaacatcatcaacaacaacaacactgttcctgcagtgtcgccaccaccaccaccaccaccatcctcagagcctcagccaatgaacatgaatgtcaacatgaacatgaacgtggtcaacaccacagaaggaacaacaccaacaccaaccccaacaacaatggttcccccaacaacaatggttgttcctgcagtgccagctccaacaacgacaacattagcagtagcaacaacaacaccagggagtttggatttgtttgggaagaagaagagagggaggcctagaaagtatgatgcagatgggaacctgagagtgagtgcaagaccaacaccaacaccaccatcgggttttactttgtccacaccttctgagtactcttcttccaaaagagggcgcggcaaacactacaacacaacttttgccaacaacagctaccaacaacaactctattcttcttctttgggtgatgtgtttgcaatcacagctgctggtgattttgtagcgcatgtgttgaatgcttatactggagaggatgttgctggaaagatcttgtcatttgcccagaagggtccaagaggaatatgcattctctctgccaatggagctatctcgaatgtcaccatacgccaacctggttcttctggtggcattttgacttatgagggtcggtttgagattttatctttgtctggatcattcacagttgttgacaacagtggcatgaaaagccgaactggtggattgagtgtctcacttgctggccctgatggtcgggtcataggtggtggtgttgctggacttttaactgctgctggccccattcagattgttgtaggaagcttcatgcaaaattgttgcaagacccaaaagaggaagtatcaacgtgaacaacagatagtggcggccacccctacttcagctggtccagaaatagtgacagcagcaatacctatctcacaagcaaatgctgctgatggtgagaactttctgatacctatacctatctatcagattccagaccaaaaccagagagaatctatcagtgtttcaagtgacaaacagaacctagatgctactcctgatgctgctgctacttggaatggttctgaggaatattcagaccagaggacttctccagacatcaacatatctttgccagatgaatagaacaagggtgatgcataggctgacatggtagtaatgaatgaaactaacaccggaaatctgtcatgacaactactgggttatatgacatgatgtacagttgtcagaaattagaaaggattattattattattaaggcctcattattttttcttattacagtttctgttgaacatttataagtttttctttcttttctttagaggtggaagagattaccaaaagacttcgtagtaggctgtttattattctgttgggattgttcggtaaaattatttgtagttttcaacattttgcacatttgggaaacttctaagagtttttctcattatcatggatccaag

SEQ ID NO: 13568 - protein, 435 aa, Glycine max
KKKPTPPSSSLFPSTSGAICSFKTPSLFFFSPSIIRNTLMESAATALNNIINNNNTVPAVSPPPPPPPSSEPQPMNMNVNMNMNVVNTTEGTTPTPTPTTMVPPTTMVVPAVPAPTTTTLAVATTTPGSLDLFGKKKRGRPRKYDADGNLRVSARPTPTPPSGFTLSTPSEYSSSKRGRGKHYNTTFANNSYQQQLYSSSLGDVFAITAAGDFVAHVLNAYTGEDVAGKILSFAQKGPRGICILSANGAISNVTIRQPGSSGGILTYEGRFEILSLSGSFTVVDNSGMKSRTGGLSVSLAGPDGRVIGGGVAGLLTAAGPIQIVVGSFMQNCCKTQKRKYQREQQIVAATPTSAGPEIVTAAIPISQANAADGENFLIPIPIYQIPDQNQRESISVSSDKQNLDATPDAAATWNGSEEYSDQRTSPDINISLPDE

SEQ ID NO: 13569 - protein, 396 aa, Glycine max
MESAATALNNIINNNNTVPAVSPPPPPPPSSEPQPMNMNVNMNMNVVNTTEGTTPTPTPTTMVPPTTMVVPAVPAPTTTTLAVATTTPGSLDLFGKKKRGRPRKYDADGNLRVSARPTPTPPSGFTLSTPSEYSSSKRGRGKHYNTTFANNSYQQQLYSSSLGDVFAITAAGDFVAHVLNAYTGEDVAGKILSFAQKGPRGICILSANGAISNVTIRQPGSSGGILTYEGRFEILSLSGSFTVVDNSGMKSRTGGLSVSLAGPDGRVIGGGVAGLLTAAGPIQIVVGSFMQNCCKTQKRKYQREQQIVAATPTSAGPEIVTAAIPISQANAADGENFLIPIPIYQIPDQNQRESISVSSDKQNLDATPDAAATWNGSEEYSDQRTSPDINISLPDE

SEQ ID NO: 13570 - protein, 361 aa, Glycine max
MNMNVNMNMNVVNTTEGTTPTPTPTTMVPPTTMVVPAVPAPTTTTLAVATTTPGSLDLFGKKKRGRPRKYDADGNLRVSARPTPTPPSGFTLSTPSEYSSSKRGRGKHYNTTFANNSYQQQLYSSSLGDVFAITAAGDFVAHVLNAYTGEDVAGKILSFAQKGPRGICILSANGAISNVTIRQPGSSGGILTYEGRFEILSLSGSFTVVDNSGMKSRTGGLSVSLAGPDGRVIGGGVAGLLTAAGPIQIVVGSFMQNCCKTQKRKYQREQQIVAATPTSAGPEIVTAAIPISQANAADGENFLIPIPIYQIPDQNQRESISVSSDKQNLDATPDAAATWNGSEEYSDQRTSPDINISLPDE

SEQ ID NO: 13571 - DNA, 1733 bp, Glycine max
  misc_feature (1723)..(1723): n is a, c, g, or t
gaaaaaactaaggttgttggagaatcatcaaccgccgctagtggcgacggttccgttggtggagagggaagtgggaaacgtagctctgagttgtcaactacggagagacaagaaattcagataaagaaagcaaagctaatcaacatgcttgatgaggtggagcaaaggtacaggcagtaccacaaccagatgaagatagtgatatcctcatttgagcaagctgctggaataggctcagcaagaacgtacactgcgcttgcactgcaaacaatttcgaagcaatttcggtgtttgaaggatgcaataacggggcaaatcagagctgcaaacaagagtttgggagaagaggattgttttggtgctaaaattgaaggatctaggctcaaatatgtggaccatcatctaaggcaacagagggctattcagcaactgggaatgatccatcacaatgcttggagaccccagagaggattgccagagagatcggtttctgttctgcgtgcttggctctttgaacactttcttcatccttaccccaaggactcagacaagcacatgcttgctaaacaaacagggcttaccaggagccaggtttcaaattggttcattaatgctagagttcggctttggaagccaatggtggaggaaatgtacttggaggagatgaaagagcatgaactaaatggttctgaggagaaatcaagcaagagtggtgaagatcctgctacaaaaaccacaagtccacaagagaaacgtacttcctctgaaattgaatccaaaagtttcaattccaaacaagatgtttccaaacaaagccagaacactccaattcttccaacttctccaccatcaatatcacctatagggggaagtgttaagaaccaatcaggattcagtttcatggggtcatcagaacttgatggaatcacacaaggaagtcctaaaaagccaaggaaccatgaaattctacgctctccaaaccgtgtcccttcaatcaacatggatgtgaaagccaatgaggcaaacaatgagcaacaactctctatggatcttgagaggcagaatagggatggctacactttcatggggaaccaaacaaacttcattagtggttttggacaataccctatggaggaaattggtaggtttgatgctgagcaattcacaccaaggttttcaggtaataatggagtttccctcactcttggtcttcctcattgtgacacattgtcaggaacacaccaaagttttctcccaaaccaaaacattcaattaggaagagggttggacattggtgaaccaaaccagtttggtgcattgaataattccacttctcactcttcagcagcatttgagagcatcaacatgcagaacccaaagaggtttgctgcacaattgctaccagactttgtggcctaaataagacattgaagaggggataagatcatagttggtgacattggttatatgggtctctcatattttcttctaatccatgtgcttgtttcttggggagtagtgataaaatcttagtgtaaagaaagaaggaattttactctagtataggtttataccttgcatagaaccatttgagttcttagatagcttagcgatttgaaagtatatggttatttgaggttgtatattatttttgtaattttttgaaaatgggatagatgggttggtgtcataaaatttcaattggtaaagattacaatatatnttcgattgag

SEQ ID NO: 13572 - protein, 472 aa, Glycine max
EKTKVVGESSTAASGDGSVGGEGSGKRSSELSTTERQEIQIKKAKLINMLDEVEQRYRQYHNQMKIVISSFEQAAGIGSARTYTALALQTISKQFRCLKDAITGQIRAANKSLGEEDCFGAKIEGSRLKYVDHHLRQQRAIQQLGMIHHNAWRPQRGLPERSVSVLRAWLFEHFLHPYPKDSDKHMLAKQTGLTRSQVSNWFINARVRLWKPMVEEMYLEEMKEHELNGSEEKSSKSGEDPATKTTSPQEKRTSSEIESKSFNSKQDVSKQSQNTPILPTSPPSISPIGGSVKNQSGFSFMGSSELDGITQGSPKKPRNHEILRSPNRVPSINMDVKANEANNEQQLSMDLERQNRDGYTFMGNQTNFISGFGQYPMEEIGRFDAEQFTPRFSGNNGVSLTLGLPHCDTLSGTHQSFLPNQNIQLGRGLDIGEPNQFGALNNSTSHSSAAFESINMQNPKRFAAQLLPDFVA

SEQ ID NO: 13573 - protein, 424 aa, Glycine max
MLDEVEQRYRQYHNQMKIVISSFEQAAGIGSARTYTALALQTISKQFRCLKDAITGQIRAANKSLGEEDCFGAKIEGSRLKYVDHHLRQQRAIQQLGMIHHNAWRPQRGLPERSVSVLRAWLFEHFLHPYPKDSDKHMLAKQTGLTRSQVSNWFINARVRLWKPMVEEMYLEEMKEHELNGSEEKSSKSGEDPATKTTSPQEKRTSSEIESKSFNSKQDVSKQSQNTPILPTSPPSISPIGGSVKNQSGFSFMGSSELDGITQGSPKKPRNHEILRSPNRVPSINMDVKANEANNEQQLSMDLERQNRDGYTFMGNQTNFISGFGQYPMEEIGRFDAEQFTPRFSGNNGVSLTLGLPHCDTLSGTHQSFLPNQNIQLGRGLDIGEPNQFGALNNSTSHSSAAFESINMQNPKRFAAQLLPDFVA

SEQ ID NO: 13574 - protein, 409 aa, Glycine max
MKIVISSFEQAAGIGSARTYTALALQTISKQFRCLKDAITGQIRAANKSLGEEDCFGAKIEGSRLKYVDHHLRQQRAIQQLGMIHHNAWRPQRGLPERSVSVLRAWLFEHFLHPYPKDSDKHMLAKQTGLTRSQVSNWFINARVRLWKPMVEEMYLEEMKEHELNGSEEKSSKSGEDPATKTTSPQEKRTSSEIESKSFNSKQDVSKQSQNTPILPTSPPSISPIGGSVKNQSGFSFMGSSELDGITQGSPKKPRNHEILRSPNRVPSINMDVKANEANNEQQLSMDLERQNRDGYTFMGNQTNFISGFGQYPMEEIGRFDAEQFTPRFSGNNGVSLTLGLPHCDTLSGTHQSFLPNQNIQLGRGLDIGEPNQFGALNNSTSHSSAAFESINMQNPKRFAAQLLPDFVA

SEQ ID NO: 13575 - DNA, 1249 bp, Glycine max
  misc_feature (578)..(578): n is a, c, g, or t
  misc_feature (1204)..(1204): n is a, c, g, or t
  misc_feature (1241)..(1241): n is a, c, g, or t
  misc_feature (1243)..(1243): n is a, c, g, or t
tcaaactttccttaaaaaggatgtgataccctcgcaactattcaaacactgaaaccaagcaacaatcttctgttcccattctccattggtgagttcacgaacacaaatgttgtccttaacactacctattcctctgctgaaaaccctaactcctccttctccaaacattaacaacccctctctctctccctattctcattatcaacctcgttcccgttccctaacacggggacttatagtccccaaacacagctccgccactgctcctccgagcgcgacgcttcgggacgacggaacctcactcgctggagattcaccggagccgcttccggaggagttagtggcggagctgatgccaaagcacgtggcggtgattatcgacggacatggtaggtgggccaagttgagagggctgccggcgtccgcggggcaccaagcgggtgtgcagccactgaggacggtggtgaggctgtgttgcagttggggaattcaggttctcacggttttcgtgttatccactgagaactggtttcgccccaaggtggaggttgactccttgatgaagctctttgagacancaataaactcctcaattgcatgtatgaaaaaggaaggaattcaaatatacgtgattggggattcatcaaaacttcctgagtctctaaggagtactatagctaatgcagaaaagagtacaaaacataactcgagactccaacttattgtggcaatgaattacggtgggaaatacgatgttgttcaagcatgtaaaagtgtagcaaaaaaagtcaaagatggtcttcttcatttggacaacatcaatgaaaaaattattgaaaaagaattggaaactaaatgtactgagtttccttatccagatctactaatacgagctggtggtgagcttagattgagcaacttcttgttgtggcaattggcatacacagaattttattttaataaaacaccgtggccagattttggaaaggaagaatttgtagatgccttaagatcatttcagcaaagacaaagacactatggtggtgaacgacattcataagcatatgtctgtaatatagtattatcacttaattaatcttttaggattaagtgtataatggttttgggattatgtttaaattattggaccaagctaacctactaagtcgtgtgttcattatagctgaggtatctcacttaaggnttttgctttgttcaatatagtgacatcactatatgcngngctaac

SEQ ID NO: 13576 - protein, 317 aa, Glycine max
  misc_feature (158)..(158): Xaa can be any naturally occurring amino acid
MLSLTLPIPLLKTLTPPSPNINNPSLSPYSHYQPRSRSLTRGLIVPKHSSATAPPSATLRDDGTSLAGDSPEPLPEELVAELMPKHVAVIIDGHGRWAKLRGLPASAGHQAGVQPLRTVVRLCCSWGIQVLTVFVLSTENWFRPKVEVDSLMKLFETXINSSIACMKKEGIQIYVIGDSSKLPESLRSTIANAEKSTKHNSRLQLIVAMNYGGKYDVVQACKSVAKKVKDGLLHLDNINEKIIEKELETKCTEFPYPDLLIRAGGELRLSNFLLWQLAYTEFYFNKTPWPDFGKEEFVDALRSFQQRQRHYGGERHS

SEQ ID NO: 13577 - protein, 235 aa, Glycine max
  misc_feature (76)..(76): Xaa can be any naturally occurring amino acid
MPKHVAVIIDGHGRWAKLRGLPASAGHQAGVQPLRTVVRLCCSWGIQVLTVFVLSTENWFRPKVEVDSLMKLFETXINSSIACMKKEGIQIYVIGDSSKLPESLRSTIANAEKSTKHNSRLQLIVAMNYGGKYDVVQACKSVAKKVKDGLLHLDNINEKIIEKELETKCTEFPYPDLLIRAGGELRLSNFLLWQLAYTEFYFNKTPWPDFGKEEFVDALRSFQQRQRHYGGERHS

SEQ ID NO: 13578 - protein, 166 aa, Glycine max
  misc_feature (7)..(7): Xaa can be any naturally occurring amino acid
MKLFETXINSSIACMKKEGIQIYVIGDSSKLPESLRSTIANAEKSTKHNSRLQLIVAMNYGGKYDVVQACKSVAKKVKDGLLHLDNINEKIIEKELETKCTEFPYPDLLIRAGGELRLSNFLLWQLAYTEFYFNKTPWPDFGKEEFVDALRSFQQRQRHYGGERHS

SEQ ID NO: 13579 - DNA, 1257 bp, Glycine max
ggaaaagaaaccagtcttcacattttacctggaactcgttagggacctgcttcacttgtctatgtatatgtgcttctttcttgtaatttttgtaaactatggtattcccttgcaccttatacgggagctgtatgagacgtttaggaacttcaaagtccgtgttgcagattacatacgttatcgtaaaatcacttcaaatatgaacgatcggtttccagatgcaacccctgaagagcttaatgcaagtgatgcaacctgcattatttgtcgtgaagagatgacgacagccaagaaacttatatgtggacatcttttcatgttcattgtctccgatcatggctggagcggcagcacacttgccccacctgcagagccttggttgtaccacctgaaaatgggacaactgcggctgcagggcagcaaggatcacagtcagatgtccatcaacggggaacaactgggacaggcagtggaagcacagctcagactgaggctactgatagtttgagtcgacatcaagctagactccaagcagctgctgctgctgcttcaatatatgagaagtcttatgtgtatccctctatgaattctcttgtatgctctcctggatacactcttcatcccccagttcaaatatctatggctgaatcttctaatacggaccgtaatggagagcaaacttccagtgaagaagcacaaaagcagtttcttatcgctggtagaccaccaaatctatcctttcctccaatgcaaaacttccattttctaccttcccaagcacatgcatcccctgtgaactatggagaggggtttgaaaatgatccaaatatcccaagctctcagcttgaagcttatagaaaacttcttcaatgccagattcagctcgagatgctgcagaggataaaggctgatagaaatgtagatgagggcacaccgtcatcagatagcagaggcaagagtgtcgtttcctcatcatctgaatctggtcatggttatcgtgaggatattcaagatggaaaagcataaggctcggctgtttatttctggtttaagccaggaatagactgccaaatgtagatataggaagaggaaaatacagaaatcacagcattgctctaatgtgacatctgttattcgtgatggtactaatcttgtaaatgcatagtgccccttgaaaatgatttattttggcttcttttttttttcccatgtggattgttgtacgcttatattagcttttacaaaagttaccttttg

SEQ ID NO: 13580 - protein, 241 aa, Glycine max
MWTSFHVHCLRSWLERQHTCPTCRALVVPPENGTTAAAGQQGSQSDVHQRGTTGTGSGSTAQTEATDSLSRHQARLQAAAAAASIYEKSYVYPSMNSLVCSPGYTLHPPVQISMAESSNTDRNGEQTSSEEAQKQFLIAGRPPNLSFPPMQNFHFLPSQAHASPVNYGEGFENDPNIPSSQLEAYRKLLQCQIQLEMLQRIKADRNVDEGTPSSDSRGKSVVSSSSESGHGYREDIQDGKA

SEQ ID NO: 13581 - protein, 168 aa, Glycine max
EKKPVFTFYLELVRDLLHLSMYMCFFLVIFVNYGIPLHLIRELYETFRNFKVRVADYIRYRKITSNMNDRFPDATPEELNASDATCIICREEMTTAKKLICGHLFMFIVSDHGWSGSTLAPPAEPWLYHLKMGQLRLQGSKDHSQMSINGEQLGQAVEAQLRLRLLIV

SEQ ID NO: 13582 - protein, 148 aa, Glycine max
MYMCFFLVIFVNYGIPLHLIRELYETFRNFKVRVADYIRYRKITSNMNDRFPDATPEELNASDATCIICREEMTTAKKLICGHLFMFIVSDHGWSGSTLAPPAEPWLYHLKMGQLRLQGSKDHSQMSINGEQLGQAVEAQLRLRLLIV

SEQ ID NO: 13583 - DNA, 1608 bp, Glycine max
agtgttatgctcaaactcttccactaggtattaatattttgatcatgcttaagcattcaaactccaattagatatggcttatatgtaatgaatatgatactctgttctgattctgaatgaagcagcgctataaggaagatgagtagtttctcgccagcgtttcccaagttcatatccgtagaaggcgcagacatacattccagaactaaacctgacggcttcagattcagtcttgtttcgtataacattttggctcaggcttatgtgaagagctcactgttcccacactctccttccccaagtctcaaatggaagcttcgttcagacactattttggcagttctcaagaacttgggagctgattttttctgcctacaggaagttgatgaatttgacagcttttacaaagggaacatgcaggacctagaatattcttctatttatatgaagagaagtgggcaaaagcgtgatgggtgtgggctgttttacaagcataaccgtgcagagttggtcttagaggagaaaattgaatacaatgatcttgtaaagtcagttcccgatgggaactcttcaaataatgatgaacacaccaatatccagacagttcagccagataaacaaaaggatgtgccccccaaaaatggatctaaatcgaattcaaaagatcgtggagatcccaatgatccttgtgtcagactaaagcgtgattgtgttggaattatggctgcattcaaactcaaagatcgctctcatcatattgttattgtggccaacacacatctttattgggatcctgagtgggctgatgtcaagcttgcacaagctaaatatcttctatcccgcttagcaaaatttaaaacactgatatcagataggtatgaatgcatacctgaagtcattttggccggtgacttcaattctatgccaggagatatggtttatcggtaccttgtatcagggaatccttcatcaaacctgatgccggactgtttagaggagtctcctattcccttatgtagtgtctatgcttctacaagaggagagccaccatttacaaactacacacctgacttcactggaacactcgactatatattattttccccttctgatcacattaaaccaattagttttcttgaacttccagactccgatgcagctgatattgttggtggactgccaaacttcatttatccaagtgatcatctaccaattggtgctgaatttgaaatcatcgaggaataaacgttcttgtatgccaggtgttattttgagtaatcagctttcatgttccacctcctctcccctttgtgatgattgaagcaaggttctggaagcaagtgcacaggcaattggcaagaaggacaacagttaccaaaaagcaaacatttagaagtttttgttgcaaatgtgcccataacagctgcaacttctttcctagtttttagaagtttaattttacatttcaaatattaggagatattaggagttctgattctgtttttaaatttaaaattatgcccttatgtctacaaataagggatgtataatttatgctctgtgctctttatttaaagctgctttaataaaataattgatacttctctg

SEQ ID NO: 13584 - protein, 368 aa, Glycine max
MSSFSPAFPKFISVEGADIHSRTKPDGFRFSLVSYNILAQAYVKSSLFPHSPSPSLKWKLRSDTILAVLKNLGADFFCLQEVDEFDSFYKGNMQDLEYSSIYMKRSGQKRDGCGLFYKHNRAELVLEEKIEYNDLVKSVPDGNSSNNDEHTNIQTVQPDKQKDVPPKNGSKSNSKDRGDPNDPCVRLKRDCVGIMAAFKLKDRSHHIVIVANTHLYWDPEWADVKLAQAKYLLSRLAKFKTLISDRYECIPEVILAGDFNSMPGDMVYRYLVSGNPSSNLMPDCLEESPIPLCSVYASTRGEPPFTNYTPDFTGTLDYILFSPSDHIKPISFLELPDSDAADIVGGLPNFIYPSDHLPIGAEFEIIEE

SEQ ID NO: 13585 - protein, 276 aa, Glycine max
MQDLEYSSIYMKRSGQKRDGCGLFYKHNRAELVLEEKIEYNDLVKSVPDGNSSNNDEHTNIQTVQPDKQKDVPPKNGSKSNSKDRGDPNDPCVRLKRDCVGIMAAFKLKDRSHHIVIVANTHLYWDPEWADVKLAQAKYLLSRLAKFKTLISDRYECIPEVILAGDFNSMPGDMVYRYLVSGNPSSNLMPDCLEESPIPLCSVYASTRGEPPFTNYTPDFTGTLDYILFSPSDHIKPISFLELPDSDAADIVGGLPNFIYPSDHLPIGAEFEIIEE

SEQ ID NO: 13586 - protein, 266 aa, Glycine max
MKRSGQKRDGCGLFYKHNRAELVLEEKIEYNDLVKSVPDGNSSNNDEHTNIQTVQPDKQKDVPPKNGSKSNSKDRGDPNDPCVRLKRDCVGIMAAFKLKDRSHHIVIVANTHLYWDPEWADVKLAQAKYLLSRLAKFKTLISDRYECIPEVILAGDFNSMPGDMVYRYLVSGNPSSNLMPDCLEESPIPLCSVYASTRGEPPFTNYTPDFTGTLDYILFSPSDHIKPISFLELPDSDAADIVGGLPNFIYPSDHLPIGAEFEIIEE

SEQ ID NO: 13587 - DNA, 1753 bp, Glycine max
agattcctcggttcttactcgtgaagcttctaaagtaagcgtagatcctttgccaacaagtgggtttcaaagggtcttgcaaggtcaagaactttcgaccttgagaggtaattttgctgaaagcaacgaatctgatacggcagagaagtctggtgtgtggccacctgccacggatgatgaaaagattgatgtttctacctcaagaaggtatgggtcagacagctggatgtcaatgggaaggcatgaaccaacatatccagatctactttcaggctttggggcccacggagatcattcatcccatccatcatttgttgatcaaaatggtcctgtagctaaccttagtagaaaacatttgctggatcgtgaaggcaaacataatgttctgagtccttggtctggagtgccatctagcctgtcactgaatcttttggactcaaatacaaaaggctctgctcaaggtggtgatacaacttaccaagttcgagggaatttgaggtatagtagtgcatttggtgagtaccccatgcttcatggacataaagttgagcattcacatggaaactttttgatgccaccaccaccatcaactccatatgagagtcctcgttcaagagaactgttgcccaaaccaatatcagggaaaccttgtgaggtttcaaaaccgaaagacagtgactgtaagctatttggcatctcacttcttagtagccccattgcaccagagccttctgtatcacaaagaaatgtcccaagtgagccagttggtcacatgcatacaacatcacaccaacagcgtgcatttgacaacgatcagaagtctgagcattcaagggggggatcaaaaccagctgatggtctgctgattgacgaccatgaaaaggtgttacaaacttctcagacacatctgaaagatattcaagcaaaatctcatagtggttctgctagaagttgcactaaagttcacaagaaggggattgcgctcggtaggtcagtggacctcacaaaattcagtgattatggggaattaattgctgaattagatcaactattcgaatttggaggtttattaacttctccacaaaaggattggcttattgtctacactgataatgagggagatatgatgcttgttggtgatgatccgtggcaggaatttgttgcaatggttcgcaaaatttatatctaccccaaagaggagattcagaaaatgagcccgggtaccttgagttcaaagaatgaagagaatcaatctgctagtgaaggtgccacagacacacaagaaatcaagtgtcagctcaataattcagcttcagatacctgataatttgtagatttgatttccatagcttccagattccggactggagtggaaagtaggtgactgtcataaagccatccagttggagaatatgacctgatgaagaaaattctaattctgaatctgactgctttatcaagtgactgcttgtgtttggaatctgaatatggatggcatgaatgagtatccatccaattttggaccgtgtcgtggaattagtagtagtagtagtagtatatatatatgccttccctgttatacactcctaatatagtagtatagtacggaattgtgcgttgtgcaaggtgataagggagtgtatcggccttgcatttttcaacaatcctaccttgtacatagttttactcgcaaccttagtaccggaactcgttaatgtaattaagttgatatacaagggcgattttaaacatg

SEQ ID NO: 13588 - protein, 440 aa, Glycine max
DSSVLTREASKVSVDPLPTSGFQRVLQGQELSTLRGNFAESNESDTAEKSGVWPPATDDEKIDVSTSRRYGSDSWMSMGRHEPTYPDLLSGFGAHGDHSSHPSFVDQNGPVANLSRKHLLDREGKHNVLSPWSGVPSSLSLNLLDSNTKGSAQGGDTTYQVRGNLRYSSAFGEYPMLHGHKVEHSHGNFLMPPPPSTPYESPRSRELLPKPISGKPCEVSKPKDSDCKLFGISLLSSPIAPEPSVSQRNVPSEPVGHMHTTSHQQRAFDNDQKSEHSRGGSKPADGLLIDDHEKVLQTSQTHLKDIQAKSHSGSARSCTKVHKKGIALGRSVDLTKFSDYGELIAELDQLFEFGGLLTSPQKDWLIVYTDNEGDMMLVGDDPWQEFVAMVRKIYIYPKEEIQKMSPGTLSSKNEENQSASEGATDTQEIKCQLNNSASDT

SEQ ID NO: 13589 - protein, 365 aa, Glycine max
MSMGRHEPTYPDLLSGFGAHGDHSSHPSFVDQNGPVANLSRKHLLDREGKHNVLSPWSGVPSSLSLNLLDSNTKGSAQGGDTTYQVRGNLRYSSAFGEYPMLHGHKVEHSHGNFLMPPPPSTPYESPRSRELLPKPISGKPCEVSKPKDSDCKLFGISLLSSPIAPEPSVSQRNVPSEPVGHMHTTSHQQRAFDNDQKSEHSRGGSKPADGLLIDDHEKVLQTSQTHLKDIQAKSHSGSARSCTKVHKKGIALGRSVDLTKFSDYGELIAELDQLFEFGGLLTSPQKDWLIVYTDNEGDMMLVGDDPWQEFVAMVRKIYIYPKEEIQKMSPGTLSSKNEENQSASEGATDTQEIKCQLNNSASDT

SEQ ID NO: 13590 - protein, 363 aa, Glycine max
MGRHEPTYPDLLSGFGAHGDHSSHPSFVDQNGPVANLSRKHLLDREGKHNVLSPWSGVPSSLSLNLLDSNTKGSAQGGDTTYQVRGNLRYSSAFGEYPMLHGHKVEHSHGNFLMPPPPSTPYESPRSRELLPKPISGKPCEVSKPKDSDCKLFGISLLSSPIAPEPSVSQRNVPSEPVGHMHTTSHQQRAFDNDQKSEHSRGGSKPADGLLIDDHEKVLQTSQTHLKDIQAKSHSGSARSCTKVHKKGIALGRSVDLTKFSDYGELIAELDQLFEFGGLLTSPQKDWLIVYTDNEGDMMLVGDDPWQEFVAMVRKIYIYPKEEIQKMSPGTLSSKNEENQSASEGATDTQEIKCQLNNSASDT

SEQ ID NO: 13591 - DNA, 1343 bp, Glycine max
  misc_feature (321)..(321): n is a, c, g, or t
  misc_feature (1180)..(1180): n is a, c, g, or t
aatacagagacgagaagttcgagcatcagattttggtcctagagcaagcttttggatgaattttcctaaagaaggttctcaattgacacctcctcatcaatcagagggttttaaatggaaagattactgccctatggtgttcagaaatttgagagagttgttcaagattgatgctgctgactatatgatgtccatttgtggaaatgatgctctgagggaactttcttctccagggaaaagtggtagtgtctttttcctgtctcaagatgatcgattcatgattaagacactgcgaagatctgaagtgaaggttcttctaanaatgcttccagactatcatcaccatgtgaagacatatgataatacacttatcacaaaattttttggtctgcacaggattattccttcaagtggtcaaaagtttcgctttgtcgtaatgggaaatatgttctgcacagaattaaggatccataggagatatgatttgaaaggttcatctcttggacgttcttcggacaagatagaaattgatgaaaacaccactcttaaagatttggatctgaactactgcttttacttggaaccatcttggcgggagtctttattgaagcagattgagattgacagcaagttcttggaattacaacagataatggattacagcctccttctaggtgttcattatcgagctccccagcagttgcatccatacaaccaaagtagaaatgcagatggattggcaattcttgcagaggaagaccctctagaggatgaaggatccaactatccacaaggccttgttctggtccctcgaggtggggatgatgatagtgttgttgtagggtcacacattaggggtagcagattgcgagcttcggctgctggggatgaggaggtggatctacttctacccggtacagcaagactacaaatccagctaggtgtgaacatgcctgctagggcagagcagattcctggaaaagaggaagttcaaatgttccatgaggcttacgatgttgtactttaccttggtataattgacatattgcaagagtacaacatgactaagaagattgaacatgcatacaaatctattcagtttgattcattatctatctcggcggtggacccaacattctactcgcgtcgcttcctggattttattcagaaaatgttcccnccacatgaaatggcaggataacagtttggggattaagttcaaccagttggtttattcagaaagtgtgtacattgtcacattgcctccttttgtgcatgctgtataattgacttgaatatgtttagattttatataaatatgctaaatggtcttttctattttc

SEQ ID NO: 13592 - protein, 399 aa, Glycine max
  misc_feature (107)..(107): Xaa can be any naturally occurring amino acid
  misc_feature (393)..(393): Xaa can be any naturally occurring amino acid
IQRREVRASDFGPRASFWMNFPKEGSQLTPPHQSEGFKWKDYCPMVFRNLRELFKIDAADYMMSICGNDALRELSSPGKSGSVFFLSQDDRFMIKTLRRSEVKVLLXMLPDYHHHVKTYDNTLITKFFGLHRIIPSSGQKFRFVVMGNMFCTELRIHRRYDLKGSSLGRSSDKIEIDENTTLKDLDLNYCFYLEPSWRESLLKQIEIDSKFLELQQIMDYSLLLGVHYRAPQQLHPYNQSRNADGLAILAEEDPLEDEGSNYPQGLVLVPRGGDDDSVVVGSHIRGSRLRASAAGDEEVDLLLPGTARLQIQLGVNMPARAEQIPGKEEVQMFHEAYDVVLYLGIIDILQEYNMTKKIEHAYKSIQFDSLSISAVDPTFYSRRFLDFIQKMFXPHEMAG

SEQ ID NO: 13593 - protein, 381 aa, Glycine max
  misc_feature (89)..(89): Xaa can be any naturally occurring amino acid
  misc_feature (375)..(375): Xaa can be any naturally occurring amino acid
MNFPKEGSQLTPPHQSEGFKWKDYCPMVFRNLRELFKIDAADYMMSICGNDALRELSSPGKSGSVFFLSQDDRFMIKTLRRSEVKVLLXMLPDYHHHVKTYDNTLITKFFGLHRIIPSSGQKFRFVVMGNMFCTELRIHRRYDLKGSSLGRSSDKIEIDENTTLKDLDLNYCFYLEPSWRESLLKQIEIDSKFLELQQIMDYSLLLGVHYRAPQQLHPYNQSRNADGLAILAEEDPLEDEGSNYPQGLVLVPRGGDDDSVVVGSHIRGSRLRASAAGDEEVDLLLPGTARLQIQLGVNMPARAEQIPGKEEVQMFHEAYDVVLYLGIIDILQEYNMTKKIEHAYKSIQFDSLSISAVDPTFYSRRFLDFIQKMFXPHEMAG

SEQ ID NO: 13594 - protein, 355 aa, Glycine max
  misc_feature (63)..(63): Xaa can be any naturally occurring amino acid
  misc_feature (349)..(349): Xaa can be any naturally occurring amino acid
MVFRNLRELFKIDAADYMMSICGNDALRELSSPGKSGSVFFLSQDDRFMIKTLRRSEVKVLLXMLPDYHHHVKTYDNTLITKFFGLHRIIPSSGQKFRFVVMGNMFCTELRIHRRYDLKGSSLGRSSDKIEIDENTTLKDLDLNYCFYLEPSWRESLLKQIEIDSKFLELQQIMDYSLLLGVHYRAPQQLHPYNQSRNADGLAILAEEDPLEDEGSNYPQGLVLVPRGGDDDSVVVGSHIRGSRLRASAAGDEEVDLLLPGTARLQIQLGVNMPARAEQIPGKEEVQMFHEAYDVVLYLGIIDILQEYNMTKKIEHAYKSIQFDSLSISAVDPTFYSRRFLDFIQKMFXPHEMAG

SEQ ID NO: 13595 - DNA, 1915 bp, Glycine max
aaaatggctctactatcatcagtcctaaagcaattgccgcatgagctaagttcaacccattacctaacagttttcttctgcatcttccttatacttcttcagctaataagaagaaacaaatacaatctgccaccatccccaccaaagatacccataatcggcaatcttcaccagctaggcacactgccacaccgctcctttcatgcactctcacacaaatatggccctctcatgatgttgcaattgggtcaaattccaaccctagtggtctcatcagctgacgtggccagagaaataatcaaaacgcatgatgttgttttctccaaccgccgacaacctacagctgctaaaatctttggttatggatgcaaagatgtggctttcgtgtactaccgcgaagagtggagacaaaagataaagacatgtaaggttgagcttatgagtctgaagaaggtgcggttgtttcattccattagacaagaagttgttacagagttggttgaagctataggtgaagcgtgtggtagtgaaagaccatgtgtgaatctgactgagatgctgatggcagcatcgaacgacattgtgtctagatgtgttcttggacggaagtgtgatgatgcatgtggtggtagtggcagtagcagctttgcagcgttgggaagaaagattatgagactattatcggctttcagcgtgggtgatttcttcccttcgttgggttgggttgactatctgactggcttaattccagagatgaaaaccacgtttctcgcagtagatgctttccttgatgaggtaattgcagaacacgagagcagtaacaagaagaatgatgacttcttggggatacttcttcaacttcaagaatgtgggaggcttgactttcagctcgaccgagataacctcaaagcaatcctagtggacatgataataggtgggagtgacactacttcaacaactctagaatggacttttgcggagttccttagaaatccaaataccatgaagaaagctcaagaagaggtaagaagagtggtgggaatcaattccaaagcagtactggatgaaaattgtgtgaatcaaatgaactacttgaaatgtgtagtcaaagaaactttgagattacatccaccccttcctcttttgattgctcgagagacatcatcaagtgtaaaactaagagggtacgatattcccgcaaaaacaatggtatttatcaatgcatgggcgatccagagggatcctgaattatgggatgatcctgaagaatttattcccgaaagatttgaaactagccaagttgatcttaatggacaagattttcaattaattccgttcggtattgggagaaggggatgccctgcaatgtcatttggacttgcttcaactgagtatgttcttgctaatcttttgtattggttcaattggaatatgtccgagtctggacgtatattgatgcacaacattgacatgagtgagacaaatggactcactgtcagtaagaaagtaccacttcatcttgaaccagaaccatataaaacatgatcatttcacattatgcatgtttggcaacacctataaagagtatagatctggaagtacttcaatttagtaatggatgtaaaagctatacaataagaagtgctaacaagctaggatatgagcatttatggagtaacgagtgaggttccaaagagtctaattactcgtctcttgaacattgttatatttgttttcttgcagtttgttaatcttttgaatagttgtttcacatttatttttgtatggtttgttggtatgttgtggaaggcgttagtaaaaatttgtggtgtgttcttaaattctagaaagccaaattgtgtgattgcaattgaatctaattaatgacattaaaaataaaccaattgatatttct

SEQ ID NO: 13596 - protein, 514 aa, Glycine max
KMALLSSVLKQLPHELSSTHYLTVFFCIFLILLQLIRRNKYNLPPSPPKIPIIGNLHQLGTLPHRSFHALSHKYGPLMMLQLGQIPTLVVSSADVAREIIKTHDVVFSNRRQPTAAKIFGYGCKDVAFVYYREEWRQKIKTCKVELMSLKKVRLFHSIRQEVVTELVEAIGEACGSERPCVNLTEMLMAASNDIVSRCVLGRKCDDACGGSGSSSFAALGRKIMRLLSAFSVGDFFPSLGWVDYLTGLIPEMKTTFLAVDAFLDEVIAEHESSNKKNDDFLGILLQLQECGRLDFQLDRDNLKAILVDMIIGGSDTTSTTLEWTFAEFLRNPNTMKKAQEEVRRVVGINSKAVLDENCVNQMNYLKCVVKETLRLHPPLPLLIARETSSSVKLRGYDIPAKTMVFINAWAIQRDPELWDDPEEFIPERFETSQVDLNGQDFQLIPFGIGRRGCPAMSFGLASTEYVLANLLYWFNWNMSESGRILMHNIDMSETNGLTVSKKVPLHLEPEPYKT

SEQ ID NO: 13597 - protein, 513 aa, Glycine max
MALLSSVLKQLPHELSSTHYLTVFFCIFLILLQLIRRNKYNLPPSPPKIPIIGNLHQLGTLPHRSFHALSHKYGPLMMLQLGQIPTLVVSSADVAREIIKTHDVVFSNRRQPTAAKIFGYGCKDVAFVYYREEWRQKIKTCKVELMSLKKVRLFHSIRQEVVTELVEAIGEACGSERPCVNLTEMLMAASNDIVSRCVLGRKCDDACGGSGSSSFAALGRKIMRLLSAFSVGDFFPSLGWVDYLTGLIPEMKTTFLAVDAFLDEVIAEHESSNKKNDDFLGILLQLQECGRLDFQLDRDNLKAILVDMIIGGSDTTSTTLEWTFAEFLRNPNTMKKAQEEVRRVVGINSKAVLDENCVNQMNYLKCVVKETLRLHPPLPLLIARETSSSVKLRGYDIPAKTMVFINAWAIQRDPELWDDPEEFIPERFETSQVDLNGQDFQLIPFGIGRRGCPAMSFGLASTEYVLANLLYWFNWNMSESGRILMHNIDMSETNGLTVSKKVPLHLEPEPYKT

SEQ ID NO: 13598 - protein, 437 aa, Glycine max
MMLQLGQIPTLVVSSADVAREIIKTHDVVFSNRRQPTAAKIFGYGCKDVAFVYYREEWRQKIKTCKVELMSLKKVRLFHSIRQEVVTELVEAIGEACGSERPCVNLTEMLMAASNDIVSRCVLGRKCDDACGGSGSSSFAALGRKIMRLLSAFSVGDFFPSLGWVDYLTGLIPEMKTTFLAVDAFLDEVIAEHESSNKKNDDFLGILLQLQECGRLDFQLDRDNLKAILVDMIIGGSDTTSTTLEWTFAEFLRNPNTMKKAQEEVRRVVGINSKAVLDENCVNQMNYLKCVVKETLRLHPPLPLLIARETSSSVKLRGYDIPAKTMVFINAWAIQRDPELWDDPEEFIPERFETSQVDLNGQDFQLIPFGIGRRGCPAMSFGLASTEYVLANLLYWFNWNMSESGRILMHNIDMSETNGLTVSKKVPLHLEPEPYKT

SEQ ID NO: 13599 - DNA, 2035 bp, Glycine max
acaacatatctttctcttgttccttctccttgtgatcttcttcaaccttcagagtgagaaaacacattcagaaaccacgtttctctcttcttcttcttcttcttctttttcttctctcgaggtcattattaagtattcaccatggaggcaccatctcccaccaaacccaacgacccaacaaaaccttccaacacttccaccacccttagtctggaggccggcccggcccaagcgagcccactccgaaaaatgtttgccgtggcgtccatcgccgccggcatacagttcgggtgggctctccagctctctcttctaaccccctacgttcagcttttaggagtcccccacgcggcggcctccttcatctggctctgcgggcccatttcctggctcgtggtacagcccattgtgggctactacagcgaccactgtacctcccgctttggtcgcaggcgcccctttattctcgggggcgccttagccgtcgccgtcgccgtgttcctcattggttacgcagccgatataggatacgcggcgggcgacgacatatcgaaaacgacccgaccccgagcggtcggggtcttcgtcataggattttggatcctagacgtggccaacaacatgcttcaaggaccctgtcgcgcctttctagcagacctagctgccggcgaccaacgaaaaacaagaattgctaacggttttttctcgtttttcatggccgtgggcaacgtgctaggttacgcagcggggtcctacaaaggtctccacaagatgtttcccttcacggagaccaaggcctgcgacgtgttctgcgcaaatctcaagagctgcttctttttctcaatcctcttgctgctgtttttagcaacggttgctctgctctacgtaaaggacaagcaagtggaagcacgggccttggatgacgccacgcaaccctcgtgcttctttcagcttttcagtgctctgaaagagctcaagagaccgatgtggatgctgatgctggtgacagctgtgaactgggtggggtggttcccttactttttgttcgacaccgattggatggggcgcgaggtgtacggtggtcaagtgggggaggacgcgtacgccaatggagtgcgcgttgggtcgctagggctgatggtaaacgccgtcgttttgggcttcatgtcgctggcggtggagccgttggggaagatggttgggggagtgaagaggctgtgggcgattgtgaactttattctggcaattgggttcggaatgacggtggtgatcaccaaggtggcggagcaccagcgcaagatgaatcccgccgccgtgggtcacccctccgaaggggtggtggttgggtccatggttttctttggggttctcggagttcctcttgcgattactttcagtgttccatttgctctagcatcaatatactgcagcgcttcaggagcaggccaaggtttatctttgggagtcctcaatcttgcaattgtggtgccacagatggtggtgtctacattaagtggtccttgggatgctttgtttggtggtggcaacttgccggctttcatggtgggtgccgcggcggccgcattgagcgccataatggcgattgtcttgctgccaactccaaagccagctgatgaggccaaggcttcaagcatgatggcagggggctttcactagttaatcgagttttgcatgtttcagttttgtcccctgctttaataggaagaaaccaaaaaaagaaagtaataaaagaagaaaatttggatagtcttttaagatttgaattgaagctggtgtgtaattaagtaatagacccaccaagtgctacatttataaccttttgtagcacccactgaacatagtaattgtagagtttggtgtgattgtacataattgcagtggttggaacttggaagacccttcctcttgtataattttagtctgtttcagtgttcagaggaatgtggtgattaaggaggagtcttagttttaagactttatatcaattaatgataataagggaaatgctactttt

SEQ ID NO: 13600 - protein, 511 aa, Glycine max
MEAPSPTKPNDPTKPSNTSTTLSLEAGPAQASPLRKMFAVASIAAGIQFGWALQLSLLTPYVQLLGVPHAAASFIWLCGPISWLVVQPIVGYYSDHCTSRFGRRRPFILGGALAVAVAVFLIGYAADIGYAAGDDISKTTRPRAVGVFVIGFWILDVANNMLQGPCRAFLADLAAGDQRKTRIANGFFSFFMAVGNVLGYAAGSYKGLHKMFPFTETKACDVFCANLKSCFFFSILLLLFLATVALLYVKDKQVEARALDDATQPSCFFQLFSALKELKRPMWMLMLVTAVNWVGWFPYFLFDTDWMGREVYGGQVGEDAYANGVRVGSLGLMVNAVVLGFMSLAVEPLGKMVGGVKRLWAIVNFILAIGFGMTVVITKVAEHQRKMNPAAVGHPSEGVVVGSMVFFGVLGVPLAITFSVPFALASIYCSASGAGQGLSLGVLNLAIVVPQMVVSTLSGPWDALFGGGNLPAFMVGAAAAALSAIMAIVLLPTPKPADEAKASSMMAGGFH

SEQ ID NO: 13601 - protein, 475 aa, Glycine max
MFAVASIAAGIQFGWALQLSLLTPYVQLLGVPHAAASFIWLCGPISWLVVQPIVGYYSDHCTSRFGRRRPFILGGALAVAVAVFLIGYAADIGYAAGDDISKTTRPRAVGVFVIGFWILDVANNMLQGPCRAFLADLAAGDQRKTRIANGFFSFFMAVGNVLGYAAGSYKGLHKMFPFTETKACDVFCANLKSCFFFSILLLLFLATVALLYVKDKQVEARALDDATQPSCFFQLFSALKELKRPMWMLMLVTAVNWVGWFPYFLFDTDWMGREVYGGQVGEDAYANGVRVGSLGLMVNAVVLGFMSLAVEPLGKMVGGVKRLWAIVNFILAIGFGMTVVITKVAEHQRKMNPAAVGHPSEGVVVGSMVFFGVLGVPLAITFSVPFALASIYCSASGAGQGLSLGVLNLAIVVPQMVVSTLSGPWDALFGGGNLPAFMVGAAAAALSAIMAIVLLPTPKPADEAKASSMMAGGFH

SEQ ID NO: 13602 - protein, 351 aa, Glycine max
MLQGPCRAFLADLAAGDQRKTRIANGFFSFFMAVGNVLGYAAGSYKGLHKMFPFTETKACDVFCANLKSCFFFSILLLLFLATVALLYVKDKQVEARALDDATQPSCFFQLFSALKELKRPMWMLMLVTAVNWVGWFPYFLFDTDWMGREVYGGQVGEDAYANGVRVGSLGLMVNAVVLGFMSLAVEPLGKMVGGVKRLWAIVNFILAIGFGMTVVITKVAEHQRKMNPAAVGHPSEGVVVGSMVFFGVLGVPLAITFSVPFALASIYCSASGAGQGLSLGVLNLAIVVPQMVVSTLSGPWDALFGGGNLPAFMVGAAAAALSAIMAIVLLPTPKPADEAKASSMMAGGFH

SEQ ID NO: 13603 - DNA, 1326 bp, Glycine max
catggaggaccacaccccatttctctagcactgattaaacaataatctttgatttttttggtcctccggtcatccttgatgtgttcacaggaggtatgctctggtattttatatgacttaattagttcattttaaatgaatttaatttaatttaccaaattcagtaatgaaattgaatcagctaaattcaaccatgtatgaggtttcttgtagaattagcatgcagccaaccatatgcttcttagaatcttagtgacaacctgtagatgaagtgtgtcatatctttatcatttgttgtttctgttaactgatgatgatctactctgtaagttgtaactgtaatatagtaacattccttatttcatgttcctcttccaaccctaattgctttatctttctggtcatccagtggctagtatagaagaaccataagcactgagggaaaaagtgattagtactttagccaacaaattaaaaatggctgtcaccaaggtctacattgtgtattactccttatatggacatgtagacaccatggctagagaagtacacagaggggctgctacagttgaaggtgttgaagcaacactttggagggtacctgagatgctttcggaactaatattggataagttgaaggcccctcctaaaccaaatgatgtaccagacataatgccagaacaacttgtggaggctgatggtttgatatttggttttccttctcgttttgggatgatgccgagccagctcaaggccttctttgatgcaactagtgagctatgggcatcccaagcacttgccggcaaacctgctggaatcttctggagtactggtttttatggtggaggccaagaactatcagcattgacagctataactcaattagctcatcatggtatgctttttgttcctcttggatacacctttggaagtggcatgtttgagatagatgaggtaaaaggaggatctgcatatggtgctggaacttttgcaggagatggatctcgtcaacctacagaactagaactgcagcaggcattttaccagggtaaatatcttgccgaagtaacaaaaaagctgaaaagctaacttctctgcctaacaaatacatgacaggatactatgaactgtgatgtgctacattatctataacatttgattgaagactcgatgattatttttaccggtaagacaagatagaaagacctcatgtggcttttctttttctgggttctgttgttgcaacaatgtatatcttctgttatctctttcagaaaactctcaaattattccaatgaaatgataaacaagatattcagtatttcc

SEQ ID NO: 13604 - protein, 203 aa, Glycine max
MAVTKVYIVYYSLYGHVDTMAREVHRGAATVEGVEATLWRVPEMLSELILDKLKAPPKPNDVPDIMPEQLVEADGLIFGFPSRFGMMPSQLKAFFDATSELWASQALAGKPAGIFWSTGFYGGGQELSALTAITQLAHHGMLFVPLGYTFGSGMFEIDEVKGGSAYGAGTFAGDGSRQPTELELQQAFYQGKYLAEVTKKLKS

SEQ ID NO: 13605 - protein, 184 aa, Glycine max
MAREVHRGAATVEGVEATLWRVPEMLSELILDKLKAPPKPNDVPDIMPEQLVEADGLIFGFPSRFGMMPSQLKAFFDATSELWASQALAGKPAGIFWSTGFYGGGQELSALTAITQLAHHGMLFVPLGYTFGSGMFEIDEVKGGSAYGAGTFAGDGSRQPTELELQQAFYQGKYLAEVTKKLKS

SEQ ID NO: 13606 - protein, 160 aa, Glycine max
MLSELILDKLKAPPKPNDVPDIMPEQLVEADGLIFGFPSRFGMMPSQLKAFFDATSELWASQALAGKPAGIFWSTGFYGGGQELSALTAITQLAHHGMLFVPLGYTFGSGMFEIDEVKGGSAYGAGTFAGDGSRQPTELELQQAFYQGKYLAEVTKKLKS

SEQ ID NO: 13607 - DNA, 1435 bp, Glycine max
  misc_feature (112)..(112): n is a, c, g, or t
  misc_feature (133)..(133): n is a, c, g, or t
  misc_feature (1094)..(1094): n is a, c, g, or t
  misc_feature (1404)..(1404): n is a, c, g, or t
aaacaacagaagcagcaggttcaaacttcaattcatggaagtgtgattctaatctccacaacaaacctaaccctaaaaagctaacccttttttttttttttttaaatattgnttctttttttacttaccctanatgttagagccatggacataaccccaacaacaacgatcaacaacaacaacactactcccagtgcaacaacaaaatccccagaaaatgaaacagaaacaccgaccaggatcaccacccccatcactcccacaacgacaaaaacctcatctttctcgaatggtgtcctcaaacgcacccaccaccaccaccacctccaccaccctatccctccggtggttacctacaaagaatgcctcaaaaatcacgccgccaacttgggtggccacgccttagatggctgcggcgagttcatgccctctccgaccgccaccgctgccgaccccagctccataaaatgcgccgcctgcggctgccaccgcaacttccaccgccgcgagccggaggagccccccatcgcctccaccaccacgcacgtcatcgagtatcagccccaccaccgccaccaccctcccccgccgctgcacgcggcggcggtagccacccgcagccccaattctgcttccccaccgccgatctcctcgtcgtactacccctccgcgccgcacatgctcctcgccctctccgccggactggcggctccgccggagagcaccgccgcgcctgccgccgcgcccacgagaaagcggttccgcacgaagttcagccaagagcagaaggagaagatgcacaagttcgcggagaaagtagggtggaagattcagaagcgcgacgaggatttgattcacgaaatttgcaacgaagttggcgttgatagaagcgttctcaaggtttggatgcataacaacaaaaacacctttgccaaaaaggataacaataatattgttactagtaatgatattaatattactactaaaaataatatttctactgataatgatgcaaatgggagtgatgtcaaggtttttgaaaaccctaacaatgatggtggtgaagatcgcgctgaagatccgagtagtaatcnctatgatggggtgaacgttgttggtgctaatggatcttctagttcttgatctaagggggaagaaaataataatgtattagataggttaatgatgattatgatgatgatgatgatgctacaaggttaattaatcagctgtttttaatttcttttcttttcttttttttgtttttaattgtttagtttttatattgttaatgagagcatgatgatcaatcagtttaatgggagagaatgttatatccggaagagaatttattttgcttttaatggttttatgctgaattaagttagcttttagttgttaccncttgttatgaatgtatattatgtttatcttt

SEQ ID NO: 13608 - protein, 332 aa, Glycine max
  misc_feature (317)..(317): Xaa can be any naturally occurring amino acid
MDITPTTTINNNNTTPSATTKSPENETETPTRITTPITPTTTKTSSFSNGVLKRTHHHHHLHHPIPPVVTYKECLKNHAANLGGHALDGCGEFMPSPTATAADPSSIKCAACGCHRNFHRREPEEPPIASTTTHVIEYQPHHRHHPPPPLHAAAVATRSPNSASPPPISSSYYPSAPHMLLALSAGLAAPPESTAAPAAAPTRKRFRTKFSQEQKEKMHKFAEKVGWKIQKRDEDLIHEICNEVGVDRSVLKVWMHNNKNTFAKKDNNNIVTSNDINITTKNNISTDNDANGSDVKVFENPNNDGGEDRAEDPSSNXYDGVNVVGANGSSSS

SEQ ID NO: 13609 - protein, 239 aa, Glycine max
  misc_feature (224)..(224): Xaa can be any naturally occurring amino acid
MPSPTATAADPSSIKCAACGCHRNFHRREPEEPPIASTTTHVIEYQPHHRHHPPPPLHAAAVATRSPNSASPPPISSSYYPSAPHMLLALSAGLAAPPESTAAPAAAPTRKRFRTKFSQEQKEKMHKFAEKVGWKIQKRDEDLIHEICNEVGVDRSVLKVWMHNNKNTFAKKDNNNIVTSNDINITTKNNISTDNDANGSDVKVFENPNNDGGEDRAEDPSSNXYDGVNVVGANGSSSS

SEQ ID NO: 13610 - protein, 173 aa, Glycine max
MPQKSRRQLGWPRLRWLRRVHALSDRHRCRPQLHKMRRLRLPPQLPPPRAGGAPHRLHHHARHRVSAPPPPPPSPAAARGGGSHPQPQFCFPTADLLVVLPLRAAHAPRPLRRTGGSAGEHRRACRRAHEKAVPHEVQPRAEGEDAQVRGESRVEDSEARRGFDSRNLQRSWR

SEQ ID NO: 13611 - DNA, 1431 bp, Glycine max
  misc_feature (1426)..(1426): n is a, c, g, or t
gttatataaagacttgaattcctcataattctccatccacaacaaaaaactacttctcaattcagttaacacaccaaccccacatccaaagcttcagttcaatatggcaaccttgtcaagttttgctcctttggccattctaagtttagttctagtaattagtgccattgtctttgaggctgaagctaggccaaggacattctttgtatttggagattcacttgttgataatggaaacaacaattacttggctaccacggcacgtgccgatgctcccccttatgggattgattaccctccaagtcatagaccaactggtcgtttctccaatggctacaacattcctgatcttatcagtcaacgacttggtgctgaggctacattgccatacttgagtccagaattaagaggaaataagctccttgttggtgcaaattttgcttcagctggaattggaatacttaatgacactggaattcagtttataaacgtaatcgaatgtataggcagctacaatattttaaagagtaccaaaaccgagtgagagctataattggagcttcacagactaagagcttagtgaatcaagcactagtactcatcactgtaggtggcaatgattttgtaaacaactacttcttggtgcccaattcagcaaggtctcgccaatacccattacctcaatatgtcaagtatctcatttctgagtaccaaaaacttttgcagaaactgtatgatttgggagcacgcagagttcttgtgacaggcacaggaccattgggttgtgttccatcagaattggcccaacgcggtagaaatggacaatgtgctgctgaacttcaacaagctgcagagttgtttaatccacaactcgaacaaatgttgctacaactcaacaggaaaattggaaaggacacttttattgctgcaaacacaggaaaaatgcacaacaacttcgttactaaccctcaacaatttgggtttatcacgtcacaaatagcttgttgtgggcaaggaccctacaatggtcttgggctatgcacaccactctccaacctttgccccaatagagaccaatatgcattttgggatgcattccatccatctgaaaaggccaataggcttattgtggaagaaattatgtcaggttctaaaatctacatgaacccaatgaacctcagcaccatcctggctttggatgctattaccacatgaagacaccaataagtctatgcacctcgcatgctagtttcattatgtcccttttttattattgtaattgtgatttaatttcgtattcctcaatatctaattggggaattagaaagttaaagggaggaagaaacttcccttttttgcataaaattacaacgaagaatatatatatatatataaatggtgggaagtactaagtgattcctgagtntcaat

SEQ ID NO: 13612 - protein, 238 aa, Glycine max
MYRQLQYFKEYQNRVRAIIGASQTKSLVNQALVLITVGGNDFVNNYFLVPNSARSRQYPLPQYVKYLISEYQKLLQKLYDLGARRVLVTGTGPLGCVPSELAQRGRNGQCAAELQQAAELFNPQLEQMLLQLNRKIGKDTFIAANTGKMHNNFVTNPQQFGFITSQIACCGQGPYNGLGLCTPLSNLCPNRDQYAFWDAFHPSEKANRLIVEEIMSGSKIYMNPMNLSTILALDAITT

SEQ ID NO: 13613 - protein, 146 aa, Glycine max
MATLSSFAPLAILSLVLVISAIVFEAEARPRTFFVFGDSLVDNGNNNYLATTARADAPPYGIDYPPSHRPTGRFSNGYNIPDLISQRLGAEATLPYLSPELRGNKLLVGANFASAGIGILNDTGIQFINVIECIGSYNILKSTKTE

SEQ ID NO: 13614 - DNA, 2041 bp, Glycine max
gatgtggtatttttagtaccacaaaataaataaaaaccgaaccatagcgcaacaatattattcgacagaacacaaggcacagcacagcgcagcgccgcctcaacatctcaactttcccttcgatctcattctcaggtgttgttgaagcttcctgtgttggcttggtatccctgcaagttctgctgtagcagattccaaggtgaaggtgtcacgttaaagtttctttcatgtttgaacaggctactatccatttgggagcaactgagctgcttggagagtatttttcttcctctaggaaaaattacagaccctcaccacagagacttagttgtatgaacggttggccaccttccattatccttgaaggagattgttcaaggatacagactacctttgaggttgaaattgcggctgcatataatttgaattccagcattttctgcctctgaatatctctggaactttgtaagtcaacaaacatggctttacagaacattggtgctgcaaacagtgatgatgccttctacaggtataagatgcctaagatgattaccaaaattgagggcagaggtaatggcatcaaaactaatgttgtcaatatggttgacattgcaaaggcattggcaaggcctgcgtcttacacgaccaagtattttggttgtgaacttggggcccagtcgaaatttgatgagaagaccggaacttctcacgtcaatggagcacatgatactactaagcttgctggccttcttgagaacttcattaagaaatatgtccagtgttatggttgtggaaatcctgaaactgagatcataatcactaagaaccaaatgatccagctgaaatgcgctgcttgtggttttgtgtctgatgttgatatgagagacaagctgactaccttcatcattaagaaccctccagaagttaagaaaggatccaaagacaagaaggccatgaggagagctgagaaggagagacagaaggaaggtgaattagctgatgaggaacagaagaaagtgaagaaagaggttaagaagaaaggctcttcatcttctaaggatggcactgctaaatcaacctcttctaagaaaaaagcaagtggctctgatgaagaccacacttcacctactcacagtcaaattgacgagaaagaggaggctccagatgaagatgatgacgacgacgtgcaatggctgacagatacatcacttgatgctgcccgtcaacgtatccaagaacagttaagtgctgtgacggctgatatggttatgctttctacagatgaaccagagaagaagaaaaaaacaataagtaacagaaatggtggttctcacaatggtaactcaatgcactacgggaccctggttggtgaagtgaaagcaaatttcaagaaaggtgttggggcaaatgaattgctgtcccatcttgcagcacttcctgcacctgctcaagaaaagatgagtgcactggttgaagctctatttgatggaattgataaaggttttgctaaagaagctgataagaagaagaactactttgctgctgctgttgctgaggagggatcccagctgttattgcttcatgctattgaagaattttcttgcaagtctacttccaatgctttaaaggaggttgccctggttctaaagacattctacgatgctgatgtgttggaggaagagcacatagtgcagtggtatcaaaagggactgaagggcaataacaagaactctaagatttggaagaatgctcaacctttcattgattggcttcagagtgcagaatcagaaaccgaggaagaataattttcccacattctccgtttcttatgtttgcttgcttttgtcatgtcctttatttccaataaaagggtcttgttggccccatgcgttgtggaactactatacttgtctgaagggtgtatgcttgctggactagtatagcatgtatgcgtcagtgagttttgtgatgtgtggttctaatgtattttggttattggttgtttatgattatgttttatattttaataaaacgtgtcttg

SEQ ID NO: 13615 - protein, 441 aa, Glycine max
MALQNIGAANSDDAFYRYKMPKMITKIEGRGNGIKTNVVNMVDIAKALARPASYTTKYFGCELGAQSKFDEKTGTSHVNGAHDTTKLAGLLENFIKKYVQCYGCGNPETEIIITKNQMIQLKCAACGFVSDVDMRDKLTTFIIKNPPEVKKGSKDKKAMRRAEKERQKEGELADEEQKKVKKEVKKKGSSSSKDGTAKSTSSKKKASGSDEDHTSPTHSQIDEKEEAPDEDDDDDVQWLTDTSLDAARQRIQEQLSAVTADMVMLSTDEPEKKKKTISNRNGGSHNGNSMHYGTLVGEVKANFKKGVGANELLSHLAALPAPAQEKMSALVEALFDGIDKGFAKEADKKKNYFAAAVAEEGSQLLLLHAIEEFSCKSTSNALKEVALVLKTFYDADVLEEEHIVQWYQKGLKGNNKNSKIWKNAQPFIDWLQSAESETEEE

SEQ ID NO: 13616 - protein, 422 aa, Glycine max
MPKMITKIEGRGNGIKTNVVNMVDIAKALARPASYTTKYFGCELGAQSKFDEKTGTSHVNGAHDTTKLAGLLENFIKKYVQCYGCGNPETEIIITKNQMIQLKCAACGFVSDVDMRDKLTTFIIKNPPEVKKGSKDKKAMRRAEKERQKEGELADEEQKKVKKEVKKKGSSSSKDGTAKSTSSKKKASGSDEDHTSPTHSQIDEKEEAPDEDDDDDVQWLTDTSLDAARQRIQEQLSAVTADMVMLSTDEPEKKKKTISNRNGGSHNGNSMHYGTLVGEVKANFKKGVGANELLSHLAALPAPAQEKMSALVEALFDGIDKGFAKEADKKKNYFAAAVAEEGSQLLLLHAIEEFSCKSTSNALKEVALVLKTFYDADVLEEEHIVQWYQKGLKGNNKNSKIWKNAQPFIDWLQSAESETEEE

SEQ ID NO: 13617 - protein, 419 aa, Glycine max
MITKIEGRGNGIKTNVVNMVDIAKALARPASYTTKYFGCELGAQSKFDEKTGTSHVNGAHDTTKLAGLLENFIKKYVQCYGCGNPETEIIITKNQMIQLKCAACGFVSDVDMRDKLTTFIIKNPPEVKKGSKDKKAMRRAEKERQKEGELADEEQKKVKKEVKKKGSSSSKDGTAKSTSSKKKASGSDEDHTSPTHSQIDEKEEAPDEDDDDDVQWLTDTSLDAARQRIQEQLSAVTADMVMLSTDEPEKKKKTISNRNGGSHNGNSMHYGTLVGEVKANFKKGVGANELLSHLAALPAPAQEKMSALVEALFDGIDKGFAKEADKKKNYFAAAVAEEGSQLLLLHAIEEFSCKSTSNALKEVALVLKTFYDADVLEEEHIVQWYQKGLKGNNKNSKIWKNAQPFIDWLQSAESETEEE

SEQ ID NO: 13618 - DNA, 1628 bp, Glycine max
  misc_feature (972)..(972): n is a, c, g, or t
  misc_feature (987)..(987): n is a, c, g, or t
  misc_feature (1578)..(1578): n is a, c, g, or t
gttggttgttcaggcgaaacaatggcgacggtggagctctggtggatgacgtgctttctctaacaactgctcttagaaaagagagagagaatggcggtggagtacacatgctgctcaacggcgttcttcgttcacatagtggtaatcgtgctgctggtgctgttcgcgggcctcatgtcgggcctcaccttgggcctcatgtcgctcagcctcgttgatcttgaggttctcgctaagtccggcactcctcaggatcgtaaacacgctgagaagatattaccagttgtcaaaaaccaacatttattgctatgtactcttctaatttgcaatgctgcggccatggagacacttcctatttttcttgatggtcttgttactgcttggggcgctatcctgatttcagtgacattaattcttttgtttggtgagattataccccaatcagtttgttctcggtatggtttggctattggtgcatcagtggctccctttgtccgtgtgcttgtatgcatatgtttcccagttgcctttccaattagtaagttgttggattttttgctgggccatcgacatgaagccctattccgtagagctgagttgaaaacactcgtaaatttgcatggtaatgaggctggaaaagggggggaactgacacatgatgaaacaacgatcattgctggggcacttgaactcagtgagaagacagcgagtgatgccatgactcctatatctgaaacatttaccgttgatattaattcaaagcttgatagggaactgatgaatgaaatattggagaaagggcacagcagagtcccagtctattatgagcagcctacaaacattattggccttgtactggtcaagaatttattgacagttcacccagaagatgaagcacccgtgaagagtgtaaccatacgcaggattccaagggttccagaaagtatgccactttatgacattttgaatgantttcagaagggccanagccacatggctgttgttgtcagacggtgtgacaagactaaccaacaatcttcccaaaataatgcaaatgactcggtgagagatgttaaggtggatattgatggtgaaaagcctcccaaagagaaagctttgaaacccaagatgccactccacaagtggaaaagctttccaaatacaaacaagtcatcaaataggggttctcggagcagaaaatggtcaaaaaatatgtactcggatattttagagatagatggaagtccacttccaaagctccctgaagaagaagaagctgttggaattattaccatggaagatgtcattgaagagcttttgcaggaggagatctttgatgagacggatcatcattttgaagactcataacagtgctttttccataaaaccttccatgttcatatttcttgtttggaccttatagataattaaatagataatgcggtttagggttgaaagctgctgtatagagatctgagttgtgatttggaacgtgtaagccattatcgttgatgtaatgcagagaccagacagctgttatataaaccaaaccttttgagatgtacatgggcgtgttgnctttatcacaatgacgcatgcaatcaaggcagcaaatcatggtttgtttt

SEQ ID NO: 13619 - protein, 425 aa, Glycine max
  misc_feature (294)..(294): Xaa can be any naturally occurring amino acid
  misc_feature (299)..(299): Xaa can be any naturally occurring amino acid
MAVEYTCCSTAFFVHIVVIVLLVLFAGLMSGLTLGLMSLSLVDLEVLAKSGTPQDRKHAEKILPVVKNQHLLLCTLLICNAAAMETLPIFLDGLVTAWGAILISVTLILLFGEIIPQSVCSRYGLAIGASVAPFVRVLVCICFPVAFPISKLLDFLLGHRHEALFRRAELKTLVNLHGNEAGKGGELTHDETTIIAGALELSEKTASDAMTPISETFTVDINSKLDRELMNEILEKGHSRVPVYYEQPTNIIGLVLVKNLLTVHPEDEAPVKSVTIRRIPRVPESMPLYDILNXFQKGXSHMAVVVRRCDKTNQQSSQNNANDSVRDVKVDIDGEKPPKEKALKPKMPLHKWKSFPNTNKSSNRGSRSRKWSKNMYSDILEIDGSPLPKLPEEEEAVGIITMEDVIEELLQEEIFDETDHHFEDS

SEQ ID NO: 13620 - protein, 397 aa, Glycine max
  misc_feature (266)..(266): Xaa can be any naturally occurring amino acid
  misc_feature (271)..(271): Xaa can be any naturally occurring amino acid
MSGLTLGLMSLSLVDLEVLAKSGTPQDRKHAEKILPVVKNQHLLLCTLLICNAAAMETLPIFLDGLVTAWGAILISVTLILLFGEIIPQSVCSRYGLAIGASVAPFVRVLVCICFPVAFPISKLLDFLLGHRHEALFRRAELKTLVNLHGNEAGKGGELTHDETTIIAGALELSEKTASDAMTPISETFTVDINSKLDRELMNEILEKGHSRVPVYYEQPTNIIGLVLVKNLLTVHPEDEAPVKSVTIRRIPRVPESMPLYDILNXFQKGXSHMAVVVRRCDKTNQQSSQNNANDSVRDVKVDIDGEKPPKEKALKPKMPLHKWKSFPNTNKSSNRGSRSRKWSKNMYSDILEIDGSPLPKLPEEEEAVGIITMEDVIEELLQEEIFDETDHHFEDS

SEQ ID NO: 13621 - protein, 389 aa, Glycine max
  misc_feature (258)..(258): Xaa can be any naturally occurring amino acid
  misc_feature (263)..(263): Xaa can be any naturally occurring amino acid
MSLSLVDLEVLAKSGTPQDRKHAEKILPVVKNQHLLLCTLLICNAAAMETLPIFLDGLVTAWGAILISVTLILLFGEIIPQSVCSRYGLAIGASVAPFVRVLVCICFPVAFPISKLLDFLLGHRHEALFRRAELKTLVNLHGNEAGKGGELTHDETTIIAGALELSEKTASDAMTPISETFTVDINSKLDRELMNEILEKGHSRVPVYYEQPTNIIGLVLVKNLLTVHPEDEAPVKSVTIRRIPRVPESMPLYDILNXFQKGXSHMAVVVRRCDKTNQQSSQNNANDSVRDVKVDIDGEKPPKEKALKPKMPLHKWKSFPNTNKSSNRGSRSRKWSKNMYSDILEIDGSPLPKLPEEEEAVGIITMEDVIEELLQEEIFDETDHHFEDS

SEQ ID NO: 13622 - DNA, 3335 bp, Glycine max
ggagaataggcctcactctttctttctcttccattcccaaaatgcgtgtcctctttctttttctgtttttccagtttctccattttcatttccccaaaaccctttcagccccaatctcagagtaccgtgcccttctctctctccgttcagccattaccgacgccaccccacctcttctcacttcgtggaactcctccaccccttactgttcctggctcggcgtcacctgcgacaaccgccgccacgtcacctccctagacctcaccggcctcgacctctccggccccctctccgccgacgtcgcccacctcccattcctctccaacctctccctcgcctcgaataagttctccggccccattcctccctcactctccgctctctccggcctccgcttcctcaacctctccaacaatgtcttcaacgaaaccttcccctcggagctctcgcgcctccagaacctcgaggtcctcgacctctacaacaacaacatgaccggcgtgcttcccctcgccgtcgcgcagatgcagaatcttcgtcatttgcatctcggcggcaacttcttctccggccagatcccgccggagtatggacgctggcagcgcctccagtacctcgccgtctccggcaacgagctcgaggggactatccctccggagatcggaaacttgtccagcctccgggagctctacatcggctactacaacacctacaccgggggcattccgccggagatcggaaatttgtcggagctggtgaggctcgacgccgcctactgtgggttgtccggcgagattccggcggcgctgggaaagcttcagaagctggacacgctgttccttcaggtgaatgcattgtcagggtctttgactcccgagctggggaacctgaagagcctgaaatccatggatttgtctaacaacatgctctccggtgagattccggcgagattcggcgagctgaagaatattactcttctgaatctgttcaggaacaagcttcacggagctataccagagtttataggggagcttccagcgttggaagttgtgcaactgtgggagaataacttcacaggtagcattccagagggtttgggcaaaaacgggagactcaaccttgttgatctttcttctaacaagttaactgggactttgcctacttatctctgttctgggaatactcttcagactctgataactcttgggaattttctttttggtccaattcctgagtcgcttggtagttgtgaatcccttacacggattagaatgggagagaactttttgaatggttccattccgagagggctttttggacttcccaaactaacacaggttgagcttcaggataattatctctctggagagtttcctgaggtgggttctgttgctgttaatcttggtcagattactctctctaacaaccagctttctggggttctacctccctccattggtaacttctccagcgtgcagaagctcattcttgatggcaacatgttcacgggtcggatacctccccagattgggaggttgcaacagctttctaagattgattttagtggcaacaagttctcgggtcctattgtgcctgagatcagtcagtgtaagctgttaactttccttgaccttagccgcaatgagctatctggagacatcccaaatgagataactggcatgaggatattgaattacttgaatctttctaggaatcatttagtgggtggcattccctcttcgatatcatctatgcaaagcttgacttctgttgatttttcatacaacaacctgtctggtttggtgcctggtaccggtcaattcagctacttcaattacacgtctttcttgggaaaccctgacctctgtggcccctatttgggtgcttgcaaggatggggttgccaatggcgcacaccaacctcatgttaaaggtctctcctcttcttttaagctgctacttgttgttgggttgctactatgttccattgcttttgctgtggctgcaatattcaaggcccggtcactgaagaaggccagtggggctcgtgcatggaagttgactgcgttccaacgtttggacttcactgtcgatgatgttttgcattgcttgaaggaggataatattatagggaaaggaggtgctggcattgtctacaaaggggctatgcctaatggggatcatgttgctgtgaaaaggcttccggctatgagtagaggctcttcacatgatcatggcttcaatgctgagattcaaacattggggcgaatccgacacaggcacattgttaggttgttgggcttctgttcaaatcatgaaacaaaccttttggtctatgagtacatgcccaatggaagtttaggcgaggttcttcatggaaagaaagggggtcatttgcattgggatacaaggtataaaattgcggtggaggctgccaaggggctttgctatctgcaccatgattgttcgccactcattgtccatcgtgatgtgaagtcaaacaacatccttcttgattctaatcatgaagcccatgttgctgattttgggcttgctaagttcctgcaagattctgggacatctgaatgcatgtctgctattgctggttcatatggatacatagctccagagtatgcctacacattgaaagttgatgagaaaagcgatgtgtacagttttggtgtggttctcttagaacttataacaggcaggaaaccagttggagaatttggtgatggcgtggacatagtgcaatgggtgaggaaaatgacggattctaacaaggaaggagttcttaaagttcttgatcctagacttccctcagttccccttcacgaagtgatgcatgttttctatgtagccatgctgtgcgttgaagaacaggctgtagagagaccaactatgcgtgaagttgttcaaatactgacagagcttccaaagccacctgactctaaagaggggaacttaacaataacggaatcatctttgtcatcatcaaacgctttagaatctccatcctcagcctctaaggaagatcaaaatcctcctcaatccccaccacccgatcttcttagcatttaaagtgctctgttgggtgtttcatcttagttccctgggttgtgatcgcttatccatttactttctttttctgtctctcttctgggattggttttttttttccctaactagaaggtgttaatgtttggattttttaatggttttgtacagtaggattgatgggggtattttcttataaagtcactgtcttcatcatgtagtactgctttttaatttttatttgcgaccgttgttggggaggattcaagggatacaatt

SEQ ID NO: 13623 - protein, 1025 aa, Glycine max
RIGLTLSFSSIPKMRVLFLFLFFQFLHFHFPKTLSAPISEYRALLSLRSAITDATPPLLTSWNSSTPYCSWLGVTCDNRRHVTSLDLTGLDLSGPLSADVAHLPFLSNLSLASNKFSGPIPPSLSALSGLRFLNLSNNVFNETFPSELSRLQNLEVLDLYNNNMTGVLPLAVAQMQNLRHLHLGGNFFSGQIPPEYGRWQRLQYLAVSGNELEGTIPPEIGNLSSLRELYIGYYNTYTGGIPPEIGNLSELVRLDAAYCGLSGEIPAALGKLQKLDTLFLQVNALSGSLTPELGNLKSLKSMDLSNNMLSGEIPARFGELKNITLLNLFRNKLHGAIPEFIGELPALEVVQLWENNFTGSIPEGLGKNGRLNLVDLSSNKLTGTLPTYLCSGNTLQTLITLGNFLFGPIPESLGSCESLTRIRMGENFLNGSIPRGLFGLPKLTQVELQDNYLSGEFPEVGSVAVNLGQITLSNNQLSGVLPPSIGNFSSVQKLILDGNMFTGRIPPQIGRLQQLSKIDFSGNKFSGPIVPEISQCKLLTFLDLSRNELSGDIPNEITGMRILNYLNLSRNHLVGGIPSSISSMQSLTSVDFSYNNLSGLVPGTGQFSYFNYTSFLGNPDLCGPYLGACKDGVANGAHQPHVKGLSSSFKLLLVVGLLLCSIAFAVAAIFKARSLKKASGARAWKLTAFQRLDFTVDDVLHCLKEDNIIGKGGAGIVYKGAMPNGDHVAVKRLPAMSRGSSHDHGFNAEIQTLGRIRHRHIVRLLGFCSNHETNLLVYEYMPNGSLGEVLHGKKGGHLHWDTRYKIAVEAAKGLCYLHHDCSPLIVHRDVKSNNILLDSNHEAHVADFGLAKFLQDSGTSECMSAIAGSYGYIAPEYAYTLKVDEKSDVYSFGVVLLELITGRKPVGEFGDGVDIVQWVRKMTDSNKEGVLKVLDPRLPSVPLHEVMHVFYVAMLCVEEQAVERPTMREVVQILTELPKPPDSKEGNLTITESSLSSSNALESPSSASKEDQNPPQSPPPDLLSI

SEQ ID NO: 13624 - protein, 1012 aa, Glycine max
MRVLFLFLFFQFLHFHFPKTLSAPISEYRALLSLRSAITDATPPLLTSWNSSTPYCSWLGVTCDNRRHVTSLDLTGLDLSGPLSADVAHLPFLSNLSLASNKFSGPIPPSLSALSGLRFLNLSNNVFNETFPSELSRLQNLEVLDLYNNNMTGVLPLAVAQMQNLRHLHLGGNFFSGQIPPEYGRWQRLQYLAVSGNELEGTIPPEIGNLSSLRELYIGYYNTYTGGIPPEIGNLSELVRLDAAYCGLSGEIPAALGKLQKLDTLFLQVNALSGSLTPELGNLKSLKSMDLSNNMLSGEIPARFGELKNITLLNLFRNKLHGAIPEFIGELPALEVVQLWENNFTGSIPEGLGKNGRLNLVDLSSNKLTGTLPTYLCSGNTLQTLITLGNFLFGPIPESLGSCESLTRIRMGENFLNGSIPRGLFGLPKLTQVELQDNYLSGEFPEVGSVAVNLGQITLSNNQLSGVLPPSIGNFSSVQKLILDGNMFTGRIPPQIGRLQQLSKIDFSGNKFSGPIVPEISQCKLLTFLDLSRNELSGDIPNEITGMRILNYLNLSRNHLVGGIPSSISSMQSLTSVDFSYNNLSGLVPGTGQFSYFNYTSFLGNPDLCGPYLGACKDGVANGAHQPHVKGLSSSFKLLLVVGLLLCSIAFAVAAIFKARSLKKASGARAWKLTAFQRLDFTVDDVLHCLKEDNIIGKGGAGIVYKGAMPNGDHVAVKRLPAMSRGSSHDHGFNAEIQTLGRIRHRHIVRLLGFCSNHETNLLVYEYMPNGSLGEVLHGKKGGHLHWDTRYKIAVEAAKGLCYLHHDCSPLIVHRDVKSNNILLDSNHEAHVADFGLAKFLQDSGTSECMSAIAGSYGYIAPEYAYTLKVDEKSDVYSFGVVLLELITGRKPVGEFGDGVDIVQWVRKMTDSNKEGVLKVLDPRLPSVPLHEVMHVFYVAMLCVEEQAVERPTMREVVQILTELPKPPDSKEGNLTITESSLSSSNALESPSSASKEDQNPPQSPPPDLLSI

SEQ ID NO: 13625 - protein, 862 aa, Glycine max
MTGVLPLAVAQMQNLRHLHLGGNFFSGQIPPEYGRWQRLQYLAVSGNELEGTIPPEIGNLSSLRELYIGYYNTYTGGIPPEIGNLSELVRLDAAYCGLSGEIPAALGKLQKLDTLFLQVNALSGSLTPELGNLKSLKSMDLSNNMLSGEIPARFGELKNITLLNLFRNKLHGAIPEFIGELPALEVVQLWENNFTGSIPEGLGKNGRLNLVDLSSNKLTGTLPTYLCSGNTLQTLITLGNFLFGPIPESLGSCESLTRIRMGENFLNGSIPRGLFGLPKLTQVELQDNYLSGEFPEVGSVAVNLGQITLSNNQLSGVLPPSIGNFSSVQKLILDGNMFTGRIPPQIGRLQQLSKIDFSGNKFSGPIVPEISQCKLLTFLDLSRNELSGDIPNEITGMRILNYLNLSRNHLVGGIPSSISSMQSLTSVDFSYNNLSGLVPGTGQFSYFNYTSFLGNPDLCGPYLGACKDGVANGAHQPHVKGLSSSFKLLLVVGLLLCSIAFAVAAIFKARSLKKASGARAWKLTAFQRLDFTVDDVLHCLKEDNIIGKGGAGIVYKGAMPNGDHVAVKRLPAMSRGSSHDHGFNAEIQTLGRIRHRHIVRLLGFCSNHETNLLVYEYMPNGSLGEVLHGKKGGHLHWDTRYKIAVEAAKGLCYLHHDCSPLIVHRDVKSNNILLDSNHEAHVADFGLAKFLQDSGTSECMSAIAGSYGYIAPEYAYTLKVDEKSDVYSFGVVLLELITGRKPVGEFGDGVDIVQWVRKMTDSNKEGVLKVLDPRLPSVPLHEVMHVFYVAMLCVEEQAVERPTMREVVQILTELPKPPDSKEGNLTITESSLSSSNALESPSSASKEDQNPPQSPPPDLLSI

SEQ ID NO: 13626 - DNA, 1328 bp, Glycine max
  misc_feature (1247)..(1247): n is a, c, g, or t
ggtttccaatgggaactggatttccacactttcactttccatactcctcctattgagcactataatagcaccaaccaacttgttcaaaaggactacaaggtggtccttcttcctttactttcattcatgggaaaggtcacaacttctgcaacccagcctgtatctcaagaagcttccaattatgatgaggtttttatgcagcagagcttgctctttgatgatagtctgaaggatttgaagaatctgagagcacaattatattcagcagctgaatattttgaactctcatactccaacgatgaccaaaaacaagtagtggtagaaacattgaaggattatgccatcaaagctcttgtaaatacagtggaccatttaggttctgtgacctacaaagtaaatgatttgttggatgagaaagtcgttgaagtttctgtagcagaactacgggtgtcttgtattgaacagagaataaaaacgtgccatgagtatatggatcatgagggacgtacccaacagtcattggtgatcagtactccaaaatatcataagcgttatatcttgccagttggggagaccatgcatggtgccaaccgcacaaagtcaaaacatgtggggtacaacctagatgacgaagatgaatggcctaactttaggaatgctgttcgagctactatcagagaaacaccaccatctacagcaagaagagggcgctccccatcaccatctttacaacctcagagatctggagctttttcattcacttcgaccatgcctaaaaaagatttagagaggcgatcggtttcaccataccggttcccccttctacgcactggatctcggtcatcaagtaggcctacaacacctaaaataagcagaccaaccactccaaatccaagcagacccaccacaccaaatccttctaatgcaagacaaaggtacccttcagagccgcgcaaatcatcttcaatgcgattatccgcagaaagagaccatggcaaagaactagaacaataccccagtaagagtaaacgtctcctgaaggccttactaagccggcgcaagtctaagaaggatgacatgctatacacatacttggacgagtactgatactataaaacctatagaaagcaagggaaacaagtcaattttgcttgctagtttgataggttgcactttgtcatttaaaatgaacgtttatacggtaattttcttttatctgtattttaaattaagtgtaactaagcacncaaaattatgatgtgtgataatgtaatagttcaagctttattttcaagatgaatgttatataatcgagtaaatttggcttc

SEQ ID NO: 13627 - protein, 368 aa, Glycine max
GFQWELDFHTFTFHTPPIEHYNSTNQLVQKDYKVVLLPLLSFMGKVTTSATQPVSQEASNYDEVFMQQSLLFDDSLKDLKNLRAQLYSAAEYFELSYSNDDQKQVVVETLKDYAIKALVNTVDHLGSVTYKVNDLLDEKVVEVSVAELRVSCIEQRIKTCHEYMDHEGRTQQSLVISTPKYHKRYILPVGETMHGANRTKSKHVGYNLDDEDEWPNFRNAVRATIRETPPSTARRGRSPSPSLQPQRSGAFSFTSTMPKKDLERRSVSPYRFPLLRTGSRSSSRPTTPKISRPTTPNPSRPTTPNPSNARQRYPSEPRKSSSMRLSAERDHGKELEQYPSKSKRLLKALLSRRKSKKDDMLYTYLDEY

SEQ ID NO: 13628 - protein, 326 aa, Glycine max
MGKVTTSATQPVSQEASNYDEVFMQQSLLFDDSLKDLKNLRAQLYSAAEYFELSYSNDDQKQVVVETLKDYAIKALVNTVDHLGSVTYKVNDLLDEKVVEVSVAELRVSCIEQRIKTCHEYMDHEGRTQQSLVISTPKYHKRYILPVGETMHGANRTKSKHVGYNLDDEDEWPNFRNAVRATIRETPPSTARRGRSPSPSLQPQRSGAFSFTSTMPKKDLERRSVSPYRFPLLRTGSRSSSRPTTPKISRPTTPNPSRPTTPNPSNARQRYPSEPRKSSSMRLSAERDHGKELEQYPSKSKRLLKALLSRRKSKKDDMLYTYLDEY

SEQ ID NO: 13629 - protein, 303 aa, Glycine max
MQQSLLFDDSLKDLKNLRAQLYSAAEYFELSYSNDDQKQVVVETLKDYAIKALVNTVDHLGSVTYKVNDLLDEKVVEVSVAELRVSCIEQRIKTCHEYMDHEGRTQQSLVISTPKYHKRYILPVGETMHGANRTKSKHVGYNLDDEDEWPNFRNAVRATIRETPPSTARRGRSPSPSLQPQRSGAFSFTSTMPKKDLERRSVSPYRFPLLRTGSRSSSRPTTPKISRPTTPNPSRPTTPNPSNARQRYPSEPRKSSSMRLSAERDHGKELEQYPSKSKRLLKALLSRRKSKKDDMLYTYLDEY

SEQ ID NO: 13630 - DNA, 911 bp, Glycine max
  misc_feature (595)..(595): n is a, c, g, or t
  misc_feature (602)..(602): n is a, c, g, or t
  misc_feature (646)..(646): n is a, c, g, or t
  misc_feature (734)..(734): n is a, c, g, or t
  misc_feature (744)..(744): n is a, c, g, or t
  misc_feature (767)..(767): n is a, c, g, or t
  misc_feature (780)..(780): n is a, c, g, or t
  misc_feature (786)..(786): n is a, c, g, or t
  misc_feature (812)..(812): n is a, c, g, or t
  misc_feature (821)..(821): n is a, c, g, or t
  misc_feature (830)..(830): n is a, c, g, or t
  misc_feature (888)..(888): n is a, c, g, or t
aaaacgattatttctagtcccaaagagctaacaagagattcaagaccggcatggctaatgaagaggaacagaaaaaccacctcttcggcatcaaagatctcggtcacaagactctccttcagagtgatgcactctatcagtatatacttgaaaccagtgtctatccaagagagcacgagtgcttgaaagagatacgcaagatgactgcaaaacacccactgaacatcatggcaacaccagcagacgaaggacaacttctgagcatgcttgttaagctcacgaattcaaagaacgccttggaaattggtgtattcactggttactctctgctctccactgccctggctcttccccctgatggaaaggaaaataaaaaggggtcgttggatttcgttttcgtggatgctgataaggacaattacttgaactaccacaagagggtactagagcttgtgaagattggaggactgatcggatacgataacaccctatgggctggatctgtggctgcaccacccgatgcaccattgatggattacattaagcctcttcgcggccatgtgatggagctcaacaagtatctggctcaagattngaggatngagatttgccagctccccgtgggtgatgggattaccctgtgccnccgcatcatctgatcattttctcttcatctagatttttcatgacagatattcctttcattaaaacaggttgcgtgaatggtggagttntcaaatgttntactgtcttttctagatctttgngtgtttcttgtcncgctanaaatttagctgaaaggatacaaatcnacatttatnttatttatntacttgctaatcctgtattcagctggtggaatagagttgcaaaaaaatgattttaatnaaattaagagagaagctatgttg

SEQ ID NO: 13631 - protein, 202 aa, Glycine max
  misc_feature (182)..(182): Xaa can be any naturally occurring amino acid
  misc_feature (184)..(184): Xaa can be any naturally occurring amino acid
  misc_feature (199)..(199): Xaa can be any naturally occurring amino acid
MANEEEQKNHLFGIKDLGHKTLLQSDALYQYILETSVYPREHECLKEIRKMTAKHPLNIMATPADEGQLLSMLVKLTNSKNALEIGVFTGYSLLSTALALPPDGKENKKGSLDFVFVDADKDNYLNYHKRVLELVKIGGLIGYDNTLWAGSVAAPPDAPLMDYIKPLRGHVMELNKYLAQDXRXEICQLPVGDGITLCXRII

SEQ ID NO: 13632 - protein, 152 aa, Glycine max
  misc_feature (132)..(132): Xaa can be any naturally occurring amino acid
  misc_feature (134)..(134): Xaa can be any naturally occurring amino acid
  misc_feature (149)..(149): Xaa can be any naturally occurring amino acid
MTAKHPLNIMATPADEGQLLSMLVKLTNSKNALEIGVFTGYSLLSTALALPPDGKENKKGSLDFVFVDADKDNYLNYHKRVLELVKIGGLIGYDNTLWAGSVAAPPDAPLMDYIKPLRGHVMELNKYLAQDXRXEICQLPVGDGITLCXRII

SEQ ID NO: 13633 - protein, 143 aa, Glycine max
  misc_feature (123)..(123): Xaa can be any naturally occurring amino acid
  misc_feature (125)..(125): Xaa can be any naturally occurring amino acid
  misc_feature (140)..(140): Xaa can be any naturally occurring amino acid
MATPADEGQLLSMLVKLTNSKNALEIGVFTGYSLLSTALALPPDGKENKKGSLDFVFVDADKDNYLNYHKRVLELVKIGGLIGYDNTLWAGSVAAPPDAPLMDYIKPLRGHVMELNKYLAQDXRXEICQLPVGDGITLCXRII

SEQ ID NO: 13634 - DNA, 429 bp, Glycine max
acatggttaccttcccacccattatgagaaggttcagatgctccttagtgatcgcttccttggtttctacatggttcctgataatggtccatggaattacaacttcatgggggtgagacacgcatcagggatgaaatatggagtgaagcttgggactcctagggaatattaccacgaggaccatagaccaacccatttcttagagttcagcaatatggaggaagtggagataactgctgagggagatcgagaggatacattctcttgagataaaaatatttttgtttgagatatataagtggcaggtcttttaattttttaaacttgtcagagtatgttgtattatctactgttttttcatcctagggattttgcaacaacggtatcatagctttgtatataattacgaatcaacaattctacttctac

SEQ ID NO: 13635 - protein, 88 aa, Glycine max
HGYLPTHYEKVQMLLSDRFLGFYMVPDNGPWNYNFMGVRHASGMKYGVKLGTPREYYHEDHRPTHFLEFSNMEEVEITAEGDREDTFS

SEQ ID NO: 13636 - protein, 76 aa, Glycine max
MLLSDRFLGFYMVPDNGPWNYNFMGVRHASGMKYGVKLGTPREYYHEDHRPTHFLEFSNMEEVEITAEGDREDTFS

SEQ ID NO: 13637 - protein, 65 aa, Glycine max
MVPDNGPWNYNFMGVRHASGMKYGVKLGTPREYYHEDHRPTHFLEFSNMEEVEITAEGDREDTFS

SEQ ID NO: 13638 - DNA, 881 bp, Glycine max
cattataatggatgataacttcactactattgtcaatgtggccaggtggggacgggccatatacataaacattcaaaaatttgtgcagtttcagttaacagtcaatattgttgctctgattattaactttgtttctgcatgcatcacaggatctgctcccctcacagctgttcagttgctttgggtcaacctgattatggacactctgggtgctttggccttggccactgaacctcccaatgatggacttatgctaagacccccagttggaaggacaacaaattttatcaccaaacccatgtggaggaatatttttggtcaaagtttatatcaactaattgtccttgcggtcctcacttttgatgggaagaggctactgagaattaatcgtccagatgcaactatagtgctcaacactttgatattcaactcctttgtattttgccaggttttcaatgagataaacagccgagaaatcgaaaagataaacatattcaaaggcatgtttgagagctggatattttttacggtgatcttctccacagtggtgttccaagtactcatagttgagttcctgggaacatttgctagtacagtgcctctaagctggcaattctgggtgctcagtgtcgtaatcggagcatttagcatgcctatatctgctatactcaagtgcatcccagttgaaagaggagatgctacaacgcaccatgatggttacgaggcgctaccttctggtcccgagctggcataaaatacgggaaggaaaaacataacttttcccttctaagattttctttagtgcaaatgtggctgaaattttggcctctgtggcatactacaaatcttgtcttttggcttcgtttttaagaaattttctc

SEQ ID NO: 13639 - protein, 250 aa, Glycine max
IIMDDNFTTIVNVARWGRAIYINIQKFVQFQLTVNIVALIINFVSACITGSAPLTAVQLLWVNLIMDTLGALALATEPPNDGLMLRPPVGRTTNFITKPMWRNIFGQSLYQLIVLAVLTFDGKRLLRINRPDATIVLNTLIFNSFVFCQVFNEINSREIEKINIFKGMFESWIFFTVIFSTVVFQVLIVEFLGTFASTVPLSWQFWVLSVVIGAFSMPISAILKCIPVERGDATTHHDGYEALPSGPELA

SEQ ID NO: 13640 - protein, 248 aa, Glycine max
MDDNFTTIVNVARWGRAIYINIQKFVQFQLTVNIVALIINFVSACITGSAPLTAVQLLWVNLIMDTLGALALATEPPNDGLMLRPPVGRTTNFITKPMWRNIFGQSLYQLIVLAVLTFDGKRLLRINRPDATIVLNTLIFNSFVFCQVFNEINSREIEKINIFKGMFESWIFFTVIFSTVVFQVLIVEFLGTFASTVPLSWQFWVLSVVIGAFSMPISAILKCIPVERGDATTHHDGYEALPSGPELA

SEQ ID NO: 13641 - protein, 185 aa, Glycine max
MDTLGALALATEPPNDGLMLRPPVGRTTNFITKPMWRNIFGQSLYQLIVLAVLTFDGKRLLRINRPDATIVLNTLIFNSFVFCQVFNEINSREIEKINIFKGMFESWIFFTVIFSTVVFQVLIVEFLGTFASTVPLSWQFWVLSVVIGAFSMPISAILKCIPVERGDATTHHDGYEALPSGPELA

SEQ ID NO: 13642 - DNA, 1866 bp, Glycine max
ggttcatgttagcataggaggttgagtagttcttcatcatagtcttaaacattaaaccttagcaaaactcaacaatgctagacatcaaaggctacctcgtactcttcttcctatggttcatatcaaccattctgatacgttccatcttcaagaaaccacagcgtctaagactcccaccgggtcctccaatttcaatacccttgctgggacacgcgccatatctccgttcactgctccaccaagcattgtacaagctatcactgcgctatggacccttgatccacgtcatgatcggttcgaagcacgtggtggtggcgtcgtcggcggagacggccaagcagatcctcaaaacctcggaggaggcattctgcaaccgtcccttaatgatagcgagcgagagcctaacctacggcgcggcggactacttcttcatcccctacggcacatactggcggttcctgaagaagctctgcatgacggagcttctgagcgggaagaccctggagcatttcgtgagaatccgcgagagcgaggtggaggcgttcctcaagagaatgatggagatttcaggcaatggaaattacgaggtggtgatgaggaaggagctcataacgcacacgaataacatcatcacgaggatgataatggggaagaagagtaatgcggaaaacgatgaggtggccaggttgaggaaggtggtgagggaggtcggggagttgcttggggcgtttaacttgggggatgttattgggttcatgaggcctttggatctgcaagggtttgggaagaagaacatggaaactcaccacaaggtggatgcgatgatggagaaggtgttgagggagcatgaggaggctagggctaaggaagatgctgactctgataggaagaaggatctttttgatattttgttgaacctcattgaagctgatggtgctgacaataagctcactagagagagtgccaaagcctttgctctggacatgttcatcgccggcacaaacggccccgcaagcgtcctagagtggtcactggcggagctggtgagaaacccccacgttttcaagaaggcaagagaagagattgagtcagtggtaggcaaagaaaggctggtcaaagaatcagacattcccaacctaccatacctacaagcagtgctgaaggaaaccctaaggctgcacccgccaaccccaatattcgcaagagaagccatgcgaacatgccaggttgaaggctacgacattccggaaaattccactattttgatcagcacatgggccattggtagggatccaaattactgggatgacgcactcgagtacaagccggagaggttcttgttctccgacgacccgggcaagagcaagattgacgtgagggggcagtactatcagctcctgccctttgggagcgggagaagaagctgccccggagcctcgctagcgttgcttgtcatgcaagcaacgctagcgagtttgatccagtgcttcgactggatcgttaatgatggtaaaaaccatcatgttgacatgtctgaggaagggagggtgactgtgtttttggccaagccactcaagtgcaagcctgttccgcgtttcactccgttcgctgcctgaagactgtgaatggaatggtttctctagttgtgtgtgctttacctactctatatttttaccttatttttgcttactttgtggcactagtatttgttttgggaagtagcgttgcttctgtaaacttggtggcaggggtatattatttatggaaataagtggtggcttggtagttattcccgtccatttctctaatgctgcctaataatttaaaggagttaatcaggccaatgaatacagaatgctgcctact

SEQ ID NO: 13643 - protein, 513 aa, Glycine max
MLDIKGYLVLFFLWFISTILIRSIFKKPQRLRLPPGPPISIPLLGHAPYLRSLLHQALYKLSLRYGPLIHVMIGSKHVVVASSAETAKQILKTSEEAFCNRPLMIASESLTYGAADYFFIPYGTYWRFLKKLCMTELLSGKTLEHFVRIRESEVEAFLKRMMEISGNGNYEVVMRKELITHTNNIITRMIMGKKSNAENDEVARLRKVVREVGELLGAFNLGDVIGFMRPLDLQGFGKKNMETHHKVDAMMEKVLREHEEARAKEDADSDRKKDLFDILLNLIEADGADNKLTRESAKAFALDMFIAGTNGPASVLEWSLAELVRNPHVFKKAREEIESVVGKERLVKESDIPNLPYLQAVLKETLRLHPPTPIFAREAMRTCQVEGYDIPENSTILISTWAIGRDPNYWDDALEYKPERFLFSDDPGKSKIDVRGQYYQLLPFGSGRRSCPGASLALLVMQATLASLIQCFDWIVNDGKNHHVDMSEEGRVTVFLAKPLKCKPVPRFTPFAA

SEQ ID NO: 13644 - protein, 442 aa, Glycine max
MIGSKHVVVASSAETAKQILKTSEEAFCNRPLMIASESLTYGAADYFFIPYGTYWRFLKKLCMTELLSGKTLEHFVRIRESEVEAFLKRMMEISGNGNYEVVMRKELITHTNNIITRMIMGKKSNAENDEVARLRKVVREVGELLGAFNLGDVIGFMRPLDLQGFGKKNMETHHKVDAMMEKVLREHEEARAKEDADSDRKKDLFDILLNLIEADGADNKLTRESAKAFALDMFIAGTNGPASVLEWSLAELVRNPHVFKKAREEIESVVGKERLVKESDIPNLPYLQAVLKETLRLHPPTPIFAREAMRTCQVEGYDIPENSTILISTWAIGRDPNYWDDALEYKPERFLFSDDPGKSKIDVRGQYYQLLPFGSGRRSCPGASLALLVMQATLASLIQCFDWIVNDGKNHHVDMSEEGRVTVFLAKPLKCKPVPRFTPFAA

SEQ ID NO: 13645 - protein, 410 aa, Glycine max
MIASESLTYGAADYFFIPYGTYWRFLKKLCMTELLSGKTLEHFVRIRESEVEAFLKRMMEISGNGNYEVVMRKELITHTNNIITRMIMGKKSNAENDEVARLRKVVREVGELLGAFNLGDVIGFMRPLDLQGFGKKNMETHHKVDAMMEKVLREHEEARAKEDADSDRKKDLFDILLNLIEADGADNKLTRESAKAFALDMFIAGTNGPASVLEWSLAELVRNPHVFKKAREEIESVVGKERLVKESDIPNLPYLQAVLKETLRLHPPTPIFAREAMRTCQVEGYDIPENSTILISTWAIGRDPNYWDDALEYKPERFLFSDDPGKSKIDVRGQYYQLLPFGSGRRSCPGASLALLVMQATLASLIQCFDWIVNDGKNHHVDMSEEGRVTVFLAKPLKCKPVPRFTPFAA

SEQ ID NO: 13646 - DNA, 1738 bp, Glycine max
  misc_feature (1475)..(1475): n is a, c, g, or t
  misc_feature (1530)..(1530): n is a, c, g, or t
  misc_feature (1567)..(1567): n is a, c, g, or t
  misc_feature (1730)..(1730): n is a, c, g, or t
aagtcaaccagttgtggttttctttcgtccccctctctcccttgatggtcaaaagtcaaaaaagcatgaagcttccaagatcacccacaaggcaatcacgttcacacacacagaaaacaaaagaaacaagctagactttggaacaggaagccagcatttgcattcaataaggctgttaaaaaccgcgcttgacagctaacccttcatgtggaaatagttcctttcacacttgcattgttttttttttttctttctccttttcacgggctttctcttcttttcctctggcttcatcatcatctctctatctgcaccccttttgagaacttcaacttgttacttaattactctactctcccctttctagcttctgtgttcttcttcttcggttctctcttcatggggtgctgcttaagtgccaggatcaaagctgagagccctccacgcaatggtttgagttcaaaggatggtaacaaggaagaagatggcttaagcagcaaggcctcaactccctctgttcctccaactccgcggacggagggagagatcttgaagtcctcaaacatgaagagcttcaacttcagtgagctaaaaactgctacaagaaactttcgtccagatagtgtggtgggtgaaggcgggtttggttgtgtttttaaggggtggattgatgaacagacacttgcaccagttagaccagggactggcatggtcattgctgtgaagaggcttaaccaagaaggtcttcagggacacagtgaatggttgacagaaatcaattacctggggcagctgcgtcatcctaatcttgtgaaactgattggttactgcttagaggacgaccaccggcttttggtgtatgagtttttgaccaagggaagtttggataatcatttatttaggagagcttcttactttcaaccactttcttggaacatccgtatgaaggttgctcttgatgctgctaagggtcttgcatatcttcatagcgatgaagcaaaagtgatatatcgagacttcaaagcttcaaatatcttacttgattcgaattacaatgcaaaactttctgattttggcttggcaaaggatggaccagctggtgataagagccatgtctctacaagggtaatgggcacatatggctatgctgctcctgaatatatggccacaggtcacttgacaaagaagagtgatgtatacagcttcggggttgttctgctggaaattatgtctggcaaacgagcacttgacagcaacaggccaagtggggagcacaatttaattgaatgggccaaaccttacctcagcagcaagcgcaggatcttccaagtcatggatgctcgcatagaaggccaatacatgttgcgcgaagcaatgaaagtagccactcttgccattcaatgcctatctgtggaaccaagatttagaccaaagatggatgaagtggtgagagcattggaggaacttcaggattntgatgacagagtcggaggggtgggaagctctcgtgatcaaactactagaaggagnggccctagacaacatagaggtagacaacatgaaacancaaggaagtgaaaagtgaatgttgatttcatgttgtgaacatgattttgctccagttgctattttgtatgtatgtatgcatatcatgatgaacttaagcattgcttgcttaagatgtctgattgctgtacagttgttgttgattgagcaataatattgaaatnttcatttc

SEQ ID NO: 13647 - protein, 392 aa, Glycine max
  misc_feature (359)..(359): Xaa can be any naturally occurring amino acid
  misc_feature (377)..(377): Xaa can be any naturally occurring amino acid
  misc_feature (390)..(390): Xaa can be any naturally occurring amino acid
MGCCLSARIKAESPPRNGLSSKDGNKEEDGLSSKASTPSVPPTPRTEGEILKSSNMKSFNFSELKTATRNFRPDSVVGEGGFGCVFKGWIDEQTLAPVRPGTGMVIAVKRLNQEGLQGHSEWLTEINYLGQLRHPNLVKLIGYCLEDDHRLLVYEFLTKGSLDNHLFRRASYFQPLSWNIRMKVALDAAKGLAYLHSDEAKVIYRDFKASNILLDSNYNAKLSDFGLAKDGPAGDKSHVSTRVMGTYGYAAPEYMATGHLTKKSDVYSFGVVLLEIMSGKRALDSNRPSGEHNLIEWAKPYLSSKRRIFQVMDARIEGQYMLREAMKVATLAIQCLSVEPRFRPKMDEVVRALEELQDXDDRVGGVGSSRDQTTRRXGPRQHRGRQHETXRK

SEQ ID NO: 13648 - protein, 337 aa, Glycine max
  misc_feature (304)..(304): Xaa can be any naturally occurring amino acid
  misc_feature (322)..(322): Xaa can be any naturally occurring amino acid
  misc_feature (335)..(335): Xaa can be any naturally occurring amino acid
MKSFNFSELKTATRNFRPDSVVGEGGFGCVFKGWIDEQTLAPVRPGTGMVIAVKRLNQEGLQGHSEWLTEINYLGQLRHPNLVKLIGYCLEDDHRLLVYEFLTKGSLDNHLFRRASYFQPLSWNIRMKVALDAAKGLAYLHSDEAKVIYRDFKASNILLDSNYNAKLSDFGLAKDGPAGDKSHVSTRVMGTYGYAAPEYMATGHLTKKSDVYSFGVVLLEIMSGKRALDSNRPSGEHNLIEWAKPYLSSKRRIFQVMDARIEGQYMLREAMKVATLAIQCLSVEPRFRPKMDEVVRALEELQDXDDRVGGVGSSRDQTTRRXGPRQHRGRQHETXRK

SEQ ID NO: 13649 - protein, 289 aa, Glycine max
  misc_feature (256)..(256): Xaa can be any naturally occurring amino acid
  misc_feature (274)..(274): Xaa can be any naturally occurring amino acid
  misc_feature (287)..(287): Xaa can be any naturally occurring amino acid
MVIAVKRLNQEGLQGHSEWLTEINYLGQLRHPNLVKLIGYCLEDDHRLLVYEFLTKGSLDNHLFRRASYFQPLSWNIRMKVALDAAKGLAYLHSDEAKVIYRDFKASNILLDSNYNAKLSDFGLAKDGPAGDKSHVSTRVMGTYGYAAPEYMATGHLTKKSDVYSFGVVLLEIMSGKRALDSNRPSGEHNLIEWAKPYLSSKRRIFQVMDARIEGQYMLREAMKVATLAIQCLSVEPRFRPKMDEVVRALEELQDXDDRVGGVGSSRDQTTRRXGPRQHRGRQHETXRK

SEQ ID NO: 13650 - DNA, 1555 bp, Glycine max
aaaaaacccaattttaccctaccaattaaggtctctcatacagtagtattttatttgcactacgtactggctactttatttatttaagcagaagcaggtgagtgagtgagtgagcaagagtgaagagcgaagagaatggctcccaagggtttaatctttttggctgtgttatgcttctcagcactgtcactgagtcgttgtcttgcggaggataatggacttgttatgaacttctacaaggaatcatgccctcaggctgaagacatcatcaaagaacaagtcaagcttctctacaagcgccacaagaacactgctttctcctggctcagaaacatcttccatgactgtgctgttcagagttgtgatgcttcactgttgctggactccacaagaaggagcttgtctgagaaggaaacagatagaagctttgggttgagaaatttcaggtacattgagaccatcaaagaagctttggaaagggaatgcccaggagttgtttcctgtgctgatatcctcgttctctctgccagagatggcattgtttcgctaggaggtccccatatccctcttaaaacaggaagaagggatggtagaaggagcagagccgatgtggtagagcagttcctcccagaccacaatgaatccatttctgcagttcttgacaagtttggtgccatgggaattgacacccccggcgtagttgcattgcttggagcacacagtgttggtcgaacccattgtgtgaagttggtgcaccgtttgtacccagagattgatccagctctgaaccctgaccacgtccctcacattctgaagaagtgccctgatgccattccagaccctaaggccgtgcagtacgtgagaaacgaccgtggcacccccatgattctagacaacaattactacagaaatatattggacaacaagggcttgttgatagtggatcaccaactagccaatgacaagaggaccaagccttatgtgaagaaaatggccaagagccaggactatttcttcaaggagttttctagagccattactttgctctctgagaacaaccctctcactggcacaaagggtgagatcagaaagcagtgcaatgctgccaacaagcaccatgaggagccttaattgcttcccgcttaatttgggccttgaattttcttccccttctctatgtggaagaaatctgtaagatattatgcaaaaaataattaaggtgtttttctttaaatgggttggttgattggttcaatgaaccgatcaagaccacagcaggttcatggggatgcgaggattaagacgctttgttttttaatcttccgatgtcactcttgtttgttagtttgtttttttattttttatttcaataagtactgtgcaagtaggttagagttgggtagaagggcatgttcatggtgttaattactatgttatgtatgcatgtgagtgctgctatcgatggcaagatgtcaatgtatgcgtgtagtgctgttatcgatgagagtgaaaatgtttatgatatccacactaataaagctagcttgttcttgct

SEQ ID NO: 13651 - protein, 331 aa, Glycine max
MAPKGLIFLAVLCFSALSLSRCLAEDNGLVMNFYKESCPQAEDIIKEQVKLLYKRHKNTAFSWLRNIFHDCAVQSCDASLLLDSTRRSLSEKETDRSFGLRNFRYIETIKEALERECPGVVSCADILVLSARDGIVSLGGPHIPLKTGRRDGRRSRADVVEQFLPDHNESISAVLDKFGAMGIDTPGVVALLGAHSVGRTHCVKLVHRLYPEIDPALNPDHVPHILKKCPDAIPDPKAVQYVRNDRGTPMILDNNYYRNILDNKGLLIVDHQLANDKRTKPYVKKMAKSQDYFFKEFSRAITLLSENNPLTGTKGEIRKQCNAANKHHEEP

SEQ ID NO: 13652 - protein, 301 aa, Glycine max
MNFYKESCPQAEDIIKEQVKLLYKRHKNTAFSWLRNIFHDCAVQSCDASLLLDSTRRSLSEKETDRSFGLRNFRYIETIKEALERECPGVVSCADILVLSARDGIVSLGGPHIPLKTGRRDGRRSRADVVEQFLPDHNESISAVLDKFGAMGIDTPGVVALLGAHSVGRTHCVKLVHRLYPEIDPALNPDHVPHILKKCPDAIPDPKAVQYVRNDRGTPMILDNNYYRNILDNKGLLIVDHQLANDKRTKPYVKKMAKSQDYFFKEFSRAITLLSENNPLTGTKGEIRKQCNAANKHHEEP

SEQ ID NO: 13653 - DNA, 960 bp, Glycine max
agaatcagctggtgtcttcagtcatacagtcttctccctcttcaattcttgggcagtggaatgagcttcaaggacctgagacactataccaggacatcacaaatacatatgtgacatcctctgcatatgggaaccttacaaatacatattcttctatgtcaatgctaccacaggctcagtcaggagttcttatgcgacagcctctgctttctcgctatgaagcatctcttggtgttatgaatcctgtgagcaagtctgtggacttagttaagcctcttacaatgactccccaggaaaaaattgaaaaattgaggaggcggcaacaaatgcaagcaatgcttgctattcagaaacaacagcaagaattcggccatcaagttcctagcactaataaatcaatgaatgaaaaatgtgccatagaaatccatagtcaactctgtgatggggctgatcctgaaattgaagatttaagaacagctctagatccaccaactgagcaagatgattctaatacaatgtctctggcaattgatgatcattttgttgaagacaccatactgtacatgcttcaggatgctatatcaaagttagatgtcaaaataagactatgcattagagatagcttgttccggttggctcaaagtgcaatgcaaaggaattatgctaatgatacaagcagtacaaacaacactagcagagaagaacttaaagttgctgcaagagaagaaagcaatagccaaaacagatatgctaggattgctgatgttgaaaccaagacaaatcccattgatcgaactgtggctcatttgctctttcataggcctttggagttaactgggaattatcctgataagcttgagtcacctatttctgctaagatacaatttgaaagcagagaagctaacatggagaagtttcatatgggatgcttgccagatgaggacttgaaaagtaatcaac

SEQ ID NO: 13654 - protein, 319 aa, Glycine max
NQLVSSVIQSSPSSILGQWNELQGPETLYQDITNTYVTSSAYGNLTNTYSSMSMLPQAQSGVLMRQPLLSRYEASLGVMNPVSKSVDLVKPLTMTPQEKIEKLRRRQQMQAMLAIQKQQQEFGHQVPSTNKSMNEKCAIEIHSQLCDGADPEIEDLRTALDPPTEQDDSNTMSLAIDDHFVEDTILYMLQDAISKLDVKIRLCIRDSLFRLAQSAMQRNYANDTSSTNNTSREELKVAAREESNSQNRYARIADVETKTNPIDRTVAHLLFHRPLELTGNYPDKLESPISAKIQFESREANMEKFHMGCLPDEDLKSNQ

SEQ ID NO: 13655 - protein, 268 aa, Glycine max
MSMLPQAQSGVLMRQPLLSRYEASLGVMNPVSKSVDLVKPLTMTPQEKIEKLRRRQQMQAMLAIQKQQQEFGHQVPSTNKSMNEKCAIEIHSQLCDGADPEIEDLRTALDPPTEQDDSNTMSLAIDDHFVEDTILYMLQDAISKLDVKIRLCIRDSLFRLAQSAMQRNYANDTSSTNNTSREELKVAAREESNSQNRYARIADVETKTNPIDRTVAHLLFHRPLELTGNYPDKLESPISAKIQFESREANMEKFHMGCLPDEDLKSNQ

SEQ ID NO: 13656 - protein, 266 aa, Glycine max
MLPQAQSGVLMRQPLLSRYEASLGVMNPVSKSVDLVKPLTMTPQEKIEKLRRRQQMQAMLAIQKQQQEFGHQVPSTNKSMNEKCAIEIHSQLCDGADPEIEDLRTALDPPTEQDDSNTMSLAIDDHFVEDTILYMLQDAISKLDVKIRLCIRDSLFRLAQSAMQRNYANDTSSTNNTSREELKVAAREESNSQNRYARIADVETKTNPIDRTVAHLLFHRPLELTGNYPDKLESPISAKIQFESREANMEKFHMGCLPDEDLKSNQ

SEQ ID NO: 13657 - DNA, 835 bp, Glycine max
  misc_feature (826)..(826): n is a, c, g, or t
  misc_feature (831)..(831): n is a, c, g, or t
aaaaccatttccaactaccaactactctctctatcactctcccatggcttcctcttccctctttctctcactctctctcaccctttgccttgtttcctctctctgctatgctcacaaatcttccttaaccctacctgtgacaaaagacgattcaacccaccaatacctaacaaccctctcttatggcacccctgttgagtctgcaaaattcgtgcttgatctcggaggctcaatcctctgggctgactgtgcatccagaaccaccccatcttccacccttgccccaatcttccaccgttcaattcgctgcctcacggcaaagggtcctgaaattgagacacatagatggctctcgagtctcgcaaatcccatagatcaagatcagccgtgtcaaattcctgcagagaacagcatctcggggaaaagggtcaccgaaggagagcttgtggaagacttagtgattaatcgctctcacgagcttctcttcacttgctcacccactcttctcttgaacggtttagctaccggtgccaaaggcatggtaggtcttgatcgatctcgcacttctttttcgtctcaggtttttcactcacttggaactcagagaaaaatcactctttgtctctcttcctcttctgggattgttcaatttgggaatgtggcgcatgaatcccaacccgggtctgaaattttcagatctcttacttttacaccccttgtcgcgaaccaagaccaaacacagacacacccttccatcaacgttaactccgtcaaaatcaacggcaaaaaggtttctttcgacacccccttgggtgggggtgctcanctgancacg

SEQ ID NO: 13658 - protein, 278 aa, Glycine max
  misc_feature (275)..(275): Xaa can be any naturally occurring amino acid
  misc_feature (277)..(277): Xaa can be any naturally occurring amino acid
KPFPTTNYSLYHSPMASSSLFLSLSLTLCLVSSLCYAHKSSLTLPVTKDDSTHQYLTTLSYGTPVESAKFVLDLGGSILWADCASRTTPSSTLAPIFHRSIRCLTAKGPEIETHRWLSSLANPIDQDQPCQIPAENSISGKRVTEGELVEDLVINRSHELLFTCSPTLLLNGLATGAKGMVGLDRSRTSFSSQVFHSLGTQRKITLCLSSSSGIVQFGNVAHESQPGSEIFRSLTFTPLVANQDQTQTHPSINVNSVKINGKKVSFDTPLGGGAXLXT

SEQ ID NO: 13659 - protein, 264 aa, Glycine max
  misc_feature (261)..(261): Xaa can be any naturally occurring amino acid
  misc_feature (263)..(263): Xaa can be any naturally occurring amino acid
MASSSLFLSLSLTLCLVSSLCYAHKSSLTLPVTKDDSTHQYLTTLSYGTPVESAKFVLDLGGSILWADCASRTTPSSTLAPIFHRSIRCLTAKGPEIETHRWLSSLANPIDQDQPCQIPAENSISGKRVTEGELVEDLVINRSHELLFTCSPTLLLNGLATGAKGMVGLDRSRTSFSSQVFHSLGTQRKITLCLSSSSGIVQFGNVAHESQPGSEIFRSLTFTPLVANQDQTQTHPSINVNSVKINGKKVSFDTPLGGGAXLXT

SEQ ID NO: 13660 - DNA, 623 bp, Glycine max
gctttttttcctctccgatcaacgacctctttcgtcgccctaagtcatggcaggacttgcacccgagggatcacagtttgatgctcgtcaatatgataccaagatgaatgagttgcttacatctgatggacaggattttttcacatcttatgatgaggtttatgacagttttgatgctatgggcttgcaagagaatctcctgagaggcatttatgcatatggttttgagaagccatcagctattcagcagagaggaatagttcctttctgcaagggacttgatgttatacaacaggcccagtctggaactgggaagacagcaactttctgctctggaattctgcagcaacttgactatagtgtgactgaatgccaagccttggttttagcacctactagggagcttgctcagcaaattgaaaaggttatgcgagcacttggagattatcttggtgtgaaggtgcacgcatgtgtgggaggtaccagtgttcgtgaagaccaacgcattctatcgagtggtgttcatgttgttgttggtactcctggtcgtgtatttgatatgctgcgcagacagtcacttcggccagactacatcaagatgtttgtattggatgaggctgatg

SEQ ID NO: 13661 - protein, 192 aa, Glycine max
MAGLAPEGSQFDARQYDTKMNELLTSDGQDFFTSYDEVYDSFDAMGLQENLLRGIYAYGFEKPSAIQQRGIVPFCKGLDVIQQAQSGTGKTATFCSGILQQLDYSVTECQALVLAPTRELAQQIEKVMRALGDYLGVKVHACVGGTSVREDQRILSSGVHVVVGTPGRVFDMLRRQSLRPDYIKMFVLDEAD

SEQ ID NO: 13662 - protein, 173 aa, Glycine max
MNELLTSDGQDFFTSYDEVYDSFDAMGLQENLLRGIYAYGFEKPSAIQQRGIVPFCKGLDVIQQAQSGTGKTATFCSGILQQLDYSVTECQALVLAPTRELAQQIEKVMRALGDYLGVKVHACVGGTSVREDQRILSSGVHVVVGTPGRVFDMLRRQSLRPDYIKMFVLDEAD

SEQ ID NO: 13663 - protein, 148 aa, Glycine max
MGLQENLLRGIYAYGFEKPSAIQQRGIVPFCKGLDVIQQAQSGTGKTATFCSGILQQLDYSVTECQALVLAPTRELAQQIEKVMRALGDYLGVKVHACVGGTSVREDQRILSSGVHVVVGTPGRVFDMLRRQSLRPDYIKMFVLDEAD

SEQ ID NO: 13664 - DNA, 637 bp, Glycine max
ataatcgaaagtgttaatgctggtttgccaatggctacttggcctctgtttgctgagcagttttacaatgagaagttgctggctgaggtgctgagaattggggtgccagtgggggcaaaggaatggaggaattggaatgagtttggagatgaggtggtaaaaagggaagagataggaaatgcaattggtgttttgatgggtggtgaagagtctatagaaatgaggagaagagcaaaagcacttagtgatgctgctaagaaagctattcaggttggagggtcttctcacaacaatttgaaagaactgatccaggagttgaagtcactcaaactgcagaaggccaaccacaaaagttaggccaactcttggggataattgcaatcaattcaggacatagcactgtgattctaaataagtgacatgcctcattcaaaaatagtgtgaaatataatagtattgttacctagtaattgtactacttatgaaataaaagaattctaagtgtttgtatgtttttggttaaattagagtagtgtgatccaatgatttgaaagattttgcaactggacacttctttctgtaatcatgttattagtgtcaacataattaggtaaatctttgatttattgcttttcct

SEQ ID NO: 13665 - protein, 118 aa, Glycine max
IIESVNAGLPMATWPLFAEQFYNEKLLAEVLRIGVPVGAKEWRNWNEFGDEVVKREEIGNAIGVLMGGEESIEMRRRAKALSDAAKKAIQVGGSSHNNLKELIQELKSLKLQKANHKS

SEQ ID NO: 13666 - protein, 108 aa, Glycine max
MATWPLFAEQFYNEKLLAEVLRIGVPVGAKEWRNWNEFGDEVVKREEIGNAIGVLMGGEESIEMRRRAKALSDAAKKAIQVGGSSHNNLKELIQELKSLKLQKANHKS

SEQ ID NO: 13667 - DNA, 649 bp, Glycine max
gtttatattgtgtgctagttctttgaagaataagcagtgccacaagttcacacaccccataccacctgccaatttcagaagaattcctgacccaaccacagcacaactagagagagtgagagggatggaggcgtttccaagagaccaacgaggttcgctcgaagtgttcaacccttcttcttcttactccaccgagaagtcggtgaactcgcctgtgcgtgttcaatccacgtggaagacgtggattgacgagttaccggaacaacaacaacaacaacaatgtggtggtactaacgaggtgaccgccacgtcatggatggcgcttaaggactccgctcctccaccgccgacgctcgccgcagtgctgggcgagtctctgtcagcggcggtgggggaggttggcaacgccgcgaagcgcgcggcggagtggggcctggtgctgaagacggacacggagaccgggaagccgcagggagtgaaggttcggacctccggcggggaggagctgggctttgtcccaaacatctttattttttcattcttctgagtcgcatgagtaacctgtacgttgacttaaggacaagttactccttcctttgaattcgatgtttcttaactgtgaaagtagaatatcgaagtcttgtgtgtt

SEQ ID NO: 13668 - protein, 181 aa, Glycine max
FILCASSLKNKQCHKFTHPIPPANFRRIPDPTTAQLERVRGMEAFPRDQRGSLEVFNPSSSYSTEKSVNSPVRVQSTWKTWIDELPEQQQQQQCGGTNEVTATSWMALKDSAPPPPTLAAVLGESLSAAVGEVGNAAKRAAEWGLVLKTDTETGKPQGVKVRTSGGEELGFVPNIFIFSFF

SEQ ID NO: 13669 - protein, 140 aa, Glycine max
MEAFPRDQRGSLEVFNPSSSYSTEKSVNSPVRVQSTWKTWIDELPEQQQQQQCGGTNEVTATSWMALKDSAPPPPTLAAVLGESLSAAVGEVGNAAKRAAEWGLVLKTDTETGKPQGVKVRTSGGEELGFVPNIFIFSFF

SEQ ID NO: 13670 - DNA, 535 bp, Glycine max
tttttctgctgtccttggcctacgtctgcgttaatcaagctctgggcagaacagatcctaagcatgtatcttagatgggccaaaagacgaggttatgaaggaagaattgttgacaagtgtccgttcaagaatggaggaattaattctgctattatagagtttgaatttgagtgtgcatatggctatctttcaggggaaaaaggagttcactacttgataagaggttctccaaatgaatcttctcagcttgaggtgagagaagccactttgcaaataagatgaaagcactaaacagactgaaagctaaacttctagtgacaacaaaggaacaaggagttgcaagtataaaaagtatacaaaaggaaaacattgtcaatttatggcaagaagaaattcggaggtatgtctctcatccgcacaagttagtacatgatgtaaagacaggcgttgaggtgccagacctaaattatgttctggaggggaatattggaccccttattgcagctcatattaatagcagagtcatgtcataagg

SEQ ID NO: 13671 - protein, 93 aa, Glycine max
FFCCPWPTSALIKLWAEQILSMYLRWAKRRGYEGRIVDKCPFKNGGINSAIIEFEFECAYGYLSGEKGVHYLIRGSPNESSQLEVREATLQIR

SEQ ID NO: 13672 - protein, 84 aa, Glycine max
MKALNRLKAKLLVTTKEQGVASIKSIQKENIVNLWQEEIRRYVSHPHKLVHDVKTGVEVPDLNYVLEGNIGPLIAAHINSRVMS

SEQ ID NO: 13673 - protein, 72 aa, Glycine max
MYLRWAKRRGYEGRIVDKCPFKNGGINSAIIEFEFECAYGYLSGEKGVHYLIRGSPNESSQLEVREATLQIR

SEQ ID NO: 13674 - DNA, 1608 bp, Glycine max
atttttttcatatacaacaaacacggattcattgcatcaccgtcaccaccactttcatcatcataaaacatttttcatataaataaaatatattcattcattcacacatcgtaataatcattatctatcattctctctctttcaattttagacagaagactaaaagagtgaagagaacaaacagagcaatggaaggaggaggagctgctccgccggccgacaccgtgatgtccgacgcggcgcctccgccgcagcaagcgatggctatggggatcgagaatattccggcgacgctgagccacggtggcaggttcatccaatacaacatattcggaaacatattcgaagtcaccgccaaatacaagccacccatcatgcccatcggaaaaggcgcatacggcatcgtttgctcggctttgaactcggagacgaatgagcacgttgccatcaagaagattgcgaatgcgtttgataacaagattgatgcaaagaggaccctccgtgaaatcaagctgcttcgtcacatggatcatgaaaacgtggttgcaatcagggatatagtgccaccacctcaaagggagatattcaatgatgtttacattgcatatgagttgatggacactgaccttcaccaaattattcgttcaaaccaaggattatcagaggagcactgtcagtattttctgtatcaaatcctccgtgggttgaagtacatacattctgccaatgttctgcatagggacttaaaacctagcaaccttctcctgaatgccaactgtgacttaaaaatttgtgattttggactggctcgtgtcacgtctgaaactgattttatgactgaatatgttgttacaagatggtaccgtgcaccagagcttctgttgaactcttctgattacactgcagcaattgatgtatggtctgttggttgtattttcatggaactgatggatcgcaagcctttgtttcctggcagagatcatgtgcatcagttgcgtctacttatggagctgattggcaccccatcagaggctgatttggggttcctgaatgaaaatgctaagagatacattaggcaactacccctttaccgccgtcaatctttccaggaaaagtttccacatgtccatcctgaagctatagatcttgttgaaaaaatgttaacttttgatcctagaaaaaggattactgttgaagatgcactggcgcacccgtacttgacatctctgcatgacatcagtgatgaaccagtgtgcatgactcccttcaactttgactttgaacaacatgctttgacggaggaacagatgaaagaactgatataccgagaggctctagcatttaaccctgagtatcagcagtagtagtgatagtcttgttgtcattggatttggatcgtgtgatgtttgtgtccatagatcaagggatttcattgtgtatatatatctatcatctgaaaccagatgatcttggagttgaattatttccatcagagacatgattggtagactggaacaatcgtaaggtatttgtattggcttatttgcttcatattattattgtccaattcattggctccagccaactgataaatcttttcttggtctc

SEQ ID NO: 13675 - protein, 391 aa, Glycine max
MEGGGAAPPADTVMSDAAPPPQQAMAMGIENIPATLSHGGRFIQYNIFGNIFEVTAKYKPPIMPIGKGAYGIVCSALNSETNEHVAIKKIANAFDNKIDAKRTLREIKLLRHMDHENVVAIRDIVPPPQREIFNDVYIAYELMDTDLHQIIRSNQGLSEEHCQYFLYQILRGLKYIHSANVLHRDLKPSNLLLNANCDLKICDFGLARVTSETDFMTEYVVTRWYRAPELLLNSSDYTAAIDVWSVGCIFMELMDRKPLFPGRDHVHQLRLLMELIGTPSEADLGFLNENAKRYIRQLPLYRRQSFQEKFPHVHPEAIDLVEKMLTFDPRKRITVEDALAHPYLTSLHDISDEPVCMTPFNFDFEQHALTEEQMKELIYREALAFNPEYQQ

SEQ ID NO: 13676 - protein, 378 aa, Glycine max
MSDAAPPPQQAMAMGIENIPATLSHGGRFIQYNIFGNIFEVTAKYKPPIMPIGKGAYGIVCSALNSETNEHVAIKKIANAFDNKIDAKRTLREIKLLRHMDHENVVAIRDIVPPPQREIFNDVYIAYELMDTDLHQIIRSNQGLSEEHCQYFLYQILRGLKYIHSANVLHRDLKPSNLLLNANCDLKICDFGLARVTSETDFMTEYVVTRWYRAPELLLNSSDYTAAIDVWSVGCIFMELMDRKPLFPGRDHVHQLRLLMELIGTPSEADLGFLNENAKRYIRQLPLYRRQSFQEKFPHVHPEAIDLVEKMLTFDPRKRITVEDALAHPYLTSLHDISDEPVCMTPFNFDFEQHALTEEQMKELIYREALAFNPEYQQ

SEQ ID NO: 13677 - protein, 367 aa, Glycine max
MAMGIENIPATLSHGGRFIQYNIFGNIFEVTAKYKPPIMPIGKGAYGIVCSALNSETNEHVAIKKIANAFDNKIDAKRTLREIKLLRHMDHENVVAIRDIVPPPQREIFNDVYIAYELMDTDLHQIIRSNQGLSEEHCQYFLYQILRGLKYIHSANVLHRDLKPSNLLLNANCDLKICDFGLARVTSETDFMTEYVVTRWYRAPELLLNSSDYTAAIDVWSVGCIFMELMDRKPLFPGRDHVHQLRLLMELIGTPSEADLGFLNENAKRYIRQLPLYRRQSFQEKFPHVHPEAIDLVEKMLTFDPRKRITVEDALAHPYLTSLHDISDEPVCMTPFNFDFEQHALTEEQMKELIYREALAFNPEYQQ

SEQ ID NO: 13678 - DNA, 1193 bp, Glycine max
ggtgaatcaacataaatattccgttttgcgtttctctgcctaaaaggattgaaagatgggtcaagcactaggttgctatcaagttgatcagtcaaatgtggctatcaaggagcattttggaaaatttgatgatgtcctagaacctggatgtcattgcctgccttggtgtcttgggtaccagattgctggtagtttgtcactgcgtgtgcagcaacttgatgttcgatgtgagacgaaaaccaaggacaatgtctttgtcactgtggttgcatctgtgcaataccgagctgtgtctgagaaagcatctgatgcattctataggcttaccaacacaagggagcagatccaatcatatgtttttgatgtcatcagggccagtgtaccaaagttggagttggattctgtctttgagcagaagaatgatatagcaaaggctgtggaggaggagcttgagaaggccatgtcaacctatggatttgagatagtccagactctcattgttgatatagagcctgatgttaatgtcaagagagcaatgaacgagattaacgcagctgctagattgaggttggctgcaaatgagaaggctgaagcagaaaaaatactgcagatcaaaaaagctgagggagaagcagaatccaaatatctgtcaggactcggtatcgctcgccaacgtcaagccattgtggatggactgagggacagtgtgcttgctttctctgagaacgtgcctgggacaacagctaaagatgtcatggacatggtgctggtgactcaatactttgacaccatgaaagagattggagcatcttcaaagtcctcatctgttttcataccacatggtcctggcgcagttaaggacattgccatgcagattcgggatggtctgcttcaggccaccacttcacagaattaagctttcctggagttgtaaataacaaatagtagcgtgccagattttttttcagtaaatgcttttcttgtttgaacttaaaatgtctgcatctttactcttcttatatttgatagattcatagcagtgtctatttttatgcgtgtaagtactgatgtgcagttttgaatacttgtttgaggatagtcttaatgtcaagttgcttgtgaatcattaaggaatttgttatgtaagaattacttcccaaaagatgtgtttttcttttagtgtcctatcttgt

SEQ ID NO: 13679 - protein, 286 aa, Glycine max
MGQALGCYQVDQSNVAIKEHFGKFDDVLEPGCHCLPWCLGYQIAGSLSLRVQQLDVRCETKTKDNVFVTVVASVQYRAVSEKASDAFYRLTNTREQIQSYVFDVIRASVPKLELDSVFEQKNDIAKAVEEELEKAMSTYGFEIVQTLIVDIEPDVNVKRAMNEINAAARLRLAANEKAEAEKILQIKKAEGEAESKYLSGLGIARQRQAIVDGLRDSVLAFSENVPGTTAKDVMDMVLVTQYFDTMKEIGASSKSSSVFIPHGPGAVKDIAMQIRDGLLQATTSQN

SEQ ID NO: 13680 - protein, 151 aa, Glycine max
MSTYGFEIVQTLIVDIEPDVNVKRAMNEINAAARLRLAANEKAEAEKILQIKKAEGEAESKYLSGLGIARQRQAIVDGLRDSVLAFSENVPGTTAKDVMDMVLVTQYFDTMKEIGASSKSSSVFIPHGPGAVKDIAMQIRDGLLQATTSQN

SEQ ID NO: 13681 - DNA, 1387 bp, Glycine max
aagcacgatcattgcgtggtttaacatctatagaatggaaaaataaacaagaaagcaactaagtgtactagtttaagcagtagaagtggaaagtggttgcagagtagaagtcgagatggccaaccttccaaattcaaagctttatgggaaagagaagatgaaaggagagcaagaattagaagatgaagaaagcttctcgcgtgctatgctgctttgcagctccgttgtggtttccatggcgctgcaatcggcaacggagctgggcgtatttgacgtgttgcaagaagcgggggctaagctctctgcgaaagagatagcatccaagctttcctgcgacaacaaccctgaagcagactcaatgctggatcgccttctagcccttctagcctctcactccattcttaactgttctctcattctcgaccaccaaaacctggggacctttcagaggctctacaccatcactcccgtcgccagattctttgctcgcaattctgatggggtttccttgggacccttgatggccttgcttcaagacaagatcttcctacatagctggtcggagctgaaagattcaattcgggaagggggtattccattcaacagggtttatggcactcatgcttttgagtatccaaggttggacgcaaggttcaatcaagtttttaacacagcaatgatcaatcacaccactatagtgatgaagaaggttctggagtgctacaaaggttttgagaacataaaaatgcttgtggatgttggtggtggtcttgggatcaacatcaacttgatcacttccaaataccctcatatccagggtatcaattttgacttgcctcatgtcctagaacatgctccttcctatcctggaagtggaacacgttggcggagatatgtttgaaaatgtgcctaaaggagacgccatctttatgaagtggatacttcatgattggagtgatgaatactgtctgaagttgttgaagaactgctatgacgcaattcctgatgatggaaaggtgatagttgtggaggcagttcttccaattataccagagacgtcaaatgctgcttggaaggccgtttcccaaacggatgttctgatgatgactcaaaacccgggaggcaaagagcgatctgatcaagaattcatggatttggcaactgcagctggatttagtggcatcagatatgaatgctatgttcgaaccttttggatcatggagttcttcaagtaaacaaccatatactactctgcatgcccctttatgcttttcgtcatttttaattaacaaaacacgctcaggtgtgtattatcataagtttgtttttttttaaataattatctgatgaaatctaattcagtttataaatattaaactcacttttt

SEQ ID NO: 13682 - protein, 261 aa, Glycine max
MANLPNSKLYGKEKMKGEQELEDEESFSRAMLLCSSVVVSMALQSATELGVFDVLQEAGAKLSAKEIASKLSCDNNPEADSMLDRLLALLASHSILNCSLILDHQNLGTFQRLYTITPVARFFARNSDGVSLGPLMALLQDKIFLHSWSELKDSIREGGIPFNRVYGTHAFEYPRLDARFNQVFNTAMINHTTIVMKKVLECYKGFENIKMLVDVGGGLGININLITSKYPHIQGINFDLPHVLEHAPSYPGSGTRWRRYV

SEQ ID NO: 13683 - protein, 247 aa, Glycine max
MKGEQELEDEESFSRAMLLCSSVVVSMALQSATELGVFDVLQEAGAKLSAKEIASKLSCDNNPEADSMLDRLLALLASHSILNCSLILDHQNLGTFQRLYTITPVARFFARNSDGVSLGPLMALLQDKIFLHSWSELKDSIREGGIPFNRVYGTHAFEYPRLDARFNQVFNTAMINHTTIVMKKVLECYKGFENIKMLVDVGGGLGININLITSKYPHIQGINFDLPHVLEHAPSYPGSGTRWRRYV

SEQ ID NO: 13684 - protein, 231 aa, Glycine max
MLLCSSVVVSMALQSATELGVFDVLQEAGAKLSAKEIASKLSCDNNPEADSMLDRLLALLASHSILNCSLILDHQNLGTFQRLYTITPVARFFARNSDGVSLGPLMALLQDKIFLHSWSELKDSIREGGIPFNRVYGTHAFEYPRLDARFNQVFNTAMINHTTIVMKKVLECYKGFENIKMLVDVGGGLGININLITSKYPHIQGINFDLPHVLEHAPSYPGSGTRWRRYV

SEQ ID NO: 13685 - DNA, 503 bp, Glycine max
aattttgtttttcgccttgtatctctcccaattcctcagtttccttctttcttcatctttgtgtcatggccagaggttcttcccagtctcagtcctccacttcaacagccacgcgaccaggaccagcaggcatggctccccgcggttccgccgccgcctccgccagcaccggcgttggaggcggcagcagcaacatgctgaggttctacacggacgacgccccggggctgaagatttcgccgacggtggtgctcgtgatgagcctctgcttcatcggcttcgtcaccgcgctccacgtgttcggcaaactctaccgctccaaatctggtggcgccgtttgatcttttggagatgtagttccgatccgtacccgatcgctttgttttctgtttttaattccgtaatttagttaacacttgctattttgtagttgtgaaatcaaatcgttgactatcttcttactgtggttaatggaaagtcgcttttgtttttgctttggcctt

SEQ ID NO: 13686 - protein, 135 aa, Glycine max
ILFFALYLSQFLSFLLSSSLCHGQRFFPVSVLHFNSHATRTSRHGSPRFRRRLRQHRRWRRQQQHAEVLHGRRPGAEDFADGGARDEPLLHRLRHRAPRVRQTLPLQIWWRRLIFWRCSSDPYPIALFSVFNSVI

SEQ ID NO: 13687 - protein, 112 aa, Glycine max
FCFSPCISPNSSVSFFLHLCVMARGSSQSQSSTSTATRPGPAGMAPRGSAAASASTGVGGGSSNMLRFYTDDAPGLKISPTVVLVMSLCFIGFVTALHVFGKLYRSKSGGAV

SEQ ID NO: 13688 - protein, 91 aa, Glycine max
MARGSSQSQSSTSTATRPGPAGMAPRGSAAASASTGVGGGSSNMLRFYTDDAPGLKISPTVVLVMSLCFIGFVTALHVFGKLYRSKSGGAV

SEQ ID NO: 13689 - DNA, 1789 bp, Glycine max
  misc_feature (1782)..(1782): n is a, c, g, or t
  misc_feature (1786)..(1786): n is a, c, g, or t
ggacaaggatttggtgcaaaggaataccaaatgctgggaatttacctacaagcctcttgcatcatatctcttattttttcaatcattatatccattatttggttctatacagaacccatcctagtgttgcttcatcaatctcccgacattgcaagaacagctgcactttatatgaagtttcttatcccgggagtgtttgcttatagcttcttgcaaaacatcttgaggtttctccagacacaatctgtagtaattccattggttgtactctctgctcttccaatgctggttcatattggtgttgcatatggcttggttcagtggtcaggtctgagttttacaggtgcaccagttgctgcttctatttcactatggatatcattgctattattggccttgtatgtaatgtatgctaagaagttcaagcagacatggaaaggattttcaacgcattcatttcgttacgtatttacaaacatgagactagctctgccctctgctgcaatggtatggtatgaattactaataacctttcacttagctagcccttttgattgttcatcttgattggaaaaacaagccaacacaataacaaactcaataatagagtaatagacagtggaaataaattctcccaaatttgcaaaaacctaggagcaccaataaattatagagcgcaaaatagaaattaagaaaaatcagagacacgatttgtttaaagtgaaaaacacctcaatacaagggtaaaaaccatggttcgtccagattcatatatcatcttattacctgatgtttatgttatgcaagtttggagtattgggcttttgaagttttggttttcttagctggactaatgcccgactcacagataaccacttcgttgattgcaatatgtataaacacagaattcattgcctacatgatcacttatggtctcagtgcagctgcaagcacaagggtatccaatgaattgggagcaggcaacccggaacgagctaaacatgcgatgagtgtcacactgaagctctctctcctccttggattatgttttgttttggcacttggatttggtcacaatatctggattcagtttttcagcgacagttctacaattaaaaaggagtttgcttcagtgacacccttgcttgccatttctatattacttgatgccatccaaggtgtcttgtcaggggtgtccagaggatgtggctggcagcacttggctgcttacattaaccttgctacattttatcttattggtttgccaatatcatgtttcctaggatttaagaccaatttgcagtacaagggtttatggattggtctgatttgtgggttactttgtcaaagtgggactctcttccttttcataaggcgtgccaaatggactaaattggatctctctagggacaatgataaagaacggcctcttgttgtttaactgaatggaattggacttatggtaaaaaaaaaagaaaaaggtttgcattctattatgcagaagtttatcagatagggtgaacactgaacatgattttggtgaagcgtttcttgcttatattcattttgagaaagtgctcacacttttttttatattttatttgggagtgttggtgagttgcagagagtaaatcttggcatataatgtaacagtctcacgggaacacatcaagaatagatggggagtaatgtatcccaccgtgaaaagaatactataaaaaaactaggaaactacgtgtaattgacaatggagaaccatatgattgatgatagattattttntcgngtg

SEQ ID NO: 13690 - protein, 195 aa, Glycine max
MPDSQITTSLIAICINTEFIAYMITYGLSAAASTRVSNELGAGNPERAKHAMSVTLKLSLLLGLCFVLALGFGHNIWIQFFSDSSTIKKEFASVTPLLAISILLDAIQGVLSGVSRGCGWQHLAAYINLATFYLIGLPISCFLGFKTNLQYKGLWIGLICGLLCQSGTLFLFIRRAKWTKLDLSRDNDKERPLVV

SEQ ID NO: 13691 - protein, 188 aa, Glycine max
GQGFGAKEYQMLGIYLQASCIISLIFSIIISIIWFYTEPILVLLHQSPDIARTAALYMKFLIPGVFAYSFLQNILRFLQTQSVVIPLVVLSALPMLVHIGVAYGLVQWSGLSFTGAPVAASISLWISLLLLALYVMYAKKFKQTWKGFSTHSFRYVFTNMRLALPSAAMVWYELLITFHLASPFDCSS

SEQ ID NO: 13692 - protein, 178 aa, Glycine max
MLGIYLQASCIISLIFSIIISIIWFYTEPILVLLHQSPDIARTAALYMKFLIPGVFAYSFLQNILRFLQTQSVVIPLVVLSALPMLVHIGVAYGLVQWSGLSFTGAPVAASISLWISLLLLALYVMYAKKFKQTWKGFSTHSFRYVFTNMRLALPSAAMVWYELLITFHLASPFDCSS

SEQ ID NO: 13693 - DNA, 2555 bp, Glycine max
tttttttgtgtgtatgtgtgtgtgttcgaacttcaaaaaaaaaaaacatgagtgaaagcatgcaactttgtagtcaaagagtgaacggcacatagcagcaagttttcagctttggaaagttcacttagctaattgttttttccccctttagctgctttatatttttccttttagtctttgacaattggcttttctctgcaagctcttttccttgcacctatttatttaattttttttctgcaccctaagttcaatttgttagagtattcctttttccttggtcactttaccatgatttaacatggtggtgattgctttgaattctcatagttgatccataagggagcttgaaagttagtctcttttttattttatttttttggtctttctatttttgagctgaggatggagtgtaggagaaagaaggagaatcaaaaatcaaactccactttccctgatgaggtgttggagcgaattcttgggatgttaaagtcccgcaaggacaaaagcacggtttctttggtttgcaaagagtggttcaacgcagagagatggtcaaggaggagtgtgttcataggtaactgctactctgtgtctcctgaaatcttaactcgcaggtttccaaacattagaagtgttacactgaaagggaagcctcgtttctctgacttcaacttggttcctgccaattggggtgctgatattcattcttggcttgtggtgtttgctgagaagtacccttggcttgaggagttgaggctcaagagaatgactgttactgatgagagcttggagtttctggctctcaaattccccaatttcaaagccctttcccttctcagttgtgatggattcagcactgatgggctggcttcaattgccactaattgcaagaatttgactgaacttgacatacaagagaatggtattgaggataagagtggcaattggttgagttgtttccctgacagcttcacatcattggaagtattgaactttgccaatctgcacaacgatgtaaattttgatgcactcgagaaacttgtcagtaggtgcaaatcattaaagactttgaaggttaacaaaagtgtgacactagaacagttacaaaggcttattgttcatgttcctcagttaggtgaacttggtactggctccttttcacaagagttgacatcacagcagtgctcagatcttgaaagtgcattaaaaaattgtaaaaatcttcacaccctttcagggttatgggtagctacagcacaatatctcccagttctgtactctgcatgcacgaatctaactttcttgaattttagttatgcacctcttgacagtgatggccttactaagcttcttgttcactgtcctaagcttcagcgcctctgggttgtggacactgttgaagacaagggactggaagctgttggatcacactgtccattacttgaggagctgcgtgtttttcctgcagatccctttgatgagggcattgttcatggggttactgaatcagggtttattgcagtctctcaaggatgcccgagacttcactatgttctctacttttgccgtcaaatgaccaatgctgctgttgctactgttgtccaaaactgtcctgactttactcatttccgactctgcatcatgcaccctggtcagctagattacttgacccaagaatcaatggatgaggcctttggagctgttgttaagacttgcactaaactccagaggcttgcagtatcaggttatctgactgacctaacttttgagtatataggcaagtatgcaaaaaacttggaaactctttccgtggcttttgctggaagcagtgattggggcatgcgctgtgtgctggacggctgtccaaagctgagaaaactagaggtaagggactgtccatttggcaacggagctcttctgtcaggcttggggaagtatgagtcaatgagatcactgtggatgtcagactgcaatttgacaatgaatggtgttagattgttggcccaagaaatgcctaggttgaatgttgaagtcataaaggaagaaagctatgagactcatcaggctaaaaaagtttatgtttatcgatctgttgctgggccaagaagggatgcccctccttttgttctcactctctgaaatgctatctctactcctactttgaagttcaaaatgtccttgtctttggttgtctccacagatggcaaaaatccatactgatattcaagactcaataatatggcaggtgggaggaagaaagggggattctgcataaactatccaggaagtcactgcaaatgtgagctaaattaatggattcctgatcaattattgtgaacaatatccatatgcatgaaaaatattgcattgattacagacagaaagttctataattcaagaggataatgtattcatggcagaagcctgtacttatctgtggctttttgttctgattgaaatatctattcaacaaaatgcaacattcccttctgaaaatggcgaaaatcatgtcaatggatgagattaaataaaagtgattcatgcttgattgg

SEQ ID NO: 13694 - protein, 578 aa, Glycine max
MECRRKKENQKSNSTFPDEVLERILGMLKSRKDKSTVSLVCKEWFNAERWSRRSVFIGNCYSVSPEILTRRFPNIRSVTLKGKPRFSDFNLVPANWGADIHSWLVVFAEKYPWLEELRLKRMTVTDESLEFLALKFPNFKALSLLSCDGFSTDGLASIATNCKNLTELDIQENGIEDKSGNWLSCFPDSFTSLEVLNFANLHNDVNFDALEKLVSRCKSLKTLKVNKSVTLEQLQRLIVHVPQLGELGTGSFSQELTSQQCSDLESALKNCKNLHTLSGLWVATAQYLPVLYSACTNLTFLNFSYAPLDSDGLTKLLVHCPKLQRLWVVDTVEDKGLEAVGSHCPLLEELRVFPADPFDEGIVHGVTESGFIAVSQGCPRLHYVLYFCRQMTNAAVATVVQNCPDFTHFRLCIMHPGQLDYLTQESMDEAFGAVVKTCTKLQRLAVSGYLTDLTFEYIGKYAKNLETLSVAFAGSSDWGMRCVLDGCPKLRKLEVRDCPFGNGALLSGLGKYESMRSLWMSDCNLTMNGVRLLAQEMPRLNVEVIKEESYETHQAKKVYVYRSVAGPRRDAPPFVLTL

SEQ ID NO: 13695 - protein, 552 aa, Glycine max
MLKSRKDKSTVSLVCKEWFNAERWSRRSVFIGNCYSVSPEILTRRFPNIRSVTLKGKPRFSDFNLVPANWGADIHSWLVVFAEKYPWLEELRLKRMTVTDESLEFLALKFPNFKALSLLSCDGFSTDGLASIATNCKNLTELDIQENGIEDKSGNWLSCFPDSFTSLEVLNFANLHNDVNFDALEKLVSRCKSLKTLKVNKSVTLEQLQRLIVHVPQLGELGTGSFSQELTSQQCSDLESALKNCKNLHTLSGLWVATAQYLPVLYSACTNLTFLNFSYAPLDSDGLTKLLVHCPKLQRLWVVDTVEDKGLEAVGSHCPLLEELRVFPADPFDEGIVHGVTESGFIAVSQGCPRLHYVLYFCRQMTNAAVATVVQNCPDFTHFRLCIMHPGQLDYLTQESMDEAFGAVVKTCTKLQRLAVSGYLTDLTFEYIGKYAKNLETLSVAFAGSSDWGMRCVLDGCPKLRKLEVRDCPFGNGALLSGLGKYESMRSLWMSDCNLTMNGVRLLAQEMPRLNVEVIKEESYETHQAKKVYVYRSVAGPRRDAPPFVLTL

SEQ ID NO: 13696 - protein, 457 aa, Glycine max
MTVTDESLEFLALKFPNFKALSLLSCDGFSTDGLASIATNCKNLTELDIQENGIEDKSGNWLSCFPDSFTSLEVLNFANLHNDVNFDALEKLVSRCKSLKTLKVNKSVTLEQLQRLIVHVPQLGELGTGSFSQELTSQQCSDLESALKNCKNLHTLSGLWVATAQYLPVLYSACTNLTFLNFSYAPLDSDGLTKLLVHCPKLQRLWVVDTVEDKGLEAVGSHCPLLEELRVFPADPFDEGIVHGVTESGFIAVSQGCPRLHYVLYFCRQMTNAAVATVVQNCPDFTHFRLCIMHPGQLDYLTQESMDEAFGAVVKTCTKLQRLAVSGYLTDLTFEYIGKYAKNLETLSVAFAGSSDWGMRCVLDGCPKLRKLEVRDCPFGNGALLSGLGKYESMRSLWMSDCNLTMNGVRLLAQEMPRLNVEVIKEESYETHQAKKVYVYRSVAGPRRDAPPFVLTL

SEQ ID NO: 13697 - DNA, 1318 bp, Glycine max
tttaattaatgaaacctaacttgtttaataaagttaattaattttttagcaatcacgaagattagagtgtttggtatagggttagtcatgatggctgtttttgtttcctttccacccatactggataatgaaaaggacgtgcacacagtgtgcttatgcacatccaggtacacgtaatgcaacaatagcaatcgtttcataatacgaagaaaataataaaacataataaatatcacgagtgttatgataaaaaaaaataaaaaatagggatacataagttgattgtataatatgagttgttaaaaaaattaaggttagcaattgtaaacattaatatataattgttttggcgttcttcaatattattattttttaggttttgaaggtgtcagctagcggtaacttgtggattgagtttgtgttgcatataattaatttgatggaaggctttatatataacaatagacataaccttaagggttttattagaaagtttcatgacatcttatttaaaacaaaagcagctagatattgaagtggaagtttctatagaagatgctgttgatgaagtaatatatgtacgtagtaatatatgtgcaagtgatggagtgattcgaatacggggtttcaattgaatcatatgagagtgaatggatctttatggtttaagtctcaacgtagcaaactgaagcagttttatttattagcttgtgttgatccactgaagtgaaacttttttctaatttagatgatgaaaactccattaagaataatatattgataatgaattttttgtaatgcaataaagaatatatatcatgatatatactgatgtgttatgtgtgtacggaattgataggagctagagagtccttccgttttcggagaaggtcgacatcagatgcgtacgagaagacaggccagaacagaccaagctcttcttctcctttcgatgtgtgacaaatgagcccgaccactatctcctccatatatggatgactgaaaatacaaatatatagtttgttttcctctggcctttgctgatgatgctgtgtccatttttgtttatcttttgtgcatatagtatatagtatatagtatatatatgaatatgtttacgagttcatcagttgagcggtttaagtcctgagacgatcgaggtagctttgtgtgtggtttaacagctcagtcttgttttactgttgaacttggttatggttctcaagctgtaaataagtaataacgtagtgtacgtaggtgtgttttggttatgtgtactttgtatataaaagcctttccaaggtttgttcttagtgtt

SEQ ID NO: 13698 - protein, 45 aa, Glycine max
MTSYLKQKQLDIEVEVSIEDAVDEVIYVRSNICASDGVIRIRGFN

SEQ ID NO: 13699 - protein, 42 aa, Glycine max
MCYVCTELIGARESFRFRRRSTSDAYEKTGQNRPSSSSPFDV

SEQ ID NO: 13700 - protein, 31 aa, Glycine max
MEGFIYNNRHNLKGFIRKFHDILFKTKAARY

SEQ ID NO: 13701 - DNA, 980 bp, Glycine max
  misc_feature (756)..(756): n is a, c, g, or t
  misc_feature (761)..(761): n is a, c, g, or t
  misc_feature (774)..(774): n is a, c, g, or t
  misc_feature (777)..(777): n is a, c, g, or t
  misc_feature (853)..(853): n is a, c, g, or t
  misc_feature (869)..(869): n is a, c, g, or t
  misc_feature (880)..(880): n is a, c, g, or t
  misc_feature (897)..(897): n is a, c, g, or t
ctctctataatctcttcactcttcacttacttctccacaatattttatgtgttttcgtaacaaaccaaacccaacaaaaacttcttcactcttagtttctcatggcatcatctcagaacgtagccagcattgagccatggatgcttcgcccacctgtcaccgattcatggctcgcagagttcttcgctcgcgacgccgataccctaaccagggctcttcagaagtctctctccggcgctgttctgccgcaggacaaccacctttctccgtttctgcaccagcccgccgccgccgccgccacccccaccgtgtccagcctctccggctccgaccaggagtcggcgccgcgccgccgtgcggcgcctccgccctctgggaagatctccaagaggaagtcgcgcgcctcgaagcgctcgcagacgacgttcatcaccgcggaccccgccaacttccggcagatggtccagcaggtcaccggcgtgcggttcggcggcgcgccaattgcgccggcggcggtggtgaagcccgagccgcagcgcgcctcgggcctcgccaggttccccgccggcgtggggtgccttccgacgctcgacacgtcggccttcctgctggaccatcaccagcagcaggtggtgcccgcctctgttaactctgggcctggcaccgggctttctgggcccggcccactccccttcgcccaacccctccttgacgctcacgctgcttccttcgcttcctcagggttagattttgacnccttntccaacttccccnctntcgagtcgtggaaagtcatgtgagagagaaaaaaatattgagaatttgagatgagatagattcgctgaaaattttnttttggctttttcccnttttgcccctntcgtgggttaatgaatntggacgggggaagttagctagctaggctgatttatgtaaatttgggaagggaaaatggatatgaaactagtatcttttttttt

SEQ ID NO: 13702 - protein, 232 aa, Glycine max
  misc_feature (219)..(220): Xaa can be any naturally occurring amino acid
  misc_feature (225)..(226): Xaa can be any naturally occurring amino acid
MASSQNVASIEPWMLRPPVTDSWLAEFFARDADTLTRALQKSLSGAVLPQDNHLSPFLHQPAAAAATPTVSSLSGSDQESAPRRRAAPPPSGKISKRKSRASKRSQTTFITADPANFRQMVQQVTGVRFGGAPIAPAAVVKPEPQRASGLARFPAGVGCLPTLDTSAFLLDHHQQQVVPASVNSGPGTGLSGPGPLPFAQPLLDAHAASFASSGLDFDXXSNFPXXESWKVM

SEQ ID NO: 13703 - protein, 219 aa, Glycine max
  misc_feature (206)..(207): Xaa can be any naturally occurring amino acid
  misc_feature (212)..(213): Xaa can be any naturally occurring amino acid
MLRPPVTDSWLAEFFARDADTLTRALQKSLSGAVLPQDNHLSPFLHQPAAAAATPTVSSLSGSDQESAPRRRAAPPPSGKISKRKSRASKRSQTTFITADPANFRQMVQQVTGVRFGGAPIAPAAVVKPEPQRASGLARFPAGVGCLPTLDTSAFLLDHHQQQVVPASVNSGPGTGLSGPGPLPFAQPLLDAHAASFASSGLDFDXXSNFPXXESWKVM

SEQ ID NO: 13704 - protein, 170 aa, Glycine max
MDASPTCHRFMARRVLRSRRRYPNQGSSEVSLRRCSAAGQPPFSVSAPARRRRRHPHRVQPLRLRPGVGAAPPCGASALWEDLQEEVARLEALADDVHHRGPRQLPADGPAGHRRAVRRRANCAGGGGEARAAARLGPRQVPRRRGVPSDARHVGLPAGPSPAAGGARLC

SEQ ID NO: 13705 - DNA, 1506 bp, Glycine max
  misc_feature (730)..(730): n is a, c, g, or t
  misc_feature (820)..(820): n is a, c, g, or t
  misc_feature (1401)..(1401): n is a, c, g, or t
  misc_feature (1494)..(1494): n is a, c, g, or t
ggaagaaagagagaaggtataagcagccgttttttctgttggtatatgaaggtggtgaaggaagaagaagaagaatggtgacggaccaagatatagcgaaaggggtggagtccctactgcgtcactctgacccaaactccataactacggtaaacggcgtcgttcagcagctggaggccaaactagggttagacctctctcacaaggccagtttcatcagagaccagatcgatcatcttctccggtcacagccacagacatttgctcctcaccctcctccacttcacaaagactattttgcccctcacacccaactgcacttcccaaccacccactttgctccccattttgccctccatgacgagatcaacttcctgcagcacccccaccctcctccaccgcgtaaagtcgagacctttcctcctcaaaatgttgcccctcctcaagtgcccaaagaaagtgtgcaaactggaagcaaaagaagaggtggtgctggtggtctaaacaaagtttgtggtgtttctcctgaacttcaggcggttgttggtgagccggcaatgccaagaactgaaattgtgaggcagctgtgggcatacataaagaaaaacaacctccaagatcctggtaacaaaagaaagataatttgtgatgatgccctgcgtttggtatttgagacagactgcaccgatatgttcaagatgaatcagttgctagctaaacacattatccnacttggtcctacaaaggagtcacaggctaaacgagtgaaggtggatactgaaattaagactgaaagtgctgaacctgctccatctaccgnggcaatatctgaagcgcttgccaaatttttgggcactgagggaagagagatgcaacagtctgaagccataagacttgtttgggagtacatcaagcttcaccatttggaggatcctttaaattcaatggtgatattatgcgatgcaaagcttcaagagctacttggatgtgaaagcatttctgctttaggaataccagagatgttagcacgtcatcatctatttaaacagtctgacacccgttagtgctgatcaattattgccatataagggtatgatctgcacaaaacgctggttatatgtttctgctcgttgctagatcgtataggaactttttacttattcctgtcacttcatttatctctttgttcactgacgtatgtaaactgtatgttgtctgacggttattaggttggttgtttagaatgacaatgtataccttgagctaggcaagaagtatattgtatttaatatatgccctttaggttacccgtgcattttattttatcagttctcaatgtctaacctcaactggctgatcgaattagtgatacttttgtacattgagatacaccaactactntgaaatgcaccttgtttttaccaaattttgtgaaaaatctcttggctttacatacatgagccgtgtgcagacttacatctaatctgaagtttntaatgtatactt

SEQ ID NO: 13706 - protein, 353 aa, Glycine max
  misc_feature (243)..(243): Xaa can be any naturally occurring amino acid
  misc_feature (273)..(273): Xaa can be any naturally occurring amino acid
KKERRYKQPFFLLVYEGGEGRRRRMVTDQDIAKGVESLLRHSDPNSITTVNGVVQQLEAKLGLDLSHKASFIRDQIDHLLRSQPQTFAPHPPPLHKDYFAPHTQLHFPTTHFAPHFALHDEINFLQHPHPPPPRKVETFPPQNVAPPQVPKESVQTGSKRRGGAGGLNKVCGVSPELQAVVGEPAMPRTEIVRQLWAYIKKNNLQDPGNKRKIICDDALRLVFETDCTDMFKMNQLLAKHIIXLGPTKESQAKRVKVDTEIKTESAEPAPSTXAISEALAKFLGTEGREMQQSEAIRLVWEYIKLHHLEDPLNSMVILCDAKLQELLGCESISALGIPEMLARHHLFKQSDTR

SEQ ID NO: 13707 - protein, 329 aa, Glycine max
  misc_feature (219)..(219): Xaa can be any naturally occurring amino acid
  misc_feature (249)..(249): Xaa can be any naturally occurring amino acid
MVTDQDIAKGVESLLRHSDPNSITTVNGVVQQLEAKLGLDLSHKASFIRDQIDHLLRSQPQTFAPHPPPLHKDYFAPHTQLHFPTTHFAPHFALHDEINFLQHPHPPPPRKVETFPPQNVAPPQVPKESVQTGSKRRGGAGGLNKVCGVSPELQAVVGEPAMPRTEIVRQLWAYIKKNNLQDPGNKRKIICDDALRLVFETDCTDMFKMNQLLAKHIIXLGPTKESQAKRVKVDTEIKTESAEPAPSTXAISEALAKFLGTEGREMQQSEAIRLVWEYIKLHHLEDPLNSMVILCDAKLQELLGCESISALGIPEMLARHHLFKQSDTR

SEQ ID NO: 13708 - DNA, 1539 bp, Glycine max
tttctctctctttctttctcttcgagggtttgggtttctcttcctccctggaagaaaaagaagagtcaccgctacgacgccgttcgtgcttttttgaggtgccacagtcatgtttgggcgtggtggaccaaggaggagtgacaactccaaatattatgatattctcggggtttccaaaaatgccagtgaagatgaaatcaagaaggcctatagaaaggctgctatgaagaaccatccagataagggaggagatcctgaaaagttcaaggagttaggtcaagcatatgaagttttaagtgatcctgagaagaaagacctgtatgaccagtatggtgaagatgcccttaaagaaggaatggggggaggaggctcgtttcataatccatttgatatatttgaatcattttttggtggagcaagctttggtggtggtggtagttcccgaggtagaagacagaagcatggtgaagatgtggtgcattctttaaaggtttccttggaggacgtctataacggcacaacaaagaaactatctctttctagaaacgtattctgctcaaaatgtaaagggaaaggttcaaaaagtggaacagctggtaggtgttttggatgccaaggcactggtatgaaaattacaagaaggcagattggactaggcatgattcaacaaatgcaacatgtctgtcctgactgcagaggatctggtgaggtcattaacgagagagataaatgtcctcagtgcaaaggaaacaaaatttcccaggaaaagaaggtgctggaagtgcatgttgagaagggtatgcagcagggtcagaagattgtttttgaaggacaagctgatgaagctcctgacacaatcacaggagatattgtttttgtattgcaagtaaaggatcacccaaggttcagaagggaacaagatgacctctttattgatcaaaatctcagcttaactgaggcactctgtggctttcagtttgccgtcaaacatcttgatggtaggcaactattgatcaaatcaaatcctggggaagtcatcaagccaggtcaatataaagcattaaatgatgagggaatgccacaacacaataggccattcatgaagggtcgcctttacatccaatttaatgttgatttccccgactcagggtttctttcccctgaccaatgccagttattggaaaaggtgttgcctcagaagagcagcaagcacgtctcagatatggagctggatgattgtgaggagaccactttgcatgatgtcaactttaaggaggagatgagacgaaagcagcaacagcaacaccgcgaggcatacgacgaagatgatgatgagccatctggtcaccgagtgcaatgtgctcaacagtagtgcaatttatggtagtagaggttctataatttctgcttggtttatcttttgtttggataatgcagttataactgcgtgataaatttacctttaggttttggctggtaatgttatttagtttacagttcttggcagatttcaagtatatgaaaattgaatgctttggt

SEQ ID NO: 13709 - protein, 420 aa, Glycine max
MFGRGGPRRSDNSKYYDILGVSKNASEDEIKKAYRKAAMKNHPDKGGDPEKFKELGQAYEVLSDPEKKDLYDQYGEDALKEGMGGGGSFHNPFDIFESFFGGASFGGGGSSRGRRQKHGEDVVHSLKVSLEDVYNGTTKKLSLSRNVFCSKCKGKGSKSGTAGRCFGCQGTGMKITRRQIGLGMIQQMQHVCPDCRGSGEVINERDKCPQCKGNKISQEKKVLEVHVEKGMQQGQKIVFEGQADEAPDTITGDIVFVLQVKDHPRFRREQDDLFIDQNLSLTEALCGFQFAVKHLDGRQLLIKSNPGEVIKPGQYKALNDEGMPQHNRPFMKGRLYIQFNVDFPDSGFLSPDQCQLLEKVLPQKSSKHVSDMELDDCEETTLHDVNFKEEMRRKQQQQHREAYDEDDDEPSGHRVQCAQQ

SEQ ID NO: 13710 - protein, 382 aa, Glycine max
MKNHPDKGGDPEKFKELGQAYEVLSDPEKKDLYDQYGEDALKEGMGGGGSFHNPFDIFESFFGGASFGGGGSSRGRRQKHGEDVVHSLKVSLEDVYNGTTKKLSLSRNVFCSKCKGKGSKSGTAGRCFGCQGTGMKITRRQIGLGMIQQMQHVCPDCRGSGEVINERDKCPQCKGNKISQEKKVLEVHVEKGMQQGQKIVFEGQADEAPDTITGDIVFVLQVKDHPRFRREQDDLFIDQNLSLTEALCGFQFAVKHLDGRQLLIKSNPGEVIKPGQYKALNDEGMPQHNRPFMKGRLYIQFNVDFPDSGFLSPDQCQLLEKVLPQKSSKHVSDMELDDCEETTLHDVNFKEEMRRKQQQQHREAYDEDDDEPSGHRVQCAQQ

SEQ ID NO: 13711 - protein, 338 aa, Glycine max
MGGGGSFHNPFDIFESFFGGASFGGGGSSRGRRQKHGEDVVHSLKVSLEDVYNGTTKKLSLSRNVFCSKCKGKGSKSGTAGRCFGCQGTGMKITRRQIGLGMIQQMQHVCPDCRGSGEVINERDKCPQCKGNKISQEKKVLEVHVEKGMQQGQKIVFEGQADEAPDTITGDIVFVLQVKDHPRFRREQDDLFIDQNLSLTEALCGFQFAVKHLDGRQLLIKSNPGEVIKPGQYKALNDEGMPQHNRPFMKGRLYIQFNVDFPDSGFLSPDQCQLLEKVLPQKSSKHVSDMELDDCEETTLHDVNFKEEMRRKQQQQHREAYDEDDDEPSGHRVQCAQQ

SEQ ID NO: 13712 - DNA, 1457 bp, Glycine max
gaggtcagtcaatcattcattcctattccttctttctcttccaattccaaatcacaacccttcgttttccctctctagaatcttcttctccattcaattcctactccttttttcctctctgtccctctctctctccctctctcatggcttccgatctcgaagcaaaagccaaagaggccttcgtcgaagaccacttcgaactcgccgtggaccttctctctcaggccattcatctcgaacccaacaaagccgaattctacgccgaccgcgcccaagccaacatcaaactcaacaacttcactgaggctgtggctgatgctaacaaagcaattgaattgaatccttctctaccaaaagcatatttgcggaaaggtactgcttgcatgaagcttgaggaatatgaaactgcaaaggctgctctggaggtgggtgcatcattgtctccagacaactcaaggtttgctactttgatcaaagaatgtgataagctcattgcagaatcttataccccacctattatagaggaaaaggccacaacagaagatgttactccaaaagatgttcagcaacaagatgatcttctagagaagccaacagttacagtgactaaacctaaatataggcatgaattctaccagaaacatgatcaggtggttgtgaccatatttgcaaagaaaatcccaaaggaaagcattactgttgacttcggtgaacaaatactaagtgttagtattaatgtcacaggagaagacacatatgtttttcaacctcgcttatttggaaagatcataccttccaattgtcaatatgaagttttgtccaccaaaattgaaattcgtcttgcaaaagcagaacctattcactggacatctctagaattcaccagagacatcgttgttcaacagagggttaatgcttcttcagttactggaagtcaaagaccttcttacccatcctcaaaacaaacaagagattgggacaagattgaagctcaagtcaagaaagaggagaaagatgaaaagcttgatggcgatgctgcattgaacaaatttttccgcgaaatatatcaagatgcagatgaggatacaagaagagcaatgaaaaagtcatttgttgagtctaatgggacagttctgtctacaaactggaaagaagtgggaacaaagaaggtagagggaagtcctcctgatggcatggagttgaagaaatgggaatattaagacattttctggatcagtgttgcatatatttttatgtgggattattatacttcgtttactttttttttggttagttaactactgaactgaagatactattttctttattttttttttaatgttcatgaggtgttgtgtccgtcttcgctagaacctgaattcatggttgttggttgaggacaaggctcttcactttggtgaatataattcatggttgttgacaaaaaaaaaaaaaaa

SEQ ID NO: 13713 - protein, 405 aa, Glycine max
GQSIIHSYSFFLFQFQITTLRFPSLESSSPFNSYSFFPLCPSLSPSLMASDLEAKAKEAFVEDHFELAVDLLSQAIHLEPNKAEFYADRAQANIKLNNFTEAVADANKAIELNPSLPKAYLRKGTACMKLEEYETAKAALEVGASLSPDNSRFATLIKECDKLIAESYTPPIIEEKATTEDVTPKDVQQQDDLLEKPTVTVTKPKYRHEFYQKHDQVVVTIFAKKIPKESITVDFGEQILSVSINVTGEDTYVFQPRLFGKIIPSNCQYEVLSTKIEIRLAKAEPIHWTSLEFTRDIVVQQRVNASSVTGSQRPSYPSSKQTRDWDKIEAQVKKEEKDEKLDGDAALNKFFREIYQDADEDTRRAMKKSFVESNGTVLSTNWKEVGTKKVEGSPPDGMELKKWEY

SEQ ID NO: 13714 - protein, 358 aa, Glycine max
MASDLEAKAKEAFVEDHFELAVDLLSQAIHLEPNKAEFYADRAQANIKLNNFTEAVADANKAIELNPSLPKAYLRKGTACMKLEEYETAKAALEVGASLSPDNSRFATLIKECDKLIAESYTPPIIEEKATTEDVTPKDVQQQDDLLEKPTVTVTKPKYRHEFYQKHDQVVVTIFAKKIPKESITVDFGEQILSVSINVTGEDTYVFQPRLFGKIIPSNCQYEVLSTKIEIRLAKAEPIHWTSLEFTRDIVVQQRVNASSVTGSQRPSYPSSKQTRDWDKIEAQVKKEEKDEKLDGDAALNKFFREIYQDADEDTRRAMKKSFVESNGTVLSTNWKEVGTKKVEGSPPDGMELKKWEY

SEQ ID NO: 13715 - protein, 278 aa, Glycine max
MKLEEYETAKAALEVGASLSPDNSRFATLIKECDKLIAESYTPPIIEEKATTEDVTPKDVQQQDDLLEKPTVTVTKPKYRHEFYQKHDQVVVTIFAKKIPKESITVDFGEQILSVSINVTGEDTYVFQPRLFGKIIPSNCQYEVLSTKIEIRLAKAEPIHWTSLEFTRDIVVQQRVNASSVTGSQRPSYPSSKQTRDWDKIEAQVKKEEKDEKLDGDAALNKFFREIYQDADEDTRRAMKKSFVESNGTVLSTNWKEVGTKKVEGSPPDGMELKKWEY

SEQ ID NO: 13716 - DNA, 1817 bp, Glycine max
tcctaacattattgtttcctaccaagttctctgtctggggagttcttagcaccaccaccagcttctgcagtagctttaagctacgaaagattttccctgaccatggggcaaaagcatttagtgacggtgttctgtttatgggctttaacatgttcccttcttccatctttctcctttggaattctgagaattggtttgaagaagagacctctagatcttgatagtattaatgctgctagaaaggcaagagaaggtctaagatctgtaagaccaatgatgggtgcacatgatcagtttattggtaagtcaaaaggtgaagatatagtacctttgaagaattatttggacgctcaatattttggtgagattggaattggcatacccccacagcccttcactgtagtgtttgacactgggagttccaacctttgggttccatcatcaaagtgctactttactcttgcttgctatacccataattggtacacggctaagaaatcaaagacacatgtcaaaaatggaacttcatgtaaaataaactatggaactggatcaatatctggtttcttcagtcaagataatgttaaagttggcagtgctgttgtcaagcatcaggatttcattgaggctacccacgaaggaagtcttacctttctgtcagcaaagttcgatggaatactgggacttggatttcaggagatctcagttgaaaatgctgtgcccgtatggttcaaaatggtggagcaaaaacttatcagtgagaaggtgttctctttttggcttaatggggatccgaatgcgaaaaaaggtggtgaattagtttttggtggtgttgacccaaagcacttcaaaggaaaccacacttatgttccaattactgaaaaaggttactggcagattgaaatgggagattttttcgttggaggtgtttcaacaggtgtttgtgagggtggctgtgctgctattgtggattcaggaacatctttgcttgctggtccaactcctgttgtggctgaaatcaaccatgccattggagctgaaggagttctcagtgtagaatgtaaggaagtcgtttctcaatatggagagttgatatgggatctcttggtatcaggggtgaaaccagatgacatatgttcacaagttggtttatgttcttccaaaaggcatcaatctaagagtgctggaattgaaatggtgactgaaaaggaacaggaagagttggcggcgagagatactcctttgtgttcttcttgtcagatgcttgttctttggatccagaatcaactaaaacaaaaggcaacgaaggacagagtattcaactatgtgaatcaactgtgtgagagcctgccaagtccatctggagagtcagtgataagctgtaatagtctttccaagatgccaaacattacgttcacaattggaaataaaccttttgtcctcacaccagagcagtatattctaagaactggagaaggcattacagaagtctgccttagtgggtttattgcttttgatgttcctcctccaaagggtccattgtggattcttggcgatgttttcatgagggcatatcacaccgtctttgactatggaaatctccaagttggctttgccgaagcagtctaattacgctttctggaggattttctttgtaaatttgttaagcgtgttgtaaataagctgttataattgtagctctggttactttttgaaaccacgaatgtatttatccatttaagacgtagaagtatcccacttgcaagtgttgtgtgctttttatatgaaaaaaccatcctcatttcattccgtgtttg

SEQ ID NO: 13717 - protein, 508 aa, Glycine max
MGQKHLVTVFCLWALTCSLLPSFSFGILRIGLKKRPLDLDSINAARKAREGLRSVRPMMGAHDQFIGKSKGEDIVPLKNYLDAQYFGEIGIGIPPQPFTVVFDTGSSNLWVPSSKCYFTLACYTHNWYTAKKSKTHVKNGTSCKINYGTGSISGFFSQDNVKVGSAVVKHQDFIEATHEGSLTFLSAKFDGILGLGFQEISVENAVPVWFKMVEQKLISEKVFSFWLNGDPNAKKGGELVFGGVDPKHFKGNHTYVPITEKGYWQIEMGDFFVGGVSTGVCEGGCAAIVDSGTSLLAGPTPVVAEINHAIGAEGVLSVECKEVVSQYGELIWDLLVSGVKPDDICSQVGLCSSKRHQSKSAGIEMVTEKEQEELAARDTPLCSSCQMLVLWIQNQLKQKATKDRVFNYVNQLCESLPSPSGESVISCNSLSKMPNITFTIGNKPFVLTPEQYILRTGEGITEVCLSGFIAFDVPPPKGPLWILGDVFMRAYHTVFDYGNLQVGFAEAV

SEQ ID NO: 13718 - protein, 451 aa, Glycine max
MMGAHDQFIGKSKGEDIVPLKNYLDAQYFGEIGIGIPPQPFTVVFDTGSSNLWVPSSKCYFTLACYTHNWYTAKKSKTHVKNGTSCKINYGTGSISGFFSQDNVKVGSAVVKHQDFIEATHEGSLTFLSAKFDGILGLGFQEISVENAVPVWFKMVEQKLISEKVFSFWLNGDPNAKKGGELVFGGVDPKHFKGNHTYVPITEKGYWQIEMGDFFVGGVSTGVCEGGCAAIVDSGTSLLAGPTPVVAEINHAIGAEGVLSVECKEVVSQYGELIWDLLVSGVKPDDICSQVGLCSSKRHQSKSAGIEMVTEKEQEELAARDTPLCSSCQMLVLWIQNQLKQKATKDRVFNYVNQLCESLPSPSGESVISCNSLSKMPNITFTIGNKPFVLTPEQYILRTGEGITEVCLSGFIAFDVPPPKGPLWILGDVFMRAYHTVFDYGNLQVGFAEAV

SEQ ID NO: 13719 - protein, 450 aa, Glycine max
MGAHDQFIGKSKGEDIVPLKNYLDAQYFGEIGIGIPPQPFTVVFDTGSSNLWVPSSKCYFTLACYTHNWYTAKKSKTHVKNGTSCKINYGTGSISGFFSQDNVKVGSAVVKHQDFIEATHEGSLTFLSAKFDGILGLGFQEISVENAVPVWFKMVEQKLISEKVFSFWLNGDPNAKKGGELVFGGVDPKHFKGNHTYVPITEKGYWQIEMGDFFVGGVSTGVCEGGCAAIVDSGTSLLAGPTPVVAEINHAIGAEGVLSVECKEVVSQYGELIWDLLVSGVKPDDICSQVGLCSSKRHQSKSAGIEMVTEKEQEELAARDTPLCSSCQMLVLWIQNQLKQKATKDRVFNYVNQLCESLPSPSGESVISCNSLSKMPNITFTIGNKPFVLTPEQYILRTGEGITEVCLSGFIAFDVPPPKGPLWILGDVFMRAYHTVFDYGNLQVGFAEAV

SEQ ID NO: 13720 - DNA, 1891 bp, Glycine max
  misc_feature (1699)..(1699): n is a, c, g, or t
  misc_feature (1797)..(1797): n is a, c, g, or t
atgatcgcattttgctgaggctaaaaagataagcaaagcgtgaaaaatcgcaaaataccaaatcaaaataacaagcacaattacagtgactccgcttggttcctcttcttcgatcttcggtttgattctgcgtttgttcacatcatggccaccgcttcagtggcatttaagtccagggaggaccaccgcaagcagattgagttggaggaggcgcgtaaagcggggcttgcgccagctgaactcgatgaagatggaaaggaaatcaatcctcacattccccagtatatgtcctctgctccttggtatcttaatgctgagagacctagtttgaaacatcaaaggaaatggaaatctgaccccaactacaccaaatcatggtacgatagaggtgctaaaatctttcaggcagacaagtatcggaaaggtgcttgtgagaactgtggagctatgacacatgattctaagtcatgcatggaaagaccacggagagtgggagcaaaatggacaaacaaacacattgctcctgatgaaaagatagaaacttttgagcttgactatgatggaaaacgggacagatggaatggctatgatgcatcaacgtatgctcgagtcattgagaggtatgaagctagagatgaagctcgaaagaagtacctgaaagaacagcagctgaagaaactggagaagagcaaccaaaatggtgaggatgctgcaagtgatggggatgaagaggaagaggaagatgaagatgaagatgatttaagggtagatgaggcaaaggttgatgagagcaaacaaatggactttgcaaaggttgagaagcgtgtgcgtacaacaggtggtgggagtacaggaactgtgaggaatctacgtattcgagaggatactgcaaaatatcttcttaatcttgatgtcaattctgcacactatgatcccaagaccagatccatgcgtgaggatccacttccagatgcagatccaaatgaaaagttttatttgggtgataaccaatatagaaatagtgggcaagctttagaattcaaggaactaaacatccatgcttgggaagcctttgacaagggacaagatgttcacatgcaagcagctccatcccaagctgaattactctataagaatttcaaggtcatgaaggagaagttaaagtatcaaacaaaggaaaccattattgagaagtatggcaatgcagccgatgaggacaaacttccaagagaacttctgctgggccaaagtgaaaggcaagttgagtatgatcgtgcaggtagaattattaagggccaggaagcagctctccccaggagcaagtatgaagaagatgtttacattaacaaccacacgactgtttggggctcatggtggaaggatcatcaatggggctataagtgctgcaagcagacaatacgcaatagctattgcactggtgctgctggtattgaggctgctgaggctgcaagtgatcttatgaaagctaatattgcccgtaaggaggctgctacagatgatcctgcacctgtggaggagaaaaagcttgctacatggggtactgatgtccccgatgatctagttctagatgaaaaattgcttgctgaatcactcaagaaggaggatcaaagaaagagagaagagaaagatgagaggaaacgcaagtataatgttagatggaacgatgaggttacagcanaggacatggaggcatacaggatgaagaaagtacatcatgatgatccaatgaaggattttctgcattaagcttggaaaggataaaatggcctgcatctntttccttaaaattaaagggcaatctttctttgctagtccacgagcctttctgttatgttactgccagcagctggattgggcagaatggattatc

SEQ ID NO: 13721 - protein, 540 aa, Glycine max
  misc_feature (519)..(519): Xaa can be any naturally occurring amino acid
MATASVAFKSREDHRKQIELEEARKAGLAPAELDEDGKEINPHIPQYMSSAPWYLNAERPSLKHQRKWKSDPNYTKSWYDRGAKIFQADKYRKGACENCGAMTHDSKSCMERPRRVGAKWTNKHIAPDEKIETFELDYDGKRDRWNGYDASTYARVIERYEARDEARKKYLKEQQLKKLEKSNQNGEDAASDGDEEEEEDEDEDDLRVDEAKVDESKQMDFAKVEKRVRTTGGGSTGTVRNLRIREDTAKYLLNLDVNSAHYDPKTRSMREDPLPDADPNEKFYLGDNQYRNSGQALEFKELNIHAWEAFDKGQDVHMQAAPSQAELLYKNFKVMKEKLKYQTKETIIEKYGNAADEDKLPRELLLGQSERQVEYDRAGRIIKGQEAALPRSKYEEDVYINNHTTVWGSWWKDHQWGYKCCKQTIRNSYCTGAAGIEAAEAASDLMKANIARKEAATDDPAPVEEKKLATWGTDVPDDLVLDEKLLAESLKKEDQRKREEKDERKRKYNVRWNDEVTAXDMEAYRMKKVHHDDPMKDFLH

SEQ ID NO: 13722 - protein, 493 aa, Glycine max
  misc_feature (472)..(472): Xaa can be any naturally occurring amino acid
MSSAPWYLNAERPSLKHQRKWKSDPNYTKSWYDRGAKIFQADKYRKGACENCGAMTHDSKSCMERPRRVGAKWTNKHIAPDEKIETFELDYDGKRDRWNGYDASTYARVIERYEARDEARKKYLKEQQLKKLEKSNQNGEDAASDGDEEEEEDEDEDDLRVDEAKVDESKQMDFAKVEKRVRTTGGGSTGTVRNLRIREDTAKYLLNLDVNSAHYDPKTRSMREDPLPDADPNEKFYLGDNQYRNSGQALEFKELNIHAWEAFDKGQDVHMQAAPSQAELLYKNFKVMKEKLKYQTKETIIEKYGNAADEDKLPRELLLGQSERQVEYDRAGRIIKGQEAALPRSKYEEDVYINNHTTVWGSWWKDHQWGYKCCKQTIRNSYCTGAAGIEAAEAASDLMKANIARKEAATDDPAPVEEKKLATWGTDVPDDLVLDEKLLAESLKKEDQRKREEKDERKRKYNVRWNDEVTAXDMEAYRMKKVHHDDPMKDFLH

SEQ ID NO: 13723 - protein, 439 aa, Glycine max
  misc_feature (418)..(418): Xaa can be any naturally occurring amino acid
MTHDSKSCMERPRRVGAKWTNKHIAPDEKIETFELDYDGKRDRWNGYDASTYARVIERYEARDEARKKYLKEQQLKKLEKSNQNGEDAASDGDEEEEEDEDEDDLRVDEAKVDESKQMDFAKVEKRVRTTGGGSTGTVRNLRIREDTAKYLLNLDVNSAHYDPKTRSMREDPLPDADPNEKFYLGDNQYRNSGQALEFKELNIHAWEAFDKGQDVHMQAAPSQAELLYKNFKVMKEKLKYQTKETIIEKYGNAADEDKLPRELLLGQSERQVEYDRAGRIIKGQEAALPRSKYEEDVYINNHTTVWGSWWKDHQWGYKCCKQTIRNSYCTGAAGIEAAEAASDLMKANIARKEAATDDPAPVEEKKLATWGTDVPDDLVLDEKLLAESLKKEDQRKREEKDERKRKYNVRWNDEVTAXDMEAYRMKKVHHDDPMKDFLH

SEQ ID NO: 13724 - DNA, 602 bp, Glycine max
agtttatcttcgatggcttccaaggcgatgagcgtggcagcggagaagatagcgacggcggcgcgacgccaagccgtgtcgctaacggacgccgccgcctcgcgaatacggcagctgctacagcagcgtcagaggcccttcttgaagctgggagtcaaggctcgcggctgcaacggcttatcctacaccctcaattacgcagatgaaaaagggaagtttgatgagttggttgaggataagggtgttaagatattgattgatccaaaggcccttatgcatgtcattggaactaaaatggattttgtagatgacaaactaagatcggaatttattttcgtcaatccaaattctaaaggtcagtgtggttgtggtgaatctttcatgacaacaggcagtagtggatcttctaagccatgaaatagttaaaattgctattcaacttgctgtggatcctcacgtaatgaagtcgtcctttcacgatttaattgatagatagacatacaagtacaactaatggatttctattattctgcctgcgagaacaagggaaatgagagctttggtgctcagaacaaaaggatactgaggactgacatggtctc

SEQ ID NO: 13725 - protein, 138 aa, Glycine max
SLSSMASKAMSVAAEKIATAARRQAVSLTDAAASRIRQLLQQRQRPFLKLGVKARGCNGLSYTLNYADEKGKFDELVEDKGVKILIDPKALMHVIGTKMDFVDDKLRSEFIFVNPNSKGQCGCGESFMTTGSSGSSKP

SEQ ID NO: 13726 - protein, 134 aa, Glycine max
MASKAMSVAAEKIATAARRQAVSLTDAAASRIRQLLQQRQRPFLKLGVKARGCNGLSYTLNYADEKGKFDELVEDKGVKILIDPKALMHVIGTKMDFVDDKLRSEFIFVNPNSKGQCGCGESFMTTGSSGSSKP

SEQ ID NO: 13727 - protein, 129 aa, Glycine max
MSVAAEKIATAARRQAVSLTDAAASRIRQLLQQRQRPFLKLGVKARGCNGLSYTLNYADEKGKFDELVEDKGVKILIDPKALMHVIGTKMDFVDDKLRSEFIFVNPNSKGQCGCGESFMTTGSSGSSKP

SEQ ID NO: 13728 - DNA, 1000 bp, Glycine max
tgatacggatgagaaagtgcaaaaggtgtctcccccgcgcagaaaaggctataaggatgaaaaatccgaaaggcctgctaactggatgaaaaaagatgccaacggttctgatctcttcactacaagctcaaagcagcagagcacagggaattatgggactgtgtctaaggatgaaaagtctgaaaggcctgcaaactggatgaaaagggatgccaatggttctgatcttgtcactacaagctccaagcagagcaccgggagttatagcactttgtctaaggatgaaaagtctgaaaggcctgcaaactggattaaaagggatgccaacggctctgataccttcactacaagctccaagcagcagagcaccgggaattataacaatatcaccactggatccaggcttaatgaaacagaatcctctcctgatgggaatgtcagtgcagtacttgaggaggaagaagcgctaattgctgctcataggaaagaaattgaagatacaatggagattgttcgtgaagaaatgaaactcttggcagaggtggaccaaccgggaagccttattgacaactatgtaaccaaattgagctttgtgctttctcgcaaagcagctagtctcgtgggtcttcaagctcgtcttgcaagattccaacatcgactaaaagagcaagaaattctaagtagaaaaagagttccccgtcaataagagactcggtttctcttattcaacgtcatctgtattctcgtgtttattagcaatatagttgaaaggttttgtttgatataaacaaatcttttgttgaatatattctaattgaatttacttacatgtatatgcccttgtgtgagtcgtgtgacttttgggccacctcttgcctttgcaaatttggtgttatctatgtaggttatctgcttcgttgtcataaaaaaaaaaaaaagttgtctgccccaaaatttttagtttgtgggcaaagtaataaataaaatagaatttaatgct

SEQ ID NO: 13729 - protein, 234 aa, Glycine max
DTDEKVQKVSPPRRKGYKDEKSERPANWMKKDANGSDLFTTSSKQQSTGNYGTVSKDEKSERPANWMKRDANGSDLVTTSSKQSTGSYSTLSKDEKSERPANWIKRDANGSDTFTTSSKQQSTGNYNNITTGSRLNETESSPDGNVSAVLEEEEALIAAHRKEIEDTMEIVREEMKLLAEVDQPGSLIDNYVTKLSFVLSRKAASLVGLQARLARFQHRLKEQEILSRKRVPRQ

SEQ ID NO: 13730 - protein, 206 aa, Glycine max
MKKDANGSDLFTTSSKQQSTGNYGTVSKDEKSERPANWMKRDANGSDLVTTSSKQSTGSYSTLSKDEKSERPANWIKRDANGSDTFTTSSKQQSTGNYNNITTGSRLNETESSPDGNVSAVLEEEEALIAAHRKEIEDTMEIVREEMKLLAEVDQPGSLIDNYVTKLSFVLSRKAASLVGLQARLARFQHRLKEQEILSRKRVPRQ

SEQ ID NO: 13731 - protein, 168 aa, Glycine max
MKRDANGSDLVTTSSKQSTGSYSTLSKDEKSERPANWIKRDANGSDTFTTSSKQQSTGNYNNITTGSRLNETESSPDGNVSAVLEEEEALIAAHRKEIEDTMEIVREEMKLLAEVDQPGSLIDNYVTKLSFVLSRKAASLVGLQARLARFQHRLKEQEILSRKRVPRQ

SEQ ID NO: 13732 - DNA, 1539 bp, Glycine max
  misc_feature (624)..(624): n is a, c, g, or t
aattcaaaaaaactcatcaaaagtttttcaagaataatctacaagaacagccatgagagaagttatctcaattcacgtcggtcaaggtggtatccaaatcggtaacgcctgttgggaactcttctgtttggaacacggtatccaacctgatggtcaaatgccctctgataagaccatcggaggtggtgatgatgccttcaacacctttttctctgaaactggtgccggcaagcacgtcccaagatccgtcttcctcgatttggaacccactgtcgtcgatgaagtaagaactggtacctacagacaactcttccaccccgaacaacttatctccggtaaggaagatgctgccaacaacttcgccagaggtcactacaccatcggtaaagaaatcgtcgatctttgcttggacagaatcagaaagctcgctgataactgtaccggtctccaaggattcatggtcttcaacgctgtcggaggtggtactggttccggtttggggatccctcctcttggaaagactttccgtcgattacggcaagaaatccaaagctcggttttcaccatctacccatccccccaagtctccactgccgtcgttgagccatacaactccgtcttggncactcactccctcttggaacacactgatgtcgctgttatgctcgataacgaagctatctacgatatctgcagaagacaactcgatatcgaaagacccacttacaccaacttgaacagacttatcgctcaagtcatctcctctttgactgcttctttgagattcgatggtgccctcaacgtcgatatcactgaattccaaaccaacttggtcccatacccaagaatccatttcatgttgtcctcatatgcccccatcatctccgctgaaaaggcctatcacgaacaactctccgttgctgaaatcaccaactctgccttcgaacccgcatccatgatggttaagtgtgatcccagacatggtaagtatatggcctgctgtatgatgtacagaggtgatgtcgtccccaaggatgtcaacgcttccattgccaccatcaagaccaagagaaccatccaattcgtcgactggtgccccactggtttcaaggctggtatcaactaccaaccacccactgtcgtcccaggtggtgatttggctaaggtcatgagagctgtctgcatgatttccaactccactgctattgctgaagtcttctctagaatcgatcacaagttcgatcttatgtacgccaagagagccttcgttcattggtacgtcggtgagggtatggaagaaggtgagttctccgaagccagagaagatttggctgcccttgaaaaggattacgaagaagtcggtatcgaaactgctgaaggagaaggtgaagaagaaggatattagacgtgatatcaagaaagactttttaacgagtttttttgcacaatatatacataatttattcttagttatataagtaattaaggttgcaagtatttctatgaaattatgtaccaaatgcttttgaataagctttg

SEQ ID NO: 13733 - protein, 450 aa, Glycine max
  misc_feature (191)..(191): Xaa can be any naturally occurring amino acid
MREVISIHVGQGGIQIGNACWELFCLEHGIQPDGQMPSDKTIGGGDDAFNTFFSETGAGKHVPRSVFLDLEPTVVDEVRTGTYRQLFHPEQLISGKEDAANNFARGHYTIGKEIVDLCLDRIRKLADNCTGLQGFMVFNAVGGGTGSGLGIPPLGKTFRRLRQEIQSSVFTIYPSPQVSTAVVEPYNSVLXTHSLLEHTDVAVMLDNEAIYDICRRQLDIERPTYTNLNRLIAQVISSLTASLRFDGALNVDITEFQTNLVPYPRIHFMLSSYAPIISAEKAYHEQLSVAEITNSAFEPASMMVKCDPRHGKYMACCMMYRGDVVPKDVNASIATIKTKRTIQFVDWCPTGFKAGINYQPPTVVPGGDLAKVMRAVCMISNSTAIAEVFSRIDHKFDLMYAKRAFVHWYVGEGMEEGEFSEAREDLAALEKDYEEVGIETAEGEGEEEGY

SEQ ID NO: 13734 - protein, 415 aa, Glycine max
  misc_feature (156)..(156): Xaa can be any naturally occurring amino acid
MPSDKTIGGGDDAFNTFFSETGAGKHVPRSVFLDLEPTVVDEVRTGTYRQLFHPEQLISGKEDAANNFARGHYTIGKEIVDLCLDRIRKLADNCTGLQGFMVFNAVGGGTGSGLGIPPLGKTFRRLRQEIQSSVFTIYPSPQVSTAVVEPYNSVLXTHSLLEHTDVAVMLDNEAIYDICRRQLDIERPTYTNLNRLIAQVISSLTASLRFDGALNVDITEFQTNLVPYPRIHFMLSSYAPIISAEKAYHEQLSVAEITNSAFEPASMMVKCDPRHGKYMACCMMYRGDVVPKDVNASIATIKTKRTIQFVDWCPTGFKAGINYQPPTVVPGGDLAKVMRAVCMISNSTAIAEVFSRIDHKFDLMYAKRAFVHWYVGEGMEEGEFSEAREDLAALEKDYEEVGIETAEGEGEEEGY

SEQ ID NO: 13735 - protein, 315 aa, Glycine max
  misc_feature (56)..(56): Xaa can be any naturally occurring amino acid
MVFNAVGGGTGSGLGIPPLGKTFRRLRQEIQSSVFTIYPSPQVSTAVVEPYNSVLXTHSLLEHTDVAVMLDNEAIYDICRRQLDIERPTYTNLNRLIAQVISSLTASLRFDGALNVDITEFQTNLVPYPRIHFMLSSYAPIISAEKAYHEQLSVAEITNSAFEPASMMVKCDPRHGKYMACCMMYRGDVVPKDVNASIATIKTKRTIQFVDWCPTGFKAGINYQPPTVVPGGDLAKVMRAVCMISNSTAIAEVFSRIDHKFDLMYAKRAFVHWYVGEGMEEGEFSEAREDLAALEKDYEEVGIETAEGEGEEEGY

SEQ ID NO: 13736 - DNA, 1332 bp, Glycine max
aacactagagaacaaaagctctagctagaactgataatgtatatacaagccatcattcagaacaattagtgcatcctctttcatctgaagaacttgtttagttcgctcctaaaatatttgtctgaggatgtggtgcagaaatcctttacccttccttctttattaaagcttatagcatctgcaatcattaatttcttattccttcaaagtggcgatcacactatcattcagctgattttgaagattttgtggcaggcataaaacctgcaatgagatggctttcttcccagcaaatttcatgctccaaactcctcaccatgatgatcatcatcatcaacctccaccatccctcacctcaattctaccaacgtgtgcacctcaagaatatcatgggggagtgacctttctaggaaagagatccatgtcattttcatcagggattgagcatggagaagaggtcaatgccgaggaagatttgtctgatgatggatcacaagcaggggagaagaagaggaggctcaacatggagcaagtgaagacacttgagaagagctttgagttggggaacaagcttgagccagagaggaaaatgcagcttgcaagagcacttggcttgcagccaagacaaattgctatatggttccagaacagaagggctaggtggaagaccaagcagttggagaaagactatgatgttctcaaaagacagtatgaagctgtcaagtcagataatgatgcacttcaagctcagaaccaaaaacttcaggctgaaatattggcactgaaaagtagagaaccaactgaatccataaaccttaacaaagaaacagaaggatcctgcagcaatagaagtgagaacagctcagacatcaagttggatatctcaaggacaccagctattgacagtcctcattctacacatcagcaaagcagacccctctttcctccttcttctgctaggcctgcaggagttgctcagcttttccaaacctcttcaagaccagaccttccatcatgccaaaagattgaccaaatggtcaaagaagaaagcctaagcaacatgttttgtggcatggatgatcaatcgaggttttggccatggttggagcagcaacatttcaattgaatattccaaaggaagagagagttattaattaatttaaaaatttggatgtagtaggttttctttttccctgtgaaatcaagagggtgtccatcaatttatcacaccatactttattatgatgagttcttaaattaaaaacccatgttttggaaacttggtgtataaaataggatatatatcaagtagaaattttctggcggcgcttg

SEQ ID NO: 13737 - protein, 283 aa, Glycine max
MAFFPANFMLQTPHHDDHHHQPPPSLTSILPTCAPQEYHGGVTFLGKRSMSFSSGIEHGEEVNAEEDLSDDGSQAGEKKRRLNMEQVKTLEKSFELGNKLEPERKMQLARALGLQPRQIAIWFQNRRARWKTKQLEKDYDVLKRQYEAVKSDNDALQAQNQKLQAEILALKSREPTESINLNKETEGSCSNRSENSSDIKLDISRTPAIDSPHSTHQQSRPLFPPSSARPAGVAQLFQTSSRPDLPSCQKIDQMVKEESLSNMFCGMDDQSRFWPWLEQQHFN

SEQ ID NO: 13738 - protein, 275 aa, Glycine max
MLQTPHHDDHHHQPPPSLTSILPTCAPQEYHGGVTFLGKRSMSFSSGIEHGEEVNAEEDLSDDGSQAGEKKRRLNMEQVKTLEKSFELGNKLEPERKMQLARALGLQPRQIAIWFQNRRARWKTKQLEKDYDVLKRQYEAVKSDNDALQAQNQKLQAEILALKSREPTESINLNKETEGSCSNRSENSSDIKLDISRTPAIDSPHSTHQQSRPLFPPSSARPAGVAQLFQTSSRPDLPSCQKIDQMVKEESLSNMFCGMDDQSRFWPWLEQQHFN

SEQ ID NO: 13739 - protein, 234 aa, Glycine max
MSFSSGIEHGEEVNAEEDLSDDGSQAGEKKRRLNMEQVKTLEKSFELGNKLEPERKMQLARALGLQPRQIAIWFQNRRARWKTKQLEKDYDVLKRQYEAVKSDNDALQAQNQKLQAEILALKSREPTESINLNKETEGSCSNRSENSSDIKLDISRTPAIDSPHSTHQQSRPLFPPSSARPAGVAQLFQTSSRPDLPSCQKIDQMVKEESLSNMFCGMDDQSRFWPWLEQQHFN

SEQ ID NO: 13740 - DNA, 1678 bp, Glycine max
aaaaccctttccgatcccaatcgctttcttagtttctctccgtcttcaaatctagggttcctgcaattttagttgccgtcaccaccgcgaaccaccgcgaacgccaccaccggaatagttgccgccaatttcagattcgtgatgggaaaaaatgagtttctcacacctaaagcaattgccaaccgaatcaaagcaaaaggattgcagaagcttcgttggtattgccagatgtgtcagaagcagtgccgagatgagaatgggtttaaatgtcattgcatgagtgaagggcaccagcgtcaaatgcagatttttggacaaaacccacaccggatagttgagggctattccgaagagtttgagaccacttttctggagcacatgaagcgcagtcaccgattcagccgtgtggcggccactgtagtttataacgaatacataaacgatagacaccatgttcatatgaactccactcagtgggctacgcttactgagtttgttaagtacttgggtcgaactggcaaatgtaaggttgaggaaacacccaagggatggttcattacatatatagatagagattcagaaacccttttcaaggagaggatgaagaataagagaatcaaggcagatatggtagatgaagaaaagcaagagaaggagatcaggagacagattgaaaaggctgagcaaatgatgcagcccgctacttctgaggctgatcagccttcacaggttgagcctctgagggaactgaatatggaagatggaatcaagataggattttctcttgggtcatcattagctaaacctgtggtcaaggaaaaacatgaggcgtcaagggtggtgtttgatgagggtgaggaagagaaatataatgaaaggaatcccagaaacaatttgaagaggaaagaaagtggaggtggaaaatcagctttggatgaaatgatgagggaagaagagaagaaaaaggaaaaaattaatcggaaggattattggttgcatgagggaattgttgtcaaggttatgagcaaagtcttggcggagaaggggtactacaagcaaaagggtgttgtgcggaaggtaattgacaagtatgttggggaaatagaaatgcttgaaagcaagcatgtgctcagagttgatcaggcagagcttgaaactgtgattccacaagttggggggcgtgtaaaaatagtcaatggtgcatatcgaggatcaattgctaagctgttgggggtggatacagataatttttgtgctaaggtgcatattgagaaaggagtctatgatggcagagtacttaaagctgtggaatatgaggacatttgtaaagtagcatagtgagtttgatggaattaataactcaatggttctgttttattacatgaattgtagtattcgttcttatgtatctttctctagcgtgtcatctttgtagcacaagtcatatcattatcttatattggatacaattcttggaaatttatatttctgactataattaggccccaaacgtgcagaaaaagatggtggctgagaaggctgaaatatcacattgcaggtgtaattagactacagttttattttgtagttttgtggcgagtaaagttgaattcctattcttgtcctttgttttctgtttctttgaatgcttcgtcaacaacaatcaagtttttatttt

SEQ ID NO: 13741 - protein, 398 aa, Glycine max
MGKNEFLTPKAIANRIKAKGLQKLRWYCQMCQKQCRDENGFKCHCMSEGHQRQMQIFGQNPHRIVEGYSEEFETTFLEHMKRSHRFSRVAATVVYNEYINDRHHVHMNSTQWATLTEFVKYLGRTGKCKVEETPKGWFITYIDRDSETLFKERMKNKRIKADMVDEEKQEKEIRRQIEKAEQMMQPATSEADQPSQVEPLRELNMEDGIKIGFSLGSSLAKPVVKEKHEASRVVFDEGEEEKYNERNPRNNLKRKESGGGKSALDEMMREEEKKKEKINRKDYWLHEGIVVKVMSKVLAEKGYYKQKGVVRKVIDKYVGEIEMLESKHVLRVDQAELETVIPQVGGRVKIVNGAYRGSIAKLLGVDTDNFCAKVHIEKGVYDGRVLKAVEYEDICKVA

SEQ ID NO: 13742 - protein, 369 aa, Glycine max
MCQKQCRDENGFKCHCMSEGHQRQMQIFGQNPHRIVEGYSEEFETTFLEHMKRSHRFSRVAATVVYNEYINDRHHVHMNSTQWATLTEFVKYLGRTGKCKVEETPKGWFITYIDRDSETLFKERMKNKRIKADMVDEEKQEKEIRRQIEKAEQMMQPATSEADQPSQVEPLRELNMEDGIKIGFSLGSSLAKPVVKEKHEASRVVFDEGEEEKYNERNPRNNLKRKESGGGKSALDEMMREEEKKKEKINRKDYWLHEGIVVKVMSKVLAEKGYYKQKGVVRKVIDKYVGEIEMLESKHVLRVDQAELETVIPQVGGRVKIVNGAYRGSIAKLLGVDTDNFCAKVHIEKGVYDGRVLKAVEYEDICKVA

SEQ ID NO: 13743 - protein, 353 aa, Glycine max
MSEGHQRQMQIFGQNPHRIVEGYSEEFETTFLEHMKRSHRFSRVAATVVYNEYINDRHHVHMNSTQWATLTEFVKYLGRTGKCKVEETPKGWFITYIDRDSETLFKERMKNKRIKADMVDEEKQEKEIRRQIEKAEQMMQPATSEADQPSQVEPLRELNMEDGIKIGFSLGSSLAKPVVKEKHEASRVVFDEGEEEKYNERNPRNNLKRKESGGGKSALDEMMREEEKKKEKINRKDYWLHEGIVVKVMSKVLAEKGYYKQKGVVRKVIDKYVGEIEMLESKHVLRVDQAELETVIPQVGGRVKIVNGAYRGSIAKLLGVDTDNFCAKVHIEKGVYDGRVLKAVEYEDICKVA

SEQ ID NO: 13744 - DNA, 1282 bp, Glycine max
  misc_feature (975)..(975): n is a, c, g, or t
  misc_feature (1023)..(1023): n is a, c, g, or t
  misc_feature (1027)..(1027): n is a, c, g, or t
  misc_feature (1029)..(1030): n is a, c, g, or t
  misc_feature (1039)..(1039): n is a, c, g, or t
  misc_feature (1047)..(1047): n is a, c, g, or t
  misc_feature (1049)..(1049): n is a, c, g, or t
  misc_feature (1052)..(1052): n is a, c, g, or t
  misc_feature (1054)..(1056): n is a, c, g, or t
  misc_feature (1065)..(1065): n is a, c, g, or t
  misc_feature (1205)..(1205): n is a, c, g, or t
  misc_feature (1213)..(1213): n is a, c, g, or t
  misc_feature (1219)..(1219): n is a, c, g, or t
  misc_feature (1238)..(1238): n is a, c, g, or t
gtttctgcagcttctctctcttacctcactttctccttattcttcattagatcctcagttcccaatcgaccctccatttctgtgaactgagatggctggaggtgttattcggcagttatttaggaggaaactccaatctcattctcctaattcttcttttaagtcattcattatcacaaagaaagatggtgctgactctattggcaacaactccttaagagtgcttgcattagttggagctggtgtctcagggtttctaggttttgcaacaacagcatttgctgatgaagctgagcatggcctggcatgtcctagctatccatggcctcataagggcatccttagttcatatgatcatgcttcgattcgtcgtggtcatcaagtttatcaagaagtctgtgcttcttgtcattctatgtctttgatatcataccgtgatttggttggtgttgcttatacagaagaagaggtaaaggctatggcagctgagattgaggtggttgatggccctaatgatgagggtgagatgtttacacgccctggtaaactcagtgatcgctttccccagccatatgcaaatgaagcagcagctaggtttgctaatggaggagcctatcctccagatctaagtcttgttaccaaagctcgtcacaatggtcagaactatgtgtttgcacttctaactggttatcgtgaccctcctgctggtgtttcgattagagaaggactgcactataatccttattttcctggcggggctattgctatgcctaaaatgcttaatgatggtgctgttgaatatgaagatggtacccctgctacagaatctcagatgggtaaagacattgtatcattcctgacttgggctgcggaacctgagatggaagagagaaaactgatgggattcaaatggatatttgttctatcactggcattacttcaagctgcctattaccgtcggcttaggtggtccgntctaaagtctcgcaagctggttcttgatgttgtcaactagctgccttncagntnnatttcattntttacatnanganannntattgatgncaataattttgtcagatgctaaagttgtctcttcatgtcaaattcattgaaggagtaactgaagcttgttctatttttgtttgagatagaaataaagctgctccgtgtatgtgagatataattattttcactttttcttncttctcanacctangtattgttacattctccangacccctgtactcttattttttttccccctcaatctggattatt

SEQ ID NO: 13745 - protein, 307 aa, Glycine max
  misc_feature (295)..(295): Xaa can be any naturally occurring amino acid
MAGGVIRQLFRRKLQSHSPNSSFKSFIITKKDGADSIGNNSLRVLALVGAGVSGFLGFATTAFADEAEHGLACPSYPWPHKGILSSYDHASIRRGHQVYQEVCASCHSMSLISYRDLVGVAYTEEEVKAMAAEIEVVDGPNDEGEMFTRPGKLSDRFPQPYANEAAARFANGGAYPPDLSLVTKARHNGQNYVFALLTGYRDPPAGVSIREGLHYNPYFPGGAIAMPKMLNDGAVEYEDGTPATESQMGKDIVSFLTWAAEPEMEERKLMGFKWIFVLSLALLQAAYYRRLRWSXLKSRKLVLDVVN

SEQ ID NO: 13746 - protein, 199 aa, Glycine max
  misc_feature (187)..(187): Xaa can be any naturally occurring amino acid
MSLISYRDLVGVAYTEEEVKAMAAEIEVVDGPNDEGEMFTRPGKLSDRFPQPYANEAAARFANGGAYPPDLSLVTKARHNGQNYVFALLTGYRDPPAGVSIREGLHYNPYFPGGAIAMPKMLNDGAVEYEDGTPATESQMGKDIVSFLTWAAEPEMEERKLMGFKWIFVLSLALLQAAYYRRLRWSXLKSRKLVLDVVN

SEQ ID NO: 13747 - protein, 178 aa, Glycine max
  misc_feature (166)..(166): Xaa can be any naturally occurring amino acid
MAAEIEVVDGPNDEGEMFTRPGKLSDRFPQPYANEAAARFANGGAYPPDLSLVTKARHNGQNYVFALLTGYRDPPAGVSIREGLHYNPYFPGGAIAMPKMLNDGAVEYEDGTPATESQMGKDIVSFLTWAAEPEMEERKLMGFKWIFVLSLALLQAAYYRRLRWSXLKSRKLVLDVVN

SEQ ID NO: 13748 - DNA, 456 bp, Glycine max
aatattgcacaacgacaactttaataaacgggaatacgtggtccaagtgctgatgaaggtcatccctggaatgacccttgataatgcagttaatatcatgcaagaagcacactacaatggattgtcagtggtgatcatctgtgaccaagccgatgctgaagatcactgcatgcagctaagaggcaatggattgctcagttcaattgaacctgcaaatggtggttgctgatgacaagtttaacttcaaatctcactggcttttatgctattgaaaggtgagatggaactatttgcaggtgtacataagttccctcctcatgaaggccttagagaaaccagaaaagaaaaaaagatatatctggtgtaaaacttggccttatgattaagatgaacaaaaaacctatgattaagacatgtgatagttgtcattttgaataaagaagtgcacaacatatt

SEQ ID NO: 13749 - protein, 75 aa, Glycine max
ILHNDNFNKREYVVQVLMKVIPGMTLDNAVNIMQEAHYNGLSVVIICDQADAEDHCMQLRGNGLLSSIEPANGGC

SEQ ID NO: 13750 - protein, 58 aa, Glycine max
MKVIPGMTLDNAVNIMQEAHYNGLSVVIICDQADAEDHCMQLRGNGLLSSIEPANGGC

SEQ ID NO: 13751 - protein, 52 aa, Glycine max
MTLDNAVNIMQEAHYNGLSVVIICDQADAEDHCMQLRGNGLLSSIEPANGGC

SEQ ID NO: 13752 - DNA, 1725 bp, Glycine max
acaacaaacagcaacagctacctcctccattcttcatttccattaccaaaaagaaaacaccaaactctctataaccataaccatgtcaatggcaacaacatcccctcacaccggcctcttccaaaaccgcaccaaaccttcttttcctttctcttcttcctccttcaagttcaaacccacatccatcaaatgcgccacccaactccacacccaagctccgcccctcacccactcccaagatcgcgtcttcaacttcgccgccggtcccgccaccctcccggaaaacgtcctcctccgtgcccaatccgagctctacaactggcgcggatccggcatgagcgtcatggaaatgagccaccgcggcaaggagtttctctccataatccaaaaagccgaatcggatctccgcgccctcctccagatcccccctgaatactccgtcctcttcctccagggcggcgccacctcccagttcgccgccgtccccctcaacctctgctcctcccccgactccgccgtcgactacgtcgtcaccggctcctggagcgacaaggccgccaaggaggcgcagaagtactccaagcccaccgtgatctggtctgggaaatccgaaaagtacacaaagatcccatcttttcacgatttggagctgaatgagaattctgggtatcttcatatctgtgccaatgagactattcatggggtggagtataaagactaccctgttcccaagagtggtgtcttggttgctgatatgtcctctaatttctgctccaagcctgtggatgtgtcaaggtttggggttatctatgctggggcccagaagaatgtggggccctctggtgtcaccattgtgataatcagaaaggaccttattgggaatgcacagggtttcacgcctgtgatgtttgattacaagatccatgatgaaaacaattcactctacaatacccctccttgttatgggatttacatgtgtgggttggtgtttgaggacttgttggagcaaggtgggttgggggaggttgagaggaagaatcagaagaaagctgagattctctacagtgcaattgatggcagcaaagggttctataaatgccctgttgagaagtctgtgagatctttgatgaatgtgcctttcactttggagaaatcagagctggagggtgagtttatcaaggaggctgctaaagagaagatggtgcagctcaagggacatagatcagtgggaggtatgagggcttctatttacaatgccatgcccttggctggggttgagaagttggtggctttcatgaaggattttcaggcaaggcatgcctaaaggagtaacctcaatctgaaacaaatacttgcattgcataaacctaatgcctaaaggattttatgctaataaagtgtttgtctggtattcagaaagggtcacaatctcttgtcagttttttgctttctttagttaggtatctttgctgtctctttttgtttactttcttgttccatgtttgatattcaaatttgggtcggcaggtagtgttttcattgcgctttacctttgtcgatcgcaagtgaagtagtttagttttgatttcttgatataccctctactattactactacaagtctataagtttgtatgaattgagtctcatgtgatattttactggatgtaacatgtagtatattctcaatctcaataaattgaatgaggatgaaacatattgagct

SEQ ID NO: 13753 - protein, 440 aa, Glycine max
QQTATATSSILHFHYQKENTKLSITITMSMATTSPHTGLFQNRTKPSFPFSSSSFKFKPTSIKCATQLHTQAPPLTHSQDRVFNFAAGPATLPENVLLRAQSELYNWRGSGMSVMEMSHRGKEFLSIIQKAESDLRALLQIPPEYSVLFLQGGATSQFAAVPLNLCSSPDSAVDYVVTGSWSDKAAKEAQKYSKPTVIWSGKSEKYTKIPSFHDLELNENSGYLHICANETIHGVEYKDYPVPKSGVLVADMSSNFCSKPVDVSRFGVIYAGAQKNVGPSGVTIVIIRKDLIGNAQGFTPVMFDYKIHDENNSLYNTPPCYGIYMCGLVFEDLLEQGGLGEVERKNQKKAEILYSAIDGSKGFYKCPVEKSVRSLMNVPFTLEKSELEGEFIKEAAKEKMVQLKGHRSVGGMRASIYNAMPLAGVEKLVAFMKDFQARHA

SEQ ID NO: 13754 - protein, 413 aa, Glycine max
MSMATTSPHTGLFQNRTKPSFPFSSSSFKFKPTSIKCATQLHTQAPPLTHSQDRVFNFAAGPATLPENVLLRAQSELYNWRGSGMSVMEMSHRGKEFLSIIQKAESDLRALLQIPPEYSVLFLQGGATSQFAAVPLNLCSSPDSAVDYVVTGSWSDKAAKEAQKYSKPTVIWSGKSEKYTKIPSFHDLELNENSGYLHICANETIHGVEYKDYPVPKSGVLVADMSSNFCSKPVDVSRFGVIYAGAQKNVGPSGVTIVIIRKDLIGNAQGFTPVMFDYKIHDENNSLYNTPPCYGIYMCGLVFEDLLEQGGLGEVERKNQKKAEILYSAIDGSKGFYKCPVEKSVRSLMNVPFTLEKSELEGEFIKEAAKEKMVQLKGHRSVGGMRASIYNAMPLAGVEKLVAFMKDFQARHA

SEQ ID NO: 13755 - protein, 411 aa, Glycine max
MATTSPHTGLFQNRTKPSFPFSSSSFKFKPTSIKCATQLHTQAPPLTHSQDRVFNFAAGPATLPENVLLRAQSELYNWRGSGMSVMEMSHRGKEFLSIIQKAESDLRALLQIPPEYSVLFLQGGATSQFAAVPLNLCSSPDSAVDYVVTGSWSDKAAKEAQKYSKPTVIWSGKSEKYTKIPSFHDLELNENSGYLHICANETIHGVEYKDYPVPKSGVLVADMSSNFCSKPVDVSRFGVIYAGAQKNVGPSGVTIVIIRKDLIGNAQGFTPVMFDYKIHDENNSLYNTPPCYGIYMCGLVFEDLLEQGGLGEVERKNQKKAEILYSAIDGSKGFYKCPVEKSVRSLMNVPFTLEKSELEGEFIKEAAKEKMVQLKGHRSVGGMRASIYNAMPLAGVEKLVAFMKDFQARHA

SEQ ID NO: 13756 - DNA, 1366 bp, Glycine max
aaattgaccaaacccaaaacatcgtaagttaaattgcatttttagagcaaatctgtaagctctgacggcagcttatagaggtcgttgacggcaaagagagacacaaatgtattctgtttgagtttgaaacattgattcgttgtttcctctgcaaaattaaatcctcattgtgattgttgatgaacaattgaagtgtctctccgatttgaggattccggcgacagcaagcgatgaccaccggcggcgacggtgacacctccaaacaagagctcttccaccttatcaaacgcttcggagcttgcgtcactttcaagatctccaatctgttctctctctctctccacggcctcgatatacgctctatcggggcagttgctggtcttgctgttgcaattgttttcacatggaggctgttgagatctccttctgggtctcaacggaggcaacaaaaacggcaaggtccttcatctagtaatcctggagtcactacacattcaaatgtgtcagatgttccttcggatgcttgttcaccctcagatgattcaagggcgcaaaatgttgttgatgagttctttcagccagtgaagccaaccttggggcagatagttaggcagaagttgagtgaaggaagaaaggtaacttgtcgccttcttggagtgatccttgaggaaagtagtccagaggagctgcagaaacaagctactgtgaggtcctctgtgctagaagtattattggaagtaacaaaattttgtgatttatatctcatggaacgagttctggatgatgaaagcgagaagagagttcttgtagcattggaagaagcaggggtattcacttcaggtcgtctggtcaaggacaaggttctgttctgcagcacagagaatggacggtcatcgtttgttcggcaattggaacctgattggcatattgattcaaatcctgaaattgtcactcagttagctaggtttatcaagtatcaacttcatgtatctccttataaaaccgaaagaactgctgcaaatgtgttcagtgctccatctctggaacagttctttggatccatatgaaactaaaaccactacaaatcagatgttattcataaatgtctccaagtttgtttctatgttcatctcgatttccacattcaccataagtttttttccagttttactagatgtatgagaacaaggttagatttttcttaaagatttaaggttctctcactctaggtaggtgaaagaccttatgtgtatgttgatgctttgaagaagttttactattttcttttttcttctttgttttgaaatttgtgcattacattgtatcccatccagacattttagactggcaaagtgacaattttatt

SEQ ID NO: 13757 - protein, 278 aa, Glycine max
MTTGGDGDTSKQELFHLIKRFGACVTFKISNLFSLSLHGLDIRSIGAVAGLAVAIVFTWRLLRSPSGSQRRQQKRQGPSSSNPGVTTHSNVSDVPSDACSPSDDSRAQNVVDEFFQPVKPTLGQIVRQKLSEGRKVTCRLLGVILEESSPEELQKQATVRSSVLEVLLEVTKFCDLYLMERVLDDESEKRVLVALEEAGVFTSGRLVKDKVLFCSTENGRSSFVRQLEPDWHIDSNPEIVTQLARFIKYQLHVSPYKTERTAANVFSAPSLEQFFGSI

SEQ ID NO: 13758 - DNA, 1629 bp, Glycine max
aaagccatgaccaatatggaatccaccacacctatactcactcctctagtgctcctcctcctcttctctctagccaaagggcttcacaaccccaaatgtgatgctgcctatcaacatgaccatgatggctcaaccctccaagtgttccatgtgttcagcccttgttccccattcaggccctcaaaaccaatgtcatgggaagagagtgtcctacagctacaagccaaggaccaagccaggatgcagtacctttctaacttggtggctagaagatccattgtcccaattgcctcagggagacaaatcacacagagccctacatacatagtgagggccaagtttggtaccccagcacagaccctcctcttggccatggacactagcaatgatgctgcctgggtcccttgcactgcctgtgttggttgctcaacaaccacaccctttgctcctcccaagtccaccactttcaagaaagttggatgtggtgcttctcagtgcaaacaggtacggaaccccacttgcgacggaagcgcgtgtgcattcaacttcacctatggcacttcctctgtggcagctagccttgtccaagacacagtgaccctagccactgacccagtcccagcctacacctttgggtgcattcaaaaggccacagggagctcactgccaccacaagggctattgggcctgggccgaggcccattatcactcttggcccaaacccaaaaactctaccaatctaccttctcttattgcttgcccagctttaaaacactcaactttagtgggtcactgagacttgggcccgtggcccagcccaagaggatcaagtttacccctcttctcaaaaatcctagaagatcttcactttactatgtgaatttggtggctattagagttggccggagaattgtggatattccaccggaggctctagcgttcaaccctaacaccggcgcaggcaccgtttttgattcgggtacggtattcacccggctggttgaaccggcttacaccgccgtccggaacgagttccggcgacgagttgccgttcacaagaaactcaccgtgacaagcctaggagggtttgacacatgctacacagtcccaatagttgcaccaacaataacattcatgttctccggcatgaacgtgacactcccaccggacaacatcctcatacatagcaccgccggcagcgtcacgtgcttggccatggcaccggcaccggacaatgtgaactcggtgctgaacgtgatcgccaacatgcaacagcaaaaccaccgtgtgctcttcgacgtgcccaactcaaggcttggtgttgctcgtgagctttgcacctaatacataataataagtggttcttaggttaagaattttcatgacttgtgggtacaataataaaaatcgtgtcgaattggcattgcaaagttactcctatttgggaattggtatttgatatgggttgggttttggcattgctaagagtttattgctaactatttagtagaagatagtgagctaaatgtttaaggcattgcatgtaagtctccaagtttcaagttatatatgtagtagtatgaaaagaagttatatttgtagctttgtaatggtatgtgtcacgggttc

SEQ ID NO: 13759 - protein, 447 aa, Glycine max
KAMTNMESTTPILTPLVLLLLFSLAKGLHNPKCDAAYQHDHDGSTLQVFHVFSPCSPFRPSKPMSWEESVLQLQAKDQARMQYLSNLVARRSIVPIASGRQITQSPTYIVRAKFGTPAQTLLLAMDTSNDAAWVPCTACVGCSTTTPFAPPKSTTFKKVGCGASQCKQVRNPTCDGSACAFNFTYGTSSVAASLVQDTVTLATDPVPAYTFGCIQKATGSSLPPQGLLGLGRGPLSLLAQTQKLYQSTFSYCLPSFKTLNFSGSLRLGPVAQPKRIKFTPLLKNPRRSSLYYVNLVAIRVGRRIVDIPPEALAFNPNTGAGTVFDSGTVFTRLVEPAYTAVRNEFRRRVAVHKKLTVTSLGGFDTCYTVPIVAPTITFMFSGMNVTLPPDNILIHSTAGSVTCLAMAPAPDNVNSVLNVIANMQQQNHRVLFDVPNSRLGVARELCT

SEQ ID NO: 13760 - protein, 445 aa, Glycine max
MTNMESTTPILTPLVLLLLFSLAKGLHNPKCDAAYQHDHDGSTLQVFHVFSPCSPFRPSKPMSWEESVLQLQAKDQARMQYLSNLVARRSIVPIASGRQITQSPTYIVRAKFGTPAQTLLLAMDTSNDAAWVPCTACVGCSTTTPFAPPKSTTFKKVGCGASQCKQVRNPTCDGSACAFNFTYGTSSVAASLVQDTVTLATDPVPAYTFGCIQKATGSSLPPQGLLGLGRGPLSLLAQTQKLYQSTFSYCLPSFKTLNFSGSLRLGPVAQPKRIKFTPLLKNPRRSSLYYVNLVAIRVGRRIVDIPPEALAFNPNTGAGTVFDSGTVFTRLVEPAYTAVRNEFRRRVAVHKKLTVTSLGGFDTCYTVPIVAPTITFMFSGMNVTLPPDNILIHSTAGSVTCLAMAPAPDNVNSVLNVIANMQQQNHRVLFDVPNSRLGVARELCT

SEQ ID NO: 13761 - protein, 442 aa, Glycine max
MESTTPILTPLVLLLLFSLAKGLHNPKCDAAYQHDHDGSTLQVFHVFSPCSPFRPSKPMSWEESVLQLQAKDQARMQYLSNLVARRSIVPIASGRQITQSPTYIVRAKFGTPAQTLLLAMDTSNDAAWVPCTACVGCSTTTPFAPPKSTTFKKVGCGASQCKQVRNPTCDGSACAFNFTYGTSSVAASLVQDTVTLATDPVPAYTFGCIQKATGSSLPPQGLLGLGRGPLSLLAQTQKLYQSTFSYCLPSFKTLNFSGSLRLGPVAQPKRIKFTPLLKNPRRSSLYYVNLVAIRVGRRIVDIPPEALAFNPNTGAGTVFDSGTVFTRLVEPAYTAVRNEFRRRVAVHKKLTVTSLGGFDTCYTVPIVAPTITFMFSGMNVTLPPDNILIHSTAGSVTCLAMAPAPDNVNSVLNVIANMQQQNHRVLFDVPNSRLGVARELCT

SEQ ID NO: 13762 - DNA, 862 bp, Glycine max
ttgtagttggcaacttacttggaatggtagccatatttcttatccagagaaaccggcatgctttgattggtagagccatggatgaccatgatatggagaaagtacttcagtttttgaaaaaagacccggttgtagattccctctatgattgcaaaagtgaagttattgggcctggattcttcagatttaaggcagaaatagattttaatggagaaatggtggtgcaaaattatcttaaaaggactggtcgtgaagagtgggcaagacagtttcgtgaagctgctaagcagaaggatgatactgccatgatgaagattatgtcaaattacggtgaggaagtagttacagctttaggaagtgaagtagataggttagagaaggagatccagaatctcgttcctggtattcggcatgttgatattgaagcccacaatcctccaacagaggcgaccttgtcaagtgaaagttttaaataaattcgacaccctcttcacattcatttatattatcaaagcatttatgaaaaattgatttggctttatccagtatcacgagttctgaaggaaatacgaagttgagttacatgcctcgggttgagttgaccctggacagctcttgatacattagtactcatgttttcctcttcactgaaacgtgacatctgagcgacctcgagtgtgaaagactacaaggcacatatatatatatatatattgaacagtgctacgatgctaagctcgatgaataattagaagtggtaactttttctgtgtcctgcagttactgttacttgaggtcagtatcatagttccatgtaattgaggaatgttatgaacgcattctttaatatattgtttttgac

SEQ ID NO: 13763 - protein, 157 aa, Glycine max
VVGNLLGMVAIFLIQRNRHALIGRAMDDHDMEKVLQFLKKDPVVDSLYDCKSEVIGPGFFRFKAEIDFNGEMVVQNYLKRTGREEWARQFREAAKQKDDTAMMKIMSNYGEEVVTALGSEVDRLEKEIQNLVPGIRHVDIEAHNPPTEATLSSESFK

SEQ ID NO: 13764 - protein, 150 aa, Glycine max
MVAIFLIQRNRHALIGRAMDDHDMEKVLQFLKKDPVVDSLYDCKSEVIGPGFFRFKAEIDFNGEMVVQNYLKRTGREEWARQFREAAKQKDDTAMMKIMSNYGEEVVTALGSEVDRLEKEIQNLVPGIRHVDIEAHNPPTEATLSSESFK

SEQ ID NO: 13765 - protein, 132 aa, Glycine max
MDDHDMEKVLQFLKKDPVVDSLYDCKSEVIGPGFFRFKAEIDFNGEMVVQNYLKRTGREEWARQFREAAKQKDDTAMMKIMSNYGEEVVTALGSEVDRLEKEIQNLVPGIRHVDIEAHNPPTEATLSSESFK

SEQ ID NO: 13766 - DNA, 561 bp, Glycine max
gaagtggattctgcatgactggagcgacgagcactgcatcaagatcttgaagaactgcaggaaggcaataccagagaagacaggaaaagtcataatcgtggatcacgttcttcgacccgaaggcaacgaactcttcacagacgttggcatcgcattcgacatgatgcttctcgctcacaacgccggtggcaaagagaggaccgaagagaactggaagtggctgttcaaggaaaccggtttcgcgcgttacaacatcatcaagatcaacgctctcccttccatcattgaggcgtttccaatctgaagaagatgccactaccacaactgcatgtggtttttatgttgcatgtgttgttgttattattaacagctatatgatcttcgttttaattttgtggttttccttcctgcccttgttatgtttgtgcattaaataaaagtaagaaatgccccaccactaagtaatgctatatggattatgtatgtgttccatatatgtcaagtgagtggtgtgtggttgtgaagaatctattgcttttaatgaatcagatcctttggtgc

SEQ ID NO: 13767 - protein, 100 aa, Glycine max
KWILHDWSDEHCIKILKNCRKAIPEKTGKVIIVDHVLRPEGNELFTDVGIAFDMMLLAHNAGGKERTEENWKWLFKETGFARYNIIKINALPSIIEAFPI

SEQ ID NO: 13768 - DNA, 603 bp, Glycine max
tgaggcccttgtggacctaacagtgatagagatattgtcaaggcatgcttctgatgaggtctaccttggacagagggacaatccaaattggactgatgacacaaaggcaattcaagcctttaagaagtttggaaacaagctgaaggaaattgaggacaaaatctcagggaggaacaagaattcaagccttaggaaccgtaatggaccggcgcagatgccctacactgtgcttcttcctaccagtggggaaggccttactttcagaggaattcccaacagcatctctatctaatgagagtgtgtggtgtgtggtgtgtggttttctttccttccaacgtacctctcattgacaaataaacgtgcaaacttatgtgtgcataattttcttatgtatgcttaagttttgtaattggatgctatctagtttttcatatctaatagggtgttgtgtcagtttttatgtatagtattgtgctcctatcatgttcacccgtatcatgttcacccgtatgtaagtctgatattctgatctatgaatgtcaaatcaaatttctctatgtcaccaacttggatttgatacccgtatgtaagtcctatcatgtc

SEQ ID NO: 13769 - protein, 96 aa, Glycine max
EALVDLTVIEILSRHASDEVYLGQRDNPNWTDDTKAIQAFKKFGNKLKEIEDKISGRNKNSSLRNRNGPAQMPYTVLLPTSGEGLTFRGIPNSISI

SEQ ID NO: 13770 - protein, 49 aa, Glycine max
MDRRRCPTLCFFLPVGKALLSEEFPTASLSNESVWCVVCGFLSFQRTSH

SEQ ID NO: 13771 - DNA, 937 bp, Glycine max
gacaccacacaccacacacatagtagctattatactctctagagtaattgcggaatctgctagaattttctaataatggcgaaagacgttgagcaggtcacagagcaaggtgaatactccgcgaaggactaccatgaccctcctccggcaccgttgatcgacccagatgagctcacaaagtggtccttgtacagagccgccatagctgagttcatagcaacactcctttttctttacatcaccgtgttgaccattattggctacaagagacagagtgacaccaaaatccccggtaacaccgaatgtgacggcgttggcattttgggcatcgcttgggccttcggtggcatgatcttcatccttgtttactgcactgccggaatctctgggggacacatcaaccctgcggtgacattcgggttgttccttggacgcaaggtgtctttggtgagggcgttgttgtacatgatagcacagtgtgccggtgcaatctgcggtgctgggttggccaaagggttccagaaatcgttctacaacaggtacggaggtggggttaacactgtcagcgatggctacaacaaaggtaccgctttgggtgctgagatcattggtacctttgttcttgtctacaccgttttctccgccactgatcctaagaggaacgctagggactctcatgttcctgtgttagcaccacttcccattgggtttgccgtcttcatggttcacttggctacaatccctgtcactggaaccggcattaaccctgcaaggagtttcggaccagctgtgatcttcaacaacgacaaagcctgggacgaccaatggatttactgggttggaccgtttgttggagctgcggtggctgcaatctaccatcaatacattcttagaggttctgcaatcaaagctcttggatccttcaggagcaacgctt

SEQ ID NO: 13772 - protein, 287 aa, Glycine max
MAKDVEQVTEQGEYSAKDYHDPPPAPLIDPDELTKWSLYRAAIAEFIATLLFLYITVLTIIGYKRQSDTKIPGNTECDGVGILGIAWAFGGMIFILVYCTAGISGGHINPAVTFGLFLGRKVSLVRALLYMIAQCAGAICGAGLAKGFQKSFYNRYGGGVNTVSDGYNKGTALGAEIIGTFVLVYTVFSATDPKRNARDSHVPVLAPLPIGFAVFMVHLATIPVTGTGINPARSFGPAVIFNNDKAWDDQWIYWVGPFVGAAVAAIYHQYILRGSAIKALGSFRSNA

SEQ ID NO: 13773 - protein, 196 aa, Glycine max
MIFILVYCTAGISGGHINPAVTFGLFLGRKVSLVRALLYMIAQCAGAICGAGLAKGFQKSFYNRYGGGVNTVSDGYNKGTALGAEIIGTFVLVYTVFSATDPKRNARDSHVPVLAPLPIGFAVFMVHLATIPVTGTGINPARSFGPAVIFNNDKAWDDQWIYWVGPFVGAAVAAIYHQYILRGSAIKALGSFRSNA

SEQ ID NO: 13774 - protein, 157 aa, Glycine max
MIAQCAGAICGAGLAKGFQKSFYNRYGGGVNTVSDGYNKGTALGAEIIGTFVLVYTVFSATDPKRNARDSHVPVLAPLPIGFAVFMVHLATIPVTGTGINPARSFGPAVIFNNDKAWDDQWIYWVGPFVGAAVAAIYHQYILRGSAIKALGSFRSNA

SEQ ID NO: 13775 - DNA, 811 bp, Glycine max
gaatttctctttgcctttgatctttgtcagctttttcttgcttccgtagttcatatggcgtgtgttcaagtcatcacagtttttctctttgcattggctctagctaaaatttacccctcaacatgtcaagtggtgcagggaaaagtctcctgcgttgactgcactcacaactatgacttatctgatattaaggtttcggtgaggtgtgatggtgtgaaaaaactggctttggctactacagaaaatgatggctccttcaaggttgatcttcccctagaccacacaaaaccttcttcttctgtgaataattgcctagcaaaacttcttggtgggccagttcagctttatgtctcaagggaaaaccaggtatcccaaattatcaagggcaaagatcaaaacagctacaccatctccacttcccttagtttcaggacatcatgccccctaaccacaaaatgcaagggtgggaaacaggttggttcatcgaaaactgtggatctacctctgcctccagagtggggattggcaccaagtagctattatgttcctttcttccccatcattggaataccttgatcatgggctcaagacttcaagtgatttgtaatcacttgattaataatacttgtaggggataatagactgttatactgtcttatatgttacatatgattattatagatatgtgtcatgtgtagtgtgaaagaatgatgccacttatagttgtggcatgtactgtatgatagtacgtgaaggaagtatatttcctggcttgaaaaagaatataaatactctactggtttgtcaactt

SEQ ID NO: 13776 - protein, 191 aa, Glycine max
EFLFAFDLCQLFLASVVHMACVQVITVFLFALALAKIYPSTCQVVQGKVSCVDCTHNYDLSDIKVSVRCDGVKKLALATTENDGSFKVDLPLDHTKPSSSVNNCLAKLLGGPVQLYVSRENQVSQIIKGKDQNSYTISTSLSFRTSCPLTTKCKGGKQVGSSKTVDLPLPPEWGLAPSSYYVPFFPIIGIP

SEQ ID NO: 13777 - protein, 173 aa, Glycine max
MACVQVITVFLFALALAKIYPSTCQVVQGKVSCVDCTHNYDLSDIKVSVRCDGVKKLALATTENDGSFKVDLPLDHTKPSSSVNNCLAKLLGGPVQLYVSRENQVSQIIKGKDQNSYTISTSLSFRTSCPLTTKCKGGKQVGSSKTVDLPLPPEWGLAPSSYYVPFFPIIGIP

SEQ ID NO: 13778 - DNA, 415 bp, Glycine max
acacagctattcctcttaagcttgctactgagtttccacactgcataccttaggtcttccgaattcgaagttaatttgcaagatggctaaggaaaaggctcagatcaacattgtggtggttggtcatgtggaccctgaggaggcaaccaccattaacgagctgaagaagcctgttgtggagaaagaagctccagggcatgccatatgagggcatgcacgtacggcctcggaggggaaccagaaaattatgttaacaaaataatctggaaccctaatgtatcagtgtcatcatcagtgtgtagtttaagctagctttgctatggttacgttctttgagatgagagtcttgatgaacagtaccattctgatgtattgctttccttgaaagttaatgcatgcttcttatcttctgtct

SEQ ID NO: 13779 - protein, 41 aa, Glycine max
MAKEKAQINIVVVGHVDPEEATTINELKKPVVEKEAPGHAI

SEQ ID NO: 13780 - protein, 35 aa, Glycine max
MRACTYGLGGEPENYVNKIIWNPNVSVSSSVCSLS

SEQ ID NO: 13781 - DNA, 1992 bp, Glycine max
tttttgacagggttgaccagtagggaagttaataatccacagttccattttctgaaaccgacccacagcatgtttacgttttttacttccctcgcggatgcctattcgaaggttttgatgccaccaaagggtttgatggagaagctaaagaatagcgtgtctgatatgactactgtccttgaaaggtgtgtgaataggctggagtgggatcgttctcaagagcaagctaggcaaaaggctgaggatgagatagagcaggaaagaatacaaatggctatgattgattggcatgattttgtggtggttgaaacaatagattttgctgatgatgaggaccaagagttacctcctccaatgactattgaggaggttataaggagaagcaaggtgacagccatggaagaagaagatattgttgagcctggaaaggaggtcgaaatggaaatggatgaggaagaggcccaacttgttgaggagggcatgagagctgctagtttggaagaccgtgatgacaggaagcagaatgaagtcagggttactgaagaccctgaaccaccaatgagaattgttaagaactggaagagaccagaggagaggatttctgcagaaagagattccaccaagtttgttgtttctcctatcactggtgagttaattcctattagcgagatgtcagaacatatgcggatttctctcattgatcctaagtacaaagaacaaaaagaaagaatgtttgccaaaattcgagagacaactttggctgcggatgatgaaatttcaagaaacattgttggacttgctcggacccgtcctgatatatttggtactacggaagaagaggtctccaatgctgttaaggcagaaattgagaagataaatgatgagcaaccaaagcaggttatatgggatggtcacactggtagcattgggcgtacggcaaaccaagccatgtcccaaaatattggaaacgaggatcaaaatgatgcttctaataatgaagccaggaactttctgggtcctgctgcacctcctccaagacctggtatgccttcagttcgtcctcttccaccaccacctggactggcattgaatcttccccgtgttcctgtccaatattctgctccccatagtggtgcccttccaatgcctccaccaagacccatgatgccatctattcggcctgctcctcctcctccaatgccgatgaatactggacagcagtcagttatggctggccaaccacccccaatgcatccatcaattcctatgaataaccaaggaattcccatacccccacctccgggatctcacttcactcatgttccagttccacgaccttttgttcctctttctgttccgcaatcagtcatgcctatgatgcatccaccacctttgcctcaaggagtgccaccaccactgccaccagaggaggctcctcccccactcccagaagaaccagaaccaaagaggcagaaacttgatgattctgctctgatccctgaagatcaatttctggctcaacatcctgggcctgttcgcatcagtgtatctgttcctaatgttgatgaaggaaatctcaagggacaagttctggaaattacagtgcaatctttgtctgaaactgttggtagtctgaaggaaaaaattgctggggagatccagctccctgctaataagcagaaattgagtggaaagcctggctttctcaaggataatatgtcactcgcccattacaatgttggtggaggtgaaacacttaccctctctttaagagagcgtggtggtagaaagagatgagcatattgctttcatttccgttcaagaaggttgttgtaatctttgccttattacaaggcatatagtattgatagctacatgatgttatttcctgaattttatgtgagtacattagatttattgtattgtgagacatcttgaggtatttactgctgtcatgaagactgatgttaattctggaatacagattttggc

SEQ ID NO: 13782 - protein, 598 aa, Glycine max
FLTGLTSREVNNPQFHFLKPTHSMFTFFTSLADAYSKVLMPPKGLMEKLKNSVSDMTTVLERCVNRLEWDRSQEQARQKAEDEIEQERIQMAMIDWHDFVVVETIDFADDEDQELPPPMTIEEVIRRSKVTAMEEEDIVEPGKEVEMEMDEEEAQLVEEGMRAASLEDRDDRKQNEVRVTEDPEPPMRIVKNWKRPEERISAERDSTKFVVSPITGELIPISEMSEHMRISLIDPKYKEQKERMFAKIRETTLAADDEISRNIVGLARTRPDIFGTTEEEVSNAVKAEIEKINDEQPKQVIWDGHTGSIGRTANQAMSQNIGNEDQNDASNNEARNFLGPAAPPPRPGMPSVRPLPPPPGLALNLPRVPVQYSAPHSGALPMPPPRPMMPSIRPAPPPPMPMNTGQQSVMAGQPPPMHPSIPMNNQGIPIPPPPGSHFTHVPVPRPFVPLSVPQSVMPMMHPPPLPQGVPPPLPPEEAPPPLPEEPEPKRQKLDDSALIPEDQFLAQHPGPVRISVSVPNVDEGNLKGQVLEITVQSLSETVGSLKEKIAGEIQLPANKQKLSGKPGFLKDNMSLAHYNVGGGETLTLSLRERGGRKR

SEQ ID NO: 13783 - protein, 575 aa, Glycine max
MFTFFTSLADAYSKVLMPPKGLMEKLKNSVSDMTTVLERCVNRLEWDRSQEQARQKAEDEIEQERIQMAMIDWHDFVVVETIDFADDEDQELPPPMTIEEVIRRSKVTAMEEEDIVEPGKEVEMEMDEEEAQLVEEGMRAASLEDRDDRKQNEVRVTEDPEPPMRIVKNWKRPEERISAERDSTKFVVSPITGELIPISEMSEHMRISLIDPKYKEQKERMFAKIRETTLAADDEISRNIVGLARTRPDIFGTTEEEVSNAVKAEIEKINDEQPKQVIWDGHTGSIGRTANQAMSQNIGNEDQNDASNNEARNFLGPAAPPPRPGMPSVRPLPPPPGLALNLPRVPVQYSAPHSGALPMPPPRPMMPSIRPAPPPPMPMNTGQQSVMAGQPPPMHPSIPMNNQGIPIPPPPGSHFTHVPVPRPFVPLSVPQSVMPMMHPPPLPQGVPPPLPPEEAPPPLPEEPEPKRQKLDDSALIPEDQFLAQHPGPVRISVSVPNVDEGNLKGQVLEITVQSLSETVGSLKEKIAGEIQLPANKQKLSGKPGFLKDNMSLAHYNVGGGETLTLSLRERGGRKR

SEQ ID NO: 13784 - protein, 559 aa, Glycine max
MPPKGLMEKLKNSVSDMTTVLERCVNRLEWDRSQEQARQKAEDEIEQERIQMAMIDWHDFVVVETIDFADDEDQELPPPMTIEEVIRRSKVTAMEEEDIVEPGKEVEMEMDEEEAQLVEEGMRAASLEDRDDRKQNEVRVTEDPEPPMRIVKNWKRPEERISAERDSTKFVVSPITGELIPISEMSEHMRISLIDPKYKEQKERMFAKIRETTLAADDEISRNIVGLARTRPDIFGTTEEEVSNAVKAEIEKINDEQPKQVIWDGHTGSIGRTANQAMSQNIGNEDQNDASNNEARNFLGPAAPPPRPGMPSVRPLPPPPGLALNLPRVPVQYSAPHSGALPMPPPRPMMPSIRPAPPPPMPMNTGQQSVMAGQPPPMHPSIPMNNQGIPIPPPPGSHFTHVPVPRPFVPLSVPQSVMPMMHPPPLPQGVPPPLPPEEAPPPLPEEPEPKRQKLDDSALIPEDQFLAQHPGPVRISVSVPNVDEGNLKGQVLEITVQSLSETVGSLKEKIAGEIQLPANKQKLSGKPGFLKDNMSLAHYNVGGGETLTLSLRERGGRKR

SEQ ID NO: 13785 - DNA, 1618 bp, Glycine max
  misc_feature (1377)..(1377): n is a, c, g, or t
  misc_feature (1433)..(1433): n is a, c, g, or t
  misc_feature (1438)..(1438): n is a, c, g, or t
  misc_feature (1512)..(1512): n is a, c, g, or t
  misc_feature (1610)..(1610): n is a, c, g, or t
acatacacctcaaacaaataccaaagtgccttttcttagaatggagctcttgtggaaagatcacatgagggtacaagtaattagattggtttgtgctgtccttttggtgacactgctgagctcagaggtagctgagagcagaaaagtcaaaactgttggtacttcctttaagtacgaagctataaattgcaggactcatagtgcttcattgactgattttggtggtgttggagatggaaagacatcaaacacaaaggcatttcagtctgcaatcagtcatctgagtcagtatgcttcaaaaggaggggctcaactttatgttcctgctgggaagtggcttacagggagttttagtctaatcagccacttcactttatatctaaacaaagatgctgttcttcttgcatctcaggatattagtgagtggcctgcgatcgaaccactcccatcatacggtagaggaagagacgcaccagcaggaaggtacactagcctcatatttggaacaaacctcactgatgttattgtgacaggtggcaatggcaccatagatggtcaaggagcattttggtggcagaaatttcacaagaaaaagttgaagtacactcgcccttacttgattgaattaatgttctcagaccagattcaaatctccaatttaaccctcctaaattctccatcatggaatgttcatcctgtttatagcagcaatattattattaagggcctcaccatcatcgctcctgtcccatctccaaacacagatggcattaatccagattcttgcacaaataccagaattgaagactgctacatagtttctggggatgactgtgtggcagtgaaaagtgggtgggatgagtatggcataaagtttggatggcccacaaaacaactagtgatcagaaggctgacatgcatttctccacaaagtgcagccattgccttggggagtgagatgtcaggtggaatccaagatgtcagagctgaggacatcacagccatccacacagaatcaggagtcagaatcaagacagcagtaggaagaggagggtatgtgaaggacatatatgtcaagagaatgaccatgcacaccatgaaatgggtattttggatgactggtaactatggttcacatgctgatagccactatgatcctaaagccttgcctgagatcaatggcatcaactatagagatgtggtggctgacaatgtcaccatggctgcaaggttggaaggaatctccaatgatcccttcactggaatctgcattgccaatgtgacaattggcatggcagccaaggccaagaaacagccttggacatgcactgatattgaagggatcacaagtggtgtgactcctaagccatgcaattntttgcctgatcaagggcctgagaaaatcaaagcatgtgattttccccaagggaatntaccnattgatatgttggagctcaagaagtgtgcttacattatgaagcatgcatgactatacttgttttaagatgtgtnttctagttatttatttaaggccagtctttcccatttcatccagaaatcattgctcaagatgagaaatgaatgttcggtctcgtaatgaaacaattttnttatcgct

SEQ ID NO: 13786 - protein, 495 aa, Glycine max
  misc_feature (459)..(459): Xaa can be any naturally occurring amino acid
  misc_feature (478)..(479): Xaa can be any naturally occurring amino acid
HTPQTNTKVPFLRMELLWKDHMRVQVIRLVCAVLLVTLLSSEVAESRKVKTVGTSFKYEAINCRTHSASLTDFGGVGDGKTSNTKAFQSAISHLSQYASKGGAQLYVPAGKWLTGSFSLISHFTLYLNKDAVLLASQDISEWPAIEPLPSYGRGRDAPAGRYTSLIFGTNLTDVIVTGGNGTIDGQGAFWWQKFHKKKLKYTRPYLIELMFSDQIQISNLTLLNSPSWNVHPVYSSNIIIKGLTIIAPVPSPNTDGINPDSCTNTRIEDCYIVSGDDCVAVKSGWDEYGIKFGWPTKQLVIRRLTCISPQSAAIALGSEMSGGIQDVRAEDITAIHTESGVRIKTAVGRGGYVKDIYVKRMTMHTMKWVFWMTGNYGSHADSHYDPKALPEINGINYRDVVADNVTMAARLEGISNDPFTGICIANVTIGMAAKAKKQPWTCTDIEGITSGVTPKPCNXLPDQGPEKIKACDFPQGNXXIDMLELKKCAYIMKHA

SEQ ID NO: 13787 - protein, 482 aa, Glycine max
  misc_feature (446)..(446): Xaa can be any naturally occurring amino acid
  misc_feature (465)..(466): Xaa can be any naturally occurring amino acid
MELLWKDHMRVQVIRLVCAVLLVTLLSSEVAESRKVKTVGTSFKYEAINCRTHSASLTDFGGVGDGKTSNTKAFQSAISHLSQYASKGGAQLYVPAGKWLTGSFSLISHFTLYLNKDAVLLASQDISEWPAIEPLPSYGRGRDAPAGRYTSLIFGTNLTDVIVTGGNGTIDGQGAFWWQKFHKKKLKYTRPYLIELMFSDQIQISNLTLLNSPSWNVHPVYSSNIIIKGLTIIAPVPSPNTDGINPDSCTNTRIEDCYIVSGDDCVAVKSGWDEYGIKFGWPTKQLVIRRLTCISPQSAAIALGSEMSGGIQDVRAEDITAIHTESGVRIKTAVGRGGYVKDIYVKRMTMHTMKWVFWMTGNYGSHADSHYDPKALPEINGINYRDVVADNVTMAARLEGISNDPFTGICIANVTIGMAAKAKKQPWTCTDIEGITSGVTPKPCNXLPDQGPEKIKACDFPQGNXXIDMLELKKCAYIMKHA

SEQ ID NO: 13788 - protein, 474 aa, Glycine max
  misc_feature (438)..(438): Xaa can be any naturally occurring amino acid
  misc_feature (457)..(458): Xaa can be any naturally occurring amino acid
MRVQVIRLVCAVLLVTLLSSEVAESRKVKTVGTSFKYEAINCRTHSASLTDFGGVGDGKTSNTKAFQSAISHLSQYASKGGAQLYVPAGKWLTGSFSLISHFTLYLNKDAVLLASQDISEWPAIEPLPSYGRGRDAPAGRYTSLIFGTNLTDVIVTGGNGTIDGQGAFWWQKFHKKKLKYTRPYLIELMFSDQIQISNLTLLNSPSWNVHPVYSSNIIIKGLTIIAPVPSPNTDGINPDSCTNTRIEDCYIVSGDDCVAVKSGWDEYGIKFGWPTKQLVIRRLTCISPQSAAIALGSEMSGGIQDVRAEDITAIHTESGVRIKTAVGRGGYVKDIYVKRMTMHTMKWVFWMTGNYGSHADSHYDPKALPEINGINYRDVVADNVTMAARLEGISNDPFTGICIANVTIGMAAKAKKQPWTCTDIEGITSGVTPKPCNXLPDQGPEKIKACDFPQGNXXIDMLELKKCAYIMKHA

SEQ ID NO: 13789 - DNA, 578 bp, Glycine max
aaagcttcatctgatatggaacaaatacrrtctaaagtttcatcgcaaaccytggctgttgaaaattttcttgccactgctgttcatgaagccaaggatgtaatatgcawcatscagaattctattgacgagcaaaagcagctgctagcattctcccttcarcawcaagaagaaggatttcaacaaagtctgacttcagcacgagtagtttcagaggcagccgtaaacttctttgatgacattcatctccgttcttctagagtcatgaaaattcttgaagaaagtcaaaatgagaggttccagcwgttaactaactttgagaagaagttcaaggaagaggttgagatagaggaggggcaggccttagagaaaattgcagcaattctggcagccttgacatcaaagagaactgcgatggtctcaggggcatcaagacatatgcaggacactagcatgcaacagtctaaaagattgcggctagagatgctcaacatgcaggaagtttcaaaagatggymctaaggaagttaatgagtmtgtagagaatgtgaaaaagtcattatgtggaacaaatattct

SEQ ID NO: 13790 - protein, 192 aa, Glycine max
  misc_feature (10)..(10): Xaa can be any naturally occurring amino acid
  misc_feature (18)..(18): Xaa can be any naturally occurring amino acid
  misc_feature (37)..(38): Xaa can be any naturally occurring amino acid
  misc_feature (54)..(55): Xaa can be any naturally occurring amino acid
  misc_feature (102)..(102): Xaa can be any naturally occurring amino acid
  misc_feature (172)..(173): Xaa can be any naturally occurring amino acid
  misc_feature (179)..(179): Xaa can be any naturally occurring amino acid
KASSDMEQIXSKVSSQTXAVENFLATAVHEAKDVICXXQNSIDEQKQLLAFSLXXQEEGFQQSLTSARVVSEAAVNFFDDIHLRSSRVMKILEESQNERFQXLTNFEKKFKEEVEIEEGQALEKIAAILAALTSKRTAMVSGASRHMQDTSMQQSKRLRLEMLNMQEVSKDXXKEVNEXVENVKKSLCGTNI

SEQ ID NO: 13791 - protein, 187 aa, Glycine max
  misc_feature (5)..(5): Xaa can be any naturally occurring amino acid
  misc_feature (13)..(13): Xaa can be any naturally occurring amino acid
  misc_feature (32)..(33): Xaa can be any naturally occurring amino acid
  misc_feature (49)..(50): Xaa can be any naturally occurring amino acid
  misc_feature (97)..(97): Xaa can be any naturally occurring amino acid
  misc_feature (167)..(168): Xaa can be any naturally occurring amino acid
  misc_feature (174)..(174): Xaa can be any naturally occurring amino acid
MEQIXSKVSSQTXAVENFLATAVHEAKDVICXXQNSIDEQKQLLAFSLXXQEEGFQQSLTSARVVSEAAVNFFDDIHLRSSRVMKILEESQNERFQXLTNFEKKFKEEVEIEEGQALEKIAAILAALTSKRTAMVSGASRHMQDTSMQQSKRLRLEMLNMQEVSKDXXKEVNEXVENVKKSLCGTNI

SEQ ID NO: 13792 - protein, 104 aa, Glycine max
  misc_feature (14)..(14): Xaa can be any naturally occurring amino acid
  misc_feature (84)..(85): Xaa can be any naturally occurring amino acid
  misc_feature (91)..(91): Xaa can be any naturally occurring amino acid
MKILEESQNERFQXLTNFEKKFKEEVEIEEGQALEKIAAILAALTSKRTAMVSGASRHMQDTSMQQSKRLRLEMLNMQEVSKDXXKEVNEXVENVKKSLCGTNI

SEQ ID NO: 13793 - DNA, 561 bp, Glycine max
ttatttttttcacatgagtttggtaattagccttcttcagtctccgttatttttgttttataaacctgctgtcttaggtaagcttagctactggtttcttgtttcttggtggtggaatgagaacattttcaacaaacaaccattccattgctgctttgctaattactctatatccacgcttgccgactggtccaaatgataacagatgccaccttcaggcatttcgccatctctatgtccttgcaacagaggcgcgatggattcagacagttgatgttgacacgggtctgcctgtttatgctcctcttgaggtcacagtcagagaaactgagcattatgcagaatccagcttttgcgaggtcaccccttgccttctgccagaacgatcaattttgaaaagaatacgtgtttgtgggcctcgctactggcctcaagtaatagactttaccccagaagataaaccttggtggaattttggagacaagaataatccatttaattctggtattcttttcatcaaaaagaaaggttggagcttgttcatatgttgatgatcccatt

SEQ ID NO: 13794 - protein, 144 aa, Glycine max
MRTFSTNNHSIAALLITLYPRLPTGPNDNRCHLQAFRHLYVLATEARWIQTVDVDTGLPVYAPLEVTVRETEHYAESSFCEVTPCLLPERSILKRIRVCGPRYWPQVIDFTPEDKPWWNFGDKNNPFNSGILFIKKKGWSLFIC

SEQ ID NO: 13795 - DNA, 1856 bp, Glycine max
cagctacgtaggccccccccccttcatattaaagcagttaaataagtatcaggaatttgctgttctcttaggcacagctacagctaggtaaatggttcagacaaggaggcagagaatccttcttatgtctgatcttccaagaaaacagattgatagagtagcagacaatattgcaaaagatttaaatcatattgatgtccttacaaagaggtatcaatgctggttgcagccttaatatgaccaaatcatttgaaagagcagcagctaacagggcacgtgcaataattatactgccaacaaaaggagatcggtatgaagttgacacagatgcatttctttctgttttagcccttcaaccaattccaaacatggattctgtccccaccattgttgaggtttcaagttccaagacatgtgagttgttgaagtcaatctcagcattgaaagtagagccagtagaaaatgtggcatccaaactatttgttcaatgctctcggcagaagggacttataaagatctacaggcacttgctaaattatcgaaaaaatgtattcaatctttgcagcttgcctaatctagaaggactgacatatagacaaataagacatagatttccagaagctgttgtatgtggtctttaccggagtgggaaaatatacttccacccaaacgatggtgaaattccgcagcaaaccgacaaagtattgtttattggatcccttcgggatacaaatactaaaaagccagaagtaatcctagatgggaaagaaggaatgtatgaaattcataatgaggaaatacttgaaaaggatgtggaacatgccattgaattgagtaaagtaaggcttgctaatattgtaaaacggcctaatagatcaggttccaaggcatcagatgggaatcttggaccgaaagaatgcattcttttacttggatggcgccctgaggctgtagaaatgattcaagagtatgataactatcttggtcctggaagtgttttggaagtgttatcagacacaccattagatgacaggatcaataaggcaagcaacatccatggtcataacaaactcaggaatgtccgagtttcacatcggattggaaatcccatggactatgacaccttaaaggaaaccattttgcatattcagaattctttgaagaatgaggatgttcctatgtcaattgctgtcatatctgacagagactggcttcttggagatccatctaaggcagacaggctgtctgcttatgctctcctccttgctgaaaatatctgcaacaaactcggagttaaggtgcaaaatctagttgcagaaattgttgattcaaaattggggaaacaaattagtagaatcaggccatcagtgacctccattgcagcagaggaaataatgagcctcgtaacagctcaagtggccgagaacagtgaactgaatgaagtttggaaagacttactagatgcagagggagatgaaatatatattaaggatattggcctatacatgaaagaaggagagaatccatcattttctgagctttctgagagagcatatttacggagagaagtagctataggatatgtgaagaacaagaagaatgtaatcaaccctgttgccaagtctgagccactctctcttgaaatgactgactccttgatagtcatatctgagctggaaggagagcaacccgttgttttgtaatgctgaagctttaatcttgtcaagaatttttttggaaaattctaaccccaaaaatttggggccattgattttgatgattgatgattaggatgattcaatatcattgtgttactctttcatcattcgaaataaattgtgtatggtttctctgtc

SEQ ID NO: 13796 - protein, 502 aa, Glycine max
MSLQRGINAGCSLNMTKSFERAAANRARAIIILPTKGDRYEVDTDAFLSVLALQPIPNMDSVPTIVEVSSSKTCELLKSISALKVEPVENVASKLFVQCSRQKGLIKIYRHLLNYRKNVFNLCSLPNLEGLTYRQIRHRFPEAVVCGLYRSGKIYFHPNDGEIPQQTDKVLFIGSLRDTNTKKPEVILDGKEGMYEIHNEEILEKDVEHAIELSKVRLANIVKRPNRSGSKASDGNLGPKECILLLGWRPEAVEMIQEYDNYLGPGSVLEVLSDTPLDDRINKASNIHGHNKLRNVRVSHRIGNPMDYDTLKETILHIQNSLKNEDVPMSIAVISDRDWLLGDPSKADRLSAYALLLAENICNKLGVKVQNLVAEIVDSKLGKQISRIRPSVTSIAAEEIMSLVTAQVAENSELNEVWKDLLDAEGDEIYIKDIGLYMKEGENPSFSELSERAYLRREVAIGYVKNKKNVINPVAKSEPLSLEMTDSLIVISELEGEQPVVL

SEQ ID NO: 13797 - protein, 488 aa, Glycine max
MTKSFERAAANRARAIIILPTKGDRYEVDTDAFLSVLALQPIPNMDSVPTIVEVSSSKTCELLKSISALKVEPVENVASKLFVQCSRQKGLIKIYRHLLNYRKNVFNLCSLPNLEGLTYRQIRHRFPEAVVCGLYRSGKIYFHPNDGEIPQQTDKVLFIGSLRDTNTKKPEVILDGKEGMYEIHNEEILEKDVEHAIELSKVRLANIVKRPNRSGSKASDGNLGPKECILLLGWRPEAVEMIQEYDNYLGPGSVLEVLSDTPLDDRINKASNIHGHNKLRNVRVSHRIGNPMDYDTLKETILHIQNSLKNEDVPMSIAVISDRDWLLGDPSKADRLSAYALLLAENICNKLGVKVQNLVAEIVDSKLGKQISRIRPSVTSIAAEEIMSLVTAQVAENSELNEVWKDLLDAEGDEIYIKDIGLYMKEGENPSFSELSERAYLRREVAIGYVKNKKNVINPVAKSEPLSLEMTDSLIVISELEGEQPVVL

SEQ ID NO: 13798 - protein, 444 aa, Glycine max
MDSVPTIVEVSSSKTCELLKSISALKVEPVENVASKLFVQCSRQKGLIKIYRHLLNYRKNVFNLCSLPNLEGLTYRQIRHRFPEAVVCGLYRSGKIYFHPNDGEIPQQTDKVLFIGSLRDTNTKKPEVILDGKEGMYEIHNEEILEKDVEHAIELSKVRLANIVKRPNRSGSKASDGNLGPKECILLLGWRPEAVEMIQEYDNYLGPGSVLEVLSDTPLDDRINKASNIHGHNKLRNVRVSHRIGNPMDYDTLKETILHIQNSLKNEDVPMSIAVISDRDWLLGDPSKADRLSAYALLLAENICNKLGVKVQNLVAEIVDSKLGKQISRIRPSVTSIAAEEIMSLVTAQVAENSELNEVWKDLLDAEGDEIYIKDIGLYMKEGENPSFSELSERAYLRREVAIGYVKNKKNVINPVAKSEPLSLEMTDSLIVISELEGEQPVVL

SEQ ID NO: 13799 - DNA, 494 bp, Glycine max
  misc_feature (370)..(370): n is a, c, g, or t
  misc_feature (383)..(383): n is a, c, g, or t
  misc_feature (425)..(425): n is a, c, g, or t
ggcatgagactgtgagccttcatggtgctggaaagcatctagctaagggtgaggcttcccgcatattgcatcatcttgttgttgaggattttcttggggaggaagtaaagaaaagtgatttttatggatctgtatcatcaatattgaaggtaaatgagcccaaggtccgtaatctgtttgcaggccagagaattatattgagattcccatcctctgtaaaggcatcaaaaccagggaaatctgatgcaactccagctaagggttctctgacctctgaaaagctgaatgttatgcaaattgaccctccttcacctcaaactgaagtggatcatattctttcagctaagttatacaatgccctgcggttgtngaggaaaagtctngttacagaagctggagagggtgtcatgcctcaccacatattnggtaatgctacattgcttctgataagcaaaagagtgccgagaacaaaagaagaactccttgatatcaat

SEQ ID NO: 13800 - protein, 164 aa, Glycine max
  misc_feature (123)..(123): Xaa can be any naturally occurring amino acid
  misc_feature (127)..(127): Xaa can be any naturally occurring amino acid
  misc_feature (141)..(141): Xaa can be any naturally occurring amino acid
HETVSLHGAGKHLAKGEASRILHHLVVEDFLGEEVKKSDFYGSVSSILKVNEPKVRNLFAGQRIILRFPSSVKASKPGKSDATPAKGSLTSEKLNVMQIDPPSPQTEVDHILSAKLYNALRLXRKSXVTEAGEGVMPHHIXGNATLLLISKRVPRTKEELLDIN

SEQ ID NO: 13801 - DNA, 786 bp, Glycine max
gctacgtaggccccccccccttttcgaattcaatgtaacaagtgggctgtgatagtgcgtttactgttgggagaaatacctgagcggactgtcttcatgcagaaaggaatggagaaagctctaaggccttactttgagcttacaaatgctgtgcggattggagacttggaactgtttaggaatattgcggacaagtttgccactacctttaatgcagacagaacccataatttgattgttcgtttgcggcataatgtcatcaggactggtttacgcaacatcagcatctcctattctcgcatctctctagctgatgttgctaaaaaactgaggctgaactctgcaagtcctgttgcagatgctgagagcattgtatcaaaggctattcgtgatggtgcaattgatgctacattggatcatgccaatggttggatggtgtccaaagaaactggagatatttactccacaaatgagcctcagttagcctttaattctcggattgctttctgtcttaacatgcacaatgaggcggttcgagcacttcgatttccaccaaacacacacaaagagaaggaaagtgctgaaaagagaagagagagacaacagcaagagcaagagctggctaagcatattgcagaggaggatgacgatgatttctgataattgttttttttcaccctatgaattgctatctggataccttcatttccaacgtttgctcatcttttccttttgaagaactttcattatcatttcctttttcaaaaagtgaatttttcatttcct

SEQ ID NO: 13802 - protein, 187 aa, Glycine max
MQKGMEKALRPYFELTNAVRIGDLELFRNIADKFATTFNADRTHNLIVRLRHNVIRTGLRNISISYSRISLADVAKKLRLNSASPVADAESIVSKAIRDGAIDATLDHANGWMVSKETGDIYSTNEPQLAFNSRIAFCLNMHNEAVRALRFPPNTHKEKESAEKRRERQQQEQELAKHIAEEDDDDF

SEQ ID NO: 13803 - protein, 183 aa, Glycine max
MEKALRPYFELTNAVRIGDLELFRNIADKFATTFNADRTHNLIVRLRHNVIRTGLRNISISYSRISLADVAKKLRLNSASPVADAESIVSKAIRDGAIDATLDHANGWMVSKETGDIYSTNEPQLAFNSRIAFCLNMHNEAVRALRFPPNTHKEKESAEKRRERQQQEQELAKHIAEEDDDDF

SEQ ID NO: 13804 - DNA, 636 bp, Glycine max
  misc_feature (32)..(32): n is a, c, g, or t
tcatcttctgatgaatatgaatgaaaagtacncctgcattytttgaaagcmcgcttgggtgatggacttcaaatgtcatttatgtttatgcaatctatttgtggcagttctgaaaatgttgatcataasattcaatctaasacctctacttctggaaaagggaagcccgaggctggctcccttgctcaagctaaacttggggtttctcgaatttacaagctcatccgakggaaccgggtgtcaaggaacaaatttttgwmctygatcgtgcggaaatttgataatscaagatggaataaattactaatasctttcttaatatactgcacggaagtcctagcattgstgccattmatttcacctgacgagcccctttatttaatctatgctatcaatygagtarttcaagtaagggctggaccactaraagcgaactttaargcctgkacttcaagcatttcacgtcattgcacacctyatgggaatggaatgtatcaacaggggaccgatgagcctactgytgcaagccaagtaatgccattggatttgaatggaacatttcagcaaaatgtaratcttcasccaaatatgaatgacatgagaaccctggatttaaatggatcaaatcatcaactg

SEQ ID NO: 13805 - protein, 188 aa, Glycine max
  misc_feature (19)..(19): Xaa can be any naturally occurring amino acid
  misc_feature (23)..(23): Xaa can be any naturally occurring amino acid
  misc_feature (53)..(53): Xaa can be any naturally occurring amino acid
  misc_feature (63)..(64): Xaa can be any naturally occurring amino acid
  misc_feature (72)..(72): Xaa can be any naturally occurring amino acid
  misc_feature (80)..(80): Xaa can be any naturally occurring amino acid
  misc_feature (92)..(92): Xaa can be any naturally occurring amino acid
  misc_feature (94)..(94): Xaa can be any naturally occurring amino acid
  misc_feature (109)..(109): Xaa can be any naturally occurring amino acid
  misc_feature (111)..(111): Xaa can be any naturally occurring amino acid
  misc_feature (119)..(119): Xaa can be any naturally occurring amino acid
  misc_feature (123)..(123): Xaa can be any naturally occurring amino acid
  misc_feature (125)..(125): Xaa can be any naturally occurring amino acid
  misc_feature (136)..(136): Xaa can be any naturally occurring amino acid
  misc_feature (150)..(150): Xaa can be any naturally occurring amino acid
  misc_feature (168)..(168): Xaa can be any naturally occurring amino acid
  misc_feature (170)..(170): Xaa can be any naturally occurring amino acid
MSFMFMQSICGSSENVDHXIQSXTSTSGKGKPEAGSLAQAKLGVSRIYKLIRXNRVSRNKFLXXIVRKFDNXRWNKLLIXFLIYCTEVLALXPXISPDEPLYLIYAINXVXQVRAGPLXANFXAXTSSISRHCTPXGNGMYQQGTDEPTXASQVMPLDLNGTFQQNVXLXPNMNDMRTLDLNGSNHQL

SEQ ID NO: 13806 - protein, 185 aa, Glycine max
  misc_feature (16)..(16): Xaa can be any naturally occurring amino acid
  misc_feature (20)..(20): Xaa can be any naturally occurring amino acid
  misc_feature (50)..(50): Xaa can be any naturally occurring amino acid
  misc_feature (60)..(61): Xaa can be any naturally occurring amino acid
  misc_feature (69)..(69): Xaa can be any naturally occurring amino acid
  misc_feature (77)..(77): Xaa can be any naturally occurring amino acid
  misc_feature (89)..(89): Xaa can be any naturally occurring amino acid
  misc_feature (91)..(91): Xaa can be any naturally occurring amino acid
  misc_feature (106)..(106): Xaa can be any naturally occurring amino acid
  misc_feature (108)..(108): Xaa can be any naturally occurring amino acid
  misc_feature (116)..(116): Xaa can be any naturally occurring amino acid
  misc_feature (120)..(120): Xaa can be any naturally occurring amino acid
  misc_feature (122)..(122): Xaa can be any naturally occurring amino acid
  misc_feature (133)..(133): Xaa can be any naturally occurring amino acid
  misc_feature (147)..(147): Xaa can be any naturally occurring amino acid
  misc_feature (165)..(165): Xaa can be any naturally occurring amino acid
  misc_feature (167)..(167): Xaa can be any naturally occurring amino acid
MFMQSICGSSENVDHXIQSXTSTSGKGKPEAGSLAQAKLGVSRIYKLIRXNRVSRNKFLXXIVRKFDNXRWNKLLIXFLIYCTEVLALXPXISPDEPLYLIYAINXVXQVRAGPLXANFXAXTSSISRHCTPXGNGMYQQGTDEPTXASQVMPLDLNGTFQQNVXLXPNMNDMRTLDLNGSNHQL

SEQ ID NO: 13807 - protein, 183 aa, Glycine max
  misc_feature (14)..(14): Xaa can be any naturally occurring amino acid
  misc_feature (18)..(18): Xaa can be any naturally occurring amino acid
  misc_feature (48)..(48): Xaa can be any naturally occurring amino acid
  misc_feature (58)..(59): Xaa can be any naturally occurring amino acid
  misc_feature (67)..(67): Xaa can be any naturally occurring amino acid
  misc_feature (75)..(75): Xaa can be any naturally occurring amino acid
  misc_feature (87)..(87): Xaa can be any naturally occurring amino acid
  misc_feature (89)..(89): Xaa can be any naturally occurring amino acid
  misc_feature (104)..(104): Xaa can be any naturally occurring amino acid
  misc_feature (106)..(106): Xaa can be any naturally occurring amino acid
  misc_feature (114)..(114): Xaa can be any naturally occurring amino acid
  misc_feature (118)..(118): Xaa can be any naturally occurring amino acid
  misc_feature (120)..(120): Xaa can be any naturally occurring amino acid
  misc_feature (131)..(131): Xaa can be any naturally occurring amino acid
  misc_feature (145)..(145): Xaa can be any naturally occurring amino acid
  misc_feature (163)..(163): Xaa can be any naturally occurring amino acid
  misc_feature (165)..(165): Xaa can be any naturally occurring amino acid
MQSICGSSENVDHXIQSXTSTSGKGKPEAGSLAQAKLGVSRIYKLIRXNRVSRNKFLXXIVRKFDNXRWNKLLIXFLIYCTEVLALXPXISPDEPLYLIYAINXVXQVRAGPLXANFXAXTSSISRHCTPXGNGMYQQGTDEPTXASQVMPLDLNGTFQQNVXLXPNMNDMRTLDLNGSNHQL

SEQ ID NO: 13808 - DNA, 1080 bp, Glycine max
cagctacgtaggccccccccccaattgactagagagggaatagtgctgcacaatgggtctgaataaagctgtaaaattgcctgcttttttccctatggtggttgagctatcatagacttgggtttcacaaaaacaaaacccatggaaaaggaaatggaatcttggacaattcatgggtcttcagcataatatgtaggtacatttgtttgtgttaccatgccgatcatttaaattttgcatgcagtacacatcacaagttgcaagactttttaattgtactataaaataaaacttgaatccaaggttttaaatattggactgccgtggcaaacactgtcccaatttgcgttagaaaaccttgatgtcacggtccacgttaagatgcaaactgtttttttaaaaccttatttaaatcaaattcaacacaattgatttgattataatgttgtatatgtttttttttatgtgatcagatttttggtggatgaaacgccaataagggtgcacacgaacatggagcacaagggaattccatttcctaaggaccaacccatgggtgtgtacagttcattatggaatgctgatgattgggccacgcagggtggtcgtgtgaaaacagattggagccacgcacccttcattgccacatacaagaacttcgagataaatgcgtgtgagtgtcccgtgtcagtggctgcaatggataatgctaagaagtgcaccagcagtgaggggaataagtattggtgggatgagcctaatttggctgaactcaacttgcaccagagccaccagcttatgtgggttagggcaaggcacattttctatgactattgcactgacactgctaggttcccagtcacgcctgctgagtgtgtccatcaccgtcacacctgagcagacttagtgattagtctaaactttattttgttataacttatgggaagttatgaaaataggattggggcataagaaaaaaatggtgggtggtgaacaaagttgtggaacatgtccttcatgtttctgattgtaatatatattgccacaacattaatgtgaattgttggtttttcttcttgt

SEQ ID NO: 13809 - protein, 127 aa, Glycine max
MEHKGIPFPKDQPMGVYSSLWNADDWATQGGRVKTDWSHAPFIATYKNFEINACECPVSVAAMDNAKKCTSSEGNKYWWDEPNLAELNLHQSHQLMWVRARHIFYDYCTDTARFPVTPAECVHHRHT

SEQ ID NO: 13810 - protein, 114 aa, Glycine max
MGVYSSLWNADDWATQGGRVKTDWSHAPFIATYKNFEINACECPVSVAAMDNAKKCTSSEGNKYWWDEPNLAELNLHQSHQLMWVRARHIFYDYCTDTARFPVTPAECVHHRHT

SEQ ID NO: 13811 - protein, 79 aa, Glycine max
MRVSVPCQWLQWIMLRSAPAVRGISIGGMSLIWLNSTCTRATSLCGLGQGTFSMTIALTLLGSQSRLLSVSITVTPEQT

SEQ ID NO: 13812 - DNA, 530 bp, Glycine max
atcttgaatattgtgttcatcgattacataatgaaaatcctggaattcataacctgctactttctttatatgcaaaacaggaagatgatagttcacttctacgtttcctacaaagcaaatttgggaaaggaccagaaaatggtcctgagttcttctacgatcctaaatacgccttgcgtctttgcctcaaggaaaaacgaatgcgtgcatgtgttcatatatacagtatgatgtcaatgcatgaagaagcagttgctcttgccttacagattgattcagagcttgctatggccgaagctgataaggttgaagatgatgaggatttgagaaagaagctttggctcatgattgccaagcatgttgttgaacaagaaaaaggaactaagagggaaaacataaggaaggcaattgcatttcttaaagaaactgatggcctgctaaagatagaggatatattaccattctttccagattttgccctgattgacgacttcaaggaggctatctgctcatcattggaggattacaat

SEQ ID NO: 13813 - protein, 176 aa, Glycine max
LEYCVHRLHNENPGIHNLLLSLYAKQEDDSSLLRFLQSKFGKGPENGPEFFYDPKYALRLCLKEKRMRACVHIYSMMSMHEEAVALALQIDSELAMAEADKVEDDEDLRKKLWLMIAKHVVEQEKGTKRENIRKAIAFLKETDGLLKIEDILPFFPDFALIDDFKEAICSSLEDYN

SEQ ID NO: 13814 - protein, 110 aa, Glycine max
MRACVHIYSMMSMHEEAVALALQIDSELAMAEADKVEDDEDLRKKLWLMIAKHVVEQEKGTKRENIRKAIAFLKETDGLLKIEDILPFFPDFALIDDFKEAICSSLEDYN

SEQ ID NO: 13815 - protein, 101 aa, Glycine max
MMSMHEEAVALALQIDSELAMAEADKVEDDEDLRKKLWLMIAKHVVEQEKGTKRENIRKAIAFLKETDGLLKIEDILPFFPDFALIDDFKEAICSSLEDYN

SEQ ID NO: 13816 - DNA, 566 bp, Glycine max
atatatggagagaatggagtttcagacagcaataaattatattcagaggaagtgaagaaggataatatcattagccctaaaatgaagaatgtaactgtgaaatggaatccctgttctgagaaagagcatcagttttatatttcagaagctgaactgcaaatgcatcaagctaagacgccattgtggggaaagactgggatatattttcattcagtgggtaaagaggctactttgatgatggatgaagaagctgctctcgaaggggaatttgagatcgaaaagattccaactcgtgtgatacaagctaggtcaaaagacttggttccaatttttgactatattcagacctcaaaatttcaacaaataaggtctgctttgatgactaactaattaacttactaattatctattaggtaggtcaaaagatttaggctttcgacattttgctattaatttttttgtcataacgacattacctcactttcgaaggctagagaataccaaaattgattatgttcatattgcatgtactctttgctgcatgcaaggagacagtttatttatgg

SEQ ID NO: 13817 - protein, 129 aa, Glycine max
IYGENGVSDSNKLYSEEVKKDNIISPKMKNVTVKWNPCSEKEHQFYISEAELQMHQAKTPLWGKTGIYFHSVGKEATLMMDEEAALEGEFEIEKIPTRVIQARSKDLVPIFDYIQTSKFQQIRSALMTN

SEQ ID NO: 13818 - protein, 102 aa, Glycine max
MKNVTVKWNPCSEKEHQFYISEAELQMHQAKTPLWGKTGIYFHSVGKEATLMMDEEAALEGEFEIEKIPTRVIQARSKDLVPIFDYIQTSKFQQIRSALMTN

SEQ ID NO: 13819 - protein, 76 aa, Glycine max
MHQAKTPLWGKTGIYFHSVGKEATLMMDEEAALEGEFEIEKIPTRVIQARSKDLVPIFDYIQTSKFQQIRSALMTN

SEQ ID NO: 13820 - DNA, 516 bp, Glycine max
ttagacctatccaatacaaacataaaaaaactacctgaatcaacatgttcactctacaacttgcaaatactgaagctgaatggttgttcacatatgaaggaatttcccacaaatttccataaactcaccaatttgcgtcgccttgaattaataaaaactgaagtgagaaaggtgcccgagcagttgggaaaactgaagaatcttcatgtattgatgagttcatttgatgttggcaaaagtagggagtttggtattcatcagctaggagaactcaatcttcatggaaggatatcaattggggagctacagaacattgagaatccctcggatgcattggcagtggatttgaaaaacaaaatacaccttgtggagatagacttaaaatgggttagggaccagaaccccgatgattcaattaaagaaagggatgaaattgtaattcagaatctacaaccttccaaacacttggagaagttgtcaattggacactatggtggtacaaaatttccatcttgg

SEQ ID NO: 13821 - protein, 172 aa, Glycine max
LDLSNTNIKKLPESTCSLYNLQILKLNGCSHMKEFPTNFHKLTNLRRLELIKTEVRKVPEQLGKLKNLHVLMSSFDVGKSREFGIHQLGELNLHGRISIGELQNIENPSDALAVDLKNKIHLVEIDLKWVRDQNPDDSIKERDEIVIQNLQPSKHLEKLSIGHYGGTKFPSW

SEQ ID NO: 13822 - protein, 141 aa, Glycine max
MKEFPTNFHKLTNLRRLELIKTEVRKVPEQLGKLKNLHVLMSSFDVGKSREFGIHQLGELNLHGRISIGELQNIENPSDALAVDLKNKIHLVEIDLKWVRDQNPDDSIKERDEIVIQNLQPSKHLEKLSIGHYGGTKFPSW

SEQ ID NO: 13823 - protein, 101 aa, Glycine max
MSSFDVGKSREFGIHQLGELNLHGRISIGELQNIENPSDALAVDLKNKIHLVEIDLKWVRDQNPDDSIKERDEIVIQNLQPSKHLEKLSIGHYGGTKFPSW

SEQ ID NO: 13824 - DNA, 612 bp, Glycine max
  misc_feature (7)..(7): n is a, c, g, or t
  misc_feature (37)..(37): n is a, c, g, or t
  misc_feature (599)..(599): n is a, c, g, or t
gtttttngttattcagagacttgatgcagtcaggcgnttagaccaaatgagtatacattttccggagttctaaatgcatgtgccgaccatgctgctgaacacctgggaaaggaggttcatcggtacatgatgcgcacagggtatggtccgttttcatttgctataagtgcccttgttcatatgtactcaaagtgtgggaacactagagttgcaagaaaggtgttcaacgagatgcatcagccagatttggtatcatggacttctctaattgttgggtatgctcagaatggtcaaccagaggaagcacttcatttcttcaaattactactccaatcaggtaccaagcctgatcaaataaagggttagaatatttccattcaataagggagaagcatggattgatgcatactgcagatcattatgcatgtgttattgatttattggaacgatttggccggttcaaagaggcagagaatatcattgataacatgcacataaagcctgataaattcctttgggcatccttacttggaggatgtagaatacatggaaccttgaactggctaaaagagcaccaaaagcattatatgagatagagncagagaatccagc

SEQ ID NO: 13825 - protein, 79 aa, Glycine max
MMRTGYGPFSFAISALVHMYSKCGNTRVARKVFNEMHQPDLVSWTSLIVGYAQNGQPEEALHFFKLLLQSGTKPDQIKG

SEQ ID NO: 13826 - protein, 78 aa, Glycine max
MRTGYGPFSFAISALVHMYSKCGNTRVARKVFNEMHQPDLVSWTSLIVGYAQNGQPEEALHFFKLLLQSGTKPDQIKG

SEQ ID NO: 13827 - protein, 64 aa, Glycine max
MHTADHYACVIDLLERFGRFKEAENIIDNMHIKPDKFLWASLLGGCRIHGTLNWLKEHQKHYMR

SEQ ID NO: 13828 - DNA, 538 bp, Glycine max
ggctccagcaacctctgccaagtaagttcctcatttccctttagtgcaggtccaacgccaatctgaagcagcaagtgggtttggcaccaagacccatttgttcatttgaggggaataatcagaggaagtttgtggcaatggcttctaccgttcctgtggagcaagtcaacaatggccccctgcaggtgacaggtgactccttcatcagagagcatctgaggaagttggctccttatcagcccattttgccctttgaggttttatcagctcgccttggacgtaagcctgaggatatcgtgaagttagatgctaatgaaaatccttatggtccccctccagaggtcatggaagccctaggatcaatgcaattcccatatgtctatcctgacccagagagccgcagattgcgcgcagctcttgcccatgattcaggccttgaagctgaatatattcttgcagggtgtggtgcagatgagcttattgatttgatcatgcgttgtgtgctggatcctggagacaagattgtggactgccctcc

SEQ ID NO: 13829 - protein, 133 aa, Glycine max
MASTVPVEQVNNGPLQVTGDSFIREHLRKLAPYQPILPFEVLSARLGRKPEDIVKLDANENPYGPPPEVMEALGSMQFPYVYPDPESRRLRAALAHDSGLEAEYILAGCGADELIDLIMRCVLDPGDKIVDCP

SEQ ID NO: 13830 - DNA, 649 bp, Glycine max
  misc_feature (34)..(34): n is a, c, g, or t
acaatmaaccaaacacaacacttcactctcaagnttcaagcatgactcctttttacytcctcctatttgccttcatccttttcctctccataaacttcttgatccaaacaagaaggttcaaaaaccttcctccgggaccattttctttccctataatcggaaacctccaccaactcaagcaacccctccaccgcacgttccatgccttatcacaaaaatatggccctattttctccctctggttcggctcccgttttgtcgtcgtcgtttcgtcgccgctcgcggtgcaagaatgcttcaccaagaacgacatcgtcttggccaaccgccctcacttcctcaccggcaagtatatagggtacaacaacaccaccgtcgccgtttccccctacggcgaccactggcgcaacctccgccgcatcatggcgctcgaggttctctccacccaccggataaactccttcttggaaaatcggagggacgagatcatgaggctcgtgcaaaagcttgctcgggactcgcgcaatggcttcaccaaagtagaacttaaatccaggttttcggagatgacatttaacactataatgaggatggtgtcagggaagavgtactatggtgaagactgkgatgtgagtgatgtacavgaagc

SEQ ID NO: 13831 - protein, 215 aa, Glycine max
  misc_feature (2)..(2): Xaa can be any naturally occurring amino acid
  misc_feature (11)..(11): Xaa can be any naturally occurring amino acid
  misc_feature (19)..(19): Xaa can be any naturally occurring amino acid
  misc_feature (202)..(202): Xaa can be any naturally occurring amino acid
  misc_feature (208)..(208): Xaa can be any naturally occurring amino acid
  misc_feature (214)..(214): Xaa can be any naturally occurring amino acid
NXPNTTLHSQXSSMTPFYXLLFAFILFLSINFLIQTRRFKNLPPGPFSFPIIGNLHQLKQPLHRTFHALSQKYGPIFSLWFGSRFVVVVSSPLAVQECFTKNDIVLANRPHFLTGKYIGYNNTTVAVSPYGDHWRNLRRIMALEVLSTHRINSFLENRRDEIMRLVQKLARDSRNGFTKVELKSRFSEMTFNTIMRMVSGKXYYGEDXDVSDVXE

SEQ ID NO: 13832 - protein, 202 aa, Glycine max
  misc_feature (6)..(6): Xaa can be any naturally occurring amino acid
  misc_feature (189)..(189): Xaa can be any naturally occurring amino acid
  misc_feature (195)..(195): Xaa can be any naturally occurring amino acid
  misc_feature (201)..(201): Xaa can be any naturally occurring amino acid
MTPFYXLLFAFILFLSINFLIQTRRFKNLPPGPFSFPIIGNLHQLKQPLHRTFHALSQKYGPIFSLWFGSRFVVVVSSPLAVQECFTKNDIVLANRPHFLTGKYIGYNNTTVAVSPYGDHWRNLRRIMALEVLSTHRINSFLENRRDEIMRLVQKLARDSRNGFTKVELKSRFSEMTFNTIMRMVSGKXYYGEDXDVSDVXE

SEQ ID NO: 13833 - protein, 182 aa, Glycine max
  misc_feature (2)..(2): Xaa can be any naturally occurring amino acid
  misc_feature (11)..(11): Xaa can be any naturally occurring amino acid
  misc_feature (19)..(19): Xaa can be any naturally occurring amino acid
QXTKHNTSLSXFKHDSFLXPPICLHPFPLHKLLDPNKKVQKPSSGTIFFPYNRKPPPTQATPPPHVPCLITKIWPYFLPLVRLPFCRRRFVAARGARMLHQERHRLGQPPSLPHRQVYRVQQHHRRRFPLRRPLAQPPPHHGARGSLHPPDKLLLGKSEGRDHEARAKACSGLAQWLHQSRT

SEQ ID NO: 13834 - DNA, 625 bp, Glycine max
gcaatattttggaaattctaatgagcattcatcatctgctagccaaagtgctcaaggtggtgtagatctgcgacataaagatggggtggcctctgacagtcttgagttgattagacaaaagggcaatcttcctgatgattttgtgccttctgttggtgatgaaaccaaaggatcagcattccttgctcaggttcgagataagcttagtgctgcagaatatataaactttgtgggttatatgaaggcgctgaaaaccaaaacgatgaaaattagtgaagttttacagtgtatttctagattgttcactggacctgacaggctaccacttcttaaaaggttcaaggattacatccccgcaaaatatcattctttgtatgagcactatgttgaaaaaaaataatcatgtgaagactacttgaaagtgccctgttgatgactgtcatgtgataatacttgagctaaaaccaggtgatctcttagcatctttcttggattttgtgattaaagataatgaaaaaaatttagctcttgatttttttttaaaaggagctcttgaatcttgatagccagacacaattttaactactatcattttcgtagacgggaagcctcaatgaacatcgtc

SEQ ID NO: 13835 - protein, 132 aa, Glycine max
QYFGNSNEHSSSASQSAQGGVDLRHKDGVASDSLELIRQKGNLPDDFVPSVGDETKGSAFLAQVRDKLSAAEYINFVGYMKALKTKTMKISEVLQCISRLFTGPDRLPLLKRFKDYIPAKYHSLYEHYVEKK

SEQ ID NO: 13836 - DNA, 541 bp, Glycine max
atgaaatctaactcaataaatttggtcagcccaaccaattgcttatttttcctaaagtttagttgttggtcacacctaaatattgattttttatttaatacatgtgaattttgatttataatgtagacggctatgaacataatgcccaaaacaaatttggcaactctaccatgtacattgaatcattaaaggccattcaaggacaacaaacttataaaacgagcatttcaagaaatgtgattttacaggaagcacaagcagtggcctcttgttcctatgaaatagacacaaattggggtaatgaggcaagtatatatatacatctatatattagcatatgtgtgtgtacttagtttgacatttggtgattcaaaattagacaaatatgggaaaattgacaacttcaaaaatgtaaattgattgaaacctacaggtaggattctcatatgttatattactggagagtacagttactggctatcttcttcactgtagaggatggagatcaacttacctttaccccaaaagaccttgtttcttg

SEQ ID NO: 13837 - protein, 60 aa, Glycine max
MYIESLKAIQGQQTYKTSISRNVILQEAQAVASCSYEIDTNWGNEASIYIHLYISICVCT

SEQ ID NO: 13838 - protein, 39 aa, Glycine max
MRQVYIYIYILAYVCVLSLTFGDSKLDKYGKIDNFKNVN

SEQ ID NO: 13839 - protein, 37 aa, Glycine max
MKSNSINLVSPTNCLFFLKFSCWSHLNIDFLFNTCEF

SEQ ID NO: 13840 - DNA, 544 bp, Glycine max
  misc_feature (393)..(395): n is a, c, g, or t
  misc_feature (500)..(502): n is a, c, g, or t
attctcagtaccacccgcaccttgtagtgaaggtgagaatttttcaattaagttggagggaaaattgaagaaaaccaatgtttcttcagttgattacagtgaagattcaaaatctatggcaatcaatgatgggtcgtgccagatggcaagcctttgcaccaaggtgcaggattgtcctgaacaagcttgcttgggttctgttcttgcaaaagaacatgataaacgaattctgaacaagggtggtttgagtgtagaaaaatttaaacacaatattgttggccagagttcaaaatctttgattgttgatgagatggacattggtgtagatggggatgatggagttgttgaacgtaaccaccctacttcctcaagcttgacagactcatctaatgnnnctgggtcaatgatgcatagcaggtcatcaggctctcggagctttgagaaccaggatcagtccaaaggcaaatgaaccatcattgattgtgggtcgaaactaattnnnaaagctacctatagagaagacaccattcggttcaaggttgat

SEQ ID NO: 13841 - protein, 155 aa, Glycine max
  misc_feature (131)..(132): Xaa can be any naturally occurring amino acid
FSVPPAPCSEGENFSIKLEGKLKKTNVSSVDYSEDSKSMAINDGSCQMASLCTKVQDCPEQACLGSVLAKEHDKRILNKGGLSVEKFKHNIVGQSSKSLIVDEMDIGVDGDDGVVERNHPTSSSLTDSSNXXGSMMHSRSSGSRSFENQDQSKGK

SEQ ID NO: 13842 - protein, 117 aa, Glycine max
  misc_feature (93)..(94): Xaa can be any naturally occurring amino acid
MAINDGSCQMASLCTKVQDCPEQACLGSVLAKEHDKRILNKGGLSVEKFKHNIVGQSSKSLIVDEMDIGVDGDDGVVERNHPTSSSLTDSSNXXGSMMHSRSSGSRSFENQDQSKGK

SEQ ID NO: 13843 - protein, 108 aa, Glycine max
  misc_feature (84)..(85): Xaa can be any naturally occurring amino acid
MASLCTKVQDCPEQACLGSVLAKEHDKRILNKGGLSVEKFKHNIVGQSSKSLIVDEMDIGVDGDDGVVERNHPTSSSLTDSSNXXGSMMHSRSSGSRSFENQDQSKGK

SEQ ID NO: 13844 - DNA, 603 bp, Glycine max
  misc_feature (534)..(534): n is a, c, g, or t
tggactttctctccgctgatcgttgrsataaatcatgacttgagccmaagtgatgggaaagaaataaatgacaactttttgctaagaagaaaaggtcagggagaaaatggacaaagtgtaggatcagcaatgttcttagctacagtttatgataaagaatccgaggcttggactggattatcacctagtggaatggaacttaaaaggttagttgcatatgcccgaagcagtgccaatttgttggcaaaactcacatttctggaagagattggtccatttagatgggagtgcctttttagaactcctttaaacaattatgatgcagtaatttttctccacaaggacaaactcccgtatccccaaaggcttctctttccatcagaagttaatcacggaacacatgtygctgaaggacaggccagcaagtgtttycaaccctttttgttgcctaaagatttgaagggcaggccagaggaacttaraaataagttgctggtagattttgatccatcaaagtgctttatcagagatttnaaagcaagarttctcaaccacattccaagtatggcatgattatctgggaggkgatgttattggcctaac

SEQ ID NO: 13845 - protein, 190 aa, Glycine max
  misc_feature (9)..(9): Xaa can be any naturally occurring amino acid
  misc_feature (16)..(16): Xaa can be any naturally occurring amino acid
  misc_feature (135)..(135): Xaa can be any naturally occurring amino acid
  misc_feature (144)..(144): Xaa can be any naturally occurring amino acid
  misc_feature (161)..(161): Xaa can be any naturally occurring amino acid
  misc_feature (178)..(178): Xaa can be any naturally occurring amino acid
  misc_feature (182)..(182): Xaa can be any naturally occurring amino acid
WTFSPLIVXINHDLSXSDGKEINDNFLLRRKGQGENGQSVGSAMFLATVYDKESEAWTGLSPSGMELKRLVAYARSSANLLAKLTFLEEIGPFRWECLFRTPLNNYDAVIFLHKDKLPYPQRLLFPSEVNHGTHXAEGQASKCXQPFLLPKDLKGRPEELXNKLLVDFDPSKCFIRDXKARXLNHIPSMA

SEQ ID NO: 13846 - protein, 147 aa, Glycine max
  misc_feature (92)..(92): Xaa can be any naturally occurring amino acid
  misc_feature (101)..(101): Xaa can be any naturally occurring amino acid
  misc_feature (118)..(118): Xaa can be any naturally occurring amino acid
  misc_feature (135)..(135): Xaa can be any naturally occurring amino acid
  misc_feature (139)..(139): Xaa can be any naturally occurring amino acid
MFLATVYDKESEAWTGLSPSGMELKRLVAYARSSANLLAKLTFLEEIGPFRWECLFRTPLNNYDAVIFLHKDKLPYPQRLLFPSEVNHGTHXAEGQASKCXQPFLLPKDLKGRPEELXNKLLVDFDPSKCFIRDXKARXLNHIPSMA

SEQ ID NO: 13847 - protein, 126 aa, Glycine max
  misc_feature (71)..(71): Xaa can be any naturally occurring amino acid
  misc_feature (80)..(80): Xaa can be any naturally occurring amino acid
  misc_feature (97)..(97): Xaa can be any naturally occurring amino acid
  misc_feature (114)..(114): Xaa can be any naturally occurring amino acid
  misc_feature (118)..(118): Xaa can be any naturally occurring amino acid
MELKRLVAYARSSANLLAKLTFLEEIGPFRWECLFRTPLNNYDAVIFLHKDKLPYPQRLLFPSEVNHGTHXAEGQASKCXQPFLLPKDLKGRPEELXNKLLVDFDPSKCFIRDXKARXLNHIPSMA

SEQ ID NO: 13848 - DNA, 1205 bp, Glycine max
cagctacgtaggcccccccccccccccgaagaaggactcaattgagagagagagatggagaagccaggaggaggaggagtgttatcggcgaaggaggcattcgagaagcttgaaaaggtgggagaagggacatatgggaaggtgtacagagcaagagagaaggccacggggaagatcgtggctctgaagaagactcgtctccacgaggacgaagaaggtgtccctcccaccactctccgtgaggtttccattctgcgaatgctctctcgcgatccccatgtcgttaggttaatggatgtcaaacaaggtcagaacaaggaagggaagacagtgctctacttggtctttgagtacatggacaccgatctcaagaaattcattcgctctttccgtcaaactggacaaaccgttccaccccaaaccatcaaaagcttgatgtaccagctttgcaagggcgttgctttctgccacggtcatgggatcttcacagggacttgaaacctcacaatctcttgatggacccaaaaaccatgatgcttaaaattgctgatcttggactcgctcgagcatttactgtgccgattaagaaatatacacatgagatactaaccctgtggtatagagctcctgaagtcctcttgggtgctacccattactcaatggcggtggacatttggtccgtaggctgcatatttgccgaacttgtcaccaaacaagcactctttcctggtgattccgaactgcaacaactcctgcatatattcaggctattgggtactcccaacgaagacgtgtggccaggcgtgagtaaactaatgaactggcatgaataccctcaatggaaccctcaaagtctgtcaacggctgttccaagtttggatgagcttggactggatttgctatctcaaatgttgaaatatgagccttccaagaggatttctgcaaagaaagcaatggaacatgcttactttgatgacttggacaagaggcacctttagaacgaataaattggtccaagatttggaagtagaattttatgactaccaatttactctatgcttctctcgagcgtgtatcctaatccgtttaaggagtggttgcccttgggatttatttcatagctgcttctatgttttttagtcattctaatggaaatatcgaggtgttttcgtgtcattctaatgaaaatcctctccgcttttctt

SEQ ID NO: 13849 - protein, 160 aa, Glycine max
MDPKTMMLKIADLGLARAFTVPIKKYTHEILTLWYRAPEVLLGATHYSMAVDIWSVGCIFAELVTKQALFPGDSELQQLLHIFRLLGTPNEDVWPGVSKLMNWHEYPQWNPQSLSTAVPSLDELGLDLLSQMLKYEPSKRISAKKAMEHAYFDDLDKRHL

SEQ ID NO: 13850 - protein, 155 aa, Glycine max
MMLKIADLGLARAFTVPIKKYTHEILTLWYRAPEVLLGATHYSMAVDIWSVGCIFAELVTKQALFPGDSELQQLLHIFRLLGTPNEDVWPGVSKLMNWHEYPQWNPQSLSTAVPSLDELGLDLLSQMLKYEPSKRISAKKAMEHAYFDDLDKRHL

SEQ ID NO: 13851 - protein, 154 aa, Glycine max
MLKIADLGLARAFTVPIKKYTHEILTLWYRAPEVLLGATHYSMAVDIWSVGCIFAELVTKQALFPGDSELQQLLHIFRLLGTPNEDVWPGVSKLMNWHEYPQWNPQSLSTAVPSLDELGLDLLSQMLKYEPSKRISAKKAMEHAYFDDLDKRHL

SEQ ID NO: 13852 - DNA, 529 bp, Glycine max
tctgcatcttcaaacacaacacacacacacacactgtgtttgtgaaactctcacacagacaagtcacaacaacaagtttctgttgttccaatggcatcagcaacaccccttttgaaagatgagctggacatcgtgatcccaacgatcaggaacctggatttcttggagatgtggaggccattctttgagccttaccatctcattattgtgcaagatggagacccttcaaagatcatcaaggtccctgaaggctttgactatgagctctacaaccgcaatgacatcaacaggatccttggccccaaggccaattgcatctccttcaaggactctgcatgccgttgctttggctacatggtctccaagaagaagtacatctacaccattgatgatgactgctttgttgccactgatccatccggacacaagattaatgcacttaagcagcatatagaaaacctgctctgcccatccacaccctactttttcaacaccctctatgaacctttccgagaaggtgcagattttg

SEQ ID NO: 13853 - protein, 146 aa, Glycine max
MASATPLLKDELDIVIPTIRNLDFLEMWRPFFEPYHLIIVQDGDPSKIIKVPEGFDYELYNRNDINRILGPKANCISFKDSACRCFGYMVSKKKYIYTIDDDCFVATDPSGHKINALKQHIENLLCPSTPYFFNTLYEPFREGADF

SEQ ID NO: 13854 - protein, 120 aa, Glycine max
MWRPFFEPYHLIIVQDGDPSKIIKVPEGFDYELYNRNDINRILGPKANCISFKDSACRCFGYMVSKKKYIYTIDDDCFVATDPSGHKINALKQHIENLLCPSTPYFFNTLYEPFREGADF

SEQ ID NO: 13855 - protein, 79 aa, Glycine max
METLQRSSRSLKALTMSSTTAMTSTGSLAPRPIASPSRTLHAVALATWSPRRSTSTPLMMTALLPLIHPDTRLMHLSSI

SEQ ID NO: 13856 - DNA, 509 bp, Glycine max
aaaatgagctaggaggtttccccttgagagttgaaaaagcaaagcctcgacgtgataactggggtataggcagtggcagagatggacgtgataactggggtataggcagtggcagagatggtggtgatcatcagtttggtggaagggatggaagtggctataccagcagagtgggttgggggagaagtggtggtggtgggtggcattctcttcatttttctgatgaagactcggggaggaagaaccactcttactgatgacgattattgcagcagatgttgggaattttgggtgggttaattgcagtgtcaattggattgcttttgtggctacctcgtgattattgcagtgtcagttggaattggaaaattgggggtcggtgttaaaccgaactaaattgctgtagaacaacctcattttttttagtttggttcattttttggatcttgtacaaactgaacccaatcaaattgaaccgaacattatatatgcatttttacttaatatat

SEQ ID NO: 13857 - protein, 84 aa, Glycine max
NELGGFPLRVEKAKPRRDNWGIGSGRDGRDNWGIGSGRDGGDHQFGGRDGSGYTSRVGWGRSGGGGWHSLHFSDEDSGRKNHSY

SEQ ID NO: 13858 - protein, 60 aa, Glycine max
MVVIISLVEGMEVAIPAEWVGGEVVVVGGILFIFLMKTRGGRTTLTDDDYCSRCWEFWVG

SEQ ID NO: 13859 - protein, 50 aa, Glycine max
MEVAIPAEWVGGEVVVVGGILFIFLMKTRGGRTTLTDDDYCSRCWEFWVG

SEQ ID NO: 13860 - DNA, 519 bp, Glycine max
ggcaaagctacaaatacaaagtacaaaagtggtgttggaaaacttcaccccggggaactggggaagtatattttcttcttttttggtggttctagttgttggaggaagatattgtaatcatgaatgttgaagaagaggttcagcgtctcagccaagaaatcaagaggcttggtaaggtccaagcagatggttcttacaaggtaacatttggaacactatttaacgatgatgagtgtgcaaatatatttgaagcacttgttggaacactaagagcagcgaaaaagcgtaaagtactgacatacgagggtgagctactgctgcaaggagtccatgacaatgtggaaatcactcttaatcctgcccctgcagaagcagcagcagctgccaactgatacaatggttacatgccatacagtatcctgtgcaacttgaaccaccaactcgtttttatgacccgtaatactattatgcatgaatctgtaatatgagtgtggagacttaaaaattcatctcgtaaat

SEQ ID NO: 13861 - protein, 90 aa, Glycine max
MNVEEEVQRLSQEIKRLGKVQADGSYKVTFGTLFNDDECANIFEALVGTLRAAKKRKVLTYEGELLLQGVHDNVEITLNPAPAEAAAAAN

SEQ ID NO: 13862 - DNA, 912 bp, Glycine max
ttggccaaagagggttgctatttgtcgtggcacggcttctggtctaacttttgttcatgatgaggcacaaccaaacattgttcacagggatatcaaggccagcaacatattgttggatgggaacttcaatccgaaaattggggattttggtctggcaaaactttttcctgataatgtcacccatgttagtactcgagttgcaggaactgtgggatatcttgccccagaatatgcacttctggggcaacttacaaagaaggcagacgtgtacagttttgggattcttatgcttgaaataatcagtgggaaaagtagtagcatagctgcctttgaggatgattatttggttttggtggaatgggcttggaagctgagaggagaaaataggcttttggaccttgttgattcagaactaagtgaatatgatgagagtgaggtgtataggttcctcatagtggctctattttgcacccaatcagccgctcaacatagaccaagcatgaagcaagtattggaaatgctttgcaaggaagttcatctcaatgagaaggcattgactgagcccggaatatacagatggcacagcaatggaaagaggggtggttctttgaatgagacatcatcttctcaagcaatcaagtacaaaagaaccgaaaatccacatgaagcaccttcaactcacttcagtggtacagatattgtgacagagatgcttccaagatgatcatggttacatgtgtatgtggcgttaggtacatatataagtagaatgtggtcatatatatcatttagtaattaggaataagatcaatgtttttccaaagggaaatacaatatcatgggaagaaaggccttattcgtccgcatgtgtacgtaatatatgcgtgtgtatatacatattttccctttgct

SEQ ID NO: 13863 - protein, 240 aa, Glycine max
WPKRVAICRGTASGLTFVHDEAQPNIVHRDIKASNILLDGNFNPKIGDFGLAKLFPDNVTHVSTRVAGTVGYLAPEYALLGQLTKKADVYSFGILMLEIISGKSSSIAAFEDDYLVLVEWAWKLRGENRLLDLVDSELSEYDESEVYRFLIVALFCTQSAAQHRPSMKQVLEMLCKEVHLNEKALTEPGIYRWHSNGKRGGSLNETSSSQAIKYKRTENPHEAPSTHFSGTDIVTEMLPR

SEQ ID NO: 13864 - protein, 145 aa, Glycine max
MLEIISGKSSSIAAFEDDYLVLVEWAWKLRGENRLLDLVDSELSEYDESEVYRFLIVALFCTQSAAQHRPSMKQVLEMLCKEVHLNEKALTEPGIYRWHSNGKRGGSLNETSSSQAIKYKRTENPHEAPSTHFSGTDIVTEMLPR

SEQ ID NO: 13865 - DNA, 579 bp, Glycine max
tctactgttcgtgtcttcctttcaagcarggattgyyawtctggaagtctaaatgcaacaatggcagcaggcaaaattgttctatgcttttcagtatcagatcaacaggacattgtttctgcatcacttacagtgaaggaagctggaggagttggactagtatatgcacaatatcatgaagatggactcaatcaatgtggttcatttccatgtwtcaaggtagattatgaagtggggacacaaacactaacctatattagaagatcaaggtttccgacagcaagcctaagttttccaaagactgttattggaaaatggacatcaccacgagttgcatctttctcatctagaggacccagtagcatgtctccaacagtgctaaaggtgtggacattttggctgcatttccaccawagggcactacaaggagtagtggatttgcattcctatctggaacttcaatgtcatgtccccatgtggcaggaatagcagctctcatcaaatccaaacacccaacttggtcacctgcagccataagatcagctttggttacaacagcatctcaaactggaactgatg

SEQ ID NO: 13866 - protein, 162 aa, Glycine max
  misc_feature (10)..(10): Xaa can be any naturally occurring amino acid
  misc_feature (12)..(13): Xaa can be any naturally occurring amino acid
  misc_feature (72)..(72): Xaa can be any naturally occurring amino acid
  misc_feature (138)..(138): Xaa can be any naturally occurring amino acid
STVRVFLSSXDXXSGSLNATMAAGKIVLCFSVSDQQDIVSASLTVKEAGGVGLVYAQYHEDGLNQCGSFPCXKVDYEVGTQTLTYIRRSRFPTASLSFPKTVIGKWTSPRVASFSSRGPSSMSPTVLKVWTFWLHFHXRALQGVVDLHSYLELQCHVPMWQE

SEQ ID NO: 13867 - protein, 142 aa, Glycine max
  misc_feature (52)..(52): Xaa can be any naturally occurring amino acid
  misc_feature (118)..(118): Xaa can be any naturally occurring amino acid
MAAGKIVLCFSVSDQQDIVSASLTVKEAGGVGLVYAQYHEDGLNQCGSFPCXKVDYEVGTQTLTYIRRSRFPTASLSFPKTVIGKWTSPRVASFSSRGPSSMSPTVLKVWTFWLHFHXRALQGVVDLHSYLELQCHVPMWQE

SEQ ID NO: 13868 - DNA, 1293 bp, Glycine max
  misc_feature (1091)..(1091): n is a, c, g, or t
  misc_feature (1100)..(1100): n is a, c, g, or t
aagcctttttttcataaagtgttttaaagaaaaaaaatcatttgggctaaatgaagacagaatatctaaatttatacaatcgtgcatcatggcaaaggtaatttcctagctttagagcaatgtacctcttaaacagtgttaacatcctcataattaagatttattacagtctctcacaaattcttttacaatgtgtccagattcttctgacaatgtatgcattgaagactgttatataagcactggtgatgatctgattgccatcaagagcgggtgggatgagtatggcattgcatatggtcgcccaagcacaaacattatcatccacaggctagttggtaaaactcaaacaagtgggattgctattggaagtgagatgtctggtggtgtatctgaagttcatgcagaagatattcaattctatgattcatataatgcaatcagaataaagacttctcctggcaggggtggttacgttagaaacatctatgtctctaacgtgaccttggctaatgtagatattgctattacgttcactggtttatatggggagcatccagatgatgcttatgacccaaatgctctacctgtaatagaaaaagttacaatcaaggatgtggtaggagaaaatatcaaaactgcaggtcttatagagggtatagaaggtgacaattttgtcaacatttgcctgtcaaacattatccttaacgtgacctcaaactatccatggaactgctcctacgttaaaggatattctgacttagtccagccagaagcttgtgagcctctcaaggagagaatattccctgatcattgttcagattgttactatttgacaaatcaaattcagagttcgaatagtcaaaatagagcaggacaaacttcaggtgacataagaggttgagtggagttgcccaactgtgattgtccatctgcagaaagataccgagaaatgattggtttttgtaacttgtgtgcagtaacaaaataattgagtgatttatcagaaataggaagttggatgatttcatgtcttgctttttctagctacatatggctttggaaaagaaaattgcaaagttttgtgtttntaatgattntaagggaaagaatgtgtttggctattgatagaggtgagatatggctaccctgacataattccctcttgccaaaaatgttatcggacacaggagattttgcagtagtacgaggctggtgcttgttggctttacatcccttttgattgaataaggaatccaataaataaacttcctagaaaggtggaatttacgc

SEQ ID NO: 13869 - protein, 237 aa, Glycine max
MCPDSSDNVCIEDCYISTGDDLIAIKSGWDEYGIAYGRPSTNIIIHRLVGKTQTSGIAIGSEMSGGVSEVHAEDIQFYDSYNAIRIKTSPGRGGYVRNIYVSNVTLANVDIAITFTGLYGEHPDDAYDPNALPVIEKVTIKDVVGENIKTAGLIEGIEGDNFVNICLSNIILNVTSNYPWNCSYVKGYSDLVQPEACEPLKERIFPDHCSDCYYLTNQIQSSNSQNRAGQTSGDIRG

SEQ ID NO: 13870 - protein, 175 aa, Glycine max
MSGGVSEVHAEDIQFYDSYNAIRIKTSPGRGGYVRNIYVSNVTLANVDIAITFTGLYGEHPDDAYDPNALPVIEKVTIKDVVGENIKTAGLIEGIEGDNFVNICLSNIILNVTSNYPWNCSYVKGYSDLVQPEACEPLKERIFPDHCSDCYYLTNQIQSSNSQNRAGQTSGDIRG

SEQ ID NO: 13871 - DNA, 1195 bp, Glycine max
cagctacgtaggccccccccccggaagttccacttaagacatcactcacttccccctctctgctttttgcagtcctcctttacctgcaaaaacagcaaatggctctgcttaacctcatacttgtctggttatttttcttgagtctgtgtctttattcgtgtcctacttcggcccagttaagtagacaccactatgcaaaaacttgccccaatgtagaaaacattgtcagagaagcagtcaaaaagaagtttcatcaaacatttgttacggtccctgccaccattcgtctcttcttccatgattgcttcgtgcagggctgtgatgcctcggttttggttgcatccacaaaaaacaacaaagcagagaaggatcaccctgataatctttcactagctggagatgggtttgatacagtgattaaagcaaaagaagcagtggatgcagttccattgtgcaggaacaaagtttcatgtgctgatattttagctatggcaacccgtgatgttattgcactggctggtgggcctttctacgaggttgaattgggaagatttgatgggctaagatctaaatcttcagatgtaaataggaggctgcctcaggcagagttcaacttgaaccagctgaattcactgtttgcggccaacggcctcacccaaactgaaatgatagctctgtcaggtgctcacactgttggattctcccattgcaacaaattcacgaacagagtatacaatttcaagagcaaaagtcgagtggaccctacactgaacgagaaatacgcaacacagctaaggtcaatgtgcccaaggaatgtggatccaaggattgcaatcgatatggacccaaccactccacggtcattcgacaatgtttatttcaagaatcttcagcaagggaagggcctcttctcttcagaccaagttctcttcacggactcaagatccaaggccacagtaaatgcctttgctagtagcagcaatatctttcatgccaacttcgctgctgccatgaccaaattgggccgagttggagtcaagaatgcacagaatggaaacattcgcaccgattgttctgtcatttaatttacgataaaaacaactcatgttaaggagggacattattatctagtcaggggaattcgttatgtatattatttaccctgtgtttaaaataataagtactgaaagtattt

SEQ ID NO: 13872 - protein, 328 aa, Glycine max
MALLNLILVWLFFLSLCLYSCPTSAQLSRHHYAKTCPNVENIVREAVKKKFHQTFVTVPATIRLFFHDCFVQGCDASVLVASTKNNKAEKDHPDNLSLAGDGFDTVIKAKEAVDAVPLCRNKVSCADILAMATRDVIALAGGPFYEVELGRFDGLRSKSSDVNRRLPQAEFNLNQLNSLFAANGLTQTEMIALSGAHTVGFSHCNKFTNRVYNFKSKSRVDPTLNEKYATQLRSMCPRNVDPRIAIDMDPTTPRSFDNVYFKNLQQGKGLFSSDQVLFTDSRSKATVNAFASSSNIFHANFAAAMTKLGRVGVKNAQNGNIRTDCSVI

SEQ ID NO: 13873 - protein, 198 aa, Glycine max
MATRDVIALAGGPFYEVELGRFDGLRSKSSDVNRRLPQAEFNLNQLNSLFAANGLTQTEMIALSGAHTVGFSHCNKFTNRVYNFKSKSRVDPTLNEKYATQLRSMCPRNVDPRIAIDMDPTTPRSFDNVYFKNLQQGKGLFSSDQVLFTDSRSKATVNAFASSSNIFHANFAAAMTKLGRVGVKNAQNGNIRTDCSVI

SEQ ID NO: 13874 - DNA, 1413 bp, Glycine max
aaagtgggaagaaatagttaagtagcacggtaggcgcagtaggccacagtcacacacagcctttgcctttgcctttgctgttcagtgctcccactcccagtccgggccgaggcagaaaatatcggaaactaacctttcacactcacacatccatcgtcatatctgaattggcaactcattattaaatcaattacgaaaacgaagaaacccaacaaaacaatggtagtagcttagctaattgcctaattgaatgaatctcaatggaacctcctctcatcaacgactccacattctcttccgctaacccttccttgtccgagatttggccctctcattttcccacagaccacactcccagtaacaagagacacctctccccctcgactgattgtggcagcaataaacatatcaaatcatcaggatcaggatcccaggatcaaaacggtgccttgaaggcgggtgaagtggacgcgacttcagtagccggtaacaagttacccgaacaaacggcgaaacctagttcttccgagcagccacctaagcaagactatatacacgtgcgagctagaagaggccaagccaccgatagccacagtctcgctgagagagctaggagagaaaagatcagtgagaggatgaaaattcttcaagatatagttcccggctgcaacaaggtaattggtaaagcacttgtgctggatgagataattaattatatccagtcactgcagcatcaggttgagttcctttctatgaagcttgaggcagttaattcgagattgagcatgagccctactattgaatgttttccttcaaaagaagttggcactcagccatttgaccttgccggaataatatttggatcacaaccggccaggggatatgctcaaggatcacagccgggatggctgcatatgcagatagctggtggttttgagaaagcaacataatttgagggaggttcattgggaatgacagaccaatcagtgtggttggttttccattgaaaaggaaaaagtcacttggctggttggttagcatgcgctgctctattaacaacctagtcaattgatgcaaaatgttgtaaggtctgtatgttctttgtcatagtatgatatcaatagtaagaaatgcatctaatttccttgcgcatcatctgactgggaacgtagtgtttcaccatgttagcaattgaaataatcttattgtggtttagttttcgtttcaaaactctggtgtggtaggattcttctctcctgatttgttctatcacaattcatatatgattagcaagatattattcgcgttagggacagtatgaaaattgccccaaggtcgtaattgagtccttgtctgaagttcaaatgtttgattgcgactaaacaagtaatatgttaatgtcaaatgtttgag

SEQ ID NO: 13875 - protein, 229 aa, Glycine max
MEPPLINDSTFSSANPSLSEIWPSHFPTDHTPSNKRHLSPSTDCGSNKHIKSSGSGSQDQNGALKAGEVDATSVAGNKLPEQTAKPSSSEQPPKQDYIHVRARRGQATDSHSLAERARREKISERMKILQDIVPGCNKVIGKALVLDEIINYIQSLQHQVEFLSMKLEAVNSRLSMSPTIECFPSKEVGTQPFDLAGIIFGSQPARGYAQGSQPGWLHMQIAGGFEKAT

SEQ ID NO: 13876 - DNA, 443 bp, Glycine max
  misc_feature (98)..(98): n is a, c, g, or t
atcaaactttgactgtggagagcttgtgtttttctgatcccttatcttaattaatttaatcaccaatggctcgttctatcgctaacgccaagacttyntccgctctcgtgctagacggattctccaacactctcaccagacgtggctactctcaaagcgcaacaaggggaggagttgcctccatagcacccaaatcaggggaagacaaaggtgtctcatcatacaaggtttcctgggtgccagatcccgtcaccggttactacaaaccggaaaacatcaaggaggttgatgttgccgatttgcgtgctacccttctccgcaaaaaattcaacaactaatttcaacaattttaattttttaccaaaccttgggtgattgattcgttatggaattaattttgatactcatatgctctgcccaccttcattatacgattgctatag

SEQ ID NO: 13877 - protein, 90 aa, Glycine max
  misc_feature (11)..(11): Xaa can be any naturally occurring amino acid
MARSIANAKTXSALVLDGFSNTLTRRGYSQSATRGGVASIAPKSGEDKGVSSYKVSWVPDPVTGYYKPENIKEVDVADLRATLLRKKFNN

SEQ ID NO: 13878 - DNA, 1175 bp, Glycine max
gacagtaccgaagagtttaacctattgttgggattgcttgttcctttgatatgaaggtcacaagtctcaagctttcaattgatcatttgacttcaactgagtccctgtttctgatctcttaagattcacttatttaattgttattgtacttcctgatgtttcatttcttcagattgagtctcttcaccattttttgcaactgagattttgggttttgttgatcgtgcctaggtgaaaagctgagatctttattttgagaatagcaattattcatctatttggacgctgggttttatcaaaatgaggaagcgtcaagtcttgaagcattcaattgctattgtaagcatgctggtgtgtgtttgctgcttttttattgtgtctgtgactgttttcaagctcccagaggccccaagaaaagataggcaaatggggttttacccaacaatcagatccagaaaagtttcccttcaagatttcaacttgggtaagtttggggaaatgatgattgacatgttgcctcaagatcttgcttttaccgtatttgttccgtccgaggatgctttcaagcgagatctgcgtctgtcggtgagtgatagtttgaaaccagacgagttcaatgatacttacgcgattgtgactcgtattttggggttttcagctgttcctaggatactttcttcggctaatgtgcaatcgggtgagcttgtgaactatgattcgttatctgggtttcccttgtatgtctcaaaagacatcgatggaatgcttgttgttaataggattcgatcagaaatagtagatgttaggaagaaggagattgttgtccatgtcatggatggggttattatggatgctgaatttgagcaatcggttttagctgaggatgatacagaggaggattgacttgacggtattcgggttttgccctttgattttggcttcatattttgttgtattcaacggtggcataacagaattaaaaaaaaaaaacaaacagtgccattgtcttttcacttgtacatgttacaatgtatctcttttcctgtacacggccctactgttggctagtcctacaaatcctggaacttgcccccatttcaaaataattgttaaaaaggtatcacgaattacttgtaacgatatatttaatggggatagtctcctcctttgctgtc

SEQ ID NO: 13879 - protein, 200 aa, Glycine max
MRKRQVLKHSIAIVSMLVCVCCFFIVSVTVFKLPEAPRKDRQMGFYPTIRSRKVSLQDFNLGKFGEMMIDMLPQDLAFTVFVPSEDAFKRDLRLSVSDSLKPDEFNDTYAIVTRILGFSAVPRILSSANVQSGELVNYDSLSGFPLYVSKDIDGMLVVNRIRSEIVDVRKKEIVVHVMDGVIMDAEFEQSVLAEDDTEED

SEQ ID NO: 13880 - protein, 185 aa, Glycine max
MLVCVCCFFIVSVTVFKLPEAPRKDRQMGFYPTIRSRKVSLQDFNLGKFGEMMIDMLPQDLAFTVFVPSEDAFKRDLRLSVSDSLKPDEFNDTYAIVTRILGFSAVPRILSSANVQSGELVNYDSLSGFPLYVSKDIDGMLVVNRIRSEIVDVRKKEIVVHVMDGVIMDAEFEQSVLAEDDTEED

SEQ ID NO: 13881 - protein, 158 aa, Glycine max
MGFYPTIRSRKVSLQDFNLGKFGEMMIDMLPQDLAFTVFVPSEDAFKRDLRLSVSDSLKPDEFNDTYAIVTRILGFSAVPRILSSANVQSGELVNYDSLSGFPLYVSKDIDGMLVVNRIRSEIVDVRKKEIVVHVMDGVIMDAEFEQSVLAEDDTEED

SEQ ID NO: 13882 - DNA, 883 bp, Glycine max
gggaagttcaattccgcttcaccaaaccctgaaagcccttaaaccccaacccaaatctccatcaacaacagcaagagttccatggtcgttgaatcccaacaatgaaagctctgagaaccctaagaagaaccctctattccccaacacccgcaaccgtttttcgcgccttcttctccgcacaaccacagccgcaccacgatgaccccaccgactcctccgtcttcgatagttcccactacgcccttgaggccgagcccacgctcaagcccgagccaaagcccacgtgggacgagaagtaccgggccagggcggaccgggtggtgttcggggaagagggccccaaggggaagctgcgggtgaaggaggaggaggatgagaggcggagaagggccctcgcgaaggcccttctcgaagctgcgatggacgagggcgaagacgaagaggaggaagggaaaggagcgggcttggtgaaggaggacgaccagaagtcgctgtccgtgggaatcattggcgcccccaatgctggcaagtctgcgctgactaattacatggttgggacgaaggtggcagcagtttctcggaagacgaatactacaactcatgaagttgtgggagtgttaactaaaggagacacccaaatttgtttttttgatacaccagggctcatgttgaattgcggtggatttccttatagggatgtcaaggtccgtgttgaaagtgcttggagttcagtcaatctctatgaagtgctcatagtcatttttgacgttcatagacatattaccaggcctgattcaagagtgatacaattaattaaacaaatgggagctcgatcgattccaaatcaaaggagaattttgtgcatgaacaagattgatctagt

SEQ ID NO: 13883 - protein, 260 aa, Glycine max
MKALRTLRRTLYSPTPATVFRAFFSAQPQPHHDDPTDSSVFDSSHYALEAEPTLKPEPKPTWDEKYRARADRVVFGEEGPKGKLRVKEEEDERRRRALAKALLEAAMDEGEDEEEEGKGAGLVKEDDQKSLSVGIIGAPNAGKSALTNYMVGTKVAAVSRKTNTTTHEVVGVLTKGDTQICFFDTPGLMLNCGGFPYRDVKVRVESAWSSVNLYEVLIVIFDVHRHITRPDSRVIQLIKQMGARSIPNQRRILCMNKIDL

SEQ ID NO: 13884 - protein, 154 aa, Glycine max
MDEGEDEEEEGKGAGLVKEDDQKSLSVGIIGAPNAGKSALTNYMVGTKVAAVSRKTNTTTHEVVGVLTKGDTQICFFDTPGLMLNCGGFPYRDVKVRVESAWSSVNLYEVLIVIFDVHRHITRPDSRVIQLIKQMGARSIPNQRRILCMNKIDL

SEQ ID NO: 13885 - DNA, 663 bp, Glycine max
atagtatatgatcctgatccaatccttgacagctaggaagcgtctgagtccgagggaagacatgttcccacaaaccctaatattgttctcagcactcataatcctcttccatggagatctcgtcttaagcacaacagcaccagatgatatccacgatgttctccctcagtacggtttcccaaagggtcttcttcccaacaacgcggtctcctacaccctctcccccgacgatggcttcttcaccgtccagctcgatgccccctgctacgtccactgggacgaccaattagtctactaccacagccaaatcagtggcactctcacctacggttccgtctcgcacgtgtcggggattcaggcccagaaactcttcctctggctccctgttaccggaattaaggtccaccaggattccggcatgttagagttcttcgttggagctttgtcccagacgctacccgccagcgacttccaggatgtgcctgggtgctcccgcagaggatcgctgctcgctacaaacctcattcttcctctctgaccgtattcatctctgtctattctctcctactcatcttgttcaacttcaaattaattgtttcatactcaaatactacctactagcctactaccatgttaatgttaattaaaattatagggattttc

SEQ ID NO: 13886 - protein, 176 aa, Glycine max
MILIQSLTARKRLSPREDMFPQTLILFSALIILFHGDLVLSTTAPDDIHDVLPQYGFPKGLLPNNAVSYTLSPDDGFFTVQLDAPCYVHWDDQLVYYHSQISGTLTYGSVSHVSGIQAQKLFLWLPVTGIKVHQDSGMLEFFVGALSQTLPASDFQDVPGCSRRGSLLATNLILPL

SEQ ID NO: 13887 - protein, 158 aa, Glycine max
MFPQTLILFSALIILFHGDLVLSTTAPDDIHDVLPQYGFPKGLLPNNAVSYTLSPDDGFFTVQLDAPCYVHWDDQLVYYHSQISGTLTYGSVSHVSGIQAQKLFLWLPVTGIKVHQDSGMLEFFVGALSQTLPASDFQDVPGCSRRGSLLATNLILPL

SEQ ID NO: 13888 - DNA, 920 bp, Glycine max
aaatcacaactatcgtactagtattttacatttaagtgaaatatgcatatatcaataaaaaaaaaaccataaattaaaaaaagatgcatagttgattcatttataatcttaaaaataagaatgacattttccaaaaaaaaaaaaattgattacggatgggaagagggtgaggccaaggtgaaaaaaaagggtagtgtacaggtccatgtatctatataacgcagcttgttcttgttcactttccccaattttctcttgacgcagaaagaaagaaatctctttgatgggtttcccagtggggtactcggagctcctgttcccgaagcttctccttcacatcctctccctcttgggcctcctcaggaagctgatttgcagcctcctccgcttcatgggcctccacgacttcctcgagcccgacattgccgcctggcccgaaacccgaatgcccgaagaattcgagtccgtgtcggccacgctcatccgggaaatcctgccggtggtgaagttccgggagctggtggaccccccggagacgtgcgcggtgtgtctgagcgagttcgaggaaaacgatgagatcagacagctggcgaattgtcgccacatattccaccgaggatgtttggaccgttggatggggtacgatcagagaacatgccctctctgcagaatgccctttatacccgacgaaatgcaaggtgcttttattgagagactctgggctgcctctggtatcgctgaatatccgcatgttgctcctttctagtatcattcatatttccttattttacttttttggggaagggatatcaaaagccataaccagaagaggttcttttgatttcgtggttttttttttgtgtatgtgtatatatacagagacctctatcaattgtatatcgatttctcttagatgatgg

SEQ ID NO: 13889 - protein, 160 aa, Glycine max
MGFPVGYSELLFPKLLLHILSLLGLLRKLICSLLRFMGLHDFLEPDIAAWPETRMPEEFESVSATLIREILPVVKFRELVDPPETCAVCLSEFEENDEIRQLANCRHIFHRGCLDRWMGYDQRTCPLCRMPFIPDEMQGAFIERLWAASGIAEYPHVAPF

SEQ ID NO: 13890 - protein, 124 aa, Glycine max
MGLHDFLEPDIAAWPETRMPEEFESVSATLIREILPVVKFRELVDPPETCAVCLSEFEENDEIRQLANCRHIFHRGCLDRWMGYDQRTCPLCRMPFIPDEMQGAFIERLWAASGIAEYPHVAPF

SEQ ID NO: 13891 - protein, 114 aa, Glycine max
MRSDSWRIVATYSTEDVWTVGWGTIREHALSAECPLYPTKCKVLLLRDSGLPLVSLNIRMLLLSSIIHISLFYFFGEGISKAITRRGSFDFVVFFLCMCIYTETSINCISISLR

SEQ ID NO: 13892 - DNA, 1092 bp, Glycine max
attcttctgattttgtttaatcatgaacggtgctcccaagcacgaacgccgctgggcgtccgacaccgtgccggagatggcattcgtcagcgccgggacttcgccgggaactgagtacaactccgtcaccgacgagtacgttgaggtcactctcgatgttcacgacgatcacaccatcgttctccgcgacgttgagccggtgactgtcgttaacatcgacgacggcgtcgcaacaagtggaaacgaaactccgacgtcctccgcgtggtcgccgtcgatcaggaggagctctcctaaccggtggcggcagttctcgcaggagctgaaggccgaggcggttgcgaaggcgaggcagttttcgcaggagctcaaggcggagctgcggtggttctcgtggagccaaggcggatctgaaacggcgttggtggctcgagatctcaggaagcagcgcgctcagcttgaccgcaaccgctccggtacgaagaaagcgctccgtggactgaaatttattagcagtaaatccaatggcgctgacgcctggaacgaggtgcaaagcaatttctatagtcttgccaaggacggttatctttatcgcactgattttgcgcaatgcatagggatgaaggactctaaggagttcgctctggaactatttgacgcgctgagtcgtagacgtagactgaaggttgaaaagatcagcagagacgagcttaacgaattctggtcgcaaattaccgatcaaagctttgattcgcggcttcagatattctttgacatggtggacaagaatgaagatggtaggatcaccgaagaagaagtgaaagagatcattatgctaagcgcttcagcaaataaattatccagattgaaagagcaggccgaggaatacgcagctctgatcatggaagagttagaccctgaaagacttggctacatcgaggtgggagttctctacaaatgataacatatgaatttatcaagaatacatgcatatattttaattctctaacacatatgagtacgtcacaaaagaaaatctttgtaagtgatagacattaatgttaatccaatccatgattaatttggtttccg

SEQ ID NO: 13893 - protein, 312 aa, Glycine max
MNGAPKHERRWASDTVPEMAFVSAGTSPGTEYNSVTDEYVEVTLDVHDDHTIVLRDVEPVTVVNIDDGVATSGNETPTSSAWSPSIRRSSPNRWRQFSQELKAEAVAKARQFSQELKAELRWFSWSQGGSETALVARDLRKQRAQLDRNRSGTKKALRGLKFISSKSNGADAWNEVQSNFYSLAKDGYLYRTDFAQCIGMKDSKEFALELFDALSRRRRLKVEKISRDELNEFWSQITDQSFDSRLQIFFDMVDKNEDGRITEEEVKEIIMLSASANKLSRLKEQAEEYAALIMEELDPERLGYIEVGVLYK

SEQ ID NO: 13894 - protein, 294 aa, Glycine max
MAFVSAGTSPGTEYNSVTDEYVEVTLDVHDDHTIVLRDVEPVTVVNIDDGVATSGNETPTSSAWSPSIRRSSPNRWRQFSQELKAEAVAKARQFSQELKAELRWFSWSQGGSETALVARDLRKQRAQLDRNRSGTKKALRGLKFISSKSNGADAWNEVQSNFYSLAKDGYLYRTDFAQCIGMKDSKEFALELFDALSRRRRLKVEKISRDELNEFWSQITDQSFDSRLQIFFDMVDKNEDGRITEEEVKEIIMLSASANKLSRLKEQAEEYAALIMEELDPERLGYIEVGVLYK

SEQ ID NO: 13895 - DNA, 498 bp, Glycine max
atcctaatcgaaaaacatacacatttattccgctaaataataataataaaaaagaacgacacacaccaaagaaaaatttattagagcttttcgaagatatttgagatttgtgtttcatttgatatggagaagaagagtggtagcagctggtcctttaagaagatgagcaaagagttgtggccacggaggttgtcgtcgtcttttcgcagcaaacggcttcacttacccaccatgaccatcatcgttgacaacgttgttttcaagattgtctcggtggtagagggtgttgtaattgtttccacgctttgtgtattctacctttgttgtggttgtcacatttgaaatattctatgtatgtttgatgatcttcaaattcatttgttcgttcattttttgagggctagttaaagttcatcaataacagtctgagtttgtgttaagttgttaccatcctatgtagattgtccatgcaataaataacaattttgttttgttttt

SEQ ID NO: 13896 - protein, 72 aa, Glycine max
MEKKSGSSWSFKKMSKELWPRRLSSSFRSKRLHLPTMTIIVDNVVFKIVSVVEGVVIVSTLCVFYLCCGCHI

SEQ ID NO: 13897 - protein, 59 aa, Glycine max
MSKELWPRRLSSSFRSKRLHLPTMTIIVDNVVFKIVSVVEGVVIVSTLCVFYLCCGCHI

SEQ ID NO: 13898 - protein, 36 aa, Glycine max
MTIIVDNVVFKIVSVVEGVVIVSTLCVFYLCCGCHI

SEQ ID NO: 13899 - DNA, 512 bp, Glycine max
  misc_feature (391)..(394): n is a, c, g, or t
  misc_feature (451)..(455): n is a, c, g, or t
atttcatactacaacctcgcagttcaaaagttcaaaccccaaatcttcaaaatcctcacagcaaacccaaaataaaacaacaacaacataaaaaaaccttaacaaaaccaaaaccccaagagaaaaacaccacacttccaatcaaatgttcttcctctctttgcccttctcttcctgcttcagagcttcacaacccaaccacgatcccaccaccctctcaacgaacctcaccacctacatctaccacaccgaatacggcaccgtttcgctgacatggtcacgctccatgctaggccgctccctccacgtgaacctccacaaccactcctcctttcacctccacgtcaaaccctgaaggaaaaaagggtccaagaagctttctcacaacacnnnnttcctctggaacctctcctccgcgagattcgaatccggacgacccgaacctcgctcnnnnntctacctcgccatcgaggtagaacacagcctcagcctcctcgtgggggacttatccc

SEQ ID NO: 13900 - protein, 89 aa, Glycine max
FILQPRSSKVQTPNLQNPHSKPKIKQQQHKKTLTKPKPQEKNTTLPIKCSSSLCPSLPASELHNPTTIPPPSQRTSPPTSTTPNTAPFR

SEQ ID NO: 13901 - protein, 79 aa, Glycine max
  misc_feature (40)..(41): Xaa can be any naturally occurring amino acid
  misc_feature (60)..(61): Xaa can be any naturally occurring amino acid
MVTLHARPLPPREPPQPLLLSPPRQTLKEKRVQEAFSQHXXPLEPLLREIRIRTTRTSLXXLPRHRGRTQPQPPRGGLI

SEQ ID NO: 13902 - protein, 69 aa, Glycine max
MFFLSLPFSSCFRASQPNHDPTTLSTNLTTYIYHTEYGTVSLTWSRSMLGRSLHVNLHNHSSFHLHVKP

SEQ ID NO: 13903 - DNA, 1037 bp, Glycine max
gaaaagagaattgagctggcttggtgatccctgctccatcagaggttagggtttggcagagaacagaaattgggaaattcctcaatcttttgaactcgtcaagtgcgtgcaacactgtacaataatcttcatcgtccttgaaattcccaatcccctgtagtggtagtaagttgctagcaatcgagaatgggagggcacggaggtctcaacattctcccccaaaagcgatggaacgtttacaatttcgacaacagagagaaggtccgtcgcgacgaagagcaagccgccagggaggagcagctcaagcgtgaagagacccggaagcgcgacgccgagctccgcctcgaccgactccgcgtcgctcgcggcttggcgccgtcgattccgccgcctcccgaatccgaacctcagccttcctcccgctccgaacccgtgccttcctccgaccctggccacatcaacctcttcgaggggatcaacatttttgacccaattcagaaggacggtgctgctgaaagggattgggcgaagaggaggaagaagattgagaagggaggaggacccaagcccaagcccacagtttctgtgggcccggaggatgagaagtataggctgggctatgggcttgcggggaagggggttcagttgccgtggtatcttcggaagcctgatggtgaaggtgtcggtgatgataataaggatgaaggtggtgacgtggataggagagaaaataagggtgagaagaagaggaagactatggaggaattgagggaagagaggttgaaaagggagaggaaagagaaggatagggagagggctttgagacacgagaagatgcagagtcacagagatggttctggttatggcagtaggaggaggttcaccagatgaacataggttttttgtgttctttttctgaactgatttttgtttctgaagtttcatgtaattggaagttatgcaatttggattcagtagtatattgtataagggaagataggtttatatagttaatcaaagtggtttggttttctttc

SEQ ID NO: 13904 - protein, 234 aa, Glycine max
MGGHGGLNILPQKRWNVYNFDNREKVRRDEEQAAREEQLKREETRKRDAELRLDRLRVARGLAPSIPPPPESEPQPSSRSEPVPSSDPGHINLFEGINIFDPIQKDGAAERDWAKRRKKIEKGGGPKPKPTVSVGPEDEKYRLGYGLAGKGVQLPWYLRKPDGEGVGDDNKDEGGDVDRRENKGEKKRKTMEELREERLKRERKEKDRERALRHEKMQSHRDGSGYGSRRRFTR

SEQ ID NO: 13905 - DNA, 685 bp, Glycine max
taatcgaaaatgtgatgcatatgttttcttaaataatttggataaggtttctcatatagcttatatattccatgatttttttcatgaaatttagatagttttcacgtatagttctcaaataacttttacagtaatgatgttaactaaaaaatttctcacttgctcaagctaggacttgctaaaggttatttggctcgatctaacttttatgttgctttttgtgacgatgagcaagacccaactcaacagacttctactaataacttaatggttcaacaacttgatggaactattaatgaacgcggttagtgcaagcaaaagcctggagcaaatgctatattggcaatgtctcctgcagtctgtaaagttggtgttgacgtcttaaaagttcctctttacaagtgaataaatattgctccatgttaattcaaagatgtccctgcattctctggtggtggaaaacaagatggcccaatataagtttccatatccttaaaagtatagtatactaatgcatatgtgttacaatcagggaatgaaaaactaaatattcagtactaccatatgaatggaagcaaaaataaatatactaaccatttgaccgaaaaaaaaaaaaaaaaaaaaaaaaaaaaaaaaaaaaaaaaaaaaaaattttcgaaaccgccaacctcaagggggggcccgg

SEQ ID NO: 13906 - protein, 40 aa, Glycine max
MNGSKNKYTNHLTEKKKKKKKKKKKKKKKFSKPPTSRGGP

SEQ ID NO: 13907 - protein, 33 aa, Glycine max
MELLMNAVSASKSLEQMLYWQCLLQSVKLVLTS

SEQ ID NO: 13908 - protein, 30 aa, Glycine max
MLIQRCPCILWWWKTRWPNISFHILKSIVY

SEQ ID NO: 13909 - DNA, 1385 bp, Glycine max
atactctattatcggccttcgtttcgttcgttagtttctcagtcgtttgttctgagatcaaccttgcatcaggtgtttctcttcacttcttcttttttccctttcacaaaaacttgaattgaaccatcaacgctcaatgccgaaccctaccaattccttctattcttctattccttcaattttctcaatattaacttgtatttggttcaaccaccatttgtttctccccctttaattcaatattctcttcacacttttttcggtttgaatccttgtgaataattgtttcgcttcaacttaatcatttcaatttgaaataaatagtacactgcgttggattctctaatgttttcataaatttccagggttagggaatggctgctatcttagctcggaaatcactccttgctcttcgtgcgcgccaattggctgtaagcggtcaagggctgcacagctcccaaaactatggccttcgattaagtgcacactcctactctaccaaaagagaggatgaagaaagggagcaactcgcaaaggaaatttcaaaggattggagttctgtttttgaacgtagcatcaacactctctttctcactgaaatggttcgaggtctaatgctgactctgaaatacttctttgaaacaaaagttacaatcaattatccatttgagaaaggccctttgagcccccgtttccggggtgaacatgcactccgacgatatccaacaggagaggaacgctgcattgcttgcaaactttgtgaagctatatgtcctgcacaagcaatcacaattgaggctgaggagcgagaagatggaagccgcaggacaactcggtatgatattgacatgaccaagtgcatttattgtggattttgtcaagaggcatgccctgttgatgcgattgttgaagggccaaactttgaatttgctacagagactcatgaggagcttttatatgacaaggagaagctgcttgaaaatggggaccgatgggagactgaaattgcagagaacctgagatctgaaagcctttaccgctgaaattttccatgtgatccttgcctgttgctttttgggtctaattgggcaatgataaataaaatgaccagtgaatggttttaaagagctgtatgcatacacaattgttacatcagtttttttttttcttttgtcaatgcttgcattgctgttaagtgtacaatattgatgacgtttatctccttgaaatcttgaacaaatgtggaaataattgaatttttcagcaaattgatgccctttcagcatactggcaacttgtaggcttgtagtcataattgatcctttgaaaatggaagcactgatgcagtgcagctttcagaatctaaattcattggggattcggtg

SEQ ID NO: 13910 - protein, 222 aa, Glycine max
MAAILARKSLLALRARQLAVSGQGLHSSQNYGLRLSAHSYSTKREDEEREQLAKEISKDWSSVFERSINTLFLTEMVRGLMLTLKYFFETKVTINYPFEKGPLSPRFRGEHALRRYPTGEERCIACKLCEAICPAQAITIEAEEREDGSRRTTRYDIDMTKCIYCGFCQEACPVDAIVEGPNFEFATETHEELLYDKEKLLENGDRWETEIAENLRSESLYR

SEQ ID NO: 13911 - protein, 147 aa, Glycine max
MVRGLMLTLKYFFETKVTINYPFEKGPLSPRFRGEHALRRYPTGEERCIACKLCEAICPAQAITIEAEEREDGSRRTTRYDIDMTKCIYCGFCQEACPVDAIVEGPNFEFATETHEELLYDKEKLLENGDRWETEIAENLRSESLYR

SEQ ID NO: 13912 - protein, 142 aa, Glycine max
MLTLKYFFETKVTINYPFEKGPLSPRFRGEHALRRYPTGEERCIACKLCEAICPAQAITIEAEEREDGSRRTTRYDIDMTKCIYCGFCQEACPVDAIVEGPNFEFATETHEELLYDKEKLLENGDRWETEIAENLRSESLYR

SEQ ID NO: 13913 - DNA, 1352 bp, Glycine max
agttcacaccctagagggagtggatggattttgttgtttttcatataagggcaaagaaagatagaggagctagctagctagcgagcttcaaaactcaaaagcactgacacatacaaacaaaaagatctggctttcataaaattgagataaaagtgcaccgtctccgaatcatgtttataatattatcttcattagatcttgatctcatttttcatctgaaactaaaagaatatatatgtgcctttaccctatttagctatatgcacacacaacttgtcacatatcatattttgttcatcaagtttataattccttatctttgaacttacttacatccaagtaaggtctaagctagctggagttgattagatctagctagctagttttcgatctgcttaatttgttttccatgatctcttatatatagtaattttatttccctttaattaattaagaaagagttgaagaagaatgggaagggggaagatcgaaatcaaaaggattgagaacacaacaaatcggcaagtgaccttctgcaagagaagaaatgggcttctgaagaaagcttatgagctgtcagtgctgtgtgatgcagaagttgccctcatcgtcttctccagccgtggccgtctctatgagtattccaacaacaacataagatcaacaatagagaggtacaaaaaggcatgttctgatcactcaagcgcgagcactaccacagaaatcaatgctcagtattatcaacaagaatctgcaaagctgcgacagcaaatacagatgctgcaaaattctaacaggcacctgatgggtgatgccttaagcacactgactgtgaaggaacttaagcagttggagaatagacttgaaagaggaatcactagaatcagatctaagaaacatgagatgctactggctgaaattgaatacttccagaaaagggagattgaactggaaaatgaaaatctttgcctccgaactaagataactgacgtggagaggattcagcaagtaaacatggtttctgggccagaactgaatgccattcaggcattagcttcccgtaacttcttcaatccaaatatgttggaaggtggaactgtttaccctcactcagataagaagattcttcatcttgggtgatcaataatatatgatcttggctagcctatggcatgtctatccaattagccggtggctaaatgcattattattactactcttttggttgctcattaactagaccatgtgatctatatactacttatggattatggatacttatgtatgatgattgtatgatatcataacaatcagttagaaataataattaaaaaatagagttgtgtttgaag

SEQ ID NO: 13914 - protein, 222 aa, Glycine max
MGRGKIEIKRIENTTNRQVTFCKRRNGLLKKAYELSVLCDAEVALIVFSSRGRLYEYSNNNIRSTIERYKKACSDHSSASTTTEINAQYYQQESAKLRQQIQMLQNSNRHLMGDALSTLTVKELKQLENRLERGITRIRSKKHEMLLAEIEYFQKREIELENENLCLRTKITDVERIQQVNMVSGPELNAIQALASRNFFNPNMLEGGTVYPHSDKKILHLG

SEQ ID NO: 13915 - protein, 120 aa, Glycine max
MLQNSNRHLMGDALSTLTVKELKQLENRLERGITRIRSKKHEMLLAEIEYFQKREIELENENLCLRTKITDVERIQQVNMVSGPELNAIQALASRNFFNPNMLEGGTVYPHSDKKILHLG

SEQ ID NO: 13916 - protein, 111 aa, Glycine max
MGDALSTLTVKELKQLENRLERGITRIRSKKHEMLLAEIEYFQKREIELENENLCLRTKITDVERIQQVNMVSGPELNAIQALASRNFFNPNMLEGGTVYPHSDKKILHLG

SEQ ID NO: 13917 - DNA, 617 bp, Glycine max
ctttttccttttgccgcagcaactcaacattactttgagttccattccaacacttgatgacacaaccacaatggtagaagctgcaatttccacgcccaaaaaagtcacgtctcgttacacctcatcatcatcatctcctcgctcaccttcgcctttcacgtccaaacggtcacagtcgctcgagcggagacgacccggaacgacagcgtcgtcgtctgggaaaatgcttctgacttcgacaacaacgaggagcttatccgtgtcgtttcagggcgagtcgttccggatcaccgtcaacaaagccaaaccaacaaccacaaacgttgctgtccctgctcccaaactcctcgcgccgagaaagtcagtgttgaatggtgcatcgtctccactaggagttgtgaatagcagaggccaagtttcttatattcgtcccgcttcacccaacaaggtaccttcatcttcccgaggtgtgagtcccttgaggctcagaaacggagcttcccctaatggtttcagcagcatcaacgagtcttctattttgacctttgccattgatgttaagagagggagggtcggagaaaaccgaattttcgaggcgcattcgctgaggcttctct

SEQ ID NO: 13918 - protein, 205 aa, Glycine max
FFLLPQQLNITLSSIPTLDDTTTMVEAAISTPKKVTSRYTSSSSSPRSPSPFTSKRSQSLERRRPGTTASSSGKMLLTSTTTRSLSVSFQGESFRITVNKAKPTTTNVAVPAPKLLAPRKSVLNGASSPLGVVNSRGQVSYIRPASPNKVPSSSRGVSPLRLRNGASPNGFSSINESSILTFAIDVKRGRVGENRIFEAHSLRLL

SEQ ID NO: 13919 - protein, 182 aa, Glycine max
MVEAAISTPKKVTSRYTSSSSSPRSPSPFTSKRSQSLERRRPGTTASSSGKMLLTSTTTRSLSVSFQGESFRITVNKAKPTTTNVAVPAPKLLAPRKSVLNGASSPLGVVNSRGQVSYIRPASPNKVPSSSRGVSPLRLRNGASPNGFSSINESSILTFAIDVKRGRVGENRIFEAHSLRLL

SEQ ID NO: 13920 - protein, 131 aa, Glycine max
MLLTSTTTRSLSVSFQGESFRITVNKAKPTTTNVAVPAPKLLAPRKSVLNGASSPLGVVNSRGQVSYIRPASPNKVPSSSRGVSPLRLRNGASPNGFSSINESSILTFAIDVKRGRVGENRIFEAHSLRLL

SEQ ID NO: 13921 - DNA, 847 bp, Glycine max
accgagctgaagaaaacctaagcttagaattagaaacaaagaaaagaagaaaggaaagaattgatcgttgaaaatgcagggaggaaagaaagcgggagagtccattaaggaaacagctacaaacattggtgcttctgccaaggctggcatggagaagaccaaggccactgtccaagagaaggcagaaagaatgacagcacgtgatccggtgcaaaaggagttggcaacccaaaagaaagaggcaaagatgaaccaggcggagctggacaagcaggcggcgcgtcagcataacacggcggccaaacagtccgccaccacggctgggcacatgggacatggccaccacaccaccggaaccgggactggaaccgccacgtattccaccaccggggaatatggtcagcccatgggggcccaccagacgtcggcaatgcctggccatggaaccgggcagcccacgggccatgtcaccgaaggagtggtgggctcacatcccattggaaccaacagagggccgggtgggaccgctacagctcataatacccgtgcgggtggaaagccgaatgattatgggtatgggactgggggtacttaattaatgatgattatatcatcaaggtttattggcaatagtttaataataaggtttattaaatgtagttagtttggggtatggcttttgtacttgtttgtttggttatctttgtttgtctgcttttctctccacttgttatggagagacttgggtgtggttatgacagtgttttcactacgtggaaacgttatatgtggtaaacttgtacttgtatcatttcgtgataataattaaataaaatagtggttgtgt

SEQ ID NO: 13922 - protein, 173 aa, Glycine max
MQGGKKAGESIKETATNIGASAKAGMEKTKATVQEKAERMTARDPVQKELATQKKEAKMNQAELDKQAARQHNTAAKQSATTAGHMGHGHHTTGTGTGTATYSTTGEYGQPMGAHQTSAMPGHGTGQPTGHVTEGVVGSHPIGTNRGPGGTATAHNTRAGGKPNDYGYGTGGT

SEQ ID NO: 13923 - protein, 148 aa, Glycine max
MEKTKATVQEKAERMTARDPVQKELATQKKEAKMNQAELDKQAARQHNTAAKQSATTAGHMGHGHHTTGTGTGTATYSTTGEYGQPMGAHQTSAMPGHGTGQPTGHVTEGVVGSHPIGTNRGPGGTATAHNTRAGGKPNDYGYGTGGT

SEQ ID NO: 13924 - protein, 134 aa, Glycine max
MTARDPVQKELATQKKEAKMNQAELDKQAARQHNTAAKQSATTAGHMGHGHHTTGTGTGTATYSTTGEYGQPMGAHQTSAMPGHGTGQPTGHVTEGVVGSHPIGTNRGPGGTATAHNTRAGGKPNDYGYGTGGT

SEQ ID NO: 13925 - DNA, 508 bp, Glycine max
gtaccctgatatacacacacacagctagcagatattacatacacgtgaatcactaattaagccatggagaagaaatcaatagctgggttgtgcttcctcttccttgttctctttgttgctcaagaagttgtggtgcaaactgaggcaaagacttgcgagaacctggctgatacatacaggggtccatgcttcaccactggcagctgcgatgatcactgcaagaacaaagagcacttgctcagaggcagatgcagggacgattttcgctgttggtgcaccaaaaactgttaaatggatccattcactccaacgtgaagaagatgcatgcagcgctattttataaaaaataaaactactatatactatatataataagactggcgctgcatcaatgacctatgtattatagtatatattattaccgatgtcagaactatagatgcatgtactgtgcataacggctgagttatgtacttatgttaagaataaaataaagtgctgttgttgc

SEQ ID NO: 13926 - protein, 75 aa, Glycine max
MEKKSIAGLCFLFLVLFVAQEVVVQTEAKTCENLADTYRGPCFTTGSCDDHCKNKEHLLRGRCRDDFRCWCTKNC

SEQ ID NO: 13927 - protein, 44 aa, Glycine max
MITARTKSTCSEADAGTIFAVGAPKTVKWIHSLQREEDACSAIL

SEQ ID NO: 13928 - DNA, 1069 bp, Glycine max
aaacacctaatcgaaaaattaatttctaggtttcatttcccttaaaccgtcatgtattgcatccatgattttatggttgtcagactgagatatttttccatgttctaattggacttctttgccttttcattcatcagcaagtcagaaattcacaagtgtctggttttctgaattttgaagtaaatcacctttgaaatttcacatacctcataagttttttgggaaaccattggtattgaactctgttcagcttcctgctattttctgcacatcaggctgcaccttggagtccaacacatctgctccctaagtttatagcatttagcatgctggcaaggttaatatttgtggtactcaccatagaacaaatcagagtttgtggcatataagatggccttaacctagatttagagcagttaggtagaaacttttcctctccttctaataaaactcggtagttgcttcaaacaagactagatgactgtggatgaagtggatagtagctctgagtggagcagagagcaggataaagcatttgaaaatgcattggcaactcatccggaagatgactcagatcgttgggagaagattgccgctgatgtgccggggaagactatagaagaaatcaaacagcattatgagctcttggttgaagatattaaccagattgaatccggttgcgtgcctcttccatcttataattcttcttcagagggctcaacaagccatgccagtgatgaaggagctggcaagaagggcagcggtcctgggcattatagcggtgagtctaatcatggaactaaggcttcaagatcagatcaggaacgacgaaaggggattgcttggactgaggatgaacacaggttatttcttctgggcttggataagtatggaaaaggagactggcgaagcatatcaaggaactttgtggtgacacgaactcctacacaagtagcaagccatgcccaaaaatacttcattcgtttgaactcaatgaacaaagatagaaggcgatccagcatacatgatatcaccagtgttaacaatggagatatttcagcatatcgat

SEQ ID NO: 13929 - protein, 197 aa, Glycine max
MTVDEVDSSSEWSREQDKAFENALATHPEDDSDRWEKIAADVPGKTIEEIKQHYELLVEDINQIESGCVPLPSYNSSSEGSTSHASDEGAGKKGSGPGHYSGESNHGTKASRSDQERRKGIAWTEDEHRLFLLGLDKYGKGDWRSISRNFVVTRTPTQVASHAQKYFIRLNSMNKDRRRSSIHDITSVNNGDISAYR

SEQ ID NO: 13930 - protein, 98 aa, Glycine max
MSSWLKILTRLNPVACLFHLIILLQRAQQAMPVMKELARRAAVLGIIAVSLIMELRLQDQIRNDERGLLGLRMNTGYFFWAWISMEKETGEAYQGTLW

SEQ ID NO: 13931 - DNA, 1283 bp, Glycine max
agatggagagaaagtttaaaaattctaaagacccaatctcaatacctcaaactctaaacactgcatatttaattatcataccaccacccacccttctcccatccctcactctctcgacgaaaccctaagcttcccctttcaatctcatcagatcctttcgtggttgcgcgaaaccctaattttgaatctgcaaacatgtctgcagctatggatatgtcgctcgacgacataatcaagaacaacaaaaaatctggatccggaagttcccgtggccggatccgaccctccggttccggaccttctcgccggttccccaaccgtgccgccaaccgcgccgctccttatgccaccgctaaggcgccggaggcgacgtggcagcacgatttatatgcagatcagcaagtggctgcggcggggtaccctgctcaaggtggtcgtgcggcttccatagaaactgggactaagctttacatttcaaacttggattatggtgtttccagtgacgatattaaggaattgtttgctgaagttggtgacctgaaacggcatgcggttcattatgacaggagtggcagatcaaagggtacagcagaagtagtattttcacgacgagctgatgctgtagctgctgtaaagagatacaacaatgttcagttggatgggaaaccaatgaagattgagattgtgggaaccaacatttccacacctggtgtggctcctgctcgtaacggggctattggaaattttgatggagttcctcgaagtggacaaggaagaggtggggcattaagaaggccaggaggaagagggcagggcgttcgaagggatcggggacggggaagaggtcgtggcggagcaggtcgcggtgaaaaggtatctgctgatgatcttgatgcggatttggagaagtatcatgcagaggcaatgcaattgaactgaaggaattggccatattttattttcttgctattacatctatgatgtttattagggacttggtgctggaacaccatgtgtttatgtatctttcacgctggcctactttttagggaaagagaatggatttcctgagtgaaaacatttagacttgccatatggagtttgggcttctgttgtctatttttgattttccttgggtatgaaatatggattacgaaacagaagtcagcatgtaatatgcagtcaagtttgccttcactggcattaatttgttttaacgagtggattatggaagtgggaaccatgatttcatctatcaatgtacaaagaaatgtttggctgcc

SEQ ID NO: 13932 - protein, 247 aa, Glycine max
MSAAMDMSLDDIIKNNKKSGSGSSRGRIRPSGSGPSRRFPNRAANRAAPYATAKAPEATWQHDLYADQQVAAAGYPAQGGRAASIETGTKLYISNLDYGVSSDDIKELFAEVGDLKRHAVHYDRSGRSKGTAEVVFSRRADAVAAVKRYNNVQLDGKPMKIEIVGTNISTPGVAPARNGAIGNFDGVPRSGQGRGGALRRPGGRGQGVRRDRGRGRGRGGAGRGEKVSADDLDADLEKYHAEAMQLN

SEQ ID NO: 13933 - protein, 243 aa, Glycine max
MDMSLDDIIKNNKKSGSGSSRGRIRPSGSGPSRRFPNRAANRAAPYATAKAPEATWQHDLYADQQVAAAGYPAQGGRAASIETGTKLYISNLDYGVSSDDIKELFAEVGDLKRHAVHYDRSGRSKGTAEVVFSRRADAVAAVKRYNNVQLDGKPMKIEIVGTNISTPGVAPARNGAIGNFDGVPRSGQGRGGALRRPGGRGQGVRRDRGRGRGRGGAGRGEKVSADDLDADLEKYHAEAMQLN

SEQ ID NO: 13934 - protein, 241 aa, Glycine max
MSLDDIIKNNKKSGSGSSRGRIRPSGSGPSRRFPNRAANRAAPYATAKAPEATWQHDLYADQQVAAAGYPAQGGRAASIETGTKLYISNLDYGVSSDDIKELFAEVGDLKRHAVHYDRSGRSKGTAEVVFSRRADAVAAVKRYNNVQLDGKPMKIEIVGTNISTPGVAPARNGAIGNFDGVPRSGQGRGGALRRPGGRGQGVRRDRGRGRGRGGAGRGEKVSADDLDADLEKYHAEAMQLN

SEQ ID NO: 13935 - DNA, 453 bp, Glycine max
aaaatagtgatactctatgtactaagaattccaagataagtttatagacatagcaaactttgatagttatgtgctgatactgatggtactctatggccagatgcacaagtaaacaggtgtgaaaaccttgtaacaatgttaatgttagatcatttaaaaagtgtcttatccagatcatttacagtgctacatctgcggtcttgcatgttgttcttgagcagtttaagacatgcattatcctcctgggaaactattatctctttggatccaatcccggcataattagtatctgtggagcatttgcggctattgctggtatgtctgtttacacctaccttaatctgaagcagcaatcaaacaagatatttcctcgacaggccacccttctaccaaaatctaaactaagcaaagaaaatggaacttcccaaaattgacattacagtgatgaaaaat

SEQ ID NO: 13936 - protein, 48 aa, Glycine max
MLMLDHLKSVLSRSFTVLHLRSCMLFLSSLRHALSSWETIISLDPIPA

SEQ ID NO: 13937 - protein, 46 aa, Glycine max
MLDHLKSVLSRSFTVLHLRSCMLFLSSLRHALSSWETIISLDPIPA

SEQ ID NO: 13938 - protein, 38 aa, Glycine max
MSVYTYLNLKQQSNKIFPRQATLLPKSKLSKENGTSQN

SEQ ID NO: 13939 - DNA, 840 bp, Glycine max
ggattggatcccttccctccctctgattccattccatcggagcctggcgaggcgacggtggagtgaagatcttgacaggactgcctcgctccccacggcggcgaggcgagaccgaccggcgacgcgcggccagccctgaattgaatcagctaccatggcggccttgccattggctacagctgaagtctgcgacgccaactcgcacctcatcaccggcggcgagctgcgcgcgctgcagcccgtcttccagatctacgggaggcggcaggtcttcgcgggccccatcgtgacgctcaaggtgttcgaggacaacgtgctcgtccgcgagttcctggaggagaagggccagggcagggtgctggtggtggacggcggcggcagcctgcggtgcgccatcctgggcggcaaccccgtccagcaggcgcagaacaacgggtgggcggggatcgtggtgaacgggtgcatccgggacgtggacgagatcaacgggtgcgacatcggcgtgcgcgccctcgcctcgcaccccatgaaggccaacaagaaggggatgggcgagaagcacgtcccggtcaccatcgcgggcaccaggatctgcgacggcgagtggctctacgccgacaccgacggcatcctcgtctccaggaccgagctcatcgtgtaggagaggccgccgcctcgttgtccgtgttgttccactatgtggttgtagttgcttgaattgaatgatgttgtatctcaacttgagattcagaagctctgaacttgtaataactgtaagcttaaattgcctgatcaaatggaatgaggaatgggaataaaattatctgttgcatgcctgtc

SEQ ID NO: 13940 - protein, 168 aa, Glycine max
MAALPLATAEVCDANSHLITGGELRALQPVFQIYGRRQVFAGPIVTLKVFEDNVLVREFLEEKGQGRVLVVDGGGSLRCAILGGNPVQQAQNNGWAGIVVNGCIRDVDEINGCDIGVRALASHPMKANKKGMGEKHVPVTIAGTRICDGEWLYADTDGILVSRTELIV

SEQ ID NO: 13941 - DNA, 889 bp, Glycine max
attttcaccacccccatccgccgcaggaccgccgaacgcccgcatcgccattggagatcgtgcgaggagacgaggaccctttccgcgggccttgagcgatgaagttcggcaagagcctgagcagccagatcgtggagacgctgccggagtggcgcgacaagttcctgtcctacaaggacctcaagaagcggcttaagctcatcggcctcggcgccgacggggaggagcggcaggccaagcgggcccgcgtctcggagccggccggggacggcgacgagacagcggcggcggcggccgcggcgatgacgcctgaggaggcggacttcatgcggctcctggaggccgagctcgacaagttcaattctttcttcgtcgagaaggaggaggagtacatcatccgccagaaggagttgcaggacagggtggccagggcggccgggatggagtccagggaggagttgctgcgtgtgcacaaggagatcgtcgacttccatggcgagatggtgctgcttgagaattacagcgccctcaactacaccgcgctgctacacggacgacaattttacagccgacacctgcacgatcctacttggcagcatcaaaagcaagcatgcaggcaggaatcactgttggggagggatgcatcgttcgcagatcgtgcgtgtagtgtcgtgtgtaaagcaatttcgtttgtttttcacatactcgcacaatgtcatgatgacgtgctattacgcactagatcagtttcctttccagactgtactgcaatcagcatatatagtgcttgtgcaaactaggtcttcatttgctcgctttacagttgagtaatcttgtttcctctttgtcaatattgttgcttcgagtgtgaaaaaatgctgctcttgtt

SEQ ID NO: 13942 - protein, 233 aa, Glycine max
MKFGKSLSSQIVETLPEWRDKFLSYKDLKKRLKLIGLGADGEERQAKRARVSEPAGDGDETAAAAAAAMTPEEADFMRLLEAELDKFNSFFVEKEEEYIIRQKELQDRVARAAGMESREELLRVHKEIVDFHGEMVLLENYSALNYTALLHGRQFYSRHLHDPTWQHQKQACRQESLLGRDASFADRACSVVCKAISFVFHILAQCHDDVLLRTRSVSFPDCTAISIYSACAN

SEQ ID NO: 13943 - protein, 165 aa, Glycine max
MTPEEADFMRLLEAELDKFNSFFVEKEEEYIIRQKELQDRVARAAGMESREELLRVHKEIVDFHGEMVLLENYSALNYTALLHGRQFYSRHLHDPTWQHQKQACRQESLLGRDASFADRACSVVCKAISFVFHILAQCHDDVLLRTRSVSFPDCTAISIYSACAN

SEQ ID NO: 13944 - protein, 157 aa, Glycine max
MRLLEAELDKFNSFFVEKEEEYIIRQKELQDRVARAAGMESREELLRVHKEIVDFHGEMVLLENYSALNYTALLHGRQFYSRHLHDPTWQHQKQACRQESLLGRDASFADRACSVVCKAISFVFHILAQCHDDVLLRTRSVSFPDCTAISIYSACAN

SEQ ID NO: 13945 - DNA, 577 bp, Glycine max
aacaataaggaacaaaggaagttactaaagattttgcaaacaattacagtaatcccaattgcggtttagtcttcagattgctactattacaatagagcagttttattaattgtatttggacttcatgagccggtttgcattttctcaatgtggaatcggacgagccaagcctaaagagaaagatcctgaagggttagaagaaaacaaaggcttggtagatggtgtaattggcataaatggaagagagggtagaggaggcaatttggggagaggtggaaaccctggaagtgaaaatggtggagggttaagaaagccaccaattggttgtgggaaagatggtattggaggccgtgttggtaacaaagggttgggaacaaaatttgggtttgggaattttggtgcaaaggaaggtaaatctgttgccaaatgctcttttggtggcttgttttcatataaaaataagcgacttgcaaatgaaaattggatgttgctgtggagtagcacaagaacaaggatgagtagttgaaggagggtgaaattgaaagccattatgtggtggagaatttaagtttaagag

SEQ ID NO: 13946 - protein, 133 aa, Glycine max
MSRFAFSQCGIGRAKPKEKDPEGLEENKGLVDGVIGINGREGRGGNLGRGGNPGSENGGGLRKPPIGCGKDGIGGRVGNKGLGTKFGFGNFGAKEGKSVAKCSFGGLFSYKNKRLANENWMLLWSSTRTRMSS

SEQ ID NO: 13947 - DNA, 1301 bp, Glycine max
tctgattcttcaattttgttgactcttttttccattcacttctttctttaaaatcatcttcataacaaaaattgtgagccaccttgcccctattaatttttttttcttcttctcttaatttccacacaaaatttgagcttagtagctctttgtccttttaaatttgcgtttttttcttctaagtggaccactcaaattgtacttttgcgcctaactggttcatgcatttttatatttttttctcatagagaaaccttcaagggagttgttgtgttgaaggattccttctttgatccttggtttcaatggagaggtgttacaatgagaaagagtacaagtccaagaaaatagaccttactctaaagctttcaccttgtggtgagaatgcagaagagaaagagagggggttgagaaggtcatcatcatcatcattagtagtagttggtgttgcaaatggggcccagtggggcacatctcttggcagatcttgctcattgccagcagagaggcagaggagggtggctgcactctcacctcaagtgcttgcttgggtggctgcttcttctgctgtcaatgtcaacaacacatcgtcatcacttcacaaaccaaacccactcccaagttcttctcaggattcagggcttcaggatacactcagaggtgtctcatgcaacattccatatataggtcctacacatgcagccaaaggagttgctttgaacatccaaacatcaaccaaggaggaaaacgattccaaggcttcccacaaaacaattgccaaggcaatttcacctaggcctgctgacagtaagccggagaatccggctaaaaaacataaacttgggaactactgcagtcttaaaggcgatgtaatggagatcctgagacagatgccgagtgtgactactactggagatggccccaatgggaagagaatagaagggtttctgtacaagtataggtctggtcaagtgtgtattgtttgtgtctgccatggtaactttctcaccccagctgagtttgtcatgcatgctgggggcaaggaagtggccaatccaatgaagcatatcactgttttatctaactcattttagaggcaatgtgaatggatttataattcattcatcttggaatgtagagggaagtggaaacaatgagattatctttggttagtttagtttccatgaattaatattatccattgttcaagtggcctgtgtgaaaggaaattttcatcagaggctgtgtcctttagtatgtaatacaaggtaaaaaaccaatagaattatgtgattttggtc

SEQ ID NO: 13948 - protein, 262 aa, Glycine max
MERCYNEKEYKSKKIDLTLKLSPCGENAEEKERGLRRSSSSSLVVVGVANGAQWGTSLGRSCSLPAERQRRVAALSPQVLAWVAASSAVNVNNTSSSLHKPNPLPSSSQDSGLQDTLRGVSCNIPYIGPTHAAKGVALNIQTSTKEENDSKASHKTIAKAISPRPADSKPENPAKKHKLGNYCSLKGDVMEILRQMPSVTTTGDGPNGKRIEGFLYKYRSGQVCIVCVCHGNFLTPAEFVMHAGGKEVANPMKHITVLSNSF

SEQ ID NO: 13949 - DNA, 502 bp, Glycine max
aacaaagaatttgatcagtgataaaaaaaaaagaaagacgaatagagagaacccaatatgtctaaactagccactctcttgactttggctcttctactgagcttcaatttaatctatgcctcccgtccaaacccttcacttatcagtgtctcttctttgcatggggatgttgcggctacaaaggcagaagagatagatggtgagagttgtgaagaagggacagaggaatgtttggcaagaaggacacttgctgcgcatctcgattatatctacactcagaaggataaactgggtcagcattcttaatggcatcacaggcatatgaattgcaatactataaataaattaatgtaccacacatatatgtatgtgtgtacttatttcattaacaaacaaatgctttgcttgaatgttcgcatattttctcctaattattccatgcgagagaaataacaatctaccgtactccattcgatttcaaatataagataaaattactgtt

SEQ ID NO: 13950 - protein, 82 aa, Glycine max
MSKLATLLTLALLLSFNLIYASRPNPSLISVSSLHGDVAATKAEEIDGESCEEGTEECLARRTLAAHLDYIYTQKDKLGQHS

SEQ ID NO: 13951 - protein, 43 aa, Glycine max
MNCNTINKLMYHTYMYVCTYFINKQMLCLNVRIFSPNYSMREK

SEQ ID NO: 13952 - protein, 42 aa, Glycine max
MVRVVKKGQRNVWQEGHLLRISIISTLRRINWVSILNGITGI

SEQ ID NO: 13953 - DNA, 624 bp, Glycine max
acaccgcaaagcaatcttctcttcacttcaaaacacccgagcaaacctctccgatctcccatcccggcgccccccgctcctcccgcgatggcccgcacgaagcagacggcgcgcaagtccaccggcggcaaggccccgcggaagcagctggcgaccaaggcggcgcgcaagtcggccccggcgaccggcggcgtgaagaagccgcaccgcttccgcccgggcaccgtcgcgctgcgcgagatccgcaagtaccagaagagcacggagctgctcatccgcaagctccccttccagcgcctggtccgggagatcgcgcaggacttcaagaccgacctccgcttccagagctccgccgtctccgccctgcaggaggccgccgaggcctacctcgtcggcctcttcgaggacaccaacctctgcgccatccacgccaagcgcgtcaccatcatgcccaaggacatccagcttgcccgccgcatccgcggggagcgcgcctaggcgcctcgcttgccattgctaggtgtttaggatctgttcccgtcgtgttccatatctgcgtcgttcctgtgtaactagcttgttgctgtgcttcgatgctttcaatgaaatatggttaccagtatg

SEQ ID NO: 13954 - protein, 189 aa, Glycine max
TAKQSSLHFKTPEQTSPISHPGAPRSSRDGPHEADGAQVHRRQGPAEAAGDQGGAQVGPGDRRREEAAPLPPGHRRAARDPQVPEEHGAAHPQAPLPAPGPGDRAGLQDRPPLPELRRLRPAGGRRGLPRRPLRGHQPLRHPRQARHHHAQGHPACPPHPRGARLGASLAIARCLGSVPVVFHICVVPV

SEQ ID NO: 13955 - protein, 165 aa, Glycine max
TPQSNLLFTSKHPSKPLRSPIPAPPAPPAMARTKQTARKSTGGKAPRKQLATKAARKSAPATGGVKKPHRFRPGTVALREIRKYQKSTELLIRKLPFQRLVREIAQDFKTDLRFQSSAVSALQEAAEAYLVGLFEDTNLCAIHAKRVTIMPKDIQLARRIRGERA

SEQ ID NO: 13956 - protein, 136 aa, Glycine max
MARTKQTARKSTGGKAPRKQLATKAARKSAPATGGVKKPHRFRPGTVALREIRKYQKSTELLIRKLPFQRLVREIAQDFKTDLRFQSSAVSALQEAAEAYLVGLFEDTNLCAIHAKRVTIMPKDIQLARRIRGERA

SEQ ID NO: 13957 - DNA, 683 bp, Glycine max
aactttacttttcaccgtcggagctaagttcgcgcgccggtcatcctaaacccatatcagcgatcagccggccaggaactcgccgtagtgccgtggcgtgttctggtagcgtggaaagagtacttctgtcatggaaccaagtcagcccgagctcgaggagttctcagctgccaccgcgggcgaggtgctgaaaccagtggaggccccatccgatggtgaaggatgccccatatgcttgggtcaagaggaggccacggagaccacttggatgaagacagcgtgcggacacatctttcatgggcggtgcgtggagaggtggctcaagatgaagggaagttgccccgtgtgccggcgccagctttcgataccgcatgttggtgcaaaacaagatgttccatttatacatccctttgacttgaggacgatagagtcaatgcggaggtttcctcacatattcccagatccagatggatatttctcaatgtatacgcaggatatgtttgaaggccattgaagatgatgttgccacgtacattatgctttcggtagctctacatataagaccggtgctaagaatgttatgtaaagtatggatctcttcactttcaaactaatagaacacgtgatttccgaaaaaaaaaataaaaaaaaaaaaaaaaaagctggacaataccgtcgactgt

SEQ ID NO: 13958 - protein, 127 aa, Glycine max
MEPSQPELEEFSAATAGEVLKPVEAPSDGEGCPICLGQEEATETTWMKTACGHIFHGRCVERWLKMKGSCPVCRRQLSIPHVGAKQDVPFIHPFDLRTIESMRRFPHIFPDPDGYFSMYTQDMFEGH

SEQ ID NO: 13959 - protein, 81 aa, Glycine max
MKTACGHIFHGRCVERWLKMKGSCPVCRRQLSIPHVGAKQDVPFIHPFDLRTIESMRRFPHIFPDPDGYFSMYTQDMFEGH

SEQ ID NO: 13960 - protein, 63 aa, Glycine max
MPHMLGSRGGHGDHLDEDSVRTHLSWAVRGEVAQDEGKLPRVPAPAFDTACWCKTRCSIYTSL

SEQ ID NO: 13961 - DNA, 403 bp, Glycine max
aagctatgtgaaggccttctctaggcagtatgctgctgagatatggccccatgttgagaagttggatgcagaggtattgacagaagatgcacctcttctttttcggtcagctgtttattctggtcttcgaagaccaattcacgaggcttgatcaatttgatatttcacttctaagttgtgtttttttagaattaactaaaattcattctttagtctgtcagttaagcattttcttagtcaaccaaaagcgtaaagctgtatgcaattgtaatgtaagtgacaaggttggtatgacgagtctccgctgtttagattctaacgggaacttgaccactgctactgtacattatttcgattatagctactaatttattggaccttaaatacaaagaatgaagtttgt

SEQ ID NO: 13962 - protein, 93 aa, Glycine max
MHLFFFGQLFILVFEDQFTRLDQFDISLLSCVFLELTKIHSLVCQLSIFLVNQKRKAVCNCNVSDKVGMTSLRCLDSNGNLTTATVHYFDYSY

SEQ ID NO: 13963 - protein, 49 aa, Glycine max
SYVKAFSRQYAAEIWPHVEKLDAEVLTEDAPLLFRSAVYSGLRRPIHEA

SEQ ID NO: 13964 - DNA, 1296 bp, Glycine max
gacctttccaccacgcccccgtcctctttcccttcccgtcgctcgctccccccctacccgaaccttctcgactccctcttcgcatggccgacgccaaggccgaggcggcgaggcaggcgccgcagtcctcccaggaggaggaggaggactggaaggaggccgagggggacgtcgaggtcgcggacaggtccacgagcaatggcggcggcgccggcgaggggatcacggacaggccgatccgggtctacgccgacggcatctacgacctcttccacttcggccacgcgcgctcgctcgagcaggccaagaaatcgttccctaatgcatatcttcttgtcgggtgctgcaatgatgagctgacacatcaatacaaaggaagaactgtcatgacagaggacgagagatatgaatcacttcgccattgcaagtgggttgatgaagtcattcctgacgctccgtgggtagtaacagaagagttcttgaacaagcataacatcgattttgtcgcacatgattctctgccgtatcatgatgctagtggagctagtaatgatgtctatgaatttgtaaaaaagcttggtaaatttaaggagaccaagcgcacagaaggaatatcaacctcagacattataatgaggattgttaaagattataatgagtatgttatgcgcaatctggccagggggtacagcagaaatgatcttggtgtcagctatgtcaaggaaaaacgactaagagttaatatgggattgaaaaccctgcgtgacaaagtgaagcagcaccaagaaaaagtaggggagaagtggagtacggtggcaaaactccaagaagagtgggttgaaaacgcagatcgctgggttgttggttttctagagaaattcgaggaaggttgccattcaatgggaactgccattaaggaaagaatccaggaaaggctgaaggaggcgcagtctagggacttcagccttctacaatacgacagtgacgactttgacgactttgaagaagaagacgatgaagttgccaaagatgccaaatacgtgaaagaatagcgccactgtaaaattttacgtcaaaagtataatacaggcatgcaatgcatgttaacagtcttcgtcaaccacaatccttcaccatgtatctgtccctttgattgtgagcttcactgtcaaggtagatctgcgtgctgtgtttgtagctgtacttgatgtttttctaggcattagcgtacgctcatgtaaaagttctactgtgaggcataacactctttatttggaggatatcgatttcaattcc

SEQ ID NO: 13965 - protein, 349 aa, Glycine max
PFHHAPVLFPFPSLAPPLPEPSRLPLRMADAKAEAARQAPQSSQEEEEDWKEAEGDVEVADRSTSNGGGAGEGITDRPIRVYADGIYDLFHFGHARSLEQAKKSFPNAYLLVGCCNDELTHQYKGRTVMTEDERYESLRHCKWVDEVIPDAPWVVTEEFLNKHNIDFVAHDSLPYHDASGASNDVYEFVKKLGKFKETKRTEGISTSDIIMRIVKDYNEYVMRNLARGYSRNDLGVSYVKEKRLRVNMGLKTLRDKVKQHQEKVGEKWSTVAKLQEEWVENADRWVVGFLEKFEEGCHSMGTAIKERIQERLKEAQSRDFSLLQYDSDDFDDFEEEDDEVAKDAKYVKE

SEQ ID NO: 13966 - protein, 322 aa, Glycine max
MADAKAEAARQAPQSSQEEEEDWKEAEGDVEVADRSTSNGGGAGEGITDRPIRVYADGIYDLFHFGHARSLEQAKKSFPNAYLLVGCCNDELTHQYKGRTVMTEDERYESLRHCKWVDEVIPDAPWVVTEEFLNKHNIDFVAHDSLPYHDASGASNDVYEFVKKLGKFKETKRTEGISTSDIIMRIVKDYNEYVMRNLARGYSRNDLGVSYVKEKRLRVNMGLKTLRDKVKQHQEKVGEKWSTVAKLQEEWVENADRWVVGFLEKFEEGCHSMGTAIKERIQERLKEAQSRDFSLLQYDSDDFDDFEEEDDEVAKDAKYVKE

SEQ ID NO: 13967 - protein, 221 aa, Glycine max
MTEDERYESLRHCKWVDEVIPDAPWVVTEEFLNKHNIDFVAHDSLPYHDASGASNDVYEFVKKLGKFKETKRTEGISTSDIIMRIVKDYNEYVMRNLARGYSRNDLGVSYVKEKRLRVNMGLKTLRDKVKQHQEKVGEKWSTVAKLQEEWVENADRWVVGFLEKFEEGCHSMGTAIKERIQERLKEAQSRDFSLLQYDSDDFDDFEEEDDEVAKDAKYVKE

SEQ ID NO: 13968 - DNA, 1265 bp, Glycine max
ctctcagatgctccggttgtcacgttttctctgctgaaatatttacttttaggatgctaagatgataaagatccacccttgctgtcatttacctgttaacatcttattctctccgttctttgcttgcttattagctgagacggctagtacatgttaacagtatcacccttagggatcagtttcttccagtagtgcccctctgtttttccttttaccttctaagttcatgaagtatacattggagtccaggaaggttcgtcacaagaatgttgtgcaatttattggtgcatgcactaaacccccaaggctatgcatagtcacagaatttatgtccggtgggagtgtgtatgattatcttcataagcataaaggtatcttcaagctccctgccttagttggagttgcaatggatgtgtcaaaaggcatgagctacttacaccaaaataatattattcatcgggatctgaaaaccgccaatcttcttatggatgagaacgggatggttaaagttgctgattttggtgttgcacgtgttaaagttcagtctggagtaatgactgcagaaaccgggacataccgttggatggccccggaggttatagaacacaagccctacgaccacaaggctgatgtttttagttttggaattttgttgtgggaactgctcactgggaagattccttacgagtacctgacaccattacaagcagctgtaggtgtggttcagaagggattgcggcccacaataccaaaaaatgctcatgcaaagcttgcggagctccttcagaagtgctggcagcaggaccctgctgaaaggccagatttctccgagatattagaagctctcaagaaaatagcagaggaggtcggagatgagcacgacggaaagcacaaggacaaaagcctggggggattcttttcgtctctgagggggcgaggacactaaggtggcgctggtgtacatggcttgcaatccgttcggacgggcctgagcgaagatcagcgcctgtttatcagcatacccagtgccagtacattgagatggacagtgaactgggccggatggcaacttttcagctgtagctccactcatcggccacagccaatagtttttttttttgtctggttatttacttccgggttctgttacatgtaacataggaagagaatgcttgtggactgtacattgtttaatctgattttaacaggctgtaacttgcacatgaaataataagcctagcttagggcatgctgtgattctttct

SEQ ID NO: 13969 - protein, 239 aa, Glycine max
MKYTLESRKVRHKNVVQFIGACTKPPRLCIVTEFMSGGSVYDYLHKHKGIFKLPALVGVAMDVSKGMSYLHQNNIIHRDLKTANLLMDENGMVKVADFGVARVKVQSGVMTAETGTYRWMAPEVIEHKPYDHKADVFSFGILLWELLTGKIPYEYLTPLQAAVGVVQKGLRPTIPKNAHAKLAELLQKCWQQDPAERPDFSEILEALKKIAEEVGDEHDGKHKDKSLGGFFSSLRGRGH

SEQ ID NO: 13970 - protein, 205 aa, Glycine max
MSGGSVYDYLHKHKGIFKLPALVGVAMDVSKGMSYLHQNNIIHRDLKTANLLMDENGMVKVADFGVARVKVQSGVMTAETGTYRWMAPEVIEHKPYDHKADVFSFGILLWELLTGKIPYEYLTPLQAAVGVVQKGLRPTIPKNAHAKLAELLQKCWQQDPAERPDFSEILEALKKIAEEVGDEHDGKHKDKSLGGFFSSLRGRGH

SEQ ID NO: 13971 - protein, 179 aa, Glycine max
MDVSKGMSYLHQNNIIHRDLKTANLLMDENGMVKVADFGVARVKVQSGVMTAETGTYRWMAPEVIEHKPYDHKADVFSFGILLWELLTGKIPYEYLTPLQAAVGVVQKGLRPTIPKNAHAKLAELLQKCWQQDPAERPDFSEILEALKKIAEEVGDEHDGKHKDKSLGGFFSSLRGRGH

SEQ ID NO: 13972 - DNA, 1030 bp, Glycine max
atcgctccaaaataaaaaagaatagctaaaagatggctctcgaagtctgcgtgaaagccgccgttggtgcccctgatgctctcggcgactgtaacttcccttctctctctctagctctttttttttatatcagattatgatctctgatgatcttcaaatgtaaaatttataatacatgatttgtctgtcgtttcaggccctttcagccaacgggttctcctcaccctcgaggagaagaatcttccctacaaaatgcatctgatcaacatctccgacaaacctcaatggtcattttctttctctcacccaaaaaccttagattcgatcttagcttgtttcacctgttctactcattgacaagaagctggctttggtttatatatgatacaggttcttagccattagtcctgaagggaaagtaccagtcctcaagaacgacgacaagtgggtgtctgattccgacgtcatcaccggcattctcgaggagaagtatcctgagccatctctcaagactcctcccgagctcgcctccgttggatccaaaatcttcggtaccttcgtgaccttcttgaagagcaaagactccagcgacggatccgagaaggccttgcttgatgagcttgaagctctcgagactcatctcaagactcatgacggtcctttcatcgccggagggaaagtcagtgctgtggatctaagcttagcaccgaagctttaccatctcaaggtcgctcttggccactacaaaagctggtctgtccccgagagcttgcctcatgttcatggctacatgaaggctttgttctctcttgactcgtttgagaaaacaaagactgaggagaggtatgttattgcaggatgggaacacaaggttaacccctaaaaactactactagtttcgtctgtttgtgtgtggtggtgatgatttggttcaatgtcttatctactctatcaactcttatcagtaaaataatgttcctggacctgttatgttttgttattgtatcaatcaaataataagcctcttttg

SEQ ID NO: 13973 - protein, 37 aa, Glycine max
MVIFFLSPKNLRFDLSLFHLFYSLTRSWLWFIYDTGS

SEQ ID NO: 13974 - protein, 35 aa, Glycine max
MALEVCVKAAVGAPDALGDCNFPSLSLALFFYIRL

SEQ ID NO: 13975 - protein, 34 aa, Glycine max
MHLINISDKPQWSFSFSHPKTLDSILACFTCSTH

SEQ ID NO: 13976 - DNA, 394 bp, Glycine max
ccggctcgatcccgaattccccattccacatctccctccctcaccatggccgccgccgccgccatggcccgcaggctgctctcccccaccaccacctcccactcgaccacagcccgcctcctcgtctcccgccgcctcgcctccgccccgtgcttcccgcgcgccccggcggcggcggcgaaggagatgctgcgcccggcggccgtcgcctcctcgtcggccttcttcctccgcggcgccgggggcgccaggggcatggcgcggcggccggggggcggcgacgggtacgcccccgcgcggggcggggaccgcgcgccgacggagatggcgccgctgttccccgggtgcgactacgagcactgggtgatcggcatggacaagcccgggggggagg

SEQ ID NO: 13977 - protein, 131 aa, Glycine max
PARSRIPHSTSPSLTMAAAAAMARRLLSPTTTSHSTTARLLVSRRLASAPCFPRAPAAAAKEMLRPAAVASSSAFFLRGAGGARGMARRPGGGDGYAPARGGDRAPTEMAPLFPGCDYEHWVIGMDKPGGE

SEQ ID NO: 13978 - protein, 130 aa, Glycine max
GSIPNSPFHISLPHHGRRRRHGPQAALPHHHLPLDHSPPPRLPPPRLRPVLPARPGGGGEGDAAPGGRRLLVGLLPPRRRGRQGHGAAAGGRRRVRPRAGRGPRADGDGAAVPRVRLRALGDRHGQARGG

SEQ ID NO: 13979 - protein, 121 aa, Glycine max
RLDPEFPIPHLPPSPWPPPPPWPAGCSPPPPPPTRPQPASSSPAASPPPRASRAPRRRRRRRCCARRPSPPRRPSSSAAPGAPGAWRGGRGAATGTPPRGAGTARRRRWRRCSPGATTSTG

SEQ ID NO: 13980 - protein, 116 aa, Glycine max
MAAAAAMARRLLSPTTTSHSTTARLLVSRRLASAPCFPRAPAAAAKEMLRPAAVASSSAFFLRGAGGARGMARRPGGGDGYAPARGGDRAPTEMAPLFPGCDYEHWVIGMDKPGGE

SEQ ID NO: 13981 - DNA, 421 bp, Glycine max
taatttgagagcaaaagtttacaggaaagatatgtcacccattttaggaaactgcatctgctatacatgccagaatcatactaaagcatacatcaatcacctatttaatgttcatgaaatgctggcacagattctgttagaaatccataatacacaccactacttgacgttctttcatgtaataagagaatcaataaaggatggaaggtttgagaaatttagacagacattcatcgagagcaggcgtgcccatcaggaaagggaagctgtttgtgcttgaggtcatataagcttaggtgtattcatctgggttttaacttggatttctatgaagcgcgaaccaagtattgtacaaaaagacttcaattttagttgtgtaaactggttcgtttaaatgccaatagatacaatttatttgatt

SEQ ID NO: 13982 - protein, 92 aa, Glycine max
NLRAKVYRKDMSPILGNCICYTCQNHTKAYINHLFNVHEMLAQILLEIHNTHHYLTFFHVIRESIKDGRFEKFRQTFIESRRAHQEREAVCA

SEQ ID NO: 13983 - protein, 82 aa, Glycine max
MSPILGNCICYTCQNHTKAYINHLFNVHEMLAQILLEIHNTHHYLTFFHVIRESIKDGRFEKFRQTFIESRRAHQEREAVCA

SEQ ID NO: 13984 - protein, 53 aa, Glycine max
MLAQILLEIHNTHHYLTFFHVIRESIKDGRFEKFRQTFIESRRAHQEREAVCA

SEQ ID NO: 13985 - DNA, 496 bp, Glycine max
aagtctaagtgcatactcccaccaaatacagtagcagcaatggcgccagcgcagcaagtgcaagttccggtgcaagtctcgccacccccgattctcagcgtcctcgagaccactctcgtagcgccctcgcccagcgctggcgccgccccgccggagtcctccctcccgctcaccttcttcgacgtcctctggctcacgtccccgcccgtcgagcgtgttttcttctaccgcctcgccgctgacgccgacgtccccgaaatcctctccaacctcaagacctcactggccaaagctctcagcacctaccacccgctcgctggccgcctccgcctcacgcctgggacggctgaccgctacgagatctactaccagccgggcgacggcgtcaccttcaccgtcgccaagtaccgcgacgacattgacttcgacgagctcgtggttgacaagccgagggaggtcagcaagatcgcgccgctcgcaccgcctcttcccaagg

SEQ ID NO: 13986 - protein, 165 aa, Glycine max
KSKCILPPNTVAAMAPAQQVQVPVQVSPPPILSVLETTLVAPSPSAGAAPPESSLPLTFFDVLWLTSPPVERVFFYRLAADADVPEILSNLKTSLAKALSTYHPLAGRLRLTPGTADRYEIYYQPGDGVTFTVAKYRDDIDFDELVVDKPREVSKIAPLAPPLPK

SEQ ID NO: 13987 - protein, 152 aa, Glycine max
MAPAQQVQVPVQVSPPPILSVLETTLVAPSPSAGAAPPESSLPLTFFDVLWLTSPPVERVFFYRLAADADVPEILSNLKTSLAKALSTYHPLAGRLRLTPGTADRYEIYYQPGDGVTFTVAKYRDDIDFDELVVDKPREVSKIAPLAPPLPK

SEQ ID NO: 13988 - DNA, 736 bp, Glycine max
gagatgacgatgtcgtcgccggcctccacccacctcctccgctccgcgcccgcggcgcccctgctccctcgccgcgcctccctgcagctctcctgcgtcgccagcggagccgcgccaaggagtaggagacggagcggccgcctggaggtagtccgcgcggccaccgcggaggtggccgaggccgccggcgcccccgcctacaccaccgagtccctcatcctctacttcaaggcggagggcaccatggaggagaggtctatccccaagatcacccaggctctcgaggggatggacggcgtcagtgacctggaggtgctcatcgaagaaggcatcggaagtgttgtgttaacgaaggcgacaacagtccaagctactggggtcgcctcaaacctggtggaagccatccagggagttggtttcaagctgcaaactctgagcctcagcttcgaggactttgacaaggaggatgctgctgctgtttcgggagaaggagcagacgtccaagccagcgagtgagcttcacagcgtcgtgcctgcgctgagtgcacacgatgtgctctggtcgttggggttcaatatttcttcggacgtttttctttagttgtcatacactcgctcttagcaatttttcaagctgcacgttttaccttctggcatgactacgtaccctatgtgggcttttagaaatgctgcatcttcccattaaaaatagagaagaaaaagaaattctgcgtct

SEQ ID NO: 13989 - protein, 171 aa, Glycine max
EMTMSSPASTHLLRSAPAAPLLPRRASLQLSCVASGAAPRSRRRSGRLEVVRAATAEVAEAAGAPAYTTESLILYFKAEGTMEERSIPKITQALEGMDGVSDLEVLIEEGIGSVVLTKATTVQATGVASNLVEAIQGVGFKLQTLSLSFEDFDKEDAAAVSGEGADVQASE

SEQ ID NO: 13990 - protein, 170 aa, Glycine max
MTMSSPASTHLLRSAPAAPLLPRRASLQLSCVASGAAPRSRRRSGRLEVVRAATAEVAEAAGAPAYTTESLILYFKAEGTMEERSIPKITQALEGMDGVSDLEVLIEEGIGSVVLTKATTVQATGVASNLVEAIQGVGFKLQTLSLSFEDFDKEDAAAVSGEGADVQASE

SEQ ID NO: 13991 - protein, 168 aa, Glycine max
MSSPASTHLLRSAPAAPLLPRRASLQLSCVASGAAPRSRRRSGRLEVVRAATAEVAEAAGAPAYTTESLILYFKAEGTMEERSIPKITQALEGMDGVSDLEVLIEEGIGSVVLTKATTVQATGVASNLVEAIQGVGFKLQTLSLSFEDFDKEDAAAVSGEGADVQASE

SEQ ID NO: 13992 - DNA, 961 bp, Glycine max
acaaaatagatttggctgtcgtttcgtccctccctcttccgttgaacgaacatcggcgttttcaccgacgaatccaactttctttccatttctctctacgattcaggtctttcacttggattcagaatagtacttttgtttcttctagattattagcgacagagatggatgattgggaagctgaagactttcaaccaactcctgctaaagttgaactgaaaagtaactgggatgatgaggatgttgatgagaatgacatcaaggactcttgggaggaagaggatgatgatgagcctactccggcagctgtagtaaagcctgctccaaagaaagcagcaaaagttgttgaaaagaaggctaaatctgttgaagaaccatcaaaggaagagccttttgatcctattgctgacaaacttcgcatgcagaggctagtggaggaagctgattaccaggcaactgctgaactctttggagcaaagactgaagcaaaaagcgttgatattttcattcccaagtctgaaagcgatttcttggaatatgctgagatgatatctcgtaagcttgtaccttatgagaaaagctttcactatattgggctgctcaaagcagtgatgagactttctgtggccaatatgaaagcagctgatgttaaagacgttgcttcctccatttcggcaataggaaacgaaaaactcaaggctgagaaagatgctgctgccggcaaaaagaagtcaggtaagaagaaacaactgcacgtggataagcctgatgatgatcttgtttcgggtccttatggcgccatggacgacgatgatttcatgtaaaagaaaatggcttggagattgcacttactacctatgtaggatattgcaactaagaagaggtttaaatcattttacgtttttttttaaattatctattgaagcaacacaaattagtaaaacagaattgcctttttctc

SEQ ID NO: 13993 - protein, 273 aa, Glycine max
KIDLAVVSSLPLPLNEHRRFHRRIQLSFHFSLRFRSFTWIQNSTFVSSRLLATEMDDWEAEDFQPTPAKVELKSNWDDEDVDENDIKDSWEEEDDDEPTPAAVVKPAPKKAAKVVEKKAKSVEEPSKEEPFDPIADKLRMQRLVEEADYQATAELFGAKTEAKSVDIFIPKSESDFLEYAEMISRKLVPYEKSFHYIGLLKAVMRLSVANMKAADVKDVASSISAIGNEKLKAEKDAAAGKKKSGKKKQLHVDKPDDDLVSGPYGAMDDDDFM

SEQ ID NO: 13994 - protein, 219 aa, Glycine max
MDDWEAEDFQPTPAKVELKSNWDDEDVDENDIKDSWEEEDDDEPTPAAVVKPAPKKAAKVVEKKAKSVEEPSKEEPFDPIADKLRMQRLVEEADYQATAELFGAKTEAKSVDIFIPKSESDFLEYAEMISRKLVPYEKSFHYIGLLKAVMRLSVANMKAADVKDVASSISAIGNEKLKAEKDAAAGKKKSGKKKQLHVDKPDDDLVSGPYGAMDDDDFM

SEQ ID NO: 13995 - DNA, 950 bp, Glycine max
gaccccccgctccgctcgtctgccgccgcccacacaccaaaccctaaccctaccgccgccgccgccatggccgacccgcggatgttcccatcgggatcaaacggcccggaagaccacgcccccggccgccggaagtacaacccctaccaggacctcaacatgccctacaactacaagaacctctacgacctccccacctcgccggagttcctcttcgaggaggagtccgcggtgcagcgccgatcctggggcgagaacctcacttactacacgggcatcgggtacctctctggcgccgtgggcggcgccgccctcggcctccgcgacgccgccgcgggcgcggagcccggggagaccgccaagatccgcgccaaccgcttgctcaacgcctgcggcagctccggccgccgttacggcaacaggctcggggtcatcgggctgatgtacgccgggatggagagcggcatggtcgcggcacgcgaccaagacgactggatcaacagcgtcgccgcagggctcggcaccggcgcgctcttccgcgccgctaacgggccgcggtctgccgccgtcgcgggcgctgtcggcggggtccttgctgccgccgccttggccgggaagcagcttgcgaagcgatacgtacaggcaatatgaatctcttcctgttctctcagatcaattgatcaaatcaatcagtcgccaagaatggattatttttgcgtttgtcgttctccagtttagctgctccattagagaatgcataatatctatgctgtgttagtcacatgtatacgatcggaatggatgattttggctttgttacaatgtcggatgccagcatgatgttatacatttttcgggtgttgctgagcaataagagtctatttgatattttgcagcgattacagttgtgaaacatgtactgcagtatttagtaagaatgttcttcagtc

SEQ ID NO: 13996 - protein, 216 aa, Glycine max
DPPLRSSAAAHTPNPNPTAAAAMADPRMFPSGSNGPEDHAPGRRKYNPYQDLNMPYNYKNLYDLPTSPEFLFEEESAVQRRSWGENLTYYTGIGYLSGAVGGAALGLRDAAAGAEPGETAKIRANRLLNACGSSGRRYGNRLGVIGLMYAGMESGMVAARDQDDWINSVAAGLGTGALFRAANGPRSAAVAGAVGGVLAAAALAGKQLAKRYVQAI

SEQ ID NO: 13997 - protein, 194 aa, Glycine max
MADPRMFPSGSNGPEDHAPGRRKYNPYQDLNMPYNYKNLYDLPTSPEFLFEEESAVQRRSWGENLTYYTGIGYLSGAVGGAALGLRDAAAGAEPGETAKIRANRLLNACGSSGRRYGNRLGVIGLMYAGMESGMVAARDQDDWINSVAAGLGTGALFRAANGPRSAAVAGAVGGVLAAAALAGKQLAKRYVQAI

SEQ ID NO: 13998 - protein, 189 aa, Glycine max
MFPSGSNGPEDHAPGRRKYNPYQDLNMPYNYKNLYDLPTSPEFLFEEESAVQRRSWGENLTYYTGIGYLSGAVGGAALGLRDAAAGAEPGETAKIRANRLLNACGSSGRRYGNRLGVIGLMYAGMESGMVAARDQDDWINSVAAGLGTGALFRAANGPRSAAVAGAVGGVLAAAALAGKQLAKRYVQAI

SEQ ID NO: 13999 - DNA, 392 bp, Glycine max
gcagagcgccacgagtcggaacgagtagttgagcagtagcgcttgcctggactccccgtctcctcctccctcctcccgccgccgcgttacgacacaaccgccgcgttcacgtgccctaatcctcagcggcagctcctcctttccatccgcccgtccgtccgtcccccgaaatggagcccaagaggtcctcgccccaggcccagccgcagccgcgcgcggcgactaagaagtcgcctccccgcgccgccgcsgccgcsgacgckgtcgccgactcgccgctcagcagcctgttccacccggcaccgcacggggtaaacggcaaagagcaggacttgtacgccattcttttcaaggggcagaacggcaatgctcaggccagcatgacagatggt

SEQ ID NO: 14000 - protein, 74 aa, Glycine max
  misc_feature (27)..(27): Xaa can be any naturally occurring amino acid
  misc_feature (29)..(29): Xaa can be any naturally occurring amino acid
  misc_feature (31)..(31): Xaa can be any naturally occurring amino acid
MEPKRSSPQAQPQPRAATKKSPPRAAXAXDXVADSPLSSLFHPAPHGVNGKEQDLYAILFKGQNGNAQASMTDG

SEQ ID NO: 14001 - DNA, 533 bp, Glycine max
ctatgttctgggcctaaccttgttccttgcgatatcaataccacaatattttgtcatgaacactgcaccggatggtcatggtccagttagaacaggtggtggatggtttaatgacattttgaacaccatattctcttctgccccaactgtggctataattgttgggactcttgttgacaacacacttgaaggcaaacaaacagctgtggacagaggacttccatggtggggtcctttccagaataggaagggagatgttagaaatgatgagttttaccgtcttcttctccggataaatgagtacatgcccaccagatttctctaaagtactctaatatatgctacctgtacttaaccccttctgcgaacttaattaaattctcatgtacaatgaaatgaccctgtaaaatatggatagacaaattttcatcattggccagccagcagccaaattttaccttgtataaatggattgacatagtaattctttggatgaattgctctctaaagatgccgaaattactcttaggtag

SEQ ID NO: 14002 - protein, 107 aa, Glycine max
YVLGLTLFLAISIPQYFVMNTAPDGHGPVRTGGGWFNDILNTIFSSAPTVAIIVGTLVDNTLEGKQTAVDRGLPWWGPFQNRKGDVRNDEFYRLLLRINEYMPTRFL

SEQ ID NO: 14003 - protein, 89 aa, Glycine max
MNTAPDGHGPVRTGGGWFNDILNTIFSSAPTVAIIVGTLVDNTLEGKQTAVDRGLPWWGPFQNRKGDVRNDEFYRLLLRINEYMPTRFL

SEQ ID NO: 14004 - DNA, 692 bp, Glycine max
aagaaagaaggagggcaaaaccctagagcttttctcgccgctgctccagcgtccccccccccccccccccgcgaccgcggcatctcgaccaccgccgccgccgccgccgagctcgcgagatctccggcctcctccggtcttccttcccggctgaggcgtcgcgacaatggctggccccaaggacgtgcggagcgagctggagaaggagatgatgttcgggatggccgagaaggagatggagtaccgggtcgagcttttcaaccggcttacacatgtctgttttgagaagtgcattgagaaaaggcataaagaaggtgaactcaatatgggagagaacagttgcattgatcggtgtgtttcaaagtactggcaggtgactaacattgtcggcggaatgctcgggactcagcagaccccgatgtgagcgctctgagaagcagtagtcgcattttctgtagcaggataccgtcgccatgtttctcctccgtttttgttttggaatgttcgccgtttcgctaagtaaaagcatgagtgactgactaattcatatatactgttcaaaagggaacctcccagcgcgtcgtgctttccagtggtgtaccgtgtcactgaatcatgggcagaggcgcatgcctgtaataatttggtacagctcgatagattttgttgacgaagcttctcctttcatggct

SEQ ID NO: 14005 - protein, 94 aa, Glycine max
KKEGGQNPRAFLAAAPASPPPPPRDRGISTTAAAAAELARSPASSGLPSRLRRRDNGWPQGRAERAGEGDDVRDGREGDGVPGRAFQPAYTCLF

SEQ ID NO: 14006 - protein, 85 aa, Glycine max
MAGPKDVRSELEKEMMFGMAEKEMEYRVELFNRLTHVCFEKCIEKRHKEGELNMGENSCIDRCVSKYWQVTNIVGGMLGTQQTPM

SEQ ID NO: 14007 - protein, 71 aa, Glycine max
MMFGMAEKEMEYRVELFNRLTHVCFEKCIEKRHKEGELNMGENSCIDRCVSKYWQVTNIVGGMLGTQQTPM

SEQ ID NO: 14008 - DNA, 590 bp, Glycine max
aaaatgaaaccaaattgctaagaagcttcagatcactaatacgacgacgcattacggaactaagggttgtgttgtgtcgtttcgttttcactctcacgttctcaaattttgtttgtgtatcgcaggaattaggatccgttatggggttctctgtaaccacgctaattttcgcagtggttggaattgtggcgtccctttgtaccagaatttgtttcaacagaggaccttccgctaatctatttcacctaactttggttcttactgcaacaacatgctgctggatgatcgggcgattgtatatctatcacagatgaaaccgctcatagtacctatattgagtgagggtgaataactttctgtataaacagatgcaactcttaagaatgcgaatcactagttggacgctggagaggagatgatttcagctctcataaatcattcagtattttctctggctggatctgtatgtattgttgttggataatgacgtttcaattggatcatcttccattgtgggcattaccccatgttgttacaattgttgtattcaacccttgttcgttccataagtattttggttaaataagttg

SEQ ID NO: 14009 - protein, 103 aa, Glycine max
NETKLLRSFRSLIRRRITELRVVLCRFVFTLTFSNFVCVSQELGSVMGFSVTTLIFAVVGIVASLCTRICFNRGPSANLFHLTLVLTATTCCWMIGRLYIYHR

SEQ ID NO: 14010 - protein, 57 aa, Glycine max
MGFSVTTLIFAVVGIVASLCTRICFNRGPSANLFHLTLVLTATTCCWMIGRLYIYHR

SEQ ID NO: 14011 - DNA, 718 bp, Glycine max
attacacaccctctccctccggtagggttcttctcttctctcgcaatccaaacccataacacatcctcttcctccggtagggttctgctcttctctctcaatccaaatccattccatcttcaatctccgccatcacctaatctctgtgcaattccgcacacactactccgcaaagcgcgttcaagttcccttcttcatcgttcgcgtttttctctttcttcatggatgagtttggtgccgctgctccgaacactgaagatcacaaacaattcggacacgctttcaaagaaggtgtatttgatgcatcacaatatgcattctttggtaaagatgttgctgaggaagttgagttgagggggttagaagatgaagatgactataaggctatgcctgctgctgagttcaaggaggaagatttcttactcaataaagaagaggcagtggatgtaagatctctttccgatattgatgatctcactaccacttttttaaagttgaacaaggctgttagtggaccaagaagtccaggagttattggtgaacggggatcaagagaaagtgagtaagcaattgcttcagctaattgatgttacttatatgtatttatcactttgttaaattgcatatttttaacatgaggttcttaggattggatttcagtgtgtgaaaatatgacattattatctatttggggtgttaaattgtgatagcaaattct

SEQ ID NO: 14012 - protein, 117 aa, Glycine max
ITHPLPPVGFFSSLAIQTHNTSSSSGRVLLFSLNPNPFHLQSPPSPNLCAIPHTLLRKARSSSLLHRSRFSLSSWMSLVPLLRTLKITNNSDTLSKKVYLMHHNMHSLVKMLLRKLS

SEQ ID NO: 14013 - protein, 114 aa, Glycine max
MDEFGAAAPNTEDHKQFGHAFKEGVFDASQYAFFGKDVAEEVELRGLEDEDDYKAMPAAEFKEEDFLLNKEEAVDVRSLSDIDDLTTTFLKLNKAVSGPRSPGVIGERGSRESE

SEQ ID NO: 14014 - protein, 59 aa, Glycine max
MPAAEFKEEDFLLNKEEAVDVRSLSDIDDLTTTFLKLNKAVSGPRSPGVIGERGSRESE

SEQ ID NO: 14015 - DNA, 745 bp, Glycine max
tagaacatcctaatcgaaaaatacatttctggaacaatggtttcacagtagatgatggtccactaagagcctatgaggacgctgcaaatgcagacttcattgagagcatctagaagtcccagtgcccccaagagctggagcctgctgatcgaaggacagctgtccatgtcaatgttataaaacgacatggagattatgaggaacctgcaaggcctcgatcagctttccagggtgttggtagaacccttggtgggtcttcagcagatgagagtcctgcaccagctcctgtgacacaagagccccacggtgctcccaggtcaattggcatagttgtggacgactcgcagccctttacatccatacagctaaggttagcggacggcactcgcatggtcgctcggtttaaccttaaccacaccgtgggcgacatcaggtctttcattgatgcatcccgcccaggagctgcgcggccgtatcagttgcagactggcttcccacccaagcagctgactgaccctacgcagactgttgaccaagctggactcaagaactccgttatcatgcagaagatgtagttctcaccgagctggatctgtcgcacagaatgtctttccgatgcaattattaaattagtgctgctgaatggtttatcatgtccactagatactgcactttgcatgcaacctgtgatgtactggttgttttgtcgataaacgtcagtggagtctatattcgtcttgctacc

SEQ ID NO: 14016 - protein, 61 aa, Glycine max
MVARFNLNHTVGDIRSFIDASRPGAARPYQLQTGFPPKQLTDPTQTVDQAGLKNSVIMQKM

SEQ ID NO: 14017 - protein, 36 aa, Glycine max
EHPNRKIHFWNNGFTVDDGPLRAYEDAANADFIESI

SEQ ID NO: 14018 - protein, 35 aa, Glycine max
MRTLQMQTSLRASRSPSAPKSWSLLIEGQLSMSML

SEQ ID NO: 14019 - DNA, 864 bp, Glycine max
atggaagagaagagatcgatggagcaacccaccgatcgattcgccatggccacctttctgatcttcctcatacttgccctcgccgccggcagcagcaaccaaggaggagcagctgctgccgccgccggagcccgacctgaccttatcgtcatgaagctgcacggtcacgaccccgagggcccctccgtggccttccagacccacgacctctccttcgccggcttcaccaacgggggcggccactggcaggctttcccaggcctcgcccacctgttcccgacgtccacgcccctcccgttcggcagcagctacgacgacctcatcggcggcctcgccaacctgccgagggtgcctctggggcggcaggccatggccgacgccgcccgggtgctctccgcctacgacccgtccgcggccgcggccgccgacgtcgagccagtcaagcgcgcactggcagcgctcaaggtgatgctaggcgatgcccagcggctgcagcccatccacgagacggtcgttcgggggtgggagagcgagtcccgcgtcgcgcccgagcacctgccctacattgaccactgggacaccatctcctacgagatcatccgcgccaaccggacgggcaagtggaacgggcccttcgccaagatgctggaaacccaagccaacatccgcagccaggaggaggcgctcgccgtcgtccgggtgctgctccatgccgacttcgagcaggtgctccaggctcacggcaccaagatcaacttccagtgaacatgcatgcatgcatgcatgcttgctggcttagacttcagatttgtgctccatctcctattcgagtccatgtttctttaattaaccatgttcgttgtt

SEQ ID NO: 14020 - protein, 254 aa, Glycine max
MEEKRSMEQPTDRFAMATFLIFLILALAAGSSNQGGAAAAAAGARPDLIVMKLHGHDPEGPSVAFQTHDLSFAGFTNGGGHWQAFPGLAHLFPTSTPLPFGSSYDDLIGGLANLPRVPLGRQAMADAARVLSAYDPSAAAAADVEPVKRALAALKVMLGDAQRLQPIHETVVRGWESESRVAPEHLPYIDHWDTISYEIIRANRTGKWNGPFAKMLETQANIRSQEEALAVVRVLLHADFEQVLQAHGTKINFQ

SEQ ID NO: 14021 - protein, 248 aa, Glycine max
MEQPTDRFAMATFLIFLILALAAGSSNQGGAAAAAAGARPDLIVMKLHGHDPEGPSVAFQTHDLSFAGFTNGGGHWQAFPGLAHLFPTSTPLPFGSSYDDLIGGLANLPRVPLGRQAMADAARVLSAYDPSAAAAADVEPVKRALAALKVMLGDAQRLQPIHETVVRGWESESRVAPEHLPYIDHWDTISYEIIRANRTGKWNGPFAKMLETQANIRSQEEALAVVRVLLHADFEQVLQAHGTKINFQ

SEQ ID NO: 14022 - protein, 239 aa, Glycine max
MATFLIFLILALAAGSSNQGGAAAAAAGARPDLIVMKLHGHDPEGPSVAFQTHDLSFAGFTNGGGHWQAFPGLAHLFPTSTPLPFGSSYDDLIGGLANLPRVPLGRQAMADAARVLSAYDPSAAAAADVEPVKRALAALKVMLGDAQRLQPIHETVVRGWESESRVAPEHLPYIDHWDTISYEIIRANRTGKWNGPFAKMLETQANIRSQEEALAVVRVLLHADFEQVLQAHGTKINFQ

SEQ ID NO: 14023 - DNA, 589 bp, Glycine max
ctttacgtaatctagatgaaatccagaacgagatgtggtgctcgatgctgcctgtgcttcgaccctttgtccatccaggacatgtcattcatcgtgttctattgctgccatgcgtatcaccagtcttgcctcgaaggcggactggactcgatgaaatcaaacagcaacgcccgggacagcgacgatgggtcggaggacgacgacggttccccctcgggcgagtctagaatgcggtgtgtgctgtgcaccacagccgccgcataagttatactccctcattgagctgtccatattctgatgtgttgtgttgtaagttttgagccctgtaattattgcattgcgctcttctggggttgatgcatatgtaacaacaataggttgttgattctttgagggggagctgtgtgcgtcctccgcatgggttttctgtaaatttggcgcgctacctgagtttgagcaaggttttaacggcatttcttttttcctcaatgccacgcttgccagatcatgcaatgttcatgaagacttgttgttttgaagaaagtgggatgagcaattttatttttggtgtaatatatatttgttttcc

SEQ ID NO: 14024 - protein, 82 aa, Glycine max
MKSRTRCGARCCLCFDPLSIQDMSFIVFYCCHAYHQSCLEGGLDSMKSNSNARDSDDGSEDDDGSPSGESRMRCVLCTTAAA

SEQ ID NO: 14025 - protein, 74 aa, Glycine max
LRNLDEIQNEMWCSMLPVLRPFVHPGHVIHRVLLLPCVSPVLPRRRTGLDEIKQQRPGQRRWVGGRRRFPLGRV

SEQ ID NO: 14026 - protein, 64 aa, Glycine max
MWCSMLPVLRPFVHPGHVIHRVLLLPCVSPVLPRRRTGLDEIKQQRPGQRRWVGGRRRFPLGRV

SEQ ID NO: 14027 - DNA, 1238 bp, Glycine max
ctacaacaccagatgttctagataaaaacgtagaaaacaatttacaggagttctggcaggctacctatacaaaatcatcttcagtgactgaggtcccaaatgctgttgcaaatacaaaattggatattgctgatcttgtaaaacaacagagaaattcaccaaagtcaatgtccattccccgcagagcaccagaagttcctcttttggatatgacaaataatagcactatgttgaattgcatttctcgagacaccacagagcaccaatcccgtggcttatctgtccaactgccaccacttcaacaaacagactttgcatataagaatgacatgtctaagccagccaattcacatgaagcgaaaatctctcaagcactgcctgacaaacagatgtggtcatctcagattcgagttataaggctaagtgatggcttacctgtccaacagccaccagagcaacaaacagactttgcatataacaatggaacatctaagccagtcgaatcacaggaagggaagatctctcaagcactgcccaacaaacagatacggccatctcagcttgaggttatagagctatgtgatgacttatctgtccaacagcctccagagcaacaaacaaacttcacatataagaatggcatgtctaagccagccgaatcacaggaagtgaagatctctcaagcactgcccaacaaacagatactgcaatcacagctcgatgttatagagctaagtgatggcttacctgttcagcagctgccagagcaacaaataaattttgcatataagaatgacatgtctaagccagctgaattgcatgaagtgaagatctctcaagcacagtccaacaaacaaatacagccatctcagattcaagttatagagctaagtgatgacgatgatgaagaaaatgaaaaaccaagtactgcaaaactggttccttctgtgcaatcggataccttgatgtggcattacagagatcccatgggaaatgtacaaggaccattttccttaatttctctgaaacgttggagtgatgctggctactttccccgacatttcaaggtctggaagtcaggtaataggcaggatgaagatgtattactggtgaacatactagcccaatttttccccctttagtcaaattgcttattgatgcacattgtaaaatccaggtcaataattgtgttgtgattaccaggtaactgcaattgtaactagaaactcatgctctct

SEQ ID NO: 14028 - protein, 379 aa, Glycine max
TTPDVLDKNVENNLQEFWQATYTKSSSVTEVPNAVANTKLDIADLVKQQRNSPKSMSIPRRAPEVPLLDMTNNSTMLNCISRDTTEHQSRGLSVQLPPLQQTDFAYKNDMSKPANSHEAKISQALPDKQMWSSQIRVIRLSDGLPVQQPPEQQTDFAYNNGTSKPVESQEGKISQALPNKQIRPSQLEVIELCDDLSVQQPPEQQTNFTYKNGMSKPAESQEVKISQALPNKQILQSQLDVIELSDGLPVQQLPEQQINFAYKNDMSKPAELHEVKISQAQSNKQIQPSQIQVIELSDDDDEENEKPSTAKLVPSVQSDTLMWHYRDPMGNVQGPFSLISLKRWSDAGYFPRHFKVWKSGNRQDEDVLLVNILAQFFPL

SEQ ID NO: 14029 - protein, 324 aa, Glycine max
MSIPRRAPEVPLLDMTNNSTMLNCISRDTTEHQSRGLSVQLPPLQQTDFAYKNDMSKPANSHEAKISQALPDKQMWSSQIRVIRLSDGLPVQQPPEQQTDFAYNNGTSKPVESQEGKISQALPNKQIRPSQLEVIELCDDLSVQQPPEQQTNFTYKNGMSKPAESQEVKISQALPNKQILQSQLDVIELSDGLPVQQLPEQQINFAYKNDMSKPAELHEVKISQAQSNKQIQPSQIQVIELSDDDDEENEKPSTAKLVPSVQSDTLMWHYRDPMGNVQGPFSLISLKRWSDAGYFPRHFKVWKSGNRQDEDVLLVNILAQFFPL

SEQ ID NO: 14030 - protein, 310 aa, Glycine max
MTNNSTMLNCISRDTTEHQSRGLSVQLPPLQQTDFAYKNDMSKPANSHEAKISQALPDKQMWSSQIRVIRLSDGLPVQQPPEQQTDFAYNNGTSKPVESQEGKISQALPNKQIRPSQLEVIELCDDLSVQQPPEQQTNFTYKNGMSKPAESQEVKISQALPNKQILQSQLDVIELSDGLPVQQLPEQQINFAYKNDMSKPAELHEVKISQAQSNKQIQPSQIQVIELSDDDDEENEKPSTAKLVPSVQSDTLMWHYRDPMGNVQGPFSLISLKRWSDAGYFPRHFKVWKSGNRQDEDVLLVNILAQFFPL

SEQ ID NO: 14031 - DNA, 928 bp, Glycine max
accacaacaacacttaagctctactaaggggagaggagagaacacgatggcgtccctcccctcttcttccgtcctcctccctgtcctcatcctcatcctcgtcgctgctgcgaccgacgcggcgaccttcaccgtcatcaacaagtgccagtacacggtgtgggcggcggcggtgccggccggcgggggcaggcagctggacgcggggcagacgtggagcatcaacgtgccggccggcacgacgggcgggcgggtgtgggcgcgcacggggtgcagcttcgacggcgccggcaacgggcggtgccagacgggcgactgcggcggcaagctgcagtgcacgcagtacgggcaggcgcccaacacgctggccgagttcgggctcaacaagtacatgaacctcgacttcttcgacatctccctcatcgacgggtacaacgtgcccatgtcgttcctgccggcccccggctcccccgggtgccccaagggcgggcctcagtgccccagggtgatcacgccgcagtgccccaacgagctgcgggccgccggagggtgcaacaacgcgtgcacggtgttcaaggaggaccggtactgctgcaccgggtcggcggccaacaactgcgggccgaccgactactcgaggttcttcaagggccagtgctccgacgcctacagctaccccaaggacgacgccaccagcacctacacctgccccggcggcaccaactaccaggtcatcttctgcccatgatcgagctaaaactaggcagccattgaagcggtctcgatcgagcacacagacaagaaggagtctatctgatcttatataaaaataagcgtgattggatgcatacgttcatatgtacaatcacatgtaagcgggaaatggatgtattcgacaaggaaattgctaaaaagatttgagagggct

SEQ ID NO: 14032 - protein, 248 aa, Glycine max
PQQHLSSTKGRGENTMASLPSSSVLLPVLILILVAAATDAATFTVINKCQYTVWAAAVPAGGGRQLDAGQTWSINVPAGTTGGRVWARTGCSFDGAGNGRCQTGDCGGKLQCTQYGQAPNTLAEFGLNKYMNLDFFDISLIDGYNVPMSFLPAPGSPGCPKGGPQCPRVITPQCPNELRAAGGCNNACTVFKEDRYCCTGSAANNCGPTDYSRFFKGQCSDAYSYPKDDATSTYTCPGGTNYQVIFCP

SEQ ID NO: 14033 - protein, 233 aa, Glycine max
MASLPSSSVLLPVLILILVAAATDAATFTVINKCQYTVWAAAVPAGGGRQLDAGQTWSINVPAGTTGGRVWARTGCSFDGAGNGRCQTGDCGGKLQCTQYGQAPNTLAEFGLNKYMNLDFFDISLIDGYNVPMSFLPAPGSPGCPKGGPQCPRVITPQCPNELRAAGGCNNACTVFKEDRYCCTGSAANNCGPTDYSRFFKGQCSDAYSYPKDDATSTYTCPGGTNYQVIFCP

SEQ ID NO: 14034 - DNA, 875 bp, Glycine max
agtaatcggaaaattctagagcatcgagagtttcttcaatggcgaatctccccaccgttctcgttaccggcgctagtggcaaaacaggtcagattgtgtacaagaagctgaaggagaggtcagacaagtttgtggcgaaggggttagtgagaactcctcaagggaaagaggagattggaggagaagatgatgtgttcattggtgatataagggatgctgatagcattacccctgcgattcaagggatcgatgcgcttgtgattctcactagcgctgtgcccaagatgaaacctgggtttgatcccactaaaggtggaagacctgagttcattttcgatgatggacaataccctgaacaggttgattggattggccagaagaaccaaatagatgctgccaaggctgctggtgttaagcatattgtcttggttgggtccatgggtggaacaaatcctgatcatcctctcaacaaactgggaaatgggaacatactgatttggaagaggaaagctgaacagtaccttgctgattctggtactccttacacaataatcagagctggaggacttctagacaaagaaggaggtgcacgagagctcctagttggcaaagacgatgagcttcttcaaacagacaccaaaaccgtccccagggctgatgttgctgaagtctgcattcaggcattgctgttcgaggaagctaagaataaagcatttgatctcggttcaaaaccagagggaaccagttctcccaccaatgacttcaaggctctcttctctcaagtcatcgctcgtttttagatcttctatctctattgcaactgaataatttgtgttgtaatgtaccaaaccttttaaaataaaatctccgggttc

SEQ ID NO: 14035 - protein, 253 aa, Glycine max
MANLPTVLVTGASGKTGQIVYKKLKERSDKFVAKGLVRTPQGKEEIGGEDDVFIGDIRDADSITPAIQGIDALVILTSAVPKMKPGFDPTKGGRPEFIFDDGQYPEQVDWIGQKNQIDAAKAAGVKHIVLVGSMGGTNPDHPLNKLGNGNILIWKRKAEQYLADSGTPYTIIRAGGLLDKEGGARELLVGKDDELLQTDTKTVPRADVAEVCIQALLFEEAKNKAFDLGSKPEGTSSPTNDFKALFSQVIARF

SEQ ID NO: 14036 - protein, 171 aa, Glycine max
MKPGFDPTKGGRPEFIFDDGQYPEQVDWIGQKNQIDAAKAAGVKHIVLVGSMGGTNPDHPLNKLGNGNILIWKRKAEQYLADSGTPYTIIRAGGLLDKEGGARELLVGKDDELLQTDTKTVPRADVAEVCIQALLFEEAKNKAFDLGSKPEGTSSPTNDFKALFSQVIARF

SEQ ID NO: 14037 - DNA, 840 bp, Glycine max
gtttaaaaaaaaaaaccctagcaccagtcccgccgccgccgctgccgccctgaccctcgccgctgctgcagcctccaccgcgcaaccatgggtatcgacctcgtcgccggcggccgcaacaagaggaccaagcgcacggcgcccaaatcggacgatgtgtacctcaagctgctcgtcaagctctaccgcttcctggtccggaggaccaagagccagttcaacgccgtgatcctgaagcgcctcttcatgagcaagaccaaccgccccccgctctcgatgcgccgcctcgtcaggttcatggaggggaaggaggacaagatcgctgtgatagtgggcaccatcaccgatgaccagagggtctacgagataccggcaatgaaggtggccgcgctcaggttcaccgagacggcgagggccaggattgtcaatgccggtggcgagtgccttacctttgaccagctcgcgctccgtgctccgcttggacagaacacgcttctcctgaggggtcccaagaacgccagggaggctgttaggcactttggcaaggctccaggagtgccacacagccacaccaagccatatgtccactccaagggcaggaaattcgagaaggcaagaggaaggaggaacagcaggggcttcaaggtttaagccgtggagttttcggcacccttgtcacatttgctgttatcggtcaatcttcacttttttgggtaccagaatcatactgctttagatgtcagagtcttgtgtcgatgagtattcagaaccagttcattcttgtttcagtattttgcaacttgagaccatgcttgcaatccagttatgaatatcattttt

SEQ ID NO: 14038 - protein, 187 aa, Glycine max
MGIDLVAGGRNKRTKRTAPKSDDVYLKLLVKLYRFLVRRTKSQFNAVILKRLFMSKTNRPPLSMRRLVRFMEGKEDKIAVIVGTITDDQRVYEIPAMKVAALRFTETARARIVNAGGECLTFDQLALRAPLGQNTLLLRGPKNAREAVRHFGKAPGVPHSHTKPYVHSKGRKFEKARGRRNSRGFKV

SEQ ID NO: 14039 - protein, 134 aa, Glycine max
MSKTNRPPLSMRRLVRFMEGKEDKIAVIVGTITDDQRVYEIPAMKVAALRFTETARARIVNAGGECLTFDQLALRAPLGQNTLLLRGPKNAREAVRHFGKAPGVPHSHTKPYVHSKGRKFEKARGRRNSRGFKV

SEQ ID NO: 14040 - protein, 124 aa, Glycine max
MRRLVRFMEGKEDKIAVIVGTITDDQRVYEIPAMKVAALRFTETARARIVNAGGECLTFDQLALRAPLGQNTLLLRGPKNAREAVRHFGKAPGVPHSHTKPYVHSKGRKFEKARGRRNSRGFKV

SEQ ID NO: 14041 - DNA, 708 bp, Glycine max
atttttcgaaaaatggcctgaaaaataataattaaattgagaccattccaataagtgttaattaactgggagaaccaacccgcaaggctgccgaagatcttacggaaccttggatgcgtttgcttgtgttgtgtgattccgggaataaatgatccgattcatattgttgcagaacagacaaggcaagactcgtcttgcaaagtactatgttcctctcgaggagtccgagaaacacaaggttgaatacgaggttcatagattggtggtcaatcgcgactcgaagttcaccaatttcgtcgagtttagaacgcataaggttatataccggagatatgcagggttgtttttctcattgtgcgttgacataacagacaatgagttggcttaccttgaatgcatccacttgttcgttgagattttggaccatttcttcagcaatgtctgtgagcttgatttggttttcaacttccacaaggtgtacttaatactggatgaattcattcttgctggagagcttcaagaaacaagcaagcgggcgatcattgagaggatgtcagaactggagaagctcgagtaatgaggttgggatattatatgatagtcaagaatgaaaatgagcagtatgagtcttcctttttgctcctctctgttatgttctgtctaccttaaacacacaccttttcattttgatttattaaaactctaatg

SEQ ID NO: 14042 - protein, 142 aa, Glycine max
MIRFILLQNRQGKTRLAKYYVPLEESEKHKVEYEVHRLVVNRDSKFTNFVEFRTHKVIYRRYAGLFFSLCVDITDNELAYLECIHLFVEILDHFFSNVCELDLVFNFHKVYLILDEFILAGELQETSKRAIIERMSELEKLE

SEQ ID NO: 14043 - DNA, 657 bp, Glycine max
ttttttcctctcgcgccgccggaacagaatcgacccggagggaggaagcagcagcagcaggtcagcgagggaggagtagaggggatggcggacaagaagggcggagcgccgaggaaggaggaggtcgtcacgagggagtacaccgtcaacctccacaagcgcctccatggctgtaccttcaagaagaaggcacctaatgccatcaaagagctcaggaagtttgcacagaaggctatgggcacgacagacgtcaggatcgacgtgaagctcaacaagctcatctggagcagtgggatcagaagcgtgccccgtagggttcgcgtgaggattgcccgcaggaggaacgatgaggaggacgccaaggaggagctctactcactcgtcaccgttgccgaggtgcctgctgagggtttgaaggggctgggaaccaaggtcgtcgatgacactgagtagactcttttctttatctacatcgttagaatgagctgttatttggaattgcaccagcatgctttttgtatcccgcagaagttttggagtatggaatatcgggagctatctattttccttcatctaaatcttgatgattggttttgtccttcatactgtgctcgttattggcgtcaatacaggatgtgcagttgagcttgcagttcg

SEQ ID NO: 14044 - protein, 150 aa, Glycine max
FFPLAPPEQNRPGGRKQQQQVSEGGVEGMADKKGGAPRKEEVVTREYTVNLHKRLHGCTFKKKAPNAIKELRKFAQKAMGTTDVRIDVKLNKLIWSSGIRSVPRRVRVRIARRRNDEEDAKEELYSLVTVAEVPAEGLKGLGTKVVDDTE

SEQ ID NO: 14045 - protein, 122 aa, Glycine max
MADKKGGAPRKEEVVTREYTVNLHKRLHGCTFKKKAPNAIKELRKFAQKAMGTTDVRIDVKLNKLIWSSGIRSVPRRVRVRIARRRNDEEDAKEELYSLVTVAEVPAEGLKGLGTKVVDDTE

SEQ ID NO: 14046 - DNA, 598 bp, Glycine max
aacctatttttctgattaagtagagagagtctgcccgccaaaaagaggcagtggctaccaagcaacaatcgattggagtgaaagatgagtagcatgaaattttgccgccgctgcaacaacgttctgtaccctacggaggataaggaggagaagctacttctctatgcttgccgcaactgcaatcacgaggagattgccgatagtaacgttgtgtatagaaataagatacatcattctgttcaacggcgcactcgagagctggaaaatgtagctgcagatccaacacttcctcgcaccaagtctgttcgctgctctcaatgcaatcatggagaagctgtctttttcaaggcaccagtaaaaggggaagaaggcatggccctcatttttgtttgctgcaacccaacttgtggctaccgttggagagactaggactcttaatagtcaaggttcaacattggggagttgagcatatcaaattcttcactcttggatggatgagaaactttatttgtatatataaaacttggctagtgtgaggacgttcataattaagtatttgtgatcactgtttaatctccctaaacaattatgttgacgc

SEQ ID NO: 14047 - protein, 114 aa, Glycine max
MSSMKFCRRCNNVLYPTEDKEEKLLLYACRNCNHEEIADSNVVYRNKIHHSVQRRTRELENVAADPTLPRTKSVRCSQCNHGEAVFFKAPVKGEEGMALIFVCCNPTCGYRWRD

SEQ ID NO: 14048 - protein, 111 aa, Glycine max
MKFCRRCNNVLYPTEDKEEKLLLYACRNCNHEEIADSNVVYRNKIHHSVQRRTRELENVAADPTLPRTKSVRCSQCNHGEAVFFKAPVKGEEGMALIFVCCNPTCGYRWRD

SEQ ID NO: 14049 - protein, 72 aa, Glycine max
MQSWRSCLFQGTSKRGRRHGPHFCLLQPNLWLPLERLGLLIVKVQHWGVEHIKFFTLGWMRNFICIYKTWLV

SEQ ID NO: 14050 - DNA, 630 bp, Glycine max
accttgttaaggagagaatatagtatggcacaatctagtggcaaaaaattggttgagtggctggttgcagcattattgttcattgccttgttgagtggtagtgcacatgctgttgcaatatgtaacattgactcaagtcaactgaacttgtgtcgtgctgcagttactggtcaaaaccctccaccacctgatgagaaatgctgtgcagttattcgccaggccaatttgcgttgcctctgcagttacaagtctatcctaccttcatttggaattaaccccaaaaatgctttggccttgcctgctaaatgtggtccacaattgcctcctaattgttgagtgctgtgaagcagttaacgaaggtcaagttcattacaagcaccttaattagtagtcttcaattgctttcaggtgttttactaacactgaagataaattttaagacaggatttgatgcccctcaaataacggtgcagttggttttaatcagtgtcttgtgtccaaaagtttgtgagtagatgtgtagagtattagtgtttgatgtacaggaatactttgtatctgtactttttttccctccatgtctatgtctacattataatatgtttaataaagtttctggttttggggctc

SEQ ID NO: 14051 - protein, 111 aa, Glycine max
TLLRREYSMAQSSGKKLVEWLVAALLFIALLSGSAHAVAICNIDSSQLNLCRAAVTGQNPPPPDEKCCAVIRQANLRCLCSYKSILPSFGINPKNALALPAKCGPQLPPNC

SEQ ID NO: 14052 - protein, 103 aa, Glycine max
MAQSSGKKLVEWLVAALLFIALLSGSAHAVAICNIDSSQLNLCRAAVTGQNPPPPDEKCCAVIRQANLRCLCSYKSILPSFGINPKNALALPAKCGPQLPPNC

SEQ ID NO: 14053 - protein, 65 aa, Glycine max
MRNAVQLFARPICVASAVTSLSYLHLELTPKMLWPCLLNVVHNCLLIVECCEAVNEGQVHYKHLN

SEQ ID NO: 14054 - DNA, 580 bp, Glycine max
aacatcctaatcgaaaaatccatcacacaagctagctactagctactagaaagtacttactgctcaatcggtcgatgagggtgtcaagcatggcgtccaagggtctcgttgtgtttgctgtcctgcttgctgcggctttcctcgtggccacagctgaacaaactcaggccaagaaggaagaaactaaggccggtgttcagggttaccacggcggcggcagcggaggcggcggcggcggcggcggcggcagcggctgcaggtaccagtgctgtgggcacgggcatggtggctgccgctgctgcgcaagccccaacgagatcccggagcccatgtatcgggcggaggtccgcaactaagtgccagatgctccacacggacgttgctacttgcctgcacgtagtaactactcgtatatgtggtcaataagaaggtaggtgcatgtatgtatgtacgcgtacgtacagattgcacagttatgtttacccaataataccagaactctgttctgatcgtgtattcaccctgtaagacttctctttcttgcacaatatataatacatgcaactgtcatgcatgttat

SEQ ID NO: 14055 - protein, 93 aa, Glycine max
MRVSSMASKGLVVFAVLLAAAFLVATAEQTQAKKEETKAGVQGYHGGGSGGGGGGGGGSGCRYQCCGHGHGGCRCCASPNEIPEPMYRAEVRN

SEQ ID NO: 14056 - protein, 88 aa, Glycine max
MASKGLVVFAVLLAAAFLVATAEQTQAKKEETKAGVQGYHGGGSGGGGGGGGGSGCRYQCCGHGHGGCRCCASPNEIPEPMYRAEVRN

SEQ ID NO: 14057 - protein, 47 aa, Glycine max
MVAAAAAQAPTRSRSPCIGRRSATKCQMLHTDVATCLHVVTTRICGQ

SEQ ID NO: 14058 - DNA, 438 bp, Glycine max
agattagtcacactcttcgcaagcacacaaaaaaaaaaaacccccaaatagcgtaaggataagcctcgccggcgacgaaatcagggtttcatcgaacaagaagatggctcacgcttgcgtctccacatcagcttcctctctcaggtttacagccggattcgtctccgcgagtcccaacgcctcctctttcgattctcagaagctttccctccctttcgagcctcttcgttcaagaaagacgaagaagttggttagcggcagaaagacggctccgaaggctgtatactccggcaatgtctggactccggagactccttcgcctcaaggagtttggtccatcagagatgatttacaagtcccttcttcgccgtattttcctgtgtacgctcaaggacaaggaccacctcctatggtgcaagagcgtttccagagtatcat

SEQ ID NO: 14059 - protein, 111 aa, Glycine max
MAHACVSTSASSLRFTAGFVSASPNASSFDSQKLSLPFEPLRSRKTKKLVSGRKTAPKAVYSGNVWTPETPSPQGVWSIRDDLQVPSSPYFPVYAQGQGPPPMVQERFQSI

SEQ ID NO: 14060 - DNA, 472 bp, Glycine max
cccaaaacccatggttggacccaaggatcaccagcgctttcaagcttcttatgcaactatattaaaggcccatatgactgctataaagaagagagaaaggaaagacaagaagaagcctgcaaaggcagataaaagagaaggaagttcaaagagactgaaaagattttggcttgttttgttttcattagtgttcctatcacaaatggactagatacctgtccttctaccaaagggtcttctgttcatagttccttgccaaagtctcgggtgtgtgagtattcggcagagcgaagggagatatctacaaaaggcacttcaatgctcaagtgaaggtgttacgactaacccttggatcatgaccagcgcacagactatgatttcgttagtctggctagcctaccctatattaaataacctgtaaaagaacacatgatatatctaggcaaatctatatatatatctcattccatcc

SEQ ID NO: 14061 - protein, 69 aa, Glycine max
PKPMVGPKDHQRFQASYATILKAHMTAIKKRERKDKKKPAKADKREGSSKRLKRFWLVLFSLVFLSQMD

SEQ ID NO: 14062 - protein, 66 aa, Glycine max
MVGPKDHQRFQASYATILKAHMTAIKKRERKDKKKPAKADKREGSSKRLKRFWLVLFSLVFLSQMD

SEQ ID NO: 14063 - protein, 45 aa, Glycine max
MTAIKKRERKDKKKPAKADKREGSSKRLKRFWLVLFSLVFLSQMD

SEQ ID NO: 14064 - DNA, 1382 bp, Glycine max
ttttcacattacatcacctttcagtttttggtttctgattctgcattctgcattcaactttaaggcctattaatattattacacctgtgtttccaccttaattctcttatcaaccagaccagagtatagcggcaatatagtaggatcattatgacttgtggctgctttggagccaaatctataaaggcaaaacgcccttcttatgttcctggtgaaattgatggctatccgctagataatataaggcaattttctgataaagaactgagattagcaactgataattataatccaaagaataagataggacgaggaggttttggaaccgtttaccagggaaccttaagagatggaaggcgtatagcagtgaagactctctcagtttggtcaaagcagggagttcgcgaatttttgactgaaattaaaactttgtcaaatgttaaacattcaaaccttgttgaattgattggattctgcattcaaggacctagtcgtacattagtctacgagcatgtggaaaatggaagccttaatagtgccctacttggcacaaggaataaaaacatgaaactagaatggagaaaaaggtctgctatttgtctaggtattgctaagggtcttgcatttcttcatgaagaactttcaccaccctattgtacacagagacatcaaagctagtaatgtactacttgacagagatttcaatcccaaaataggtgattttgggctggctaaattatttccagatgacgtcactcacattagcacaagaattgctggaacaacaggttacttagcaccggaatatgcattaggtggccagttaaccaagaaggctgatatatacagctttggggttcttatacttgaaataattagtggcagaagcagtgccagaaggacaaacgggggaggatcacacaaattcctcttggaatgggcctggcaactttatgaagagaggaaattgttggagtttgtagatcaagacatggaagaatttcctgaggaagaggtaatcaggtacatgaaggttgctcttttctgcacacagtcagcagcaaatagaaggccattgatgatacaagttgttgatatgctatccaaggcaatccaactcaatgagaaagaacttacagcgccaggattcttcacaaacgaaggagaatcctctagaaataactcaaaccctatctcttctattattactattactcaagtgaccccacggtaatgtgaattgcagggttgcaaatggagtaaaaaagtaatgtttgtttcttaaaagattatgtgatagtcttctattattttgtttcaatttttttccaaagaatataatataacatggcatgaaagcaatttggtgctagtgcatgttg

SEQ ID NO: 14065 - protein, 200 aa, Glycine max
MKNFHHPIVHRDIKASNVLLDRDFNPKIGDFGLAKLFPDDVTHISTRIAGTTGYLAPEYALGGQLTKKADIYSFGVLILEIISGRSSARRTNGGGSHKFLLEWAWQLYEERKLLEFVDQDMEEFPEEEVIRYMKVALFCTQSAANRRPLMIQVVDMLSKAIQLNEKELTAPGFFTNEGESSRNNSNPISSIITITQVTPR

SEQ ID NO: 14066 - protein, 175 aa, Glycine max
MTCGCFGAKSIKAKRPSYVPGEIDGYPLDNIRQFSDKELRLATDNYNPKNKIGRGGFGTVYQGTLRDGRRIAVKTLSVWSKQGVREFLTEIKTLSNVKHSNLVELIGFCIQGPSRTLVYEHVENGSLNSALLGTRNKNMKLEWRKRSAICLGIAKGLAFLHEELSPPYCTQRHQS

SEQ ID NO: 14067 - DNA, 1201 bp, Glycine max
attttatttctttcaattgcaggacaactggttactgttaacagcagattattctcagatagaattgagattgatggctcacttctctaaagactcttcacttgttgaacttctcagtaagcctgatggtgatgtctttacaatgatagcagcaagatggactgggtgtcctgaggtttctgtgtgttctaaggagagagagcagaccaaaaggatggtgtatggcattctttatggtatgggggtcaatagccttgcagaacaactggattgcacttctgatgaagctgctgaaaagattgctaacttcaaaagctcttttcctggtgtttcttcctggcttcttgaagccgttgcgtcttgtcgcagtaaaggatatgttgagactcttaagggaagaaaaaggtttttgtcaaaaataaaatatggcagcagtacagaaaaatcaaaagctcagaggcaagctgtaaattccatttgtcagggatctgcggcagacataattaagattgcaatgttaagaatttactctgcaattgtcactggatttgatagtccagattccagttcttcactagcaaccaagtttcacatgcttaaagatcgttgccggattctgttacaggtacacgatgaattaatgttggaagttgatccttctgtgataaaagaagcagccctactattgcagacaagcatggagaatgcggtctcacttcttgttcctttgcatgtcaaacttaaggttggaagaacatggggatctttggagccatatacatccgataaattcaacaatgccactcttgtggctgaatcctgaagcacagaggttatttttatgacccaaggataaagtatttgatgatgttgaggatgcattctccataattgattcggaggtttggtgtggtggggaattatccgaatgcccaagggaagaattatgacgaagaggcttacggtgtatagtatctggagtcctcgctgagtaatagacaaaagggtaatgttttgtgtacacccatatgctgaaaaagaaatagaagatagcgaagtgatagatgtcacaagtaatgtgacacgagaagaaaacgatccaggcagtgtgtcaaatgagtgtttgtaatattgacgtgtccatgtcattcaaaataaaatgagtttcagtgcctagccactgatagcactgctatttttc

SEQ ID NO: 14068 - protein, 273 aa, Glycine max
FYFFQLQDNWLLLTADYSQIELRLMAHFSKDSSLVELLSKPDGDVFTMIAARWTGCPEVSVCSKEREQTKRMVYGILYGMGVNSLAEQLDCTSDEAAEKIANFKSSFPGVSSWLLEAVASCRSKGYVETLKGRKRFLSKIKYGSSTEKSKAQRQAVNSICQGSAADIIKIAMLRIYSAIVTGFDSPDSSSSLATKFHMLKDRCRILLQVHDELMLEVDPSVIKEAALLLQTSMENAVSLLVPLHVKLKVGRTWGSLEPYTSDKFNNATLVAES

SEQ ID NO: 14069 - protein, 249 aa, Glycine max
MAHFSKDSSLVELLSKPDGDVFTMIAARWTGCPEVSVCSKEREQTKRMVYGILYGMGVNSLAEQLDCTSDEAAEKIANFKSSFPGVSSWLLEAVASCRSKGYVETLKGRKRFLSKIKYGSSTEKSKAQRQAVNSICQGSAADIIKIAMLRIYSAIVTGFDSPDSSSSLATKFHMLKDRCRILLQVHDELMLEVDPSVIKEAALLLQTSMENAVSLLVPLHVKLKVGRTWGSLEPYTSDKFNNATLVAES

SEQ ID NO: 14070 - protein, 226 aa, Glycine max
MIAARWTGCPEVSVCSKEREQTKRMVYGILYGMGVNSLAEQLDCTSDEAAEKIANFKSSFPGVSSWLLEAVASCRSKGYVETLKGRKRFLSKIKYGSSTEKSKAQRQAVNSICQGSAADIIKIAMLRIYSAIVTGFDSPDSSSSLATKFHMLKDRCRILLQVHDELMLEVDPSVIKEAALLLQTSMENAVSLLVPLHVKLKVGRTWGSLEPYTSDKFNNATLVAES

SEQ ID NO: 14071 - DNA, 742 bp, Glycine max
agcttgggaggaaataatatcatttccgttctcaaaatcataacagtacttcgcgtgccctagctcactccgtcgctcctcacccttccggcagtgcttggtcgtggccgtcacggttcaaacttcaaaagcatttgttgtgttggagtaggctatggatgacttgtttgattcttcgctgaacttggaggacacccattacaaggaaggctatgacgaaggctacagccatggccttgtcactggcaaggaagaagctaggcaggttggcctcaaggttggctttgaggttggcgaggagcttggtttctataggggttgtgtcgaaatctggacttctgcgatccggctcgacccaacctgtttctctccacgggctaaaacatttatttgccagatggaggagttgatccagaaataccctctcatggatccagaaaatgcacaagtgcaagagatcatggatagcctcaggctcaagttcaagatggtttgttcttccttgcatgtcaaacttgagtataatgggtatcccaaatcttctacggaggtcaatgatattcaattctgagctagttatgatattttcagtctttagggatatccatgtgtagggaacctctgagttgggttagttgatgaacaaattacgtgttatcattttacaaacatttgtgcaagtcaatgtatcgaataattattttatattaaaaatgatgatatatacattgtttatgaacgt

SEQ ID NO: 14072 - protein, 138 aa, Glycine max
MDDLFDSSLNLEDTHYKEGYDEGYSHGLVTGKEEARQVGLKVGFEVGEELGFYRGCVEIWTSAIRLDPTCFSPRAKTFICQMEELIQKYPLMDPENAQVQEIMDSLRLKFKMVCSSLHVKLEYNGYPKSSTEVNDIQF

SEQ ID NO: 14073 - DNA, 1699 bp, Glycine max
acttttgttgtctaacatggctttggtgaatccgtttctgtgtaccactcgaacgtccctccctctgcgagtttcaggtccaccaaaccaagtcctaccacgttggactctctgctcccaatattcattcaaaacatcatcactaagatcgaagcaactcaggtgtggcgccactgcagacatcaaagcagatcacgcggttcttgtgggccccaccagcgaggaggagagaaaaggggactatgactggacacaggaatggtaccctttgtatctcactcagaatgtgcccgaagatgcacctttgggtctcagagtgtttgataaacagctcgtgttgttcaaggatggcaatggccagtttcgctgttacgaagatcgctgcccccacaggttagcgaaactatctgagggacagttgattgatggaaggctcgagtgtctataccatggatggcaatttgaaggggagggaaaatgtgtgaagatacctcagcttccagctgatgccaaaatcccaagggctgcttgtgttaaaacatatgaagtgagggactctcaaggtgttatttgggtatggatgtccctcaagacacctccaaatgtcagtaaattaccttggtttgagaacttcgcaaggccggggtttcaagatgtttcgacaattcacgaactcccttatgatcactctattcttctggagaacctgatggatcctgctcatatcccaatctcccatgacagaacagattggactgcgaaaagggaggatgctcagccgctgtgttttgaggtgaccgaacgaacagatagagggtttgcaggttggtggggcagagagaaagatggatccatgcctaacttcttgcggtttgaggctccttgtgttctacaaaacaacagggaaattgttgataagaatggtgaaataaactacttcagtggcctgttcctttgtagaccaaccgggcaagggaaatccatgctgatagttaggtttggaggaacaaaaagatctccactagcaaaagtgtttcctaagtggtacttccatcagaatgcaagcaaggtgtttgagcaagacatgggattcttgtcatcacaaaatgaaattcttctgagagaaaaggttccaacaaaggaactatacctgaatctgaaatcatcagacacatgggttgctgaatacaggaagtggatggacaaagcggggcatggaatgccatatcattttggtcacagcactatctctttgcctaaagagcctgctgtggttgaacacgcacctgctggactagtcgcaggacaatcagcttcctcaccaaccaaggggggcattggaacaatgcatgcccctaattttgccaacagatattttaggcatgtgattcattgcaaaggatgtagaaccgtcgtcaaagctttcgaagcttggaaaaatgctctttcagctgtggcaattgcattaactgcgttggcaattctgctttctgggagacaatggaaggtccttctcttggcatctgcagctctctgctctgttggagtctatgcttgctcaaccgccattgcaatgaatacaacaaattttattaggacacataggagattgtgagtgactggttgtaaaaatagttgttcaaatgaatactaaacagtttgtctaatgactaattagttgttacagattgtgtttggc

SEQ ID NO: 14074 - protein, 537 aa, Glycine max
LLLSNMALVNPFLCTTRTSLPLRVSGPPNQVLPRWTLCSQYSFKTSSLRSKQLRCGATADIKADHAVLVGPTSEEERKGDYDWTQEWYPLYLTQNVPEDAPLGLRVFDKQLVLFKDGNGQFRCYEDRCPHRLAKLSEGQLIDGRLECLYHGWQFEGEGKCVKIPQLPADAKIPRAACVKTYEVRDSQGVIWVWMSLKTPPNVSKLPWFENFARPGFQDVSTIHELPYDHSILLENLMDPAHIPISHDRTDWTAKREDAQPLCFEVTERTDRGFAGWWGREKDGSMPNFLRFEAPCVLQNNREIVDKNGEINYFSGLFLCRPTGQGKSMLIVRFGGTKRSPLAKVFPKWYFHQNASKVFEQDMGFLSSQNEILLREKVPTKELYLNLKSSDTWVAEYRKWMDKAGHGMPYHFGHSTISLPKEPAVVEHAPAGLVAGQSASSPTKGGIGTMHAPNFANRYFRHVIHCKGCRTVVKAFEAWKNALSAVAIALTALAILLSGRQWKVLLLASAALCSVGVYACSTAIAMNTTNFIRTHRRL

SEQ ID NO: 14075 - protein, 532 aa, Glycine max
MALVNPFLCTTRTSLPLRVSGPPNQVLPRWTLCSQYSFKTSSLRSKQLRCGATADIKADHAVLVGPTSEEERKGDYDWTQEWYPLYLTQNVPEDAPLGLRVFDKQLVLFKDGNGQFRCYEDRCPHRLAKLSEGQLIDGRLECLYHGWQFEGEGKCVKIPQLPADAKIPRAACVKTYEVRDSQGVIWVWMSLKTPPNVSKLPWFENFARPGFQDVSTIHELPYDHSILLENLMDPAHIPISHDRTDWTAKREDAQPLCFEVTERTDRGFAGWWGREKDGSMPNFLRFEAPCVLQNNREIVDKNGEINYFSGLFLCRPTGQGKSMLIVRFGGTKRSPLAKVFPKWYFHQNASKVFEQDMGFLSSQNEILLREKVPTKELYLNLKSSDTWVAEYRKWMDKAGHGMPYHFGHSTISLPKEPAVVEHAPAGLVAGQSASSPTKGGIGTMHAPNFANRYFRHVIHCKGCRTVVKAFEAWKNALSAVAIALTALAILLSGRQWKVLLLASAALCSVGVYACSTAIAMNTTNFIRTHRRL

SEQ ID NO: 14076 - protein, 344 aa, Glycine max
MSLKTPPNVSKLPWFENFARPGFQDVSTIHELPYDHSILLENLMDPAHIPISHDRTDWTAKREDAQPLCFEVTERTDRGFAGWWGREKDGSMPNFLRFEAPCVLQNNREIVDKNGEINYFSGLFLCRPTGQGKSMLIVRFGGTKRSPLAKVFPKWYFHQNASKVFEQDMGFLSSQNEILLREKVPTKELYLNLKSSDTWVAEYRKWMDKAGHGMPYHFGHSTISLPKEPAVVEHAPAGLVAGQSASSPTKGGIGTMHAPNFANRYFRHVIHCKGCRTVVKAFEAWKNALSAVAIALTALAILLSGRQWKVLLLASAALCSVGVYACSTAIAMNTTNFIRTHRRL

SEQ ID NO: 14077 - DNA, 744 bp, Glycine max
aacatcctaatcgaaaaatctttttcaacaaccttatcaacaatgcaagagcttcatgaagcggcaattgcttattacaacaacggctccacggatcaacagactttggcatggcagtttttctgttcaatggacggtgacggtaatggccgtgtcagctttcgagagtataccgacttcttgtgtagaaccaccggtttcgcttgggtccatagcgagatgtttcaggagctcgaccggaatagagacggccagcttgacttctgggaggtcttgacgctttactatgtggctcggacgcggaccattggctgccgcacgtgcctccagcctctcattggtttgtactttacgtgtgtaacgtgctttgaatcgcaatgtgttggcgacacgtttgatctctgcgtcaagtgttatatgcggcggaattataatcatccgcatcgtgtcttcctggatagttttgttttattacgatctaagcgtagccaccctcctatgttgcaggagccgcctggcgaccaaaacatgcccgaacaacatcctgggatgatgggatggtgcaccgcgttgtcagcaatggaagctgcatttgctgtgggatcttttgctggcttttgcactattatgtaaaaatcatgttctatctcattgttgtttttgttcttaaatatttagccaataaacgcactataagtttaaatggcagactacaagataagagagtaatactacaaccttgat

SEQ ID NO: 14078 - protein, 210 aa, Glycine max
NILIEKSFSTTLSTMQELHEAAIAYYNNGSTDQQTLAWQFFCSMDGDGNGRVSFREYTDFLCRTTGFAWVHSEMFQELDRNRDGQLDFWEVLTLYYVARTRTIGCRTCLQPLIGLYFTCVTCFESQCVGDTFDLCVKCYMRRNYNHPHRVFLDSFVLLRSKRSHPPMLQEPPGDQNMPEQHPGMMGWCTALSAMEAAFAVGSFAGFCTIM

SEQ ID NO: 14079 - protein, 196 aa, Glycine max
MQELHEAAIAYYNNGSTDQQTLAWQFFCSMDGDGNGRVSFREYTDFLCRTTGFAWVHSEMFQELDRNRDGQLDFWEVLTLYYVARTRTIGCRTCLQPLIGLYFTCVTCFESQCVGDTFDLCVKCYMRRNYNHPHRVFLDSFVLLRSKRSHPPMLQEPPGDQNMPEQHPGMMGWCTALSAMEAAFAVGSFAGFCTIM

SEQ ID NO: 14080 - protein, 167 aa, Glycine max
MDGDGNGRVSFREYTDFLCRTTGFAWVHSEMFQELDRNRDGQLDFWEVLTLYYVARTRTIGCRTCLQPLIGLYFTCVTCFESQCVGDTFDLCVKCYMRRNYNHPHRVFLDSFVLLRSKRSHPPMLQEPPGDQNMPEQHPGMMGWCTALSAMEAAFAVGSFAGFCTIM

SEQ ID NO: 14081 - DNA, 1347 bp, Glycine max
atccaatcttcactcactctctaatttactacagaaaaaaaaaaaagatgagtagtgttttttcagaacacaaattccaacttcaaccctctcaccaacttctctccctcaagaaatccctgagggacatagacatcccagtcccaccaaggaagctcctcacccgccgctccgccgccgtccacgacgtctccggcgacatgttttccgatgacaccctccggcacaagtaccttccccacaatggctccaccgactcctccgacgatgactccggcgacccctacgcctccgatcaattccgcatgtttgagttcaaggtccggcgctgtactcgcagccggagccatgactggacagactgtccatttgtacatcccggcgagaaggcccgccgtcgggaccctcgccggtttcattactctgcaacagtctgtccagagtttcgccgcggtcagtgtgaccgtggcgatgcatgtgagttttctcatggggtgtttgagtgctggttacacccttctaggtatagaaccgaggcttgcaaggatggtaggaattgcaagcgaaaagtttgcttctttgctcacacccctcgccaactcagggttttgcattccaatgaaaatagcaacaagaaaaagtgcaccaatatgagccctcataacaacaacaacaacaccaacaattgttgtttggtttgccattgctcttcttctactcgttcaccaacttcaaccttgttcggcatgtctcatttttctcctccattgtcaccaccttctccttcttccccttctaggtttgagaccaaccatcatcatggtgttgtgaaatataataaggatgtgctctctgagcttatgtgttccatggagggtttgaattttggtgaggcttcacttttgtctgctgcttctaagcctcacaacaatttgtcttcttggcttgatgtttctgaggatcacaatcaaaaacagttcagtactctttcaccaaccatcactgcttgtggaagcttttccaacaacggaaatgggagatttttgagagaagaaagtggggttgttgatgatgttatttccccagatctcgcatgggtgaatgaattactgatgtagattatatgcatttgaagatgatgatgacaaaaagtggttcgtggtgggaattgtgatgaggatttaccaagtgtaaatacatgttggagctagcaacatatattacatccttggcttcttttcttattattgttttaagaattttattgctttctgaatttgttttaagatttgtcaaattaaattctgtaatttttatgtccattaattagatttgatcttttattcc

SEQ ID NO: 14082 - protein, 371 aa, Glycine max
PIFTHSLIYYRKKKKMSSVFSEHKFQLQPSHQLLSLKKSLRDIDIPVPPRKLLTRRSAAVHDVSGDMFSDDTLRHKYLPHNGSTDSSDDDSGDPYASDQFRMFEFKVRRCTRSRSHDWTDCPFVHPGEKARRRDPRRFHYSATVCPEFRRGQCDRGDACEFSHGVFECWLHPSRYRTEACKDGRNCKRKVCFFAHTPRQLRVLHSNENSNKKKCTNMSPHNNNNNTNNCCLVCHCSSSTRSPTSTLFGMSHFSPPLSPPSPSSPSRFETNHHHGVVKYNKDVLSELMCSMEGLNFGEASLLSAASKPHNNLSSWLDVSEDHNQKQFSTLSPTITACGSFSNNGNGRFLREESGVVDDVISPDLAWVNELLM

SEQ ID NO: 14083 - protein, 356 aa, Glycine max
MSSVFSEHKFQLQPSHQLLSLKKSLRDIDIPVPPRKLLTRRSAAVHDVSGDMFSDDTLRHKYLPHNGSTDSSDDDSGDPYASDQFRMFEFKVRRCTRSRSHDWTDCPFVHPGEKARRRDPRRFHYSATVCPEFRRGQCDRGDACEFSHGVFECWLHPSRYRTEACKDGRNCKRKVCFFAHTPRQLRVLHSNENSNKKKCTNMSPHNNNNNTNNCCLVCHCSSSTRSPTSTLFGMSHFSPPLSPPSPSSPSRFETNHHHGVVKYNKDVLSELMCSMEGLNFGEASLLSAASKPHNNLSSWLDVSEDHNQKQFSTLSPTITACGSFSNNGNGRFLREESGVVDDVISPDLAWVNELLM

SEQ ID NO: 14084 - protein, 305 aa, Glycine max
MFSDDTLRHKYLPHNGSTDSSDDDSGDPYASDQFRMFEFKVRRCTRSRSHDWTDCPFVHPGEKARRRDPRRFHYSATVCPEFRRGQCDRGDACEFSHGVFECWLHPSRYRTEACKDGRNCKRKVCFFAHTPRQLRVLHSNENSNKKKCTNMSPHNNNNNTNNCCLVCHCSSSTRSPTSTLFGMSHFSPPLSPPSPSSPSRFETNHHHGVVKYNKDVLSELMCSMEGLNFGEASLLSAASKPHNNLSSWLDVSEDHNQKQFSTLSPTITACGSFSNNGNGRFLREESGVVDDVISPDLAWVNELLM

SEQ ID NO: 14085 - DNA, 1365 bp, Glycine max
agagattagaaactaattactcttgtgatattctctcacaagggtgtgtaattaaggcatagaaaatatggcatcctttgccagcaataattatcctttggtgtttttctttgttctcttttcactggccatgcgcttagctcatgggactaattatgcaccaacattattcatatttggagactcaacttttgatgttggaaccaacaactttcttaattctaaagcaaaggccaacttcccctacaatggcattgatttttatcctccatttcccacaggaaggtttagtaatggcttcaacactgctgaccaaattgcgagacaattcggttataagcagagcccaccaccatttttaactttggagaaagaccaatacagcctaaagaagaacattctgaagggtgtaaattttgcttcagggggatctggaattcttagagaaacagggcactcagaatggggagaagtggttttctttgaaaggcaggtggaacaatttgcatcggttggtggaaacatcagtgagatgttgggacatgcacaagctgctaaatttgtttccaaggctttgtttctcattagcgttggaagcaacgacatcttcgattatgcacgtaacgacagtggctccattcatttgggcgcagaagaatacttagctgttgtacaactcacatattactctcatataaagaaactatatgagttgggggcaaggaaatttggcatcataagcgttgcaaccgtaggttgctgtcctgctgtaagctctctcaatggagggaagtgcgtggaaccactgaatgattttgcagttgcattttatttagctacacaagctcttctgcaaaagttgagttcagaattgaaagggttcaagtactcacttggcaactcttttgaaatgacctcgaccttgttaaagagtccatcgtccttcgggttgaagtatacacagtcagcatgctgcggaattggatatctgaatgggcaaggtggatgcataaaagcccaaaacgccaatctttgcacaaatcgcaatgagttcttgttttgggattggtttcatcccactgagatagcttctttgttggcagctaagacattatttgaaggagacaaagagtttgtaactccagtgaatttacgtcagctagcttattcctattgatcatgtctaagccataacataagtaaccaattactataatttgaagtgaaataacgtagctggcatctctcactagtgccggttttaggctctttttttcttttgttgagaaaaattctcatgcataatctaatgatatgctaataagagttgctatttataaaaaaaaaaaaaaaaaagcttatcga

SEQ ID NO: 14086 - protein, 369 aa, Glycine max
MASFASNNYPLVFFFVLFSLAMRLAHGTNYAPTLFIFGDSTFDVGTNNFLNSKAKANFPYNGIDFYPPFPTGRFSNGFNTADQIARQFGYKQSPPPFLTLEKDQYSLKKNILKGVNFASGGSGILRETGHSEWGEVVFFERQVEQFASVGGNISEMLGHAQAAKFVSKALFLISVGSNDIFDYARNDSGSIHLGAEEYLAVVQLTYYSHIKKLYELGARKFGIISVATVGCCPAVSSLNGGKCVEPLNDFAVAFYLATQALLQKLSSELKGFKYSLGNSFEMTSTLLKSPSSFGLKYTQSACCGIGYLNGQGGCIKAQNANLCTNRNEFLFWDWFHPTEIASLLAAKTLFEGDKEFVTPVNLRQLAYSY

SEQ ID NO: 14087 - protein, 348 aa, Glycine max
MRLAHGTNYAPTLFIFGDSTFDVGTNNFLNSKAKANFPYNGIDFYPPFPTGRFSNGFNTADQIARQFGYKQSPPPFLTLEKDQYSLKKNILKGVNFASGGSGILRETGHSEWGEVVFFERQVEQFASVGGNISEMLGHAQAAKFVSKALFLISVGSNDIFDYARNDSGSIHLGAEEYLAVVQLTYYSHIKKLYELGARKFGIISVATVGCCPAVSSLNGGKCVEPLNDFAVAFYLATQALLQKLSSELKGFKYSLGNSFEMTSTLLKSPSSFGLKYTQSACCGIGYLNGQGGCIKAQNANLCTNRNEFLFWDWFHPTEIASLLAAKTLFEGDKEFVTPVNLRQLAYSY

SEQ ID NO: 14088 - protein, 214 aa, Glycine max
MLGHAQAAKFVSKALFLISVGSNDIFDYARNDSGSIHLGAEEYLAVVQLTYYSHIKKLYELGARKFGIISVATVGCCPAVSSLNGGKCVEPLNDFAVAFYLATQALLQKLSSELKGFKYSLGNSFEMTSTLLKSPSSFGLKYTQSACCGIGYLNGQGGCIKAQNANLCTNRNEFLFWDWFHPTEIASLLAAKTLFEGDKEFVTPVNLRQLAYSY

SEQ ID NO: 14089 - DNA, 1599 bp, Glycine max
aaccttcaacctcttcttaaacgtcttatgctatgtttatgacaactttcttatatcataacaataacaataacaattactgctacaacaacagttaccgtagctgagcaatggcttctatggccagaggcgccaagagacgccactcgataataagtagaaaaatgctgatcctcttctccgcttccctttcatgcgtcgtcgttttagttatttgttctctcttcagattccactctcccaaacccccaatttcaatttcaatttctcgcgtcgtcttcgatggccctcccaagatcgctttcttgttcctcgttcgccgcaacctccctctcgatttcctctgggacgctttcttccagaacgtcgacgtttcgagattctcgatatacgttcattcggcgcctgggtttgtgttggatgagtcaaccaccaggtcgcaattcctctacggtcgacaaatcagtaatagcattcaggttttatggggagaatcaagtatgattcaggcagaaagattgttactggcagcagctttagaggaccctgcaaatcaaagatttgttcttctctcggacagctgtgttcctctgtacaacttttcctacgtgtacaattatctcatggtttctccaaggagtttcgtggacaggtagaagaaggctttggttcttgagttttcttgatgcaaaggagggccgctacaacccaaaaatgtctcctaaaataccaagggaaaaatggcgtaaagggtcacagtggatcactgttgttcgtaagcatgcagaagtggttgtagatgatgatgttatcttttctgtctttaagaaatattgtaagagacgtccaccaattgatacaagcaagggaaagctgaatctgaaacttcagaagcagcacaattgtattccagatgaacactatgtgcagacattgcttgcaatgcatgaccttgaaggtgaacttgaacgtagaacattgacctataccctatggaaccagtctacaacaaaaatggagaataaaggctggcatcctattactttcggctattcaaatgctagccctcaaaggataaaggaaataaagggcatcaaccatgtttattatgagactgagtaccggatagaatggtgtcatacgaattccacatccgttccttgctttttgtttgctaggaaattctctcagggagctgctatgcgcttgctgagccaggaagttgttaaccactttgaagtttctgcactgttagccactcccacatgactttgaagctcttctctttagcctatactgattactgattactgatactgactgacctatgtagacatatacttcagacggcaaatgggattactacaagcttcaatcggcatactccacccaaagattttgatgggattattatacagcatactccacacaaacagattttgaagacaaaaattgggcaagtttctgcagatcgaatgttatgagctgataggaccattttatctggcttagtgagagaggtcttatacattataccacaattttaaaacaataatcacaggaaatagtaagttataatataaaaagaataattttttc

SEQ ID NO: 14090 - protein, 184 aa, Glycine max
MSPKIPREKWRKGSQWITVVRKHAEVVVDDDVIFSVFKKYCKRRPPIDTSKGKLNLKLQKQHNCIPDEHYVQTLLAMHDLEGELERRTLTYTLWNQSTTKMENKGWHPITFGYSNASPQRIKEIKGINHVYYETEYRIEWCHTNSTSVPCFLFARKFSQGAAMRLLSQEVVNHFEVSALLATPT

SEQ ID NO: 14091 - protein, 181 aa, Glycine max
MASMARGAKRRHSIISRKMLILFSASLSCVVVLVICSLFRFHSPKPPISISISRVVFDGPPKIAFLFLVRRNLPLDFLWDAFFQNVDVSRFSIYVHSAPGFVLDESTTRSQFLYGRQISNSIQVLWGESSMIQAERLLLAAALEDPANQRFVLLSDSCVPLYNFSYVYNYLMVSPRSFVDR

SEQ ID NO: 14092 - protein, 178 aa, Glycine max
MARGAKRRHSIISRKMLILFSASLSCVVVLVICSLFRFHSPKPPISISISRVVFDGPPKIAFLFLVRRNLPLDFLWDAFFQNVDVSRFSIYVHSAPGFVLDESTTRSQFLYGRQISNSIQVLWGESSMIQAERLLLAAALEDPANQRFVLLSDSCVPLYNFSYVYNYLMVSPRSFVDR

SEQ ID NO: 14093 - DNA, 1193 bp, Glycine max
aactcttgccactgcttttatctatcttctccatcggcaacaccttgcggaagataaaaaggatcgattcttcaatcaagaccagaaaaaaaaaagagcacgtacgtcacgttagactctgtatatcctgtgctgtgtcccattcggtacgcaagcctcaaaatatacatactccttcattttttcttcttctctttatggcggaaatccccaagttggatttgtcatcttcttgttttgacaatggagagcctttggattcggaacagaagagccagaaaatttttgtttcggatcacataaacgcatttcaatacgcagacgagaaagccgatagctttgtgattgacatggatgccttctcttccggccacaacaaagatgccaccaatgctaattcgagaattacgttgcagaggagtctttccaggaagggatctcagcgtctgggtgactggaagctgaataacaatgctacactttatgataaggataccgttcccgccatatgctctccaaaaggtacacttgttgggcctttcacgcccgaaaagccagcggggatggcagtagggcccatgggtcattccatgaacccacacgtccataatctaacagccgacaacatccccacagagagcaaatgtagtataactcggagaaatagttttagacgaccttcttcatgggccattgatcctaaaagggttctccttttctttgccaccttgtcaagcatgggaacaatgttgctgatatacttcactctgacaatcagtaagcaaagtgcagaagaatatggagggtgattggaagcattgactgaaggttttggattatgataacaaaaaaagaaaagaaaaaggacatgcattaattctggagcaaaacttacaagttaattagaagaagacaaccctgcagcaggagtagcaaagcaaaagctaaccaaatttccgccagcctgatgtcaaaatcagttaaaatcatctctttggcaactgcaagaggtaaatacaaagacacaatgtagtactatgacagagatcaggaagaaatcttccattatgtttttttttttttcatgtaaatggaagaaaaacaaacgatcacatggaggacattgccctttagtttatatgttgcgtgatcgcagggtttagtggaggatggatcataaatcaccttttgcc

SEQ ID NO: 14094 - protein, 268 aa, Glycine max
LLPLLLSIFSIGNTLRKIKRIDSSIKTRKKKEHVRHVRLCISCAVSHSVRKPQNIHTPSFFLLLFMAEIPKLDLSSSCFDNGEPLDSEQKSQKIFVSDHINAFQYADEKADSFVIDMDAFSSGHNKDATNANSRITLQRSLSRKGSQRLGDWKLNNNATLYDKDTVPAICSPKGTLVGPFTPEKPAGMAVGPMGHSMNPHVHNLTADNIPTESKCSITRRNSFRRPSSWAIDPKRVLLFFATLSSMGTMLLIYFTLTISKQSAEEYGG

SEQ ID NO: 14095 - protein, 203 aa, Glycine max
MAEIPKLDLSSSCFDNGEPLDSEQKSQKIFVSDHINAFQYADEKADSFVIDMDAFSSGHNKDATNANSRITLQRSLSRKGSQRLGDWKLNNNATLYDKDTVPAICSPKGTLVGPFTPEKPAGMAVGPMGHSMNPHVHNLTADNIPTESKCSITRRNSFRRPSSWAIDPKRVLLFFATLSSMGTMLLIYFTLTISKQSAEEYGG

SEQ ID NO: 14096 - protein, 152 aa, Glycine max
MDAFSSGHNKDATNANSRITLQRSLSRKGSQRLGDWKLNNNATLYDKDTVPAICSPKGTLVGPFTPEKPAGMAVGPMGHSMNPHVHNLTADNIPTESKCSITRRNSFRRPSSWAIDPKRVLLFFATLSSMGTMLLIYFTLTISKQSAEEYGG

SEQ ID NO: 14097 - DNA, 1479 bp, Glycine max
aattactagttctttctggctctgccgctgtctgtttgcgaacgccattacgttatacttgcatctaaacagcatttcacaggtgacgatactgattgagaggtagaaatgcctggtttcagcagtgtaggaaccttcaagatatttgtcgggaacttggcagaaaaaacagtatctgctgatattagacccttattcgagaaatatggaaaagttatcgaatgtgatgtggttaaggattttggatttgtgcatatggaaaatgaagagtcaggcagagacgccattcaaaatctaaatggttatctggtccatggatcagcaatgaaagtggaagctgccaccagtaggaaggggccgaacacacccacaacgaaaattttcgtgggcaacctctcagataacacaagagcacctcaagttcgctcactctttactaaatacggcacagttgtggaatgtgacattgtcagaaactatggatttgtgcacattgattgtccagacgtaaacaaaatggtagaggaactgaatggtcaagtggttgatggacagccaatgaaagtacaaatatcaacaagcaaagttcgccaaaggcctggaatgggcaatccagaacaatgctacagaatgggcccagatcgtttccgtggaagaatgggctttggaagagacccttacccacccccaccaccacccccattcctgagagacaggatgcttagtggaggatttggcggaaaggacagttactacgaccgctattatgacaggccagctgcacgatttgatgaccgggactcatttgataggaggttgccccctcttcctccacgagacttaggaccacgcagagattttatgcctccccctcccatcccaccccgtgagccactccctccccttggtcttaggggcccaccctcctccctgagagactcctttgaacgttccatgtatagccgtcggtcaccaccaccgccttctgccagatatggccgcctctatgatgactattccagggactcatatgatgatcgcagaattggcctgcgaggggcgtcaccgcgccggttcacgccgtattaattactcgctcgggtaatgattggtgagcgagcggtaacggagcggtacgtatcaacagccgacgaccgttccatatgttgacgattacatcttattttatttaagaacctttattgatgtcacactgttggtgactgtcatcacgccatttaatttgtttactatagataatatgtataatgtagttgacgtacattaagtcaaatccgtgcggcttacaatgcattaaaagtcgtgctcggataactgttgtgtgttttgtatgagtcatgttttatatatgtagtaaccgagcaaatgttttgctttctgtcttattaaagaaataaaaccaaaaaaaaaaaaaaaaaagcttatcgataccgtcgacctcgagggggggcccggtac

SEQ ID NO: 14098 - protein, 326 aa, Glycine max
MPGFSSVGTFKIFVGNLAEKTVSADIRPLFEKYGKVIECDVVKDFGFVHMENEESGRDAIQNLNGYLVHGSAMKVEAATSRKGPNTPTTKIFVGNLSDNTRAPQVRSLFTKYGTVVECDIVRNYGFVHIDCPDVNKMVEELNGQVVDGQPMKVQISTSKVRQRPGMGNPEQCYRMGPDRFRGRMGFGRDPYPPPPPPPFLRDRMLSGGFGGKDSYYDRYYDRPAARFDDRDSFDRRLPPLPPRDLGPRRDFMPPPPIPPREPLPPLGLRGPPSSLRDSFERSMYSRRSPPPPSARYGRLYDDYSRDSYDDRRIGLRGASPRRFTPY

SEQ ID NO: 14099 - protein, 277 aa, Glycine max
MENEESGRDAIQNLNGYLVHGSAMKVEAATSRKGPNTPTTKIFVGNLSDNTRAPQVRSLFTKYGTVVECDIVRNYGFVHIDCPDVNKMVEELNGQVVDGQPMKVQISTSKVRQRPGMGNPEQCYRMGPDRFRGRMGFGRDPYPPPPPPPFLRDRMLSGGFGGKDSYYDRYYDRPAARFDDRDSFDRRLPPLPPRDLGPRRDFMPPPPIPPREPLPPLGLRGPPSSLRDSFERSMYSRRSPPPPSARYGRLYDDYSRDSYDDRRIGLRGASPRRFTPY

SEQ ID NO: 14100 - protein, 254 aa, Glycine max
MKVEAATSRKGPNTPTTKIFVGNLSDNTRAPQVRSLFTKYGTVVECDIVRNYGFVHIDCPDVNKMVEELNGQVVDGQPMKVQISTSKVRQRPGMGNPEQCYRMGPDRFRGRMGFGRDPYPPPPPPPFLRDRMLSGGFGGKDSYYDRYYDRPAARFDDRDSFDRRLPPLPPRDLGPRRDFMPPPPIPPREPLPPLGLRGPPSSLRDSFERSMYSRRSPPPPSARYGRLYDDYSRDSYDDRRIGLRGASPRRFTPY

SEQ ID NO: 14101 - DNA, 897 bp, Glycine max
atccaaagtattgattttgatacaaaagtttttaagttttagagaagaatggaagggaataagcaaaagggtacttcttcttcattcacctctgagctctttgggtccaaagagtctcgtccctcttcttcttctgggatttttggctccattttttctcctccatcgtctaaggtgttagggagagagtctctgcgctctgaattgagtggcaaaattgccaatgaaacctggagctccaaaatttgtattcaagataacttctccaagggtaatggtagcgaggctcagaatgctgtgaacaaggatatgagttccatctatcaggatcaaagagtccaaccatgtcaccttagttcatcaatttattatggtggtcaggacatctattctagtcctcagagtacacagaatgagggattcaactctatgcacaggaatgttgatggagaagatggttcagaatttgcttcaagaggagactggtgccaagggggtctctattattaagatcactcttgtcaaggcatgtgcttctcaaggtacatagcaaggtagtttagcagtatagtccatcttttgttatatggaagaactatacagtaatcaaaagggttgtggacagcaagttgctttctctggctttgacagaatcatgatatgatgaatctataatcatttgcgtttcttttttattttattgtaaaggatattatcctcaccttattgcaaaagttatataggaattctatgcattatcagctaatcttgtgtggctgaacctttgcaattatttactttaatggaagaaactctctttacttgtttcacctctatcttagtacttcagctatgcaattattcactttaatggaagaaattatctttacttgttcc

SEQ ID NO: 14102 - protein, 153 aa, Glycine max
MEGNKQKGTSSSFTSELFGSKESRPSSSSGIFGSIFSPPSSKVLGRESLRSELSGKIANETWSSKICIQDNFSKGNGSEAQNAVNKDMSSIYQDQRVQPCHLSSSIYYGGQDIYSSPQSTQNEGFNSMHRNVDGEDGSEFASRGDWCQGGLYY

SEQ ID NO: 14103 - DNA, 608 bp, Glycine max
caaaaacatggattgaagtctctggttcatcagccaaggatgttgctaagcagctgaaggaacaacaaatggtgatgccaggtcatcgtgagtcaaacctgcaaaaggaactgaacagatacatccctactgccgctgcatttggtggagtgtgcatcggcgcattgactgttcttgctgatttcatgggcgcaattggttcaggaaccggaattctgttggctgttaccatcatataccagtactttgagaccttcgagaaggagagggcaacagagcttggtttcttcgggttttgattgatacatgatagctttgggagcatgttatggctacagcacagctcgagtctttttagacagtcgcaatactgcttggctggctggctgttgtggttgtaaccggagattaaattctgtttaggttaccccgacttatttacagttgagaaatctgtaggtgctgcgtgtgttcttcaggccagttatggtggtggaccggtccaagcacgggcgtggccgtcacctgtcatcttccgtagacttctcatgtttttgactatatagcaactgaatgttttgggaccaatttagtcatcttgagctggt

SEQ ID NO: 14104 - protein, 98 aa, Glycine max
KTWIEVSGSSAKDVAKQLKEQQMVMPGHRESNLQKELNRYIPTAAAFGGVCIGALTVLADFMGAIGSGTGILLAVTIIYQYFETFEKERATELGFFGF

SEQ ID NO: 14105 - protein, 76 aa, Glycine max
MVMPGHRESNLQKELNRYIPTAAAFGGVCIGALTVLADFMGAIGSGTGILLAVTIIYQYFETFEKERATELGFFGF

SEQ ID NO: 14106 - protein, 74 aa, Glycine max
MPGHRESNLQKELNRYIPTAAAFGGVCIGALTVLADFMGAIGSGTGILLAVTIIYQYFETFEKERATELGFFGF

SEQ ID NO: 14107 - DNA, 1572 bp, Glycine max
gaacacaagacaacaacaacaaatcttaagttggctttcttctcttttgttcgaccgtgtcacgtgcgagaacaatgagaattgccattttccactccctatctaaacctttgaatcttattcgattcaatttcatcacaacttaaataccatcgcatgttcattcattgatggtcatgttcttcccttaaaccttcctcaaaaagtcaaaattgaaaacctttctctctcttaactccttctcgtcatcgccccaaagcttctcaacaacatgacggataatgaagaaccgatgatcgtacctggatcgatgtctgaattagcgtttaataaatataagcgatggcaatggtggtgtcttgtgacactcagcatagcctttcttatagttggccaatctgctgctgttatccttggaagattttattatgatcagggtggaaatagtaaatggatggctactctagttcaaactgctgccttcccgatcttgttcattccattatttacaattccttcacctccagaggcttcaacttctgcttcacctcccatcaaaattattcttttgatatattttggtcttggagtcttaattgctgctgacaatatgatgtactccactggactcttatacctctcggcttctacctattcgctgatttgtgcatcacagttagcttttaatgcagttttctcatattttatcaattctcaaaagttcactgccttgattataaactctacagtggttctcactttatctgctgcactccttgctgttaacgaagacacagatgaaccatctggtttctccaagggaaagtacattattggtttcctatgtacccttggagcttctgcagtgtactctcttttgctttccctcatgcagctgacctttgagaaggttctgaagaaggaaacattttctgttgttttggaaatgcaaatctacacatcattcgttgcctctggtgcttctgtcataggcctatttgcaagtggggaatggcgtactttgcatggagaaatggagggttttcagaaaggatatgttgcttatgttatgactttggtttggacttcaatagcctggcaggtatgctctgttggtgttgttggcttgatcttcctagtgtcttctctctactccaatgttataagcacagtttctttagccgtaactcctattgctgctgttatagtttttcatgataagatgaatggggtgaagataatttctatgcttttggctctatggggttttgcctcttatatttatcagaattatcttgatgattcaaagacaagacatgcacaagctgctactaagtcccaaaatgattcttcatgttgagaatattcaatttggtcatacctttgtcgaagtttccttttttctttttagatttaaatccttcagtacaccattcgctagctttagattttatttttccttcagtctcactgaacttgtgaggtagtatagttatgaagttattggtcattctagattattgctctctcatttaagaaatgaaaagtttattggtgtctcggactggttgg

SEQ ID NO: 14108 - protein, 362 aa, Glycine max
MTDNEEPMIVPGSMSELAFNKYKRWQWWCLVTLSIAFLIVGQSAAVILGRFYYDQGGNSKWMATLVQTAAFPILFIPLFTIPSPPEASTSASPPIKIILLIYFGLGVLIAADNMMYSTGLLYLSASTYSLICASQLAFNAVFSYFINSQKFTALIINSTVVLTLSAALLAVNEDTDEPSGFSKGKYIIGFLCTLGASAVYSLLLSLMQLTFEKVLKKETFSVVLEMQIYTSFVASGASVIGLFASGEWRTLHGEMEGFQKGYVAYVMTLVWTSIAWQVCSVGVVGLIFLVSSLYSNVISTVSLAVTPIAAVIVFHDKMNGVKIISMLLALWGFASYIYQNYLDDSKTRHAQAATKSQNDSSC

SEQ ID NO: 14109 - protein, 355 aa, Glycine max
MIVPGSMSELAFNKYKRWQWWCLVTLSIAFLIVGQSAAVILGRFYYDQGGNSKWMATLVQTAAFPILFIPLFTIPSPPEASTSASPPIKIILLIYFGLGVLIAADNMMYSTGLLYLSASTYSLICASQLAFNAVFSYFINSQKFTALIINSTVVLTLSAALLAVNEDTDEPSGFSKGKYIIGFLCTLGASAVYSLLLSLMQLTFEKVLKKETFSVVLEMQIYTSFVASGASVIGLFASGEWRTLHGEMEGFQKGYVAYVMTLVWTSIAWQVCSVGVVGLIFLVSSLYSNVISTVSLAVTPIAAVIVFHDKMNGVKIISMLLALWGFASYIYQNYLDDSKTRHAQAATKSQNDSSC

SEQ ID NO: 14110 - protein, 349 aa, Glycine max
MSELAFNKYKRWQWWCLVTLSIAFLIVGQSAAVILGRFYYDQGGNSKWMATLVQTAAFPILFIPLFTIPSPPEASTSASPPIKIILLIYFGLGVLIAADNMMYSTGLLYLSASTYSLICASQLAFNAVFSYFINSQKFTALIINSTVVLTLSAALLAVNEDTDEPSGFSKGKYIIGFLCTLGASAVYSLLLSLMQLTFEKVLKKETFSVVLEMQIYTSFVASGASVIGLFASGEWRTLHGEMEGFQKGYVAYVMTLVWTSIAWQVCSVGVVGLIFLVSSLYSNVISTVSLAVTPIAAVIVFHDKMNGVKIISMLLALWGFASYIYQNYLDDSKTRHAQAATKSQNDSSC

SEQ ID NO: 14111 - DNA, 1063 bp, Glycine max
atccctctctctatgttgacgctagctagggtttctcttcctgctttgtaaatttcatcacgagtctctcatatttttaaaatgggactattctcccatcaattcgtttcacgaaattcaaatgtgtagtaggatacccagtgggttgttcttcaatcaaatgcaaactcgcggctagactcgctctaactcgtgattttatacagagttagccaattttccatcaaacacccaaaaatgtccaaaacgtcaccgtttcgctagggtttgtttgtccctttattttaggttttacgctctctccctttgtttgtcacgcacaccaacgagctcagttacatttcagcaagtcaaaatttcctccagaaagttgctcgtgtaatggatataatctctcagttacaagaacaagttaatttgatagcacatttggcttttaatacagttgggacattgcaaagggatgcccctcctaatcggctgtcgccaaattatcctgaaccacctgcgcatgctacagaggatgggtcaaatttttcagaacagccaaagctgatgagtactactttggtgaaggctgctaagcagtttgatgcattggttgcggcgcttccaatatccgagtcaggtgaagaagcacagcttaagaggatttcagaactacaagctgaaaatgatgcaataggcctagaacttcagaaacagttggaagctgcagagaaggaattgaatcaggttcaggagctgtttaggcaagcatcagataattgtttgaacttgaagaaaccagatgacagttagctatttgtgttccaggaaagctcagatgaattttgccacatgtatctcaacttgacaaaaagcagggacagctgcaggaggattttccttttctccttttaagtcttgattacctgaaatagttgtattctttcgtatgttgtgacttttgcctgacacgtgatgttttgcagaaattgatcatcagttgagatactggtaattatctttctttgctcccgagggaaaggcatatcggtgtttatattaaccatcttccttc

SEQ ID NO: 14112 - protein, 139 aa, Glycine max
MDIISQLQEQVNLIAHLAFNTVGTLQRDAPPNRLSPNYPEPPAHATEDGSNFSEQPKLMSTTLVKAAKQFDALVAALPISESGEEAQLKRISELQAENDAIGLELQKQLEAAEKELNQVQELFRQASDNCLNLKKPDDS

SEQ ID NO: 14113 - protein, 81 aa, Glycine max
MSTTLVKAAKQFDALVAALPISESGEEAQLKRISELQAENDAIGLELQKQLEAAEKELNQVQELFRQASDNCLNLKKPDDS

SEQ ID NO: 14114 - DNA, 1476 bp, Glycine max
acatcttggccaactgggtcgcttccaataccttcagattttggtaggatttcgtgcttttgcataattcgttgagtttctgaagctatggaggcttataagagatgggtgaggcagaacaaagagtttgtgcactccatggagtctttggccaatggattgacatagcttcttcctgaacggttttctgaatcagagattggaccagaagcagtaacaactattctgggaatcatcacagctctcaatgaacatataattgatacagctcctaagcaaaatattacaggctctgtcgagccttattcatttccttatccattatgcttatctgcattaaaggatttggaaacattagttgaagttgtggcacaacaatactatggtgatgataagaaatggaatttccttgccattactgaagcaaccaaggtactggttcggttatctttgtttcggaagagtggatataagatgctgctacaaggaggggaaacacctaatgatgaggagtattcagatagttttacttcacaacatcatatgggcttaaagcccgatgtgcatcataggcctggttatatgaaaaacaatcttggtgcaaaaccaatgaatcaggaaggaagagcattatctgctttggttagatttggagaaaaagcaaaggggtcagatccagtgtggttacgcagggttgaacaccaacaagcaactatggagcctacaacttcaagggtggatagaccaacacttctcaccatattgtctgaaaggggtctttgtggggctctgttttttattggagaagttctacttattagtagaccacttatttatgttttatttattcgaaaatatggtattcggtcatggaccccttggttcctttcgctggctattgattgcataggaaacagtattctttcactcattacatcgtcagtggctggtgggaaggaccgaatgtttcatctgtctgccctagaaaaggatgaggttaaacggcgaaagctgctatttgttctttacctaatgagagatccatttttcagcaagtatactaggcaaagacttgaaagcacggagaaagttttggagcctattcctgtcataggatttctcacagcaaaacttgttgaacttataattggagctcaaacacgatacacttacatgtcaggatcgtgaataaaatccagaacaaatgcctaattgccctccaagattttggaaagatagatattcttactcttcttccacactacctgctgttccaaacttttcaaatgatgaagaggtatcaaaccagctactattatgatttaaaaataacaaaccattgcaagcttgaacttttcttttgcttgacaattccaaacatagaagatgttaagctgcaacccatgtgtgagacaaattgtttgcaaggatagctacactatcaacaactcagtataaattggaatatttattggg

SEQ ID NO: 14115 - protein, 237 aa, Glycine max
MLLQGGETPNDEEYSDSFTSQHHMGLKPDVHHRPGYMKNNLGAKPMNQEGRALSALVRFGEKAKGSDPVWLRRVEHQQATMEPTTSRVDRPTLLTILSERGLCGALFFIGEVLLISRPLIYVLFIRKYGIRSWTPWFLSLAIDCIGNSILSLITSSVAGGKDRMFHLSALEKDEVKRRKLLFVLYLMRDPFFSKYTRQRLESTEKVLEPIPVIGFLTAKLVELIIGAQTRYTYMSGS

SEQ ID NO: 14116 - protein, 214 aa, Glycine max
MGLKPDVHHRPGYMKNNLGAKPMNQEGRALSALVRFGEKAKGSDPVWLRRVEHQQATMEPTTSRVDRPTLLTILSERGLCGALFFIGEVLLISRPLIYVLFIRKYGIRSWTPWFLSLAIDCIGNSILSLITSSVAGGKDRMFHLSALEKDEVKRRKLLFVLYLMRDPFFSKYTRQRLESTEKVLEPIPVIGFLTAKLVELIIGAQTRYTYMSGS

SEQ ID NO: 14117 - protein, 201 aa, Glycine max
MKNNLGAKPMNQEGRALSALVRFGEKAKGSDPVWLRRVEHQQATMEPTTSRVDRPTLLTILSERGLCGALFFIGEVLLISRPLIYVLFIRKYGIRSWTPWFLSLAIDCIGNSILSLITSSVAGGKDRMFHLSALEKDEVKRRKLLFVLYLMRDPFFSKYTRQRLESTEKVLEPIPVIGFLTAKLVELIIGAQTRYTYMSGS

SEQ ID NO: 14118 - DNA, 1660 bp, Glycine max
ctttcttctttttgttgtctcaaaatgatgagtgcaagtgcaggtgcaagaaataggtctccgttcacacaaactcagtggcaagagcttgagcaacaagctcttgtttttaagtacatggttacaggaacacctatcccaccagatctcatctactctattaaaagaagtctagacacttcaatttcttcaaggctcttcccacatcatccaagtaagtgctttttcagtttagctagcatattactaatatttttttttctaaggccatggatacttttctgttttttttaataaaatactctagtggttattattatatatgtcttacttttttatgagggacaaataaaatttagagcctggtttgttgtcataactctctctggctgcagttgggtggggatgttttgaaatgggatttggcagaaaagtagacccagagccagggaggtgcagaagaacagatggcaagaaatggagatgttcaaaggaggcatatccagactcaaagtactgtgaaagacacatgcacagaggcagaaaccgttcaagaaagcctgtggaagtttcttcagcaacaagcaccgccacaaacacctcccaaacaatcccatcatcttataccagaaacctttccttgaccaataacagtaaccccaacataacaccaccaccaccaccctcttctttccctttctctcatttgccctcttctatgcctattgatcagtcccaacccttttcccaatcctaccaaaactcttctctcaatcccttcttctactcccaatcaacctcctctagacccccagatgctgattttccaccccaagatgccaccacccaccacctattcatggactctgctggctcttattctcatgatgaaaagaattataggcatgttcatggaataagggaagatgtggatgagagagctttcttcccagaagcatcaggatcagctaggagctatacagactcgtaccaacaactatcaatgagctcctacaagtcctattcaaactccaactttcagaacattaataatgatgccaccaccaacccaagacagcaagagcagcaactacaacaacaacaacactgttttgttttagggacagacttcaaatcaacaaggccaagcaaagagaaagaagctgagacaacaacaggtcagagaccccttcaccgtttctttggggagtggccaccaaagaacacaacaacagattcctggctagatcttgcttccaactccagaatccaaaccgatgaatgatgttttttttctagttattattatgagctggtgcatacggccaagagagagagagagagagacttgttgttgataaagatcatcagtgttttgtggctggggtgattttcttttgcaaaaggtgtgatgttattgcgttatgtaggggaccacagtaggatttgtgcctttgcttttctagatatttatatttatatatttattatatatatgtttcttttctttcttccccttgaagaaatgttcaacaacaaaaaaaaaaaaaacatgtctcagatttgcacactatgtttgtttgactggaaagcatattaagttgctctgcagtctgctttataatgggtggtagcaaggacaatgcaaataagttctctg

SEQ ID NO: 14119 - protein, 289 aa, Glycine max
MGFGRKVDPEPGRCRRTDGKKWRCSKEAYPDSKYCERHMHRGRNRSRKPVEVSSATSTATNTSQTIPSSYTRNLSLTNNSNPNITPPPPPSSFPFSHLPSSMPIDQSQPFSQSYQNSSLNPFFYSQSTSSRPPDADFPPQDATTHHLFMDSAGSYSHDEKNYRHVHGIREDVDERAFFPEASGSARSYTDSYQQLSMSSYKSYSNSNFQNINNDATTNPRQQEQQLQQQQHCFVLGTDFKSTRPSKEKEAETTTGQRPLHRFFGEWPPKNTTTDSWLDLASNSRIQTDE

SEQ ID NO: 14120 - protein, 251 aa, Glycine max
MHRGRNRSRKPVEVSSATSTATNTSQTIPSSYTRNLSLTNNSNPNITPPPPPSSFPFSHLPSSMPIDQSQPFSQSYQNSSLNPFFYSQSTSSRPPDADFPPQDATTHHLFMDSAGSYSHDEKNYRHVHGIREDVDERAFFPEASGSARSYTDSYQQLSMSSYKSYSNSNFQNINNDATTNPRQQEQQLQQQQHCFVLGTDFKSTRPSKEKEAETTTGQRPLHRFFGEWPPKNTTTDSWLDLASNSRIQTDE

SEQ ID NO: 14121 - protein, 188 aa, Glycine max
MPIDQSQPFSQSYQNSSLNPFFYSQSTSSRPPDADFPPQDATTHHLFMDSAGSYSHDEKNYRHVHGIREDVDERAFFPEASGSARSYTDSYQQLSMSSYKSYSNSNFQNINNDATTNPRQQEQQLQQQQHCFVLGTDFKSTRPSKEKEAETTTGQRPLHRFFGEWPPKNTTTDSWLDLASNSRIQTDE

SEQ ID NO: 14122 - DNA, 1370 bp, Glycine max
acactacaactaaacacactagctattagctatagctagaagtccctccaatccctctttgtctttgtgcttttctagttccttccaaaataccaacaaaagcaaagacaatgagttgccaagcatggcccgaacccatagttcgagtccaatccttagctgaaagtggcctaagttcaatcccttcacgctacattaggcctcactcccaaagaccctccaataccacttcttttccaactcctaaaccttttcaaactgatcatcatcatggtcatgatcagaaaacttccgatcatgaccatgatcatgatcatgttaacattcccgtcattgacctgaaacatgttttctcggaggatccgatcctccgagaacaagtgtttgggcaggtggaccaggcatgtcgggagtgggggttcttccaggtggtgaaccatggtgttagccatgagttgatgaagagttctagggaactgtggcgtgagttcttcaaccagccacttgagatgaaggaagagtatgcaaactcccccaccacttatgagggatatggtagtcgcttgggagtgcagaaaggtgccaccttggattggagtgactacttctttctccattacatgcctccttcacttaggaaccaagctaagtggcctgcatttccagaatccttgaggaaagtgattgctgaatatggtgaaggagtggttaagctaggaggaaggatactcaagatgatgtcaataaaccttggtttgaaagaagatttccttctcaatgcatttgggggagagagtgaggttggtgcatgcctaagggtgaatttctatccaaagtgccctcaacctgacctcacttttggactctcccctcactcagatcctggtggcatgaccattcttctccctgatgattttgtgtctggccttcaagtaagaagaggagatgaatggattacagttaagcctgtcccaaatgccttcatcatcaacattggtgaccaaattcaggtgctgagcaatgcaatatacaagagtgtagaacacagggtgattgtgaactcaaacaaagatcgtgtgtccttggccttgttctacaacccgaggagtgatttactcattcaacctgccaaggagcttgtgacagaggagaagccagccttgtactcaccaatgacctatgatgaatacagactttacattaggctaaatggaccttgtggaaaggcccaagttgaatcattggcctcccaaacatgagttaatagtgtgaattaatagcaagtttggtttctcaatgtgattttctatgtttcagatgtcattttaagaagttaataaaaagttaattgttataacttctatattctc

SEQ ID NO: 14123 - protein, 382 aa, Glycine max
MSCQAWPEPIVRVQSLAESGLSSIPSRYIRPHSQRPSNTTSFPTPKPFQTDHHHGHDQKTSDHDHDHDHVNIPVIDLKHVFSEDPILREQVFGQVDQACREWGFFQVVNHGVSHELMKSSRELWREFFNQPLEMKEEYANSPTTYEGYGSRLGVQKGATLDWSDYFFLHYMPPSLRNQAKWPAFPESLRKVIAEYGEGVVKLGGRILKMMSINLGLKEDFLLNAFGGESEVGACLRVNFYPKCPQPDLTFGLSPHSDPGGMTILLPDDFVSGLQVRRGDEWITVKPVPNAFIINIGDQIQVLSNAIYKSVEHRVIVNSNKDRVSLALFYNPRSDLLIQPAKELVTEEKPALYSPMTYDEYRLYIRLNGPCGKAQVESLASQT

SEQ ID NO: 14124 - protein, 266 aa, Glycine max
MKSSRELWREFFNQPLEMKEEYANSPTTYEGYGSRLGVQKGATLDWSDYFFLHYMPPSLRNQAKWPAFPESLRKVIAEYGEGVVKLGGRILKMMSINLGLKEDFLLNAFGGESEVGACLRVNFYPKCPQPDLTFGLSPHSDPGGMTILLPDDFVSGLQVRRGDEWITVKPVPNAFIINIGDQIQVLSNAIYKSVEHRVIVNSNKDRVSLALFYNPRSDLLIQPAKELVTEEKPALYSPMTYDEYRLYIRLNGPCGKAQVESLASQT

SEQ ID NO: 14125 - protein, 249 aa, Glycine max
MKEEYANSPTTYEGYGSRLGVQKGATLDWSDYFFLHYMPPSLRNQAKWPAFPESLRKVIAEYGEGVVKLGGRILKMMSINLGLKEDFLLNAFGGESEVGACLRVNFYPKCPQPDLTFGLSPHSDPGGMTILLPDDFVSGLQVRRGDEWITVKPVPNAFIINIGDQIQVLSNAIYKSVEHRVIVNSNKDRVSLALFYNPRSDLLIQPAKELVTEEKPALYSPMTYDEYRLYIRLNGPCGKAQVESLASQT

SEQ ID NO: 14126 - DNA, 1235 bp, Glycine max
gaacatcctaatcgaaaaaatttctattttctaaagaatgaaagtgaaggtgatgagagtcgcgagcagcagcagcagcaacgggttgagcgtggtagccaaaatgagaagaagcagcagcgtttctttgttctccgttcgagcctgccatgatctccctcatggaccttcctgcatctacgttggccccctccacaccgcaacccaagagaccctcgaagctctttactctcaggcacgggatgcatattacagcggagagcctttgattcttgatgacatgtttgatagactagaggtatctatctatgtctatctatccatatctttcttcatttcaccactcatctattcactcatcttatggaaaaacagttgaagcttaagtggtatggttctaagtcagttgtcaagtatcccagatgcagtatcagaaggcattcaacatatgctgatgctgacggcaggaagatctgtcaatggctattgcattagcaagcttatggtccctatttctcgcacttggctgttcagcgtgtgtttcgcccatattctacactgttagcacggcttatcacagagcattcgactcaggattatcatacggtagcccatcttcatcgggactagggcttctttttgtcgtcaatagcattatcttcatggcactgggtttcgtcattggctacccagttgcttcagcttcagttaaggtacttcaaggtttgtggaggaatgatttagcggcactaaagggttcttgtccaaattgtggagaagaggtatttgcatttgtgagaacggacaaggctaacaactctccccatagagcagattgtcatgtgtgtgaatgcttattggaatttcgcaccgaagttgagcaatcggctttaagattagggagacaatgggtttatgggcgtatttaccttgttcgcagatccagacgccaaagagaaccgtaaattttcatcgcatctggggcttatatgattgtgaatagtagctagtaaggaatggataaaaccaaattctgttcagatcttcttagtacaaaacagttttggtagaactaagaagccatcttgtaacactttcataaaggaaataattgacgtgtcaatggtttctttgatttgatggagagttagagttaacgattttattttttgaagctgctatagatgttaaatgtaattttagttttagttatgaatggttaaatacttaagtgt

SEQ ID NO: 14127 - protein, 161 aa, Glycine max
MAIALASLWSLFLALGCSACVSPIFYTVSTAYHRAFDSGLSYGSPSSSGLGLLFVVNSIIFMALGFVIGYPVASASVKVLQGLWRNDLAALKGSCPNCGEEVFAFVRTDKANNSPHRADCHVCECLLEFRTEVEQSALRLGRQWVYGRIYLVRRSRRQREP

SEQ ID NO: 14128 - protein, 113 aa, Glycine max
MKVKVMRVASSSSSNGLSVVAKMRRSSSVSLFSVRACHDLPHGPSCIYVGPLHTATQETLEALYSQARDAYYSGEPLILDDMFDRLEVSIYVYLSISFFISPLIYSLILWKNS

SEQ ID NO: 14129 - protein, 108 aa, Glycine max
MRVASSSSSNGLSVVAKMRRSSSVSLFSVRACHDLPHGPSCIYVGPLHTATQETLEALYSQARDAYYSGEPLILDDMFDRLEVSIYVYLSISFFISPLIYSLILWKNS

SEQ ID NO: 14130 - DNA, 425 bp, Glycine max
aaaaaaaattttttttttttttttttttttttaaaatttttttttttttttttttccttaaaaatttttttttttttttttttttttttttttttttttttttttttttttttttttttttttttttttagatcaaacacccattttattataattttataaatttacactacgtacaagaacagcgagtatatttcccatcattcttacagatgccagacccaaacccttctctcctacaacattgcatacaaaaatcattatggcctattatgcatttcagtggaccacagtcttgtgcaactgttgcgggtcctgaagtgagaacaaatgcaacaaatataattcccaaaagaagagcttgatcgaaacgagaagccatgtaagaaggattttattttctaattttggtctttgtttctcgt

SEQ ID NO: 14131 - protein, 53 aa, Glycine max
KKNFFFFFFFLKFFFFFFSLKIFFFFFFFFFFFFFFFFFFFFFRSNTHFIIIL

SEQ ID NO: 14132 - protein, 50 aa, Glycine max
MPDPNPSLLQHCIQKSLWPIMHFSGPQSCATVAGPEVRTNATNIIPKRRA

SEQ ID NO: 14133 - protein, 42 aa, Glycine max
KKFFFFFFFFKIFFFFFFLKNFFFFFFFFFFFFFFFFFFFFF

SEQ ID NO: 14134 - DNA, 727 bp, Glycine max
tacctagaacatcctaatcgaaaacaaaagcactcaaaatgatcgctctggtctttttggctctcttctcggtagcagctgcatacccgtacaaacacgacatcggttcgagtacgaaggcaaattgggccacaacctcccataccagaaggaattctacggcaaggaatacacccagggcaagggatacccattcggtgaatacttccacaaacaaggttacggatacccacagtaccagggacaatactacggttacccaggatactactcccactggtccacaccatactacggccgccagactggtttcgcccgttacggatacggccagaaccgcattggatacggatatgaatacccacaaggaagctacggctacaaaccattctacggtgaatacggactccacaacttcccatactacggaatcaagaactacgaatacggatcctacggcccatacggatacggtttgggatacaatcctttctaccgctactacggcagctactacccaaaatcctaccttggcgaatacaaatactgaactgatgtttgataattgacaattgaaaattttgccagcttgttcaatagtaactttgtcgaattgacaccaacaatagcgtacctgtaaacagtgcaaacaattagaaacctacaccaaacaattgtaccaatcaaatttcatggattttctctgaaataaaaaatgacttctgat

SEQ ID NO: 14135 - protein, 176 aa, Glycine max
MIALVFLALFSVAAAYPYKHDIGSSTKANWATTSHTRRNSTARNTPRARDTHSVNTSTNKVTDTHSTRDNTTVTQDTTPTGPHHTTAARLVSPVTDTARTALDTDMNTHKEATATNHSTVNTDSTTSHTTESRTTNTDPTAHTDTVWDTILSTATTAATTQNPTLANTNTELMFDN

SEQ ID NO: 14136 - DNA, 1497 bp, Glycine max
atctatctctcttcgaatcccctcccccttaacaagttagcactcatgattccctcttcactccgatccactcgcatataacaacccttatttctccattgcaaggttcataaaagcacaggaatggaattaagcgcggagtattttaaaattcataacgatgtagacttatttttttaagaaaatctaaatgtataccgtattatttttacaaaaagaacgaacttggatgagcccgttttttctaacccttataagaaagtatgagtggttgaattagaaaaaattaatagcggcatcacatcgaagctcaatagttaatagcggcctctcgccggcaagaggtggtcgcagcggtggttctgagcattgggagctgacagtggcagcaccgttgctttctgtttcagtttattttaattgatttgtgccttcttgcttctccgtcctcgtcaaggtgtccatggctgaagattcaaggaaacgcacattggaggctttggagagaagaatagcttttgctaaagttgaagttctccaaaaagaaaagaaaaacaaaaagactataaatgaagatgggaaactacctattcctgcagattctacttctaatgatccttccccacatttgttgcattcatcatcagtctcatccaagaaagggaatttcagtttctctggtcataccactttgcaagacattgaagatggtccagcatatgcccaactttctgtgcctgtaaatggaaatctgctcacaactaatgaggagttttctgctgaaagaggaggttcaattgatggcatattgcatgagcttcttcagaagggagatgcagcacataagtacatgcaaggatctagaaacatgaaaattgacaactggatccttcttgataattatgtacaaggacgggtgctttcctctggttctcaagctagggctttgcaacttcattcaaaacgctctaagaaacacatgtctatgaaacggcataagaaggatggatcattagatcttcctcaagagttccagaaatttgatattttcaagccaatgcacgaaatgtggaaagattacataatgttgcttcttaaatccactgggaaaaatcaattggctcaatgtctccttggtgcagatctacatggtgcttttattttagttgtggagtgtaaaataacccattttactggaatttgtggcatcatgattcgtgaaactgcagaagcatttgggataattactgaagataataaattccgagttgttcccaaaaaggtttctgtgtttgtattccaagttgattgctggaaagtcactctgcatggagataaacttggttcaagaaaggttggattatgatattggtgataatccttcaactgtagaatatccacgtgacacctgtgcaatttgaaagtcccaagcagtctatgggagaaagggaaaagtttgattgctgatttgtatcagtagagaagttggaggttgct

SEQ ID NO: 14137 - protein, 300 aa, Glycine max
MAEDSRKRTLEALERRIAFAKVEVLQKEKKNKKTINEDGKLPIPADSTSNDPSPHLLHSSSVSSKKGNFSFSGHTTLQDIEDGPAYAQLSVPVNGNLLTTNEEFSAERGGSIDGILHELLQKGDAAHKYMQGSRNMKIDNWILLDNYVQGRVLSSGSQARALQLHSKRSKKHMSMKRHKKDGSLDLPQEFQKFDIFKPMHEMWKDYIMLLLKSTGKNQLAQCLLGADLHGAFILVVECKITHFTGICGIMIRETAEAFGIITEDNKFRVVPKKVSVFVFQVDCWKVTLHGDKLGSRKVGL

SEQ ID NO: 14138 - protein, 171 aa, Glycine max
MQGSRNMKIDNWILLDNYVQGRVLSSGSQARALQLHSKRSKKHMSMKRHKKDGSLDLPQEFQKFDIFKPMHEMWKDYIMLLLKSTGKNQLAQCLLGADLHGAFILVVECKITHFTGICGIMIRETAEAFGIITEDNKFRVVPKKVSVFVFQVDCWKVTLHGDKLGSRKVGL

SEQ ID NO: 14139 - protein, 165 aa, Glycine max
MKIDNWILLDNYVQGRVLSSGSQARALQLHSKRSKKHMSMKRHKKDGSLDLPQEFQKFDIFKPMHEMWKDYIMLLLKSTGKNQLAQCLLGADLHGAFILVVECKITHFTGICGIMIRETAEAFGIITEDNKFRVVPKKVSVFVFQVDCWKVTLHGDKLGSRKVGL

SEQ ID NO: 14140 - DNA, 1652 bp, Glycine max
  misc_feature (790)..(790): n is a, c, g, or t
  misc_feature (801)..(801): n is a, c, g, or t
  misc_feature (829)..(829): n is a, c, g, or t
  misc_feature (992)..(992): n is a, c, g, or t
  misc_feature (995)..(995): n is a, c, g, or t
  misc_feature (1529)..(1529): n is a, c, g, or t
attttatttacttgtataaaaaaatgttatacaaactataaacatgtaattaaataattattcattataacagatctctctcacgtaccataaaagttttgataaacaaaaaaaaaagccatttttgttatacccatggcttaatgttgagctcaaattagaaaggatttttttttttttattaattattgtttgtttcaatacaaaacagggattgtcgcaaataatggcacgggagaagtttctgttgatcagtaccatcgctacaaagaagatatagatctcatggccagcctgaattttgatgcctaccggttctcaatctcgtggtccagaatttttccaaatggaactggccaagtaaattggaaaggtgtagcatactacaataggttgatcaattacttgctagagaaaggtattactccatatgcaaatctctaccattatgatcttcctttagcacttgaggagaggtacaacggattattgagtcgccaagttgtgaaagattttgcagattatgcagaattttgtttcaagacttttggagatagagttaagaattggatgacgtttaacgaacctcgtgtggtggctgctcttggctatgataatggtttctttgcccctggaagatgctcaaaagaatatgggaattgtactgctggcaactcaggcactgagccttacattgttgcccacaatttgatattgtcacatgcagctgctgttcaaagataccgagagaagtatcaagaaaagcaaaagggaaggatgggatcctctnggattttgttnggtatgagcctcttacaagatcaaaggncgacaatttagcagctcaaagagccagagactttcatgttggatggttcattcatccccttgtttatggagagtatccaacaaccattcaaaatattgttgggaatagactccccaaattcactagtgaagaagttaaaatcgtgaagggttcaatagatttngtnggaatcaaccaatatactacgtactacatgtatgatcctcatcaagcaaaacctaaagtcccaggctatcaaatggactggaatgcaggatttgcttatgcaaagaacggagtgcctattggtccaagggcttattcttattggctttacaacgtaccatggggcatgtacaaatcattgatgtacataaaggaacgttatggaaacccaactgtgttcttatccgaaaatggcatggatgatccgggtaacgtgactcttcccaagggtttgcatgacaccacaaggataaactattacaaaggctatttgactcaactaaagaaggcagttgatgatggagctaatgtggttggatactttgcatggtcattgctggataactttgaatggaggttgggttacacatcaaggtttggcattgtctatgttgatttcaaaaccctcaagagataccctaagatgtcagcatactggttcaagcaactcattgccaaaaagaagtactaatagctgggctgaacatctactttntaagcttctagttgcttcagataatcatgttttagtggttttggttgagttaaaagtagttctgtaactgtaatcatgtgacttgattaatgcaagtcttagaataaaatgatcttttatggc

SEQ ID NO: 14141 - protein, 184 aa, Glycine max
  misc_feature (169)..(169): Xaa can be any naturally occurring amino acid
  misc_feature (172)..(172): Xaa can be any naturally occurring amino acid
  misc_feature (182)..(182): Xaa can be any naturally occurring amino acid
MASLNFDAYRFSISWSRIFPNGTGQVNWKGVAYYNRLINYLLEKGITPYANLYHYDLPLALEERYNGLLSRQVVKDFADYAEFCFKTFGDRVKNWMTFNEPRVVAALGYDNGFFAPGRCSKEYGNCTAGNSGTEPYIVAHNLILSHAAAVQRYREKYQEKQKGRMGSSXILXGMSLLQDQRXTI

SEQ ID NO: 14142 - protein, 160 aa, Glycine max
MYDPHQAKPKVPGYQMDWNAGFAYAKNGVPIGPRAYSYWLYNVPWGMYKSLMYIKERYGNPTVFLSENGMDDPGNVTLPKGLHDTTRINYYKGYLTQLKKAVDDGANVVGYFAWSLLDNFEWRLGYTSRFGIVYVDFKTLKRYPKMSAYWFKQLIAKKKY

SEQ ID NO: 14143 - protein, 145 aa, Glycine max
MDWNAGFAYAKNGVPIGPRAYSYWLYNVPWGMYKSLMYIKERYGNPTVFLSENGMDDPGNVTLPKGLHDTTRINYYKGYLTQLKKAVDDGANVVGYFAWSLLDNFEWRLGYTSRFGIVYVDFKTLKRYPKMSAYWFKQLIAKKKY

SEQ ID NO: 14144 - DNA, 1609 bp, Glycine max
actgcattaaggccaagtcaccactctcctcttccattggtggatctttttttttctctcttttaatagggaaaccattggtgtgtgtttcagctttgctgacccttctgttgtttctgccaatctctgttagtatttagacccttttgatatacgaagccttcaattacaatgctttacttcctcatatctttcgtctcctttctcatcctttccaagtctttcaccagcaggcctttctcatcaggggagagagggatcaaaccagggtcaattgggttttgggggagtctttcaagttggttagtttctaggctcaagaaaggaagcacaacaggcaccaccccttttagttttttttcagttttctcttggcatgttattgaaaaagaatagtttagtgtctaaggtggagaatgaggaggaggaggggaatgtttctctcttggatttgcctgatttgccattggaatgcatccttgagcacctttcaccagctgaattatgcagggtggcaacagtgtgcacatctctgagggatagatgtaggagtgatcatttatggaagaaacacatggagaggaaatggggtaaggtgtttggtgatgctgcttataggcaatggaaatggcatgtagcttccaagaacagagaaaaaatctcctccaaccagcacaatcagaaaggaatatttgctttccttcgtggtggttttctccccttcatatggatcaaagcaaaatcagaaaagggcacagagtcaagtagctcattaccagaagattcaatagcagctttatatctttctcttgaaagtggcaaattttggttccctgctcaagtctataaccgtgagaatggtcatgctgggttcatgctctcatgttatgatgcccaactatgctatgattctcgatccgacacttttctggcaaggtactcgcctcatgggagatggacaactgaggaaaacatacaatgggaccggctaagagtgccaccaattgctacttctccacatgctcttcacatctctgactgtttggatgacttgagacctggagatcacattgagattcagtggagaagaaacaaagaatttccttatggttggtggtatggtgtcattggtcatttggaacaatgtcaaggacatgggaaccattgccattgtcactataatgatatagtgattttggagttcacacagtacactgctgggtccagatggagacaaaccgtgataaacagaaagcatcatatagaaaaaggcaatgaaatagatggtttttatggaggaatcaggaagctgcatagcaaggaagaaattgcaaggtggaagaacctctggccaactaaaattgtgatacatgattgacttgattagaatttttgtaaattaagcagtcacccttcctaaaatgtgaaggattacttttgtcacagaacgatgtcattcctaacaataggtataaacttggaaagagtttatggaagaattttcagaggctgtaacatctgtagcacgacataacaaatagtggatatgttgcagctttcttatacgtgtctatatataattttatagaagaacattggtgcatagtgc

SEQ ID NO: 14145 - protein, 333 aa, Glycine max
MLLKKNSLVSKVENEEEEGNVSLLDLPDLPLECILEHLSPAELCRVATVCTSLRDRCRSDHLWKKHMERKWGKVFGDAAYRQWKWHVASKNREKISSNQHNQKGIFAFLRGGFLPFIWIKAKSEKGTESSSSLPEDSIAALYLSLESGKFWFPAQVYNRENGHAGFMLSCYDAQLCYDSRSDTFLARYSPHGRWTTEENIQWDRLRVPPIATSPHALHISDCLDDLRPGDHIEIQWRRNKEFPYGWWYGVIGHLEQCQGHGNHCHCHYNDIVILEFTQYTAGSRWRQTVINRKHHIEKGNEIDGFYGGIRKLHSKEEIARWKNLWPTKIVIHD

SEQ ID NO: 14146 - protein, 267 aa, Glycine max
MERKWGKVFGDAAYRQWKWHVASKNREKISSNQHNQKGIFAFLRGGFLPFIWIKAKSEKGTESSSSLPEDSIAALYLSLESGKFWFPAQVYNRENGHAGFMLSCYDAQLCYDSRSDTFLARYSPHGRWTTEENIQWDRLRVPPIATSPHALHISDCLDDLRPGDHIEIQWRRNKEFPYGWWYGVIGHLEQCQGHGNHCHCHYNDIVILEFTQYTAGSRWRQTVINRKHHIEKGNEIDGFYGGIRKLHSKEEIARWKNLWPTKIVIHD

SEQ ID NO: 14147 - protein, 167 aa, Glycine max
MLSCYDAQLCYDSRSDTFLARYSPHGRWTTEENIQWDRLRVPPIATSPHALHISDCLDDLRPGDHIEIQWRRNKEFPYGWWYGVIGHLEQCQGHGNHCHCHYNDIVILEFTQYTAGSRWRQTVINRKHHIEKGNEIDGFYGGIRKLHSKEEIARWKNLWPTKIVIHD

SEQ ID NO: 14148 - DNA, 1406 bp, Glycine max
aagttcttcattttttctcattctgtctgtctgtctgtctctctctcactcactctttaagcactgagtaatttgtaatattattctgttcttgcttttgaggtcactgttctttctgcagttgctgcattagcattttgggaccattttgttctttaccactactttttctctgtgatgccattgttgtattgtactcttccttgtgctagatctgaagctgtgaggccagactctctcatttcatttccatcccgtgtttaaattggaagctggaacctagtttatgccctgcttgatttggttgctcttaacccttttcagaaatcaaaagcacttgtactatgctggtgttccctatagggaaagatgaaattgaagtctaagaaaggatggaaatctattgtaccacttcatttgaaaggaaaatcagcaagccgtttttctttatttcgcaaagtcaattctgctggctatggacctggcaaaacaccagtttatctgaatgtgtatgacttgacacccatgaatggttatgtgtattgggctggtcttggtatctatcactctggtgtagaagttcatggtgtagaatacgcgtttggagctcatgactacccaacaagtggtgttttcgaggttgaacctcgccaatgccctggcttcaagttcaggaagtcaatattcataggaatcacatctttggattctactcaggttagggagttcatggaacgccagtcagcaagatacaacggtgacacatatcacttaattgtcaagaactgcaaccacttctgcaaagacatctgttacaagctgacggggaaatcgattccaacatgggtaaatcgactggccagactaggttcaatttgcaattgcattcttcctgaagcactaaggatttctgctgtggcgcatgatcctaattatcagcctcatgatagtgaaaagagaaggcttcgaagtggcttcaattgcttgtcctcaatctcaatgcgtcaaaaacacctttccacatcttcactgtttctacagtcacccataagaggctgcttgtcgtcgtcatggccctcctcggaattgagaaaatccattaaccgttccttgaaagaaagataaccgaactttgagaaggtaggaaatgaatgattgtaagaatcttgtttatgtaagtaggatttggtttcatcacataacctcattttcttttatttttctttccttgtcttttgcagttaaacctgccctgttttattatttttttattgtggtgactaagaatgatcctttccaagcttagaagaaactttataaatgagcatcaccaccatctgctgtgtattattttaatttttgtacatacattagcatgtaaaatgatgcaccaacaacttcaatct

SEQ ID NO: 14149 - protein, 251 aa, Glycine max
MKLKSKKGWKSIVPLHLKGKSASRFSLFRKVNSAGYGPGKTPVYLNVYDLTPMNGYVYWAGLGIYHSGVEVHGVEYAFGAHDYPTSGVFEVEPRQCPGFKFRKSIFIGITSLDSTQVREFMERQSARYNGDTYHLIVKNCNHFCKDICYKLTGKSIPTWVNRLARLGSICNCILPEALRISAVAHDPNYQPHDSEKRRLRSGFNCLSSISMRQKHLSTSSLFLQSPIRGCLSSSWPSSELRKSINRSLKER

SEQ ID NO: 14150 - protein, 199 aa, Glycine max
MNGYVYWAGLGIYHSGVEVHGVEYAFGAHDYPTSGVFEVEPRQCPGFKFRKSIFIGITSLDSTQVREFMERQSARYNGDTYHLIVKNCNHFCKDICYKLTGKSIPTWVNRLARLGSICNCILPEALRISAVAHDPNYQPHDSEKRRLRSGFNCLSSISMRQKHLSTSSLFLQSPIRGCLSSSWPSSELRKSINRSLKER

SEQ ID NO: 14151 - protein, 131 aa, Glycine max
MERQSARYNGDTYHLIVKNCNHFCKDICYKLTGKSIPTWVNRLARLGSICNCILPEALRISAVAHDPNYQPHDSEKRRLRSGFNCLSSISMRQKHLSTSSLFLQSPIRGCLSSSWPSSELRKSINRSLKER

SEQ ID NO: 14152 - DNA, 374 bp, Glycine max
aactcaataatagtcccttttctgaaattctcctaactctctcgcttctcgtgcggcacgagaagcgcttctcgtgcttttttttttttttttttgtagtaatggtctcgtgcgaattcgatgacaagaccaacgtcaaggccgcctggggtaaggtcggcgcgcacgctggcgagtatggtgcggaggccctggagaggatgttcctgtccttccccaccaccaagacctacttcccgcacttcgacctgagccacggctctgcccaggttaagggccacggcaagaaggtggccgacgcgctgaccaacgccgtggcgcacgtggacgacatgcccaacgcgctgtccgccctgagcgacctgcacgcgcac

SEQ ID NO: 14153 - protein, 124 aa, Glycine max
LNNSPFSEILLTLSLLVRHEKRFSCFFFFFFVVMVSCEFDDKTNVKAAWGKVGAHAGEYGAEALERMFLSFPTTKTYFPHFDLSHGSAQVKGHGKKVADALTNAVAHVDDMPNALSALSDLHAH

SEQ ID NO: 14154 - protein, 91 aa, Glycine max
MVSCEFDDKTNVKAAWGKVGAHAGEYGAEALERMFLSFPTTKTYFPHFDLSHGSAQVKGHGKKVADALTNAVAHVDDMPNALSALSDLHAH

SEQ ID NO: 14155 - DNA, 982 bp, Glycine max
atgatggcttctttttcagttcagtagagtagagtgagcgaaagtggaaaacaaaaatggaggagactcaagtgctgcacgaactccacaagctatcacagatagaatcagaggaaaccctaaaccaaatgctatgcaccctttggtccactcgtaaaacgggtcttcccctctccgacaagtcccatttccaatccctcctccacctcccttccccctcccatctcgaccccgttttagcgtgcctccgttccctcgtcagaaaatgcgcgcaccagaacctcgcccgcgacgaccttctcagactgtttccccgcgatcttccgattcagttgcaaacgaatttgatatcagcgttgcagagaaacagagatcggtggaaggaggacgtgagtcacgtgattccgcagctgaagggaacgataaactttgctccttcgctgctttggccgcgccaagaacaagattttgatgcggtggcggtgccggcggttgttcctgatgttggcccttcgggggtgaattcgtgcttccagtgtgatgccgttggtgcttctgataacttggaaaaccttccttgcctcaaatcaatgacgtggaccatggagaatcgtggctcatcccctgcagatagagtagctataatcagccttaagctgcatgattatagcaagtctccatcaggtgaaacagagataaagtttcagctcacaagggacacacttgaggctatgctgagatccatgacatacatcagggaacaactaaatgctgttgagacttcttcaggaccagcaaacaagaaacaaaagcagtagcttattttccagaaattaatgctgtagttagtaatattaagacaaatatctcatcctattagtcattggatgttataactgatttttgtccctccgattctttgatggatgccattaaggcttaagcaaacttaatggtttgttataaactatctctctcaatg

SEQ ID NO: 14156 - protein, 253 aa, Glycine max
MEETQVLHELHKLSQIESEETLNQMLCTLWSTRKTGLPLSDKSHFQSLLHLPSPSHLDPVLACLRSLVRKCAHQNLARDDLLRLFPRDLPIQLQTNLISALQRNRDRWKEDVSHVIPQLKGTINFAPSLLWPRQEQDFDAVAVPAVVPDVGPSGVNSCFQCDAVGASDNLENLPCLKSMTWTMENRGSSPADRVAIISLKLHDYSKSPSGETEIKFQLTRDTLEAMLRSMTYIREQLNAVETSSGPANKKQKQ

SEQ ID NO: 14157 - protein, 229 aa, Glycine max
MLCTLWSTRKTGLPLSDKSHFQSLLHLPSPSHLDPVLACLRSLVRKCAHQNLARDDLLRLFPRDLPIQLQTNLISALQRNRDRWKEDVSHVIPQLKGTINFAPSLLWPRQEQDFDAVAVPAVVPDVGPSGVNSCFQCDAVGASDNLENLPCLKSMTWTMENRGSSPADRVAIISLKLHDYSKSPSGETEIKFQLTRDTLEAMLRSMTYIREQLNAVETSSGPANKKQKQ

SEQ ID NO: 14158 - DNA, 1165 bp, Glycine max
cagctacgtaggcccccccccccgtttccacagtattataatgcatattatgatttggtgagtgctggagtgcagtttgctcaaagggatcaagtggtccaatcaaataatcctagttcacaacctagtaggactagtaatgtaccaaacagagagcaagcctcacctaaacatgaagcagttgctcagccagcagagtcccagactgtccctgaatctagcattattcaaaaggctggcaatgcattagaagtactaaaagaggtccttgatgttgttgatgctcaaaatcctcagggagcaagggatgaattcacccttgaccttgtagaacaatgttcttttcaaaaacaaagggttatgcatcttgtgatggcttcccgagatgaaaggatagtttctcgagcaattgaattgaatgagcaacttcagaaagttcttgcaagacatgatgaccttcttgctggcagagctacaacaactgccagtcgatttgaccatgaagaagcagaggaggaagaggagcctgaacagttagtccgaagattacgcaagggaaaggcttgtgcaaggcctgaacacgaggagactgaaactgacatcccttgcttgggtttgcttggagagagactcaatcgtcctctaatacgaccactctcgatagaacctccaactcgagaagctgatactcgatctccacctgttgtgatcccaccatctcgagaagctgatacccgatctccacctgctgtgattccacctccacggccaaaacagaatgggcaggttcctcaccctgtagcaattccaccaccacctgcaaaacacattgagagggagaggttttttcaggaaaacaaggatggttctaatttgtctggccacatgaggggcctctctttacatagtcgtaacggcagcagctctcgcagtggaagctttgattttagtgactgatctcttgacaacaggatctcttttagcttttcttttcatttctgtctaaatttggagttggtattatttaagctgtgaggaattggtgatttctcatttagtcttggtagtgtggagatgggagagaagaagtgaagccacatctgcttcagtttataaattacttgtaattatgttctcagattatgtgccatgacctgaggtttgt

SEQ ID NO: 14159 - protein, 318 aa, Glycine max
QLRRPPPPFPQYYNAYYDLVSAGVQFAQRDQVVQSNNPSSQPSRTSNVPNREQASPKHEAVAQPAESQTVPESSIIQKAGNALEVLKEVLDVVDAQNPQGARDEFTLDLVEQCSFQKQRVMHLVMASRDERIVSRAIELNEQLQKVLARHDDLLAGRATTTASRFDHEEAEEEEEPEQLVRRLRKGKACARPEHEETETDIPCLGLLGERLNRPLIRPLSIEPPTREADTRSPPVVIPPSREADTRSPPAVIPPPRPKQNGQVPHPVAIPPPPAKHIERERFFQENKDGSNLSGHMRGLSLHSRNGSSSRSGSFDFSD

SEQ ID NO: 14160 - protein, 198 aa, Glycine max
MHLVMASRDERIVSRAIELNEQLQKVLARHDDLLAGRATTTASRFDHEEAEEEEEPEQLVRRLRKGKACARPEHEETETDIPCLGLLGERLNRPLIRPLSIEPPTREADTRSPPVVIPPSREADTRSPPAVIPPPRPKQNGQVPHPVAIPPPPAKHIERERFFQENKDGSNLSGHMRGLSLHSRNGSSSRSGSFDFSD

SEQ ID NO: 14161 - protein, 194 aa, Glycine max
MASRDERIVSRAIELNEQLQKVLARHDDLLAGRATTTASRFDHEEAEEEEEPEQLVRRLRKGKACARPEHEETETDIPCLGLLGERLNRPLIRPLSIEPPTREADTRSPPVVIPPSREADTRSPPAVIPPPRPKQNGQVPHPVAIPPPPAKHIERERFFQENKDGSNLSGHMRGLSLHSRNGSSSRSGSFDFSD

SEQ ID NO: 14162 - DNA, 552 bp, Glycine max
  misc_feature (1)..(1): n is a, c, g, or t
  misc_feature (235)..(235): n is a, c, g, or t
  misc_feature (537)..(537): n is a, c, g, or t
  misc_feature (544)..(544): n is a, c, g, or t
ngaaatgagagatgagccacaggttggtggcatctatgttaggctgtttctgaaagatcccaaattccctcttagaaaccctaaaaggttcttggaaggtctactagatcagtatttgtcgtccattgctgccacccattatgaggtgcaggttattgatccagagcttcctttgctcctgtcggctgcactggtttccttactgcgtgtgcatcctgcactagcagatcatgtnggatatcttggatatgtaccaaaactagttgctgctgttgcatttgagggaaggcgagaaacaatgtcatcaggtgaggtaaacaatgggagacatgcagaacaaacatatgacccagataaggaatcagcagagaacacacaaactcctcaagaacgtgtgcgcctgagttgtttgcgtgtcttgcatcaacttgcagctagtaccacctgtgcggaggccatggcagcaaccagtgttggaacacctcaggttgttccgctgctaatgaaagccatagggtggcaaggtggaagcatttnagctctngagactct

SEQ ID NO: 14163 - protein, 183 aa, Glycine max
  misc_feature (78)..(78): Xaa can be any naturally occurring amino acid
  misc_feature (179)..(179): Xaa can be any naturally occurring amino acid
  misc_feature (181)..(181): Xaa can be any naturally occurring amino acid
EMRDEPQVGGIYVRLFLKDPKFPLRNPKRFLEGLLDQYLSSIAATHYEVQVIDPELPLLLSAALVSLLRVHPALADHXGYLGYVPKLVAAVAFEGRRETMSSGEVNNGRHAEQTYDPDKESAENTQTPQERVRLSCLRVLHQLAASTTCAEAMAATSVGTPQVVPLLMKAIGWQGGSIXAXET

SEQ ID NO: 14164 - protein, 182 aa, Glycine max
  misc_feature (77)..(77): Xaa can be any naturally occurring amino acid
  misc_feature (178)..(178): Xaa can be any naturally occurring amino acid
  misc_feature (180)..(180): Xaa can be any naturally occurring amino acid
MRDEPQVGGIYVRLFLKDPKFPLRNPKRFLEGLLDQYLSSIAATHYEVQVIDPELPLLLSAALVSLLRVHPALADHXGYLGYVPKLVAAVAFEGRRETMSSGEVNNGRHAEQTYDPDKESAENTQTPQERVRLSCLRVLHQLAASTTCAEAMAATSVGTPQVVPLLMKAIGWQGGSIXAXET

SEQ ID NO: 14165 - DNA, 495 bp, Glycine max
caagcagctctcgtatttttgccatgtgttcgatactgtttcttgtatagaaaagatggaggcaaaatctagaataccgatagagaaagagttgataaaaattagggcggtgattaaatcggcagcatcaacagcacaggagatcagggaccgttgtgcctttgggtgggtgaaattggagaatctggtcatttcagtttaatttgcagatttgatgccagagtcggtttatgtagtctagcatccatccatgtgaatctacttgagcaaggggattctcagcagattcatgatatattataaatagactatcaagggttatcgtcactggttttacaagcaagtctgatcgagtaaatctacgcaataccctctactctttatttaagaggcagtaatctgctattgactgctactgtccttataacaatttccagtgttctgtaaatatgttttattagtttgtgttatttacaaaagctcatcaattgattg

SEQ ID NO: 14166 - protein, 66 aa, Glycine max
KQLSYFCHVFDTVSCIEKMEAKSRIPIEKELIKIRAVIKSAASTAQEIRDRCAFGWVKLENLVISV

SEQ ID NO: 14167 - protein, 48 aa, Glycine max
MEAKSRIPIEKELIKIRAVIKSAASTAQEIRDRCAFGWVKLENLVISV

SEQ ID NO: 14168 - DNA, 1540 bp, Glycine max
aaaattttgcacaacaggttatgaaaatccacgagaagcaaccggtcgctgcctgtggatattgaggttccacaagtggtacttcctaatccggatcagcaactttcggatgatggcagcaccttggtttctaacggcggaacctttgagttgggtttcttcaatcccgggagttccaataaccgctatgtcggaatctggtacaaaaaaatctctattaaaacagtagtttgggttgccaaccgtgacaacccaatagtcagacacaactcaagcaagctggtcataaggcaagagggaaacctcgtactcctcagcaacaacaaccagtctcttctttggactacaaatgtaacaaaaaaggcttcgagttcgagtccaattgtgcaactcttggacactggaaacttggtaattaaagatggtatcaacgaagagagtgtttttctgtggcaaagctttgaccatccttgtgacacgctattgtcgggaatgaagcttgggtgggacttaagaactgggcttaaccggcgtcttacttcttggaaaagctgggatgatccgtcttcgggagacattgtttgggaggtagtgataggaaacaatcctgaattggtcatgtggaagagtaaagttgactactttaggactgggccttatactgggaatatgttcagtggagtatatgcgccgaggaataacccactttataattggaaatttgtgagtaacaaagatgaagtgtatttccaatacaccttgagtaatagttttgtggtttctataattgttttgaaccaaacccttaatcttcgtcaacgcctcacttggattcccgataccaagacttggacggtttaccaatccttgccactagatagttgtgatgtttataacacttgtgggccaaatggaaattgcatcattgctgggtcgccaatttgccagtgcttagacgggttcaagccgaaatcgccccaacagtggaacgcaatggattggaggcaagggtgtgtgcgcagtgaagagtggagttgtggggtaaaaaataaggatggttttcaaagacttgctagtatgaaactgccaaacactacattttcttgggttaacgaaagtataacacttgaggagtgtagggccaaatgtttggaaaactgttcgtgcacagcttattcgaacttggacacaaggggaggaggtagtgggtgctccatttgggttggtgaacttgttgacatgagagatgtaaaaagcggacaagatttatatgttcgaatagccacttcggatccagatggtaaacatgagcgtcaaaaaaaggtaatcttggtggttgcgatcactgtttcgctggtccttgtgatgttattagcattctgtgtttacatgatcaagaaaaaatataaaggtgagtttcttacctagaaatcttttttatttcacatacattttaaaatttaagagaacacctacaatgtcataaatagaatatttacgcacttgtgaatctcataaattcattcttcatgtttttctc

SEQ ID NO: 14169 - protein, 311 aa, Glycine max
MKLGWDLRTGLNRRLTSWKSWDDPSSGDIVWEVVIGNNPELVMWKSKVDYFRTGPYTGNMFSGVYAPRNNPLYNWKFVSNKDEVYFQYTLSNSFVVSIIVLNQTLNLRQRLTWIPDTKTWTVYQSLPLDSCDVYNTCGPNGNCIIAGSPICQCLDGFKPKSPQQWNAMDWRQGCVRSEEWSCGVKNKDGFQRLASMKLPNTTFSWVNESITLEECRAKCLENCSCTAYSNLDTRGGGSGCSIWVGELVDMRDVKSGQDLYVRIATSDPDGKHERQKKVILVVAITVSLVLVMLLAFCVYMIKKKYKGEFLT

SEQ ID NO: 14170 - protein, 269 aa, Glycine max
MWKSKVDYFRTGPYTGNMFSGVYAPRNNPLYNWKFVSNKDEVYFQYTLSNSFVVSIIVLNQTLNLRQRLTWIPDTKTWTVYQSLPLDSCDVYNTCGPNGNCIIAGSPICQCLDGFKPKSPQQWNAMDWRQGCVRSEEWSCGVKNKDGFQRLASMKLPNTTFSWVNESITLEECRAKCLENCSCTAYSNLDTRGGGSGCSIWVGELVDMRDVKSGQDLYVRIATSDPDGKHERQKKVILVVAITVSLVLVMLLAFCVYMIKKKYKGEFLT

SEQ ID NO: 14171 - protein, 252 aa, Glycine max
MFSGVYAPRNNPLYNWKFVSNKDEVYFQYTLSNSFVVSIIVLNQTLNLRQRLTWIPDTKTWTVYQSLPLDSCDVYNTCGPNGNCIIAGSPICQCLDGFKPKSPQQWNAMDWRQGCVRSEEWSCGVKNKDGFQRLASMKLPNTTFSWVNESITLEECRAKCLENCSCTAYSNLDTRGGGSGCSIWVGELVDMRDVKSGQDLYVRIATSDPDGKHERQKKVILVVAITVSLVLVMLLAFCVYMIKKKYKGEFLT

SEQ ID NO: 14172 - DNA, 540 bp, Glycine max
caatgaatttttgttatacaataaagaatatatatgatgatatacttatgtgttattgcgtgcatgtgtgtatggtattgataggagctagagaatccttccgttttcggagaaggtcaacatcagatgcgtacgagaagacaggccagaacagatcaagctcttcttctcctttcgatgtgtgagaaatgagcctgaccactatatatcctccatggatcgatgactgaaataaaatatatatagtagtttgtttttctctagcctttgcggatgatgctgtatccatttttgtttatgttaattttgtgcatatatatagtatatagtatatagcatatgtatgaatatgtttacgagttcatcagttgagcgattgaagtcctgaaacgatcgaggtagctgtgtgtggtttaacagcttggtcttgttttattgttgaactggtttatggttcggaagctgtaaataagtaataacgtagtataggtgtgtttttgttacgtgtactttgtatatatataaaagcctttccattcc

SEQ ID NO: 14173 - protein, 60 aa, Glycine max
MNFCYTIKNIYDDILMCYCVHVCMVLIGARESFRFRRRSTSDAYEKTGQNRSSSSSPFDV

SEQ ID NO: 14174 - protein, 45 aa, Glycine max
MCYCVHVCMVLIGARESFRFRRRSTSDAYEKTGQNRSSSSSPFDV

SEQ ID NO: 14175 - protein, 37 aa, Glycine max
MVLIGARESFRFRRRSTSDAYEKTGQNRSSSSSPFDV

SEQ ID NO: 14176 - DNA, 1343 bp, Glycine max
  misc_feature (84)..(84): n is a, c, g, or t
gccgagcgtcgttctatctatttttttctctgcctgctgcacacacactgagactgagagaaagagaaccaactactacagtcnacagaaaaccaaaaaaacactgtgtgtgtgtgtttgtgtgtcaaaaaaaaaaaccctaagctaatgatgatggatccgcgacagcgagagaagctacttcacaaaaccgaggcctgtgctttcgtggcaggtgttgttccggagctttcccttgtcaccgttccagggaacaacaacaacaccaacaacgttaacaacaacaacaacaacgtttctcattctcaatctcaccggtcgggtcggatccatgaaaaccaccaccaccaccttggtctcgtggctgctgtcaccaccaccttcggaactgttcacaggaagaaaaggatggccagacaaagaagatccactaaccccactttgttgatgaaccctctcatcaacaacaacaacaacaagtctggttcttctcttccttctccaagtattgcttcctcctcgcacgtgccactctcctcctcaactctcccgcccgcacgtgaaatcgatcaaagaaggttgagattccttttccagaaggagttaaagaacagtgatgttagctcccttaggagaatgatattgccaaagaaagcagcagaggctttccttccagctcttgaatccaaagaaggaattgtaatcagcatggatgatatagatggtcttcatgtatggagtttcaagtacaggttttggcctaacaataacagtcggatgtatgtacttgaaaatactggagactttgtcaacacacatggccttcgctttggagattccattttggtttaccaagatagtgaaaacaacaattatgttattcaggcgaaaaaggcttctgatcaggatgaatttatggaagaaactagtgataccatcaatgatatcttccttaatgattatgaagtgaacaaacctggttgcttcaatgtaacctatcctgcagtgaatgatacaggcatgtcattcatatatgagactaccttctcaaatgactcccctcttgattttttgggtggatcaatgaccaatttttcaaggattggaccagttgaaacctttggctctgttgagaatttgtcacttgatgacttctattaaaggcatcaaatcacaaaggaagcattaacatggtaccaagactagcactattaagtgtgtgcttctttattttggtactaaagaaacatataaagtgtgctttgttgttgtcgtggtcatgaccatgagagaatttgtgtagaataaaagagtagccatgccaatgggcatgtttcctgtcc

SEQ ID NO: 14177 - protein, 337 aa, Glycine max
MMMDPRQREKLLHKTEACAFVAGVVPELSLVTVPGNNNNTNNVNNNNNNVSHSQSHRSGRIHENHHHHLGLVAAVTTTFGTVHRKKRMARQRRSTNPTLLMNPLINNNNNKSGSSLPSPSIASSSHVPLSSSTLPPAREIDQRRLRFLFQKELKNSDVSSLRRMILPKKAAEAFLPALESKEGIVISMDDIDGLHVWSFKYRFWPNNNSRMYVLENTGDFVNTHGLRFGDSILVYQDSENNNYVIQAKKASDQDEFMEETSDTINDIFLNDYEVNKPGCFNVTYPAVNDTGMSFIYETTFSNDSPLDFLGGSMTNFSRIGPVETFGSVENLSLDDFY

SEQ ID NO: 14178 - protein, 336 aa, Glycine max
MMDPRQREKLLHKTEACAFVAGVVPELSLVTVPGNNNNTNNVNNNNNNVSHSQSHRSGRIHENHHHHLGLVAAVTTTFGTVHRKKRMARQRRSTNPTLLMNPLINNNNNKSGSSLPSPSIASSSHVPLSSSTLPPAREIDQRRLRFLFQKELKNSDVSSLRRMILPKKAAEAFLPALESKEGIVISMDDIDGLHVWSFKYRFWPNNNSRMYVLENTGDFVNTHGLRFGDSILVYQDSENNNYVIQAKKASDQDEFMEETSDTINDIFLNDYEVNKPGCFNVTYPAVNDTGMSFIYETTFSNDSPLDFLGGSMTNFSRIGPVETFGSVENLSLDDFY

SEQ ID NO: 14179 - protein, 335 aa, Glycine max
MDPRQREKLLHKTEACAFVAGVVPELSLVTVPGNNNNTNNVNNNNNNVSHSQSHRSGRIHENHHHHLGLVAAVTTTFGTVHRKKRMARQRRSTNPTLLMNPLINNNNNKSGSSLPSPSIASSSHVPLSSSTLPPAREIDQRRLRFLFQKELKNSDVSSLRRMILPKKAAEAFLPALESKEGIVISMDDIDGLHVWSFKYRFWPNNNSRMYVLENTGDFVNTHGLRFGDSILVYQDSENNNYVIQAKKASDQDEFMEETSDTINDIFLNDYEVNKPGCFNVTYPAVNDTGMSFIYETTFSNDSPLDFLGGSMTNFSRIGPVETFGSVENLSLDDFY

SEQ ID NO: 14180 - DNA, 520 bp, Glycine max
atgacagtacttctccacgactagccaccttaaagtacaacaatgatgctcttcgtcgcctaattggaccaatgggtgctctaaagagaaaaatggaagaggaaacaggtgcacggatgtctgtaggtgatggaacacttacaatagttgctaagaatcaatctgtaatggacaaaatactagaaaagattgattttattgtgggccgtcaaattgaagttggaggcatctacacaggtattgtcaccactataaaagagtatggagcttttgtggagtttaatggtggccagcagggcctactccacatttctgagttgtcacatgaaccggtttcccaagtttcagaggttgtctctgttggccagaagctgtctttgatgtgcataggccaaaatgttcatggtaacattaaattatcccttaaagcaacttcgcctcgtcctggaggattggagactaatgatgcagttgaagaatctgttgcatctgcaaaagaaacagccaacatttgggcacc

SEQ ID NO: 14181 - protein, 172 aa, Glycine max
DSTSPRLATLKYNNDALRRLIGPMGALKRKMEEETGARMSVGDGTLTIVAKNQSVMDKILEKIDFIVGRQIEVGGIYTGIVTTIKEYGAFVEFNGGQQGLLHISELSHEPVSQVSEVVSVGQKLSLMCIGQNVHGNIKLSLKATSPRPGGLETNDAVEESVASAKETANIWA

SEQ ID NO: 14182 - protein, 149 aa, Glycine max
MGALKRKMEEETGARMSVGDGTLTIVAKNQSVMDKILEKIDFIVGRQIEVGGIYTGIVTTIKEYGAFVEFNGGQQGLLHISELSHEPVSQVSEVVSVGQKLSLMCIGQNVHGNIKLSLKATSPRPGGLETNDAVEESVASAKETANIWA

SEQ ID NO: 14183 - protein, 142 aa, Glycine max
MEEETGARMSVGDGTLTIVAKNQSVMDKILEKIDFIVGRQIEVGGIYTGIVTTIKEYGAFVEFNGGQQGLLHISELSHEPVSQVSEVVSVGQKLSLMCIGQNVHGNIKLSLKATSPRPGGLETNDAVEESVASAKETANIWA

SEQ ID NO: 14184 - DNA, 581 bp, Glycine max
agcaaaacccatcattccacgagcagacgcgggacagtgcagagcttcccagagaagcttaggagcaacgatgaagagtagcacactcctggtcatcctgatccttcaggccgtcctggtcatgggaatcctctcacaggcgaacgccgagttccccaagtgctgcgacaactgcaggttcttctcgggggccgtggtctgcgatgacgccggccccaagtgccgggacggctgcgtgaactgccgcgtcgtgcagacgagccctaagaagacgttccgatgcgccgatgctcgcgccgacgacggcacgccctgcaagccctgcaagaagcactgatcgcacatgctcaggacataagatgttggaccgaaaataaaagctcgcatgggttgagcagagcagtggtggctgtacgtgcccgcggtccacgcccaacaacaattgtagttgtcatcgtcgtcgttatgcttttttctctctccagaaaaagctgttgtcattgctccgtgaataaacacatacatatgtatcagtgtatgcgtctctgctcaattaaataaaaatcagtttatttgtgtcg

SEQ ID NO: 14185 - protein, 111 aa, Glycine max
AKPIIPRADAGQCRASQRSLGATMKSSTLLVILILQAVLVMGILSQANAEFPKCCDNCRFFSGAVVCDDAGPKCRDGCVNCRVVQTSPKKTFRCADARADDGTPCKPCKKH

SEQ ID NO: 14186 - protein, 93 aa, Glycine max
MRRCSRRRRHALQALQEALIAHAQDIRCWTENKSSHGLSRAVVAVRARGPRPTTIVVVIVVVMLFSLSRKSCCHCSVNKHIHMYQCMRLCSIK

SEQ ID NO: 14187 - protein, 88 aa, Glycine max
MKSSTLLVILILQAVLVMGILSQANAEFPKCCDNCRFFSGAVVCDDAGPKCRDGCVNCRVVQTSPKKTFRCADARADDGTPCKPCKKH

SEQ ID NO: 14188 - DNA, 1493 bp, Glycine max
atttctttgggattcttgcccttgttttggtgatgccatgggagttagctgtttttgtttcctttctctctgatagaaaaagaactaagaatgggcaaatctttattgatttacttaaaaaaatatcaatatcctttaaaatatacaggcaccagagaattttttattttttatttttaatgttaaaaggtcaatgaatatgattatgagatggaagggagtaccttctttggcttcttcctaagtcctaaccttgacgaggccaattccattcattttgatgtgtctctgttttcaacaaacgttcacaacaacacatttcgccgtttcaaatcactacttaacaccggggcacatagagagagagagacatcatggtctcttctaatggactagctacgagtcagccacttttttcttttggattgatttctgatgtccaatatgctgacattcctgatggccgttcattccttggtgttccacggtattatagacacagtcttctcatattgcagagagcagttaaagaatggaacactcatcagaagcacaagtttgtgattaattttggagattttgttgatgggttttgtcccaaagatcaatctcttgatactgtaaagaaagttgttgatgaatttgagatgttcacaggaggacctgtgtatcatatgattggcaatcactgcctatacaatcttcctcgcagcaagttaccttcattactgaagatccatactcttgatggccgtgcatactatgatttctcgccagtgcctgaatatagatttgttgttctggatgcctatgacatcagtgccattggttggcctcaagatcatccaaaaacactggaggccttgaaaatcctaagggagaagaatccaaatgaagataagaacagtccaacaaatttggagggtcctgaacgaaggtttgtaatgtttaatggagctgttggaaaggaacaggtcgaatggttagatggtgttctcttggagtcaacaaacttgaaacagaaggtggttgtctgctgccatctgcctctacatcctggtgcggcaactgaagagacactgttgtggaattacgatgaagtaatgaatttgatacacagatacaattgcgttaaggtctgtcttgcagggcatgatcataaaggcggatactctattgattctcatgggatacaccatagagtttttgaagctgctttggaatgccctcctggtacggatgcatttggatacattgatgtctatgatgacaggatatcacttgttggaactgacagaatgaaaagtacagagatggattttactcccccaagttaatttgtatgacaggatgtcttcacgtttgtaaaaatacctattattttttcactaatgtttgaaatagtacctatcatcttgttctagtcctacctacagggaagtttgtatttaaagttggaataacttaaattgagttggtactgttcatgaatc

SEQ ID NO: 14189 - protein, 320 aa, Glycine max
MVSSNGLATSQPLFSFGLISDVQYADIPDGRSFLGVPRYYRHSLLILQRAVKEWNTHQKHKFVINFGDFVDGFCPKDQSLDTVKKVVDEFEMFTGGPVYHMIGNHCLYNLPRSKLPSLLKIHTLDGRAYYDFSPVPEYRFVVLDAYDISAIGWPQDHPKTLEALKILREKNPNEDKNSPTNLEGPERRFVMFNGAVGKEQVEWLDGVLLESTNLKQKVVVCCHLPLHPGAATEETLLWNYDEVMNLIHRYNCVKVCLAGHDHKGGYSIDSHGIHHRVFEAALECPPGTDAFGYIDVYDDRISLVGTDRMKSTEMDFTPPS

SEQ ID NO: 14190 - protein, 229 aa, Glycine max
MFTGGPVYHMIGNHCLYNLPRSKLPSLLKIHTLDGRAYYDFSPVPEYRFVVLDAYDISAIGWPQDHPKTLEALKILREKNPNEDKNSPTNLEGPERRFVMFNGAVGKEQVEWLDGVLLESTNLKQKVVVCCHLPLHPGAATEETLLWNYDEVMNLIHRYNCVKVCLAGHDHKGGYSIDSHGIHHRVFEAALECPPGTDAFGYIDVYDDRISLVGTDRMKSTEMDFTPPS

SEQ ID NO: 14191 - protein, 220 aa, Glycine max
MIGNHCLYNLPRSKLPSLLKIHTLDGRAYYDFSPVPEYRFVVLDAYDISAIGWPQDHPKTLEALKILREKNPNEDKNSPTNLEGPERRFVMFNGAVGKEQVEWLDGVLLESTNLKQKVVVCCHLPLHPGAATEETLLWNYDEVMNLIHRYNCVKVCLAGHDHKGGYSIDSHGIHHRVFEAALECPPGTDAFGYIDVYDDRISLVGTDRMKSTEMDFTPPS

SEQ ID NO: 14192 - DNA, 1412 bp, Glycine max
agtcacttctcaccgtcactttagtcttctcttgcggtggcacaaactatatcacgtttcgaaagagtaacttggtgaccggtgaggtgttcctagttaccatacgaaagaggattttggtgtaggatgggatcgatagagaacgcttccaaaccaaggaaggaaaatccgaaatttgaattgccagcgggttttagatttcatccaacagatgaagaactcataaatcaatacctcacaaagaaggttgttgacaactgtttctgtgctatagccattggtgaggttgatttgaacaagtgtgagccatgggatttgcctgggttggctaaaatgggtgaaactgagtggtattttttctgtgtgagggacagaaaattcccaactggtataaggactaatagggccactgatattggttattggaaagccacaggaaaagacaaggagataataatggagaatgcactcattgggatgaagaaaaccttggttttctacaagggaagagctcctaaaggtgaaaagacaaactgggttatgcatgaatataggttggaagggaaacataatcaacccaaacctggaaagagtgaatgggtgatttgtagagtctttgagaagagtcgttgtgggaagaaaatgcatgttccaaagtgtgggaggttcaacaacccctttggagaggaaccatcatcaggtgcttctctattgcctcctttgatggattcttctccatacaacagtgaaacaagaaccaccactgctggggagttgtctcaggtgacatgcttctctgatccaaatcaaactgaggatcagaacaacacacatgatgacattgttgatagcatggaaactcctattttgaacttctcacccttttcaaggcctgatgatgcatccactttggccaaagcaaccctttcttcagcctcaaaccaatcagcacagattgcacaccaaattggggaatcacagttcccagattattgttatgcgcctcaagaaccgtccatgttgaggatgctgatggaaaaccatgaaccctgtgcgaagcaaactcagaaagaagagtttcctgagggaagagactttgatggagatatctcatctatgatatacagcagtgacatgataaacagaatgtttgggaatcaagaacattcttcatcagcttctgcagggcctgtggacactgatttcctatggaattactgaaggttaaggaatattatttagtgttaagacagaaaatatgttaattatatttatattcatatgatacatacaggttggttacctgcaacttcatgaacttattgtaggaattatgggaaatgcatgaaattgaatttcccccctctggttgataactttgataaaaactagtgatgaatagtccatatgtt

SEQ ID NO: 14193 - protein, 364 aa, Glycine max
MGSIENASKPRKENPKFELPAGFRFHPTDEELINQYLTKKVVDNCFCAIAIGEVDLNKCEPWDLPGLAKMGETEWYFFCVRDRKFPTGIRTNRATDIGYWKATGKDKEIIMENALIGMKKTLVFYKGRAPKGEKTNWVMHEYRLEGKHNQPKPGKSEWVICRVFEKSRCGKKMHVPKCGRFNNPFGEEPSSGASLLPPLMDSSPYNSETRTTTAGELSQVTCFSDPNQTEDQNNTHDDIVDSMETPILNFSPFSRPDDASTLAKATLSSASNQSAQIAHQIGESQFPDYCYAPQEPSMLRMLMENHEPCAKQTQKEEFPEGRDFDGDISSMIYSSDMINRMFGNQEHSSSASAGPVDTDFLWNY

SEQ ID NO: 14194 - protein, 295 aa, Glycine max
MGETEWYFFCVRDRKFPTGIRTNRATDIGYWKATGKDKEIIMENALIGMKKTLVFYKGRAPKGEKTNWVMHEYRLEGKHNQPKPGKSEWVICRVFEKSRCGKKMHVPKCGRFNNPFGEEPSSGASLLPPLMDSSPYNSETRTTTAGELSQVTCFSDPNQTEDQNNTHDDIVDSMETPILNFSPFSRPDDASTLAKATLSSASNQSAQIAHQIGESQFPDYCYAPQEPSMLRMLMENHEPCAKQTQKEEFPEGRDFDGDISSMIYSSDMINRMFGNQEHSSSASAGPVDTDFLWNY

SEQ ID NO: 14195 - protein, 254 aa, Glycine max
MENALIGMKKTLVFYKGRAPKGEKTNWVMHEYRLEGKHNQPKPGKSEWVICRVFEKSRCGKKMHVPKCGRFNNPFGEEPSSGASLLPPLMDSSPYNSETRTTTAGELSQVTCFSDPNQTEDQNNTHDDIVDSMETPILNFSPFSRPDDASTLAKATLSSASNQSAQIAHQIGESQFPDYCYAPQEPSMLRMLMENHEPCAKQTQKEEFPEGRDFDGDISSMIYSSDMINRMFGNQEHSSSASAGPVDTDFLWNY

SEQ ID NO: 14196 - DNA, 1186 bp, Glycine max
acactcatctcgtaaacaagcagcttgctagagcgggacaagcttggccatccttaaccttatttcgacatggcgaggtcgcccatggcgatgctcccgttcctggtgctcggggtagcagcactagtcctgtctgccgcgggaatggtggccgcgcagaagtgcggctgccgggcgaacgagtgctgcagccagtacggctactgcggcactaccgacgcctactgtggacaagggtgtcagtctggcccgtgctcggggagcggcggcggcggcgggaccggcgcctccgtggagagcgtcgtcaccgaggcgttcttcaacgggatcaagtcccgggccggcaacgggtgcgccggcaaaagcttttacacgcgccggtcgttcctggccggcgcccgggcgaaccccaacttcgggaaaggccgcacgggcgacgacggtaagagggagatagccgccttcttcgcccacgtcacacacgagaccggacacatgtgctacatcgaggagatcggcggggcgagccagaactactgcgacaggaagtacacgcagtggccgtgcgcctcggggaaggggtactacgggcgcgggccgcttcagctgacgtggaactacaactacggggcggcggggaagagcgtggggttcgacgggctgaacaacccggagaaggtggcgcaggacccggaggtggcgttcaaggcggcgctgtggttctggatgaacaacgtgaagcaggtcctgccgcgggggttcggcgcgacgaccagggcgatcaacagcggcgagtgcaacggcgggaacgcggccgccatgaacgcccgggcgggctactacagggcctactgcaagcagttcggcgtcgacccggggagcagcctcacttgctaggtgcttcgggcgggcctgatcgagatctgcatgcatagaacacgcatggcttatgtagaataaacgttcggcgtgcgcatacgcgtctaaagccgtccaaacaagaaataaagggcgaggatgtggtctagtacgtaccaagatccttgcagcagtactgttcacgagctctactctttttcctcatcaacaaacaaaaagagttatgttcttgtttattactcatgtttagatacatttgtatctagaaaaatctaatacgaataattcaggacggagttaatatttt

SEQ ID NO: 14197 - protein, 275 aa, Glycine max
MARSPMAMLPFLVLGVAALVLSAAGMVAAQKCGCRANECCSQYGYCGTTDAYCGQGCQSGPCSGSGGGGGTGASVESVVTEAFFNGIKSRAGNGCAGKSFYTRRSFLAGARANPNFGKGRTGDDGKREIAAFFAHVTHETGHMCYIEEIGGASQNYCDRKYTQWPCASGKGYYGRGPLQLTWNYNYGAAGKSVGFDGLNNPEKVAQDPEVAFKAALWFWMNNVKQVLPRGFGATTRAINSGECNGGNAAAMNARAGYYRAYCKQFGVDPGSSLTC

SEQ ID NO: 14198 - protein, 270 aa, Glycine max
MAMLPFLVLGVAALVLSAAGMVAAQKCGCRANECCSQYGYCGTTDAYCGQGCQSGPCSGSGGGGGTGASVESVVTEAFFNGIKSRAGNGCAGKSFYTRRSFLAGARANPNFGKGRTGDDGKREIAAFFAHVTHETGHMCYIEEIGGASQNYCDRKYTQWPCASGKGYYGRGPLQLTWNYNYGAAGKSVGFDGLNNPEKVAQDPEVAFKAALWFWMNNVKQVLPRGFGATTRAINSGECNGGNAAAMNARAGYYRAYCKQFGVDPGSSLTC

SEQ ID NO: 14199 - protein, 268 aa, Glycine max
MLPFLVLGVAALVLSAAGMVAAQKCGCRANECCSQYGYCGTTDAYCGQGCQSGPCSGSGGGGGTGASVESVVTEAFFNGIKSRAGNGCAGKSFYTRRSFLAGARANPNFGKGRTGDDGKREIAAFFAHVTHETGHMCYIEEIGGASQNYCDRKYTQWPCASGKGYYGRGPLQLTWNYNYGAAGKSVGFDGLNNPEKVAQDPEVAFKAALWFWMNNVKQVLPRGFGATTRAINSGECNGGNAAAMNARAGYYRAYCKQFGVDPGSSLTC

SEQ ID NO: 14200 - DNA, 570 bp, Glycine max
tgcttcatctactgtggtaatatctgaagcacttgctaaatttttgggcactgagggaagagagatgcaacaagctgaagccataagacttgtttgggagtacatcaagcttcaccatttggaggatcctttaaatgcaatggtgatattatgtgatgcaaagcttcaagagctacttggatgtgaaagcatttctgctttaggaataccagagatgttagcacgccatcatctatttaaacagtctgacacctgttagtgctgatcaattgttgccatataagggcatggtcagcccggaatgctggttatatgtttctgctcgctagatcgtataggaactttttacttattcatgtaacttcatttatctttttgttcactgatatgtgtaaactgtatgttgtctgacagttattaggttcgttgtttagaatgagaatgtataccttgagctaggcgagaagtatattgtatttaagatttgcccttgaggttactcgtgcattttatttttatcagttctaaatgtctaacctcaactgactgaaggaatctgaactcgaattt

SEQ ID NO: 14201 - protein, 85 aa, Glycine max
ASSTVVISEALAKFLGTEGREMQQAEAIRLVWEYIKLHHLEDPLNAMVILCDAKLQELLGCESISALGIPEMLARHHLFKQSDTC

SEQ ID NO: 14202 - protein, 64 aa, Glycine max
MQQAEAIRLVWEYIKLHHLEDPLNAMVILCDAKLQELLGCESISALGIPEMLARHHLFKQSDTC

SEQ ID NO: 14203 - DNA, 2816 bp, Glycine max
aagtaagaaagtaagaaagtagcaaagatgacaggtgggatgtttggaaggaaggggcaaaagataaaggggacagtggtgttgatgccaaagaatgtgttggacttcaacgccataacctccgtcggaaaaggcagtgctaaggacaccgccaccgatttcttgggcaaaggcttggacgcattaggtcatgcagttgatgctctcactgccttcgctggccatagcatctccttgcagcttatcagtgctactcagactgatggtagtggaaaaggaaaagttggaaacgaagcctatttggaaaaacatcttccgaccttgccaacgttgggagcaaggcaggaagcattcgatattaactttgaatgggatgctagttttggaattccaggagcattttacatcaaaaactttatgactgatgagtttttcctcgtcagtgttaaactcgaggacattccaaaccatggaaccattaacttcgtttgtaactcatgggtttataacttcaaaagttacaaaaagaatcgcattttctttgtcaatgatacatatcttccgagtgctacaccaggtccactagttaagtacagacaagaagaattggaggttttaagaggagatggaacagggaagcgcagagactttgacagaatctatgattatgatatctataatgatttgggcaatccagatggtggtgatcctcgcccaatcattggaggctctagcaactatccttaccctcgcagggttagaaccggtagagaaaagaccaggaaagatcccaacagtgagaaaccaggcgagatatatgttccaagagatgaaaacttcggtcacttgaagtcatctgatttccttacatatggaatcaaatccttatctcagaacgtgatacctttgttcaaatctataatattgaacttaagggtcacatcgagtgagttcgatagcttcgacgaagtgcgtggtctctttgaaggtggaatcaagctgccaacaaatatactgagccaaattagccccttaccagtcctcaaggaaatcttccgcactgatggtgaaaatacccttcaatttccaccacctcatgtaatcagagttagtaaatctggatggatgactgatgatgagtttgcaagagagatgattgctggtgtaaatccaaatgtaattcgtcgtcttcaagagttcccaccaaaaagcactcttgatcccgcaacctatggtgatcaaactagtaccataacaaaacaacagttggagattaacttgggtggggtcacagtagaagaggcaattagtgctcacagattattcatattagattaccatgatgcattcttcccgtatttgacgaagataaacagcctacctattgcaaaagcttatgccacaaggacaatcctgttcttgaaagacgatggatctttaaagccacttgctatcgaattaagcaagcctgcaacagtgagtaaagtggtgttgcctgcaacagaaggtgttgagagtacaatttggttgttggccaaggctcatgtcattgtgaatgactctggttatcatcagctcataagccattggttaaatactcatgcagtgatggagccatttgccatagcaacaaacaggcatctcagtgtgcttcaccccatttataaacttctttatcctcactacaaggacacaataaatatcaatggccttgctaggcagtccctgattaacgcaggtggcattattgagcaaacatttttgcctggaaagtactccattgaaatgtcatcagttgtttacaagaattgggttttcactgaccaagcattaccagctgatcttgtcaagagaggattggcagttgaggatccctctgccccacatggtcttcgccttgtgatagaggactacccttatgctgttgatggacttgaaatatgggatgctattaagacatgggtccatgagtatgtctctgtgtattacccaacaaatgcagcaattcaacaagacactgaacttcaagcatggtggaaggaagttgtggagaagggtcatggtgacttaaaagataagccttggtggcctaaactgcagactgtggaggatctcattcaatcctgctctattatcatatggacagcttcggctctccatgcagctgttaattttgggcaatacccttatggaggttatatcgtgaaccgtccaactctagccagaaggtttatcccagaagaaggaaccaaagaatatgatgagatggtgaaggatcctcaaaaggcatatctgagaacaatcacacccaagttcgagacccttattgacatttcagtgatagagatattgtcaaggcatgcttctgatgaggtctaccttggccaaagggataatccaaattggactacggattcaaaggcattggaagctttcaaaaagtttggaaacaaactggcagaaattgagggaaaaatcacacagaggaacaatgatccaagtctgaaaagccgacatgggccagttcagcttccatacacattgctccatcgttcaagtgaggaagggatgagtttcaaaggaattcccaacagtatctccatctaaaatgtgtgtgtggtttgcttatctattgtgcttttgaataaaatagacaatacttgtctatggttattattggctgtatgtctgtatttggatgctctcgatcggtttgcaagtaataagagtgttttcactgtcactttgtatttcgatcatcttaattatgtttactagtaataatgtggaagctgtacgtttgttaattctaggtt

SEQ ID NO: 14204 - protein, 859 aa, Glycine max
MTGGMFGRKGQKIKGTVVLMPKNVLDFNAITSVGKGSAKDTATDFLGKGLDALGHAVDALTAFAGHSISLQLISATQTDGSGKGKVGNEAYLEKHLPTLPTLGARQEAFDINFEWDASFGIPGAFYIKNFMTDEFFLVSVKLEDIPNHGTINFVCNSWVYNFKSYKKNRIFFVNDTYLPSATPGPLVKYRQEELEVLRGDGTGKRRDFDRIYDYDIYNDLGNPDGGDPRPIIGGSSNYPYPRRVRTGREKTRKDPNSEKPGEIYVPRDENFGHLKSSDFLTYGIKSLSQNVIPLFKSIILNLRVTSSEFDSFDEVRGLFEGGIKLPTNILSQISPLPVLKEIFRTDGENTLQFPPPHVIRVSKSGWMTDDEFAREMIAGVNPNVIRRLQEFPPKSTLDPATYGDQTSTITKQQLEINLGGVTVEEAISAHRLFILDYHDAFFPYLTKINSLPIAKAYATRTILFLKDDGSLKPLAIELSKPATVSKVVLPATEGVESTIWLLAKAHVIVNDSGYHQLISHWLNTHAVMEPFAIATNRHLSVLHPIYKLLYPHYKDTININGLARQSLINAGGIIEQTFLPGKYSIEMSSVVYKNWVFTDQALPADLVKRGLAVEDPSAPHGLRLVIEDYPYAVDGLEIWDAIKTWVHEYVSVYYPTNAAIQQDTELQAWWKEVVEKGHGDLKDKPWWPKLQTVEDLIQSCSIIIWTASALHAAVNFGQYPYGGYIVNRPTLARRFIPEEGTKEYDEMVKDPQKAYLRTITPKFETLIDISVIEILSRHASDEVYLGQRDNPNWTTDSKALEAFKKFGNKLAEIEGKITQRNNDPSLKSRHGPVQLPYTLLHRSSEEGMSFKGIPNSISI

SEQ ID NO: 14205 - protein, 855 aa, Glycine max
MFGRKGQKIKGTVVLMPKNVLDFNAITSVGKGSAKDTATDFLGKGLDALGHAVDALTAFAGHSISLQLISATQTDGSGKGKVGNEAYLEKHLPTLPTLGARQEAFDINFEWDASFGIPGAFYIKNFMTDEFFLVSVKLEDIPNHGTINFVCNSWVYNFKSYKKNRIFFVNDTYLPSATPGPLVKYRQEELEVLRGDGTGKRRDFDRIYDYDIYNDLGNPDGGDPRPIIGGSSNYPYPRRVRTGREKTRKDPNSEKPGEIYVPRDENFGHLKSSDFLTYGIKSLSQNVIPLFKSIILNLRVTSSEFDSFDEVRGLFEGGIKLPTNILSQISPLPVLKEIFRTDGENTLQFPPPHVIRVSKSGWMTDDEFAREMIAGVNPNVIRRLQEFPPKSTLDPATYGDQTSTITKQQLEINLGGVTVEEAISAHRLFILDYHDAFFPYLTKINSLPIAKAYATRTILFLKDDGSLKPLAIELSKPATVSKVVLPATEGVESTIWLLAKAHVIVNDSGYHQLISHWLNTHAVMEPFAIATNRHLSVLHPIYKLLYPHYKDTININGLARQSLINAGGIIEQTFLPGKYSIEMSSVVYKNWVFTDQALPADLVKRGLAVEDPSAPHGLRLVIEDYPYAVDGLEIWDAIKTWVHEYVSVYYPTNAAIQQDTELQAWWKEVVEKGHGDLKDKPWWPKLQTVEDLIQSCSIIIWTASALHAAVNFGQYPYGGYIVNRPTLARRFIPEEGTKEYDEMVKDPQKAYLRTITPKFETLIDISVIEILSRHASDEVYLGQRDNPNWTTDSKALEAFKKFGNKLAEIEGKITQRNNDPSLKSRHGPVQLPYTLLHRSSEEGMSFKGIPNSISI

SEQ ID NO: 14206 - protein, 840 aa, Glycine max
MPKNVLDFNAITSVGKGSAKDTATDFLGKGLDALGHAVDALTAFAGHSISLQLISATQTDGSGKGKVGNEAYLEKHLPTLPTLGARQEAFDINFEWDASFGIPGAFYIKNFMTDEFFLVSVKLEDIPNHGTINFVCNSWVYNFKSYKKNRIFFVNDTYLPSATPGPLVKYRQEELEVLRGDGTGKRRDFDRIYDYDIYNDLGNPDGGDPRPIIGGSSNYPYPRRVRTGREKTRKDPNSEKPGEIYVPRDENFGHLKSSDFLTYGIKSLSQNVIPLFKSIILNLRVTSSEFDSFDEVRGLFEGGIKLPTNILSQISPLPVLKEIFRTDGENTLQFPPPHVIRVSKSGWMTDDEFAREMIAGVNPNVIRRLQEFPPKSTLDPATYGDQTSTITKQQLEINLGGVTVEEAISAHRLFILDYHDAFFPYLTKINSLPIAKAYATRTILFLKDDGSLKPLAIELSKPATVSKVVLPATEGVESTIWLLAKAHVIVNDSGYHQLISHWLNTHAVMEPFAIATNRHLSVLHPIYKLLYPHYKDTININGLARQSLINAGGIIEQTFLPGKYSIEMSSVVYKNWVFTDQALPADLVKRGLAVEDPSAPHGLRLVIEDYPYAVDGLEIWDAIKTWVHEYVSVYYPTNAAIQQDTELQAWWKEVVEKGHGDLKDKPWWPKLQTVEDLIQSCSIIIWTASALHAAVNFGQYPYGGYIVNRPTLARRFIPEEGTKEYDEMVKDPQKAYLRTITPKFETLIDISVIEILSRHASDEVYLGQRDNPNWTTDSKALEAFKKFGNKLAEIEGKITQRNNDPSLKSRHGPVQLPYTLLHRSSEEGMSFKGIPNSISI

SEQ ID NO: 14207 - DNA, 2819 bp, Glycine max
cggcacgagcgtaattgtgacacactcgaagtagcccataaggatagcataagaagtatcgcctccatcactatggggtttgactctttttccttcttctaataacaaaaccctgtttcctttaccttctccttcactaggctccccaagcaacaacaacaactactcttttttctctttcatcgacgatcttcactaagctctttcactcaaacacacacccttgattatatcactttctcttgttctcttaccgtagaacattgcatttactcctatctctcactctggatcttcaacttcttcctgattttgctgatttgggggattgagttggaaggggaaacatggctgcttcttctgcatctctttctggtgcttctgcttcggatcttctgaggagttcaaccagcggtttcaatggtgttcctttgagaaccatggggaagggaaagttggttttgaagaggagggactttacagttgctgccaggctgaggaaggtgaagaagcatgaatatccttggcctgctaaccctgatcccaatgtgaaaggtggggtgctgagccacctttccttgttcaagccactcaaggagaagccaaagcctgtcactttggattttgaaaggcctcttgttgatctgcaaaagaagatcattgatgtacagaagatggcgaacgaaactggactggacttcagtgatcagattctctcattggagaccaagtaccaccaggctttaaaggatctgtatacgcatctgactcctattcagcgggtcaacatcgctcggcaccctaacaggccaactttccttgatcatgtgtttaacataactgagaagtttgttgaactccatggtgatcgggcaggttacgatgatcctgctattgttactggtctagggactatagatggtagaagctacatgttcattggtcaccaaaagggtagaaatactaaagaaaatattcagcgtaactttgggatgccaactcctcatggttacaggaaggcccttcgcttgatggaatatgcagatcatcatgggttccccatagttactttcattgacacgcctggggcatatgctgaccttaaatcagaggaactaggacagggtgaagcgattgctcacaatttgagatccatgtttggtctgaaggtgccagttatatctatagttattggagaaggtggttcaggtggcgccctagccattggatgtgctaataaattactcatgcttgaaaatgctgttttttatgttgccagtccagaggcatgtgcagcaatcttgtggaagacagctaaagcttctccaaaggctgctgagaaattgaagattacagccactgaactgtgcaaattacaaattgcagatggtgttatacctgagccacttggtggtgcacatgcagatccagagtggacctctcaacagataaaaaaggctatcaaagaaaccatggatgagctcacgaagatgaacacagaagaactgttaaaacatcgcatgcttaagttcagaaagattggtgggttccaggaaggtattcctatagatcctaagagaaaagccaacatgaagaagagggatctatctattgctaagattcctgatgctgaactagaagttgaggttgagaaactgaagcaacaggttttggaagctaaggaatcttctcctgttcctccaaaactagatctggatgagatgctaaagcaactggcaagggaggtcgatctagaatactctgaggcagttaaagccacgggcttgacagacagtttgttgaaactaagggaggaagtttcgaaagcaaatgcagataatcaaattgttgatccattgctggagggtaagatagaaaagctaagggtggagtttgaacagcaattgcgtgcagctcccaattatggtaggctgcagaataagcttaactatctgagcgaattatgtaaagttaagcttctgtcagatggaaagaagaacaatgaggctgtcacatttaagcaagagttgaagaaaaaaattgatgatgccttgagtgatccgaaaataagggagacatttgaagcattaaaggctgaaattaaaggtgttggtgcatcctcagcaagtgatttggatgacgagttgaagaagaaaatcattgagtttatcaaagaagtaaaagaagtaaaagaagtaaaagaggtaatagaaaatcaaattgaaagtttggtaaactcgtcggatgatattaagagcaagatactgcaattgaaattggaggttcctaaggctggagagacgcctgattcagaaccaaagaatagaattggtgctttggtgcaactaattaagccgagcctagtggaggccgttgactcgtctggcttaaaagatctgtttgaaaatctggtgtctaatgatggaagtttgacacatggagatccagctagagacagtctcaccgatgaccagtagagggtgaaagttggtgcaaactgcaccatttcttaataaatgctgctcatatggtgctggctgcaacaagttaatgaatggaatagtgaaaactgcaccagtgtgagtgatcttgatacattaccatatcagctggttgtacatcatctagaattatggccatacttcttagggacaagttttggtaattttaaggagataccgtgttaatggtgactaatattttttctgtaatcttcaaatagaggaccagaagggggaataaaattgaaaaccatgttgtctttgtttgagtcaaaatgttgcagttatattttgaatgattttttatgttttcttttc

SEQ ID NO: 14208 - protein, 709 aa, Glycine max
MAASSASLSGASASDLLRSSTSGFNGVPLRTMGKGKLVLKRRDFTVAARLRKVKKHEYPWPANPDPNVKGGVLSHLSLFKPLKEKPKPVTLDFERPLVDLQKKIIDVQKMANETGLDFSDQILSLETKYHQALKDLYTHLTPIQRVNIARHPNRPTFLDHVFNITEKFVELHGDRAGYDDPAIVTGLGTIDGRSYMFIGHQKGRNTKENIQRNFGMPTPHGYRKALRLMEYADHHGFPIVTFIDTPGAYADLKSEELGQGEAIAHNLRSMFGLKVPVISIVIGEGGSGGALAIGCANKLLMLENAVFYVASPEACAAILWKTAKASPKAAEKLKITATELCKLQIADGVIPEPLGGAHADPEWTSQQIKKAIKETMDELTKMNTEELLKHRMLKFRKIGGFQEGIPIDPKRKANMKKRDLSIAKIPDAELEVEVEKLKQQVLEAKESSPVPPKLDLDEMLKQLAREVDLEYSEAVKATGLTDSLLKLREEVSKANADNQIVDPLLEGKIEKLRVEFEQQLRAAPNYGRLQNKLNYLSELCKVKLLSDGKKNNEAVTFKQELKKKIDDALSDPKIRETFEALKAEIKGVGASSASDLDDELKKKIIEFIKEVKEVKEVKEVIENQIESLVNSSDDIKSKILQLKLEVPKAGETPDSEPKNRIGALVQLIKPSLVEAVDSSGLKDLFENLVSNDGSLTHGDPARDSLTDDQ

SEQ ID NO: 14209 - protein, 678 aa, Glycine max
MGKGKLVLKRRDFTVAARLRKVKKHEYPWPANPDPNVKGGVLSHLSLFKPLKEKPKPVTLDFERPLVDLQKKIIDVQKMANETGLDFSDQILSLETKYHQALKDLYTHLTPIQRVNIARHPNRPTFLDHVFNITEKFVELHGDRAGYDDPAIVTGLGTIDGRSYMFIGHQKGRNTKENIQRNFGMPTPHGYRKALRLMEYADHHGFPIVTFIDTPGAYADLKSEELGQGEAIAHNLRSMFGLKVPVISIVIGEGGSGGALAIGCANKLLMLENAVFYVASPEACAAILWKTAKASPKAAEKLKITATELCKLQIADGVIPEPLGGAHADPEWTSQQIKKAIKETMDELTKMNTEELLKHRMLKFRKIGGFQEGIPIDPKRKANMKKRDLSIAKIPDAELEVEVEKLKQQVLEAKESSPVPPKLDLDEMLKQLAREVDLEYSEAVKATGLTDSLLKLREEVSKANADNQIVDPLLEGKIEKLRVEFEQQLRAAPNYGRLQNKLNYLSELCKVKLLSDGKKNNEAVTFKQELKKKIDDALSDPKIRETFEALKAEIKGVGASSASDLDDELKKKIIEFIKEVKEVKEVKEVIENQIESLVNSSDDIKSKILQLKLEVPKAGETPDSEPKNRIGALVQLIKPSLVEAVDSSGLKDLFENLVSNDGSLTHGDPARDSLTDDQ

SEQ ID NO: 14210 - protein, 600 aa, Glycine max
MANETGLDFSDQILSLETKYHQALKDLYTHLTPIQRVNIARHPNRPTFLDHVFNITEKFVELHGDRAGYDDPAIVTGLGTIDGRSYMFIGHQKGRNTKENIQRNFGMPTPHGYRKALRLMEYADHHGFPIVTFIDTPGAYADLKSEELGQGEAIAHNLRSMFGLKVPVISIVIGEGGSGGALAIGCANKLLMLENAVFYVASPEACAAILWKTAKASPKAAEKLKITATELCKLQIADGVIPEPLGGAHADPEWTSQQIKKAIKETMDELTKMNTEELLKHRMLKFRKIGGFQEGIPIDPKRKANMKKRDLSIAKIPDAELEVEVEKLKQQVLEAKESSPVPPKLDLDEMLKQLAREVDLEYSEAVKATGLTDSLLKLREEVSKANADNQIVDPLLEGKIEKLRVEFEQQLRAAPNYGRLQNKLNYLSELCKVKLLSDGKKNNEAVTFKQELKKKIDDALSDPKIRETFEALKAEIKGVGASSASDLDDELKKKIIEFIKEVKEVKEVKEVIENQIESLVNSSDDIKSKILQLKLEVPKAGETPDSEPKNRIGALVQLIKPSLVEAVDSSGLKDLFENLVSNDGSLTHGDPARDSLTDDQ

SEQ ID NO: 14211 - DNA, 618 bp, Glycine max
gtcagtatggatggtgctccctatttaaggaaagtagacttgaagaattactctacatatccagaattatcttctgctctagaaaagatgttcagctgttttactatgagtaaatgtggatctcatggaattctgggcagggagatgctgaatgaaaccaagctgaaggaccttcttcatggatcagaatatgttcttacatatgaggacagagagggcgattggatgcttgtgggtgatgttccctgggagatgtttattgaaacatgcaagaggctgaggatcatgaagagttctgatgccattggtctagctcccagggctgttgaaaaatgtaagagcagaacctaggcagtaccagtgttcctcttcgaacatggtgtattggaagcgagaactgaaggcatatgggactggatagaatctcatactaagctgccataatccttctattgtttattatgtgtccgttttatgttgtcatggcgtttatgatttagtaagcttcttttcaagattgttgtgataaaacttaacaaaactctaagacttgactgtgggagtagctatattttatgtacccgagttaatgttatggttgaaggatctttgatgtgt

SEQ ID NO: 14212 - protein, 116 aa, Glycine max
VSMDGAPYLRKVDLKNYSTYPELSSALEKMFSCFTMSKCGSHGILGREMLNETKLKDLLHGSEYVLTYEDREGDWMLVGDVPWEMFIETCKRLRIMKSSDAIGLAPRAVEKCKSRT

SEQ ID NO: 14213 - protein, 114 aa, Glycine max
MDGAPYLRKVDLKNYSTYPELSSALEKMFSCFTMSKCGSHGILGREMLNETKLKDLLHGSEYVLTYEDREGDWMLVGDVPWEMFIETCKRLRIMKSSDAIGLAPRAVEKCKSRT

SEQ ID NO: 14214 - protein, 87 aa, Glycine max
MFSCFTMSKCGSHGILGREMLNETKLKDLLHGSEYVLTYEDREGDWMLVGDVPWEMFIETCKRLRIMKSSDAIGLAPRAVEKCKSRT

SEQ ID NO: 14215 - DNA, 555 bp, Glycine max
agttttgataaactttctcggctgatgaaagaattggtgactaatatgccaagtaaaccggcaaggcggaccgaagtactgaagttttgtgtcaaggccttggagatcttgtctaagcacaatctcaccaagaattttgttaaaactttggcacctgatactcaagctgcccttgaggtgcaacttggtgagcaattcattagtttgaagaagctggaaaaataaacggcacaatttaaaattgctgctacagcctgactaaagaagtttttgctgtatcacattgcttgcacactcgacagaacaaaacaagttggaaaatacagtgaaaaccagaaaagcaatcccccatgatactttaaatttattctgcccgcagtatggtgaaaacagtgctccgaaaatccttgaggtgtttgcagtgagaatttttggtaaaacttcaagttattagttcttatttgtcttttggatatgctttgtttttgtaagctctattattgttacacatgatgagattttgagttggtaaagggattaacttttatggtgctt

SEQ ID NO: 14216 - protein, 74 aa, Glycine max
SFDKLSRLMKELVTNMPSKPARRTEVLKFCVKALEILSKHNLTKNFVKTLAPDTQAALEVQLGEQFISLKKLEK

SEQ ID NO: 14217 - protein, 66 aa, Glycine max
MKELVTNMPSKPARRTEVLKFCVKALEILSKHNLTKNFVKTLAPDTQAALEVQLGEQFISLKKLEK

SEQ ID NO: 14218 - protein, 59 aa, Glycine max
MPSKPARRTEVLKFCVKALEILSKHNLTKNFVKTLAPDTQAALEVQLGEQFISLKKLEK

SEQ ID NO: 14219 - DNA, 637 bp, Glycine max
tgtccactgcgactgtgagcttcgttcgttcagttcatccgtgttcttgtttgcgaggtcgagagagagaggatgtcgtgctgcggaggcaactgtgggtgcggctccggctgcaagtgcggcaacggctgcggagggtgcagcaagatgtacccggacatggctgagcaggtgaccaccaccacccaggctctcatcatgggtgtcgcaccatccaaggggcacgccgagggcgggttcgaggcggccgccggagctgagaacggcgggtgcaagtgcggcggcaactgccagtgcgacccctgcaactgcggcaagtgagctaggtgctccaccctgcaggccggccggaggaagctagctaattattataagctaaataaagtatagcggcgtcgctgtgtgtgtttcgagtcagtcagtcagttagttgcgtgccatggctggcatgctctgagtctgagatgatgatgatgcctgatggcggcgtcgtgtcctgtagtcctcccctgccccctcgggcgcttctggcggcgagcagtgtgttgtgttgtgttgtgtgggtgcagcacggtagcaggctagccatgtgccctgctgtgttgtgtcaccatccatctataataatcttatatct

SEQ ID NO: 14220 - protein, 82 aa, Glycine max
MSCCGGNCGCGSGCKCGNGCGGCSKMYPDMAEQVTTTTQALIMGVAPSKGHAEGGFEAAAGAENGGCKCGGNCQCDPCNCGK

SEQ ID NO: 14221 - protein, 57 aa, Glycine max
VHCDCELRSFSSSVFLFARSRERGCRAAEATVGAAPAASAATAAEGAARCTRTWLSR

SEQ ID NO: 14222 - protein, 57 aa, Glycine max
MYPDMAEQVTTTTQALIMGVAPSKGHAEGGFEAAAGAENGGCKCGGNCQCDPCNCGK

SEQ ID NO: 14223 - DNA, 535 bp, Glycine max
atttaacttgcaaaaagctcaaccttcatttgctcaatacgatgctacatttaaccagttgggtcagatgtcacaaactcaagcctcacttggctatgcacctccttcaaccccgataatgagtccttttggcaccccaggattgaatcagacatctagtgagggtgcttacctacagtggcctagtgctgcaatgatgtatgctcattcatatgaccaatttagacatggtgttttccaggctccatttggtcaacagccgttgagctttgactattcacagaactattagatgacatttagggggagaatattcaatttggatgcaaaaagttatgttagcttttttagaatttcatgttaagttcatttgtcagttctgtcatagacccttattgtagggatatggctttggttttcagttttgatggttatagtaaatcgttgggtacttttaatgtgacagtttataaaatagtgaattgtagtgtatcactggatttgcaatatatgataaggtttctgtggttgcttt

SEQ ID NO: 14224 - protein, 96 aa, Glycine max
FNLQKAQPSFAQYDATFNQLGQMSQTQASLGYAPPSTPIMSPFGTPGLNQTSSEGAYLQWPSAAMMYAHSYDQFRHGVFQAPFGQQPLSFDYSQNY

SEQ ID NO: 14225 - protein, 74 aa, Glycine max
MSQTQASLGYAPPSTPIMSPFGTPGLNQTSSEGAYLQWPSAAMMYAHSYDQFRHGVFQAPFGQQPLSFDYSQNY

SEQ ID NO: 14226 - protein, 59 aa, Glycine max
MLSSFVSSVIDPYCRDMALVFSFDGYSKSLGTFNVTVYKIVNCSVSLDLQYMIRFLWLL

SEQ ID NO: 14227 - DNA, 826 bp, Glycine max
aaaaaagaaaatgattcccaacgccaaaggcagaatattcgttcgggaaattagggttagggttgcagcgtcctccatcagcacccgtatataaatacccttttcccccccacttgttctaccttaatccttacgctctctcactcacaaacgcacactgaattcaaaaacatcgaaagagagaggcatggccaggcaaaccttcatcatgatcaagccagatggcgttcaaagcggccttattggagagattattagcagatttgagaggaagggtttttacttgaaagggttgaaactcgttactgtggaccgtccttttgctgagaagcactatgctgatttgtctgcaaagcctttctttagtggtttggtggattacattgtctctggccctgttgttgccatgatctgggagggtaatgttgttacaactggccgaaagattatcggagccacaaacccagctcaatctgagcctggaactattcgtggtgactttgctattgacattggaaggaatgttatccatggaagtgattcagttgagagtgctaacaaggaaattgcattgtggttccctgagggccctgctaactggcaaagctcccagcactcttggatctatgagtaatacaaatgcctcaagttgatcttgaaattggccttaggttgatccagattatctacatgttttctgtttttgtccattgttggacttttgctaagagtttggtaccgtggtttgcatgtagagtctatttatgtcatttctgttgaaacatgctcacagtttgataaattaaatcccaaactagctcgtgcc

SEQ ID NO: 14228 - protein, 148 aa, Glycine max
MARQTFIMIKPDGVQSGLIGEIISRFERKGFYLKGLKLVTVDRPFAEKHYADLSAKPFFSGLVDYIVSGPVVAMIWEGNVVTTGRKIIGATNPAQSEPGTIRGDFAIDIGRNVIHGSDSVESANKEIALWFPEGPANWQSSQHSWIYE

SEQ ID NO: 14229 - protein, 141 aa, Glycine max
MIKPDGVQSGLIGEIISRFERKGFYLKGLKLVTVDRPFAEKHYADLSAKPFFSGLVDYIVSGPVVAMIWEGNVVTTGRKIIGATNPAQSEPGTIRGDFAIDIGRNVIHGSDSVESANKEIALWFPEGPANWQSSQHSWIYE

SEQ ID NO: 14230 - protein, 76 aa, Glycine max
MLLQLAERLSEPQTQLNLSLELFVVTLLLTLEGMLSMEVIQLRVLTRKLHCGSLRALLTGKAPSTLGSMSNTNASS

SEQ ID NO: 14231 - DNA, 2192 bp, Glycine max
aattgaatcacagtggtgccttatcgctgtggttatcatcttcttcttcctctttcttagatctcttctttctctacgccgcacgccgaaaccatggccggaaaaggagagggtcctgctatcggaatcgatctcggaaccacctactcttgcgtcggtgtgtggcaacatgaccgcgttgaaatcatcgccaacgaccaagggaacagaaccacgccgtcttacgtcggattcactgacaccgagcgtctcatcggtgatgcggccaagaatcaagtcgccatgaaccccatcaacaccgtcttcgatgccaagaggttgattggtcgtagattcagtgattcctctgttcagagtgatatcaaattgtggcctttcaaggtcattcctggtgctgctgacaagccaatgatcgtggttaactacaagggtgaagagaagcaatttgccgcagaagaaatctcttccatggtgctcatcaagatgcgtgagattgctgaggcttacctaggttccacagtgaagaatgctgttgtcaccgtccctgcttacttcaatgattctcagcgtcaagctaccaaagacgctggtgtcattgctggtctaaatgtgatgcgaattatcaatgagcctactgcagctgccattgcatatggtcttgataagaaggccacgagtgttggtgagaagaatgtgttgatttttgaccttggtggtgggacatttgatgtgtctttactcaccattgaggagggtatctttgaggtgaaagccactgctggtgacacccatcttggaggtgaagattttgataacaggatggtgaaccactttgttcaagagttcaagagaaagaacaagaaggacattagtggaaaccccagagcacttagaaggttgaggactgcttgtgagagggccaagagaacactttcatcgactgctcagaccaccattgaaattgattctctatacgagggaattgatttctactccactgttactcgtgccagatttgaggagctcaacatggatctcttcaggaaatgtatggagccggtggagaaatgtttgagggatgctaagatggacaaaagaagtgttgatgatgttgtccttgttggtggttctaccagaattcccaaggttcaacaactgctgcaggacttctttaatggaaaagagctttgcaagagcattaatcccgatgaggctgttgcatatggtgcggctgttcaggctgcaatcttaagtggtgagggcaatgagaaggttcaggatcttctcctcctggatgtcacccctctgtctcttggtttggagactgccggtggtgtgatgactgtcctgatccctaggaacactacaattccaacaaagaaggaacaagttttctcaacatactctgacaaccagcctggtgtgcttatccaggtctttgagggtgaaagagcaaggaccagagataacaatttgttgggcaaatttgagctatctggcattcctcctgcacccaggggtgttcctcagattacagtgtgctttgacattgatgccaatggtatcttgaatgtctctgccgaagataaaaccactggccagaaaaataagatcactatcaccaatgacaagggtagattgtcaaaggaagatattgagaagatggttcaagaggctgagaagtacaagtctgaggatgaagagcacaagaagaaggttgaggccaaaaacgctttggaaaactatgcatacaacatgaggaacaccgtgaaggatgacaagattggtgagaaacttgacccggctgacaagaagaagattgaggatgcaattgagcaagcaatccagtggttagacagcaaccagcttgcagaagcagatgagtttgaggacaaaatgaaggaattggaaagcatctgcaatccaatcattgccaagatgtaccaaggtggtgctggtccagacgtgggtggtgctggtgcagcagaggatgagtatgctgctcctccttctggtggaagtggtgctggccccaagattgaggaagtggactaaatgtagttgctttcctccagatacctgttttaaaaacttattttactttatgctttttaattgaattttaatcgcatgatttttgttggatgggattcaaactatttttcccttctgatatgaacgttgctttaagc

SEQ ID NO: 14232 - protein, 653 aa, Glycine max
MAGKGEGPAIGIDLGTTYSCVGVWQHDRVEIIANDQGNRTTPSYVGFTDTERLIGDAAKNQVAMNPINTVFDAKRLIGRRFSDSSVQSDIKLWPFKVIPGAADKPMIVVNYKGEEKQFAAEEISSMVLIKMREIAEAYLGSTVKNAVVTVPAYFNDSQRQATKDAGVIAGLNVMRIINEPTAAAIAYGLDKKATSVGEKNVLIFDLGGGTFDVSLLTIEEGIFEVKATAGDTHLGGEDFDNRMVNHFVQEFKRKNKKDISGNPRALRRLRTACERAKRTLSSTAQTTIEIDSLYEGIDFYSTVTRARFEELNMDLFRKCMEPVEKCLRDAKMDKRSVDDVVLVGGSTRIPKVQQLLQDFFNGKELCKSINPDEAVAYGAAVQAAILSGEGNEKVQDLLLLDVTPLSLGLETAGGVMTVLIPRNTTIPTKKEQVFSTYSDNQPGVLIQVFEGERARTRDNNLLGKFELSGIPPAPRGVPQITVCFDIDANGILNVSAEDKTTGQKNKITITNDKGRLSKEDIEKMVQEAEKYKSEDEEHKKKVEAKNALENYAYNMRNTVKDDKIGEKLDPADKKKIEDAIEQAIQWLDSNQLAEADEFEDKMKELESICNPIIAKMYQGGAGPDVGGAGAAEDEYAAPPSGGSGAGPKIEEVD

SEQ ID NO: 14233 - protein, 590 aa, Glycine max
MNPINTVFDAKRLIGRRFSDSSVQSDIKLWPFKVIPGAADKPMIVVNYKGEEKQFAAEEISSMVLIKMREIAEAYLGSTVKNAVVTVPAYFNDSQRQATKDAGVIAGLNVMRIINEPTAAAIAYGLDKKATSVGEKNVLIFDLGGGTFDVSLLTIEEGIFEVKATAGDTHLGGEDFDNRMVNHFVQEFKRKNKKDISGNPRALRRLRTACERAKRTLSSTAQTTIEIDSLYEGIDFYSTVTRARFEELNMDLFRKCMEPVEKCLRDAKMDKRSVDDVVLVGGSTRIPKVQQLLQDFFNGKELCKSINPDEAVAYGAAVQAAILSGEGNEKVQDLLLLDVTPLSLGLETAGGVMTVLIPRNTTIPTKKEQVFSTYSDNQPGVLIQVFEGERARTRDNNLLGKFELSGIPPAPRGVPQITVCFDIDANGILNVSAEDKTTGQKNKITITNDKGRLSKEDIEKMVQEAEKYKSEDEEHKKKVEAKNALENYAYNMRNTVKDDKIGEKLDPADKKKIEDAIEQAIQWLDSNQLAEADEFEDKMKELESICNPIIAKMYQGGAGPDVGGAGAAEDEYAAPPSGGSGAGPKIEEVD

SEQ ID NO: 14234 - protein, 548 aa, Glycine max
MIVVNYKGEEKQFAAEEISSMVLIKMREIAEAYLGSTVKNAVVTVPAYFNDSQRQATKDAGVIAGLNVMRIINEPTAAAIAYGLDKKATSVGEKNVLIFDLGGGTFDVSLLTIEEGIFEVKATAGDTHLGGEDFDNRMVNHFVQEFKRKNKKDISGNPRALRRLRTACERAKRTLSSTAQTTIEIDSLYEGIDFYSTVTRARFEELNMDLFRKCMEPVEKCLRDAKMDKRSVDDVVLVGGSTRIPKVQQLLQDFFNGKELCKSINPDEAVAYGAAVQAAILSGEGNEKVQDLLLLDVTPLSLGLETAGGVMTVLIPRNTTIPTKKEQVFSTYSDNQPGVLIQVFEGERARTRDNNLLGKFELSGIPPAPRGVPQITVCFDIDANGILNVSAEDKTTGQKNKITITNDKGRLSKEDIEKMVQEAEKYKSEDEEHKKKVEAKNALENYAYNMRNTVKDDKIGEKLDPADKKKIEDAIEQAIQWLDSNQLAEADEFEDKMKELESICNPIIAKMYQGGAGPDVGGAGAAEDEYAAPPSGGSGAGPKIEEVD

SEQ ID NO: 14235 - DNA, 550 bp, Glycine max
aattgctattctctctctttcacagcacactcctcccagggtttctccaccaagagggaaatggctcccaaaccgcctagtacgggtctgtttgttggactgaacaagggacatgtcgtcaccaagaaggaattgcccccacgcccctcggatcgtaaggggaaaacaagcaagagggtgcactttgtgaggaacctcataagagaggttgctggttttgcaccctatgaaaagcgtataactgagttgctgaaggttgggaaggataagagggcacttaaggttgcaaagagaaagcttggaacccacaaacgtgcaaagaagaagcgtgaggaaatgtccaatgttcttaggaagatgagggctggtggggctggagacaagaagaaataagtcttatttactcttttctagtttcactagatggacctgtgtattgatggacgaactttcatatttttgctttggatcaattagtttacttcaacattttgtttgagaaatgtgttttgcttaactgagacatgatttatggaagaagctagattgg

SEQ ID NO: 14236 - protein, 130 aa, Glycine max
NCYSLSFTAHSSQGFSTKREMAPKPPSTGLFVGLNKGHVVTKKELPPRPSDRKGKTSKRVHFVRNLIREVAGFAPYEKRITELLKVGKDKRALKVAKRKLGTHKRAKKKREEMSNVLRKMRAGGAGDKKK

SEQ ID NO: 14237 - protein, 110 aa, Glycine max
MAPKPPSTGLFVGLNKGHVVTKKELPPRPSDRKGKTSKRVHFVRNLIREVAGFAPYEKRITELLKVGKDKRALKVAKRKLGTHKRAKKKREEMSNVLRKMRAGGAGDKKK

SEQ ID NO: 14238 - DNA, 582 bp, Glycine max
tagttgctgttctctctactcttccaccgcacactctctgctcctagggtttctcctatcgagtgagggaaatggctcccaaaccgcctagtacgggtctgtttgttggactgaacaagggtcacgtcgtcaccaagaaggaattgcccccacgcccctcagatcgtaaggggaaaacaagcaagagggtgcactttgtgaggaacctcataagagaggttgctggttttgcaccctatgaaaagcgtataactgagttgctgaaggttgggaaggataagagggcactgaaggttgcaaagagaaagcttggaacccacaaacgtgcaaagaagaagcgtgaggaaatgtccagtgttctcaggaagatgagggctggtggtgctggagacaagaagaaataagtcttatttatttactcttttccagattcactagatggacctgtgtattgatggacgagctttcatatttttgctttggttcaattagtttatttcaagattttgtttgagaaatatgttttgcttaattgagacatgatttatggaagaagctagattggattattttctgttttgc

SEQ ID NO: 14239 - protein, 110 aa, Glycine max
MAPKPPSTGLFVGLNKGHVVTKKELPPRPSDRKGKTSKRVHFVRNLIREVAGFAPYEKRITELLKVGKDKRALKVAKRKLGTHKRAKKKREEMSSVLRKMRAGGAGDKKK

SEQ ID NO: 14240 - DNA, 1160 bp, Glycine max
tctctctttcactctttctccgagaacaaaaaaaaaaacgtgattcgctcttctcttcgaataaaccacaaaaccaacaaacgagaagaggagtgagagaagatggggttgtcgttcacgaagctgttcagcaggttgtttgcgaagaaggaaatgaggattctgatggtaggtctcgatgctgctggtaagacaaccatcttgtacaagctcaagcttggagaaatcgtcaccaccatccccaccatcggatttaatgttgagactgtggagtacaagaacatcagcttcactgtgtgggatgttggtggtcaggacaagatccgtcctctgtggaggcattatttccagaacactcagggtctcatttttgtggttgatagcaatgatagggatcgagtggttgaggcaagggatgagttgcacaggatgttgaatgaggatgaacttagagatgctgttttgcttgtttttgccaacaagcaagatcttcctaatgcaatgaatgctgcagaaataactgacaagcttggacttcattcactccgtcaacgccactggtatatccaaagcacttgtgcaacttctggagagggtctctatgagggtttggactggctttctaacaacattgccagcaaggcatgagacatttgaaaatttttggtcttgtctggtgatttcctgctgagtatggcggttcttggagaaagatgcttatcctttcttgtcaatgttgtaatagcagaatgcttgctagaagtattctcttcttttgtgtaacttgggtttgtatgattgcttaaattagctaatacttttagctataattggaactcttggatcctcttgtgcgtgccttgtttgtgttcattttgttagtttgatttttggttgaatatttccgtgcgttttgttcttggagtgcttgttggtgatgatagttgaatgaggattagaaaattgcgccagtttttgctcttgggccaagagtcacctgttcaaatattgtctttgcgaaattccagttcagatagacttggtacctgtttgttttaaagttgagcagacctaattttgatagaattggttaattatttattgtgattcagatgtgtgtctaaattaattatagtaataaagtttatattgaaacatgc

SEQ ID NO: 14241 - protein, 181 aa, Glycine max
MGLSFTKLFSRLFAKKEMRILMVGLDAAGKTTILYKLKLGEIVTTIPTIGFNVETVEYKNISFTVWDVGGQDKIRPLWRHYFQNTQGLIFVVDSNDRDRVVEARDELHRMLNEDELRDAVLLVFANKQDLPNAMNAAEITDKLGLHSLRQRHWYIQSTCATSGEGLYEGLDWLSNNIASKA

SEQ ID NO: 14242 - protein, 164 aa, Glycine max
MRILMVGLDAAGKTTILYKLKLGEIVTTIPTIGFNVETVEYKNISFTVWDVGGQDKIRPLWRHYFQNTQGLIFVVDSNDRDRVVEARDELHRMLNEDELRDAVLLVFANKQDLPNAMNAAEITDKLGLHSLRQRHWYIQSTCATSGEGLYEGLDWLSNNIASKA

SEQ ID NO: 14243 - protein, 160 aa, Glycine max
MVGLDAAGKTTILYKLKLGEIVTTIPTIGFNVETVEYKNISFTVWDVGGQDKIRPLWRHYFQNTQGLIFVVDSNDRDRVVEARDELHRMLNEDELRDAVLLVFANKQDLPNAMNAAEITDKLGLHSLRQRHWYIQSTCATSGEGLYEGLDWLSNNIASKA

SEQ ID NO: 14244 - DNA, 1044 bp, Glycine max
tccagccacacgcttcagaagacatggcctcattgggtgggttacaaaatgtgagcggcatcaattttcttatcaaagagggtccaaaagtcaatgcaaagttcgagctgaagccgccaccatatccactgaatggtttggagccggtgatgagccagcagacacttgagtttcactgggggaagcaccacaagacttatgtggaaaatctgaaaaaacaagttgttgggacagagcttgatgggaagtcactagaagagattattgtcacatcatacaataagggtgacattcttccagctttcaacaatgcagcacaggtatggaaccatgacttcttctgggagtgcatgaaaccaggtggaggtggaaagccatccggggagcttctagaactgattgaaagagactttggttcatttgtaaaattccttgatgagttcaaggctgctgctgcaacacaatttggttcagggtgggcttggctagcatatagagcaagaaaatttgatggggaaaatgtagcaaatcctccttcacccgatgaggacaacaagctagtggtgctcaagagtcccaatgctgtgaacccccttgtttggggaggttactacccacttcttaccattgatgtttgggagcatgcttactaccttgattttcagaaccggcgtcctgattatatatcagtgttcatggataagcttgtttcctgggatgcagtgagctctagacttgaacaagctaaggctttaattaccagtgcatgatgctgaattaaatgcagaataagtgatttatcctgatagtgatgatgaattggatggcgtcatgcggaatagtgaattatttttatctagaaagtgtaagcaggcacatcttttgtactttaaataggtgttgtggtatcagggctaaatctcagattattatgttctatggttagaaatcttagttatggttctctttgtgtgacaatgtgaacaataagattgcttatgcatgaataatcaacaaaataatactatggtgtagagccttttc

SEQ ID NO: 14245 - protein, 255 aa, Glycine max
QPHASEDMASLGGLQNVSGINFLIKEGPKVNAKFELKPPPYPLNGLEPVMSQQTLEFHWGKHHKTYVENLKKQVVGTELDGKSLEEIIVTSYNKGDILPAFNNAAQVWNHDFFWECMKPGGGGKPSGELLELIERDFGSFVKFLDEFKAAAATQFGSGWAWLAYRARKFDGENVANPPSPDEDNKLVVLKSPNAVNPLVWGGYYPLLTIDVWEHAYYLDFQNRRPDYISVFMDKLVSWDAVSSRLEQAKALITSA

SEQ ID NO: 14246 - protein, 248 aa, Glycine max
MASLGGLQNVSGINFLIKEGPKVNAKFELKPPPYPLNGLEPVMSQQTLEFHWGKHHKTYVENLKKQVVGTELDGKSLEEIIVTSYNKGDILPAFNNAAQVWNHDFFWECMKPGGGGKPSGELLELIERDFGSFVKFLDEFKAAAATQFGSGWAWLAYRARKFDGENVANPPSPDEDNKLVVLKSPNAVNPLVWGGYYPLLTIDVWEHAYYLDFQNRRPDYISVFMDKLVSWDAVSSRLEQAKALITSA

SEQ ID NO: 14247 - protein, 206 aa, Glycine max
MSQQTLEFHWGKHHKTYVENLKKQVVGTELDGKSLEEIIVTSYNKGDILPAFNNAAQVWNHDFFWECMKPGGGGKPSGELLELIERDFGSFVKFLDEFKAAAATQFGSGWAWLAYRARKFDGENVANPPSPDEDNKLVVLKSPNAVNPLVWGGYYPLLTIDVWEHAYYLDFQNRRPDYISVFMDKLVSWDAVSSRLEQAKALITSA

SEQ ID NO: 14248 - DNA, 1009 bp, Glycine max
aaaaaaagtgataatcactctctcactctcactctttccgtctctcgttagtcgtttgtaacgcctttgtttgcgttttttgcacagaagaattaacacgtatatagcaagcatggcagtcacactctacgaccttagctctgcctctgggttgaagaagcttgatgagtaccttctcccacgcagctacatcaccgggtaccaagctacaaaggatgatcttactgtttatgcagctttgccaactgctccatcagatgaatatggaaatgtttccaggtggtacaagcacattgatgctttgttgagaatctctggtgtttctggcgagggatctggtgttattgttgagggatccctggttgcggagcctgttgcaactcccccagctgctgacactaaggctgctgttgctgaggatgacgatgatgatgatgttgatttgtttggtgaagagactgaggaagagaagaaggcagctgaggaacgggcagctgcagtgaaggcatctgcaaaaaagaaagagtctgggaaatcatctgttctgttggatgtaaaaccatgggatgatgaaactgacatgaagaagcttgaagaatcagtgagatctgttcagatggaagggttgctttggggtgcatccaaacttgttcctgttggatacggtattaagaaactgcaaattatgcttactattgtggatgacctagtttctgttgatactcttattgaggaacatctcacagttgagcccatcaatgaatatgtccagagttgtgacattgtggccttcaataaaatataaactacaatcggtgggatttggagatcatggcaactgggagaattgcaagttttagaaactatgttctagggggaactaccctgaattgagaatttttgtctttagaaacccgcttatattatttgtttctatatatctttgtgttgtcatcggattatttggatagtaataatttcacctttaatgtgtcaacggattatttgg

SEQ ID NO: 14249 - protein, 230 aa, Glycine max
MAVTLYDLSSASGLKKLDEYLLPRSYITGYQATKDDLTVYAALPTAPSDEYGNVSRWYKHIDALLRISGVSGEGSGVIVEGSLVAEPVATPPAADTKAAVAEDDDDDDVDLFGEETEEEKKAAEERAAAVKASAKKKESGKSSVLLDVKPWDDETDMKKLEESVRSVQMEGLLWGASKLVPVGYGIKKLQIMLTIVDDLVSVDTLIEEHLTVEPINEYVQSCDIVAFNKI

SEQ ID NO: 14250 - DNA, 969 bp, Glycine max
agatttgactcttggttgagagtgagtttggaacttgaaagaaactagaatggccactttagacgaacgcccttctgcgaaaaggtggcttcctctcgaagctaaccctgacgtcatgaaccagttcctttggggtcttggccttccagtggatgaggcagagtgcggtgatgtgtttggcttagatgaagagcttctgaaaatggttcccaagccagttctcgccgtgctttttctttatccaattaccgcgaagtctgaagaagaaaggttgcaacaggaaaacgtaaaaaaggattatagcagtaaagtatatttcatgaagcaaaccgtgggtaatgcttgtggtacaatagggctgcttcatgcacttgggaacataacctctgaagtcaagcttgttgagggttcattctttgataagttctttaaatctactgcaagcatggatccattgcagcgggctgtatttcttgagaatgacagagagatggaagttgctcattcagtagccgccactgctggtgatacagtggcatcagataatgtggacactcatttcatctgctttgcttgtgtggatggtgaactgtatgagcttgatggaagaaagtcaggaccaatatctcatggtccatcctcaccaagtactttgttgagggatgcagctaaagtcatccagagcatgattcagaaaaatccaggttctctcaacttcaatgtcattgcaatatcaaagaaatccaaggatggacattaaggcagtctatttgggtgaagtaattcttgaagttatctgcagtataatccccagtcatccatgcagctttattcactttccctgtatgtttgtatgctcggatttttattttcagtcagtggcatatcaggttgagcatttttcgtttcaaatagatgcagtgcgagtaactttgagctaaaagaacaaactgagctaaaagttgggtc

SEQ ID NO: 14251 - protein, 236 aa, Glycine max
MATLDERPSAKRWLPLEANPDVMNQFLWGLGLPVDEAECGDVFGLDEELLKMVPKPVLAVLFLYPITAKSEEERLQQENVKKDYSSKVYFMKQTVGNACGTIGLLHALGNITSEVKLVEGSFFDKFFKSTASMDPLQRAVFLENDREMEVAHSVAATAGDTVASDNVDTHFICFACVDGELYELDGRKSGPISHGPSSPSTLLRDAAKVIQSMIQKNPGSLNFNVIAISKKSKDGH

SEQ ID NO: 14252 - protein, 214 aa, Glycine max
MNQFLWGLGLPVDEAECGDVFGLDEELLKMVPKPVLAVLFLYPITAKSEEERLQQENVKKDYSSKVYFMKQTVGNACGTIGLLHALGNITSEVKLVEGSFFDKFFKSTASMDPLQRAVFLENDREMEVAHSVAATAGDTVASDNVDTHFICFACVDGELYELDGRKSGPISHGPSSPSTLLRDAAKVIQSMIQKNPGSLNFNVIAISKKSKDGH

SEQ ID NO: 14253 - protein, 185 aa, Glycine max
MVPKPVLAVLFLYPITAKSEEERLQQENVKKDYSSKVYFMKQTVGNACGTIGLLHALGNITSEVKLVEGSFFDKFFKSTASMDPLQRAVFLENDREMEVAHSVAATAGDTVASDNVDTHFICFACVDGELYELDGRKSGPISHGPSSPSTLLRDAAKVIQSMIQKNPGSLNFNVIAISKKSKDGH

SEQ ID NO: 14254 - DNA, 1243 bp, Glycine max
atttccatggccacagaagagcccactgtcgcggtggaacccgctcccgaacctgcctccgccgatcctcccccggaggagaaggaggagaccaaacctgaagccaaggctaagaaaaccaaggagcccaaacctaaaaaggtttccagacctcgcaaccctcccactcatccttcctacgaagagatggttaaagatgcaattacctcgctgaaggagaaaaccggttcgagccaatacgcgattgcgaagttcatcgaggagaagcacaagcagcttccaccgaacttcaagaagcttcttctctaccatttgaagaagctcgtcgccgccggaaaactcgtcaaagtcaaaggctcgttcaagctcccacctaccagacctgctgcatcttcttcttcttcttcttcgccggcaaagaagaaaaagcccgcagctgccaagtccaagcctaagcctaagcccaagcccgctgcgaaagccaaggatactaaggcaactaaatcgaaggcaccagctaagcccaagccagctgctaagcctaaagccaaagctccagccaaggccaaacccgctgctaaaccaaaggcttctgctgctgccaagcccaagcctgctgccgccaagcccaaagccgctaaaccagctgccaagtccaagcctgctgctaaaacaaaggctgttcctgccaagcccgcggcaaagcccaaagccaagcccgtcaaggcttcaaggacgtcgacgaggacttcaccagggaagaaagcagctcctgctgctaagcccgcggcgaagaaagttgcggtggcagcgaagaaaacgccagtgaagagtgtgaaaccgaagagtgtaaagtctccggccaaaaaggctacggccaagagagggggtaggaagtgagaaagagtggtcggtggggtagggttgttttggggttggtgttgtgaagttctttgtcctcttggtgtagttgggggttacagatgatgttcctataacagatgaaatctgattttatgaaacctttgttatttccctttttagttttgatttttttttggttcgacctaggaagtagataaaaacaatgtttctagctatgcctttcagctaaatgagttaatcataaaatgtatcttagagtgtgaggtttctttgcgttatagtacctttgatggatcgatgtagtataagcacctttttcacatgaatggatttgtagtatatgctttctgtgtatttg

SEQ ID NO: 14255 - protein, 299 aa, Glycine max
ISMATEEPTVAVEPAPEPASADPPPEEKEETKPEAKAKKTKEPKPKKVSRPRNPPTHPSYEEMVKDAITSLKEKTGSSQYAIAKFIEEKHKQLPPNFKKLLLYHLKKLVAAGKLVKVKGSFKLPPTRPAASSSSSSSPAKKKKPAAAKSKPKPKPKPAAKAKDTKATKSKAPAKPKPAAKPKAKAPAKAKPAAKPKASAAAKPKPAAAKPKAAKPAAKSKPAAKTKAVPAKPAAKPKAKPVKASRTSTRTSPGKKAAPAAKPAAKKVAVAAKKTPVKSVKPKSVKSPAKKATAKRGGRK

SEQ ID NO: 14256 - protein, 297 aa, Glycine max
MATEEPTVAVEPAPEPASADPPPEEKEETKPEAKAKKTKEPKPKKVSRPRNPPTHPSYEEMVKDAITSLKEKTGSSQYAIAKFIEEKHKQLPPNFKKLLLYHLKKLVAAGKLVKVKGSFKLPPTRPAASSSSSSSPAKKKKPAAAKSKPKPKPKPAAKAKDTKATKSKAPAKPKPAAKPKAKAPAKAKPAAKPKASAAAKPKPAAAKPKAAKPAAKSKPAAKTKAVPAKPAAKPKAKPVKASRTSTRTSPGKKAAPAAKPAAKKVAVAAKKTPVKSVKPKSVKSPAKKATAKRGGRK

SEQ ID NO: 14257 - protein, 237 aa, Glycine max
MVKDAITSLKEKTGSSQYAIAKFIEEKHKQLPPNFKKLLLYHLKKLVAAGKLVKVKGSFKLPPTRPAASSSSSSSPAKKKKPAAAKSKPKPKPKPAAKAKDTKATKSKAPAKPKPAAKPKAKAPAKAKPAAKPKASAAAKPKPAAAKPKAAKPAAKSKPAAKTKAVPAKPAAKPKAKPVKASRTSTRTSPGKKAAPAAKPAAKKVAVAAKKTPVKSVKPKSVKSPAKKATAKRGGRK

SEQ ID NO: 14258 - DNA, 593 bp, Glycine max
tgcaactttgctctctgtgaggcttcaatttccaattagggtttcgcttagagtaaccaattaccatgggagtcttcacctttgtcgttcgcaaatccggcgccgaatggagcgccaagcaacattccggcgacatcgaggcctccgccgactccacctacgatctccaaaggaagctcgtgcaagccgctctcgccgttgattcctccggtggagtccagtcctccttctctcccgtgtctcctacctccgctgtgttccaggtgatagtgggtggtgctgtattcgttggaggtggcggtggtgctgttgcagctgcacctgcaggtggtgctgctgcagctgatgctgctgcagctgatgctgccccggctgctgagaaaaaggaagaaaaggtggaggaagagtccgatgatgatatgggattgggacttttgattagagattttctgctttttattgagttttgatggaaaagtgtttttagtgtttaatcctataaattgtgtgggtatattgcttttcaccagttaatggtacattgaacttcgtcagatagagttatgtgctgtgacccaaatggttcttctgcg

SEQ ID NO: 14259 - protein, 134 aa, Glycine max
MGVFTFVVRKSGAEWSAKQHSGDIEASADSTYDLQRKLVQAALAVDSSGGVQSSFSPVSPTSAVFQVIVGGAVFVGGGGGAVAAAPAGGAAAADAAAADAAPAAEKKEEKVEEESDDDMGLGLLIRDFLLFIEF

SEQ ID NO: 14260 - DNA, 681 bp, Glycine max
  misc_feature (576)..(576): n is a, c, g, or t
  misc_feature (596)..(596): n is a, c, g, or t
  misc_feature (622)..(622): n is a, c, g, or t
gctgtgagtgagacaccgatagatagagagcgcggcataacctaaacctatctttcttctctctctgtgtgtgcgcttcaacggcaaccagaagcagccatggccactgcaaggactgtgaaggatgtttcacctcatgagttcgttaaggcgtactcctctcacctcaagcgatccggcaagatggagctgccagagtggactgatattgtgaaaactgcaagatttaaggagttggctccttatgatcctgactggtactatgtcagagctgcttccatggcaagaaagatctacttgagaggaggacttggtgttggtgcctttcagaggatttatggtgggagcaagaggaatggtagtcgccctcctcatttttgcaagagcagtggtgccattgctcgtcacattcttcaacagttgcagaacatgaacatcattgaactggacaccaagggtggcaggaaaatcacttccagtggccgacgggatcttgaccaagtggctggacgcattgtggttgcaccatgattcatgatttgaaaatgccataagcatattgaggtttttgggttnttgttagagagatgtgatancagattatgctcaaattttgattttngactgagtgtcttttgtgtattagacatgctcaatgtttatgttgctttcagtcatttt

SEQ ID NO: 14261 - protein, 143 aa, Glycine max
MATARTVKDVSPHEFVKAYSSHLKRSGKMELPEWTDIVKTARFKELAPYDPDWYYVRAASMARKIYLRGGLGVGAFQRIYGGSKRNGSRPPHFCKSSGAIARHILQQLQNMNIIELDTKGGRKITSSGRRDLDQVAGRIVVAP

SEQ ID NO: 14262 - protein, 115 aa, Glycine max
MELPEWTDIVKTARFKELAPYDPDWYYVRAASMARKIYLRGGLGVGAFQRIYGGSKRNGSRPPHFCKSSGAIARHILQQLQNMNIIELDTKGGRKITSSGRRDLDQVAGRIVVAP

SEQ ID NO: 14263 - protein, 83 aa, Glycine max
MARKIYLRGGLGVGAFQRIYGGSKRNGSRPPHFCKSSGAIARHILQQLQNMNIIELDTKGGRKITSSGRRDLDQVAGRIVVAP

SEQ ID NO: 14264 - DNA, 1546 bp, Glycine max
  misc_feature (208)..(208): n is a, c, g, or t
gccgcccaaaacttctcatacccttttattcattccattcgtttctagggttttcttttctttgccgagaaaatgagagagtgcatttcgatccacattggccaggccggtatccaggttggaaacgcctgctgggaactctattgccttgaacacggcattcagcccgatggacagatgccgagtgacaagaccgttggcggagganacgacgccttcaacacatttttcagcgagaccggcgccggaaagcacgtgccccgcgccgtcttcgtggatcttgaacccaccgtgatcgacgaagtccgaaccggtgcgtaccggcagctcttccacccggagcagctgatcagcggcaaggaagacgccgccaacaacttcgcgcgtggccactacaccatcgggaaggagatcgtcgatctctgcctcgacaggatccgaaagctcgccgacaactgcaccggtctccagggtttcctcgtcttcaacgccgtcggtggcggcaccggttctggcttgggctcgcttctcttggagcgtctctccgttgactatggaaaaagtcaaagctcggtttcaccgtttatccatcccctcaggtttcgacctcggtcgtggaaccctacaacagcgtcctttcaacgcattctctcctcgaacacaccgatgttgctgtgcttctcgacaacgaggcaatctacgacatttgcaggagatctcttgacatcgaacgccctacctacaccaacctgaaccgtctcgtttcccaggtgatatcatccctcactgcctctttgaggtttgatggagcactgaatgttgatgtgactgagtttcaaaccaacttggttccttacccaaggatccatttcatgctttcctcgtatgcccctgttatctctgccgagaaagcataccatgagcagctttccgttgctgagatcaccaacagtgccttcgagccatcctccatgatggcaaagtgtgaccctcgccacggcaagtacatggcgtgttgtttgatgtaccggggcgatgtcgtgcccaaggatgtgaatgctgctgtggccaccatcaagaccaagagaaccatccagtttgtggattggtgccccactgggttcaagtgtggtataaactatcagcctcctactgttgttcctggaggtgaccttgccaaggtgcagagggctgtgtgcatgatttcgaactccactagtgtggctgaagtgttctccaggattgatcataagtttgacctcatgtatgcgaagagggccttcgtgcactggtatgtgggtgaaggtatggaagagggtgagttctcagaggctcgtgaggaccttgctgctcttgagaaggattatgaggaggttggtgccgagtctggtgatggagatgatgatggtgaaggagatgatgattattagagtgtctgaaatatcgtgtgtttgatgtctactttttcgtcttctgtcggacatgtgtggtttttgaatgatgattgttatcaaatatatgtgctatgtatagcacagaagtttct

SEQ ID NO: 14265 - protein, 226 aa, Glycine max
  misc_feature (46)..(46): Xaa can be any naturally occurring amino acid
MRECISIHIGQAGIQVGNACWELYCLEHGIQPDGQMPSDKTVGGGXDAFNTFFSETGAGKHVPRAVFVDLEPTVIDEVRTGAYRQLFHPEQLISGKEDAANNFARGHYTIGKEIVDLCLDRIRKLADNCTGLQGFLVFNAVGGGTGSGLGSLLLERLSVDYGKSQSSVSPFIHPLRFRPRSWNPTTASFQRILSSNTPMLLCFSTTRQSTTFAGDLLTSNALPTPT

SEQ ID NO: 14266 - protein, 191 aa, Glycine max
  misc_feature (11)..(11): Xaa can be any naturally occurring amino acid
MPSDKTVGGGXDAFNTFFSETGAGKHVPRAVFVDLEPTVIDEVRTGAYRQLFHPEQLISGKEDAANNFARGHYTIGKEIVDLCLDRIRKLADNCTGLQGFLVFNAVGGGTGSGLGSLLLERLSVDYGKSQSSVSPFIHPLRFRPRSWNPTTASFQRILSSNTPMLLCFSTTRQSTTFAGDLLTSNALPTPT

SEQ ID NO: 14267 - protein, 185 aa, Glycine max
MLSSYAPVISAEKAYHEQLSVAEITNSAFEPSSMMAKCDPRHGKYMACCLMYRGDVVPKDVNAAVATIKTKRTIQFVDWCPTGFKCGINYQPPTVVPGGDLAKVQRAVCMISNSTSVAEVFSRIDHKFDLMYAKRAFVHWYVGEGMEEGEFSEAREDLAALEKDYEEVGAESGDGDDDGEGDDDY

SEQ ID NO: 14268 - DNA, 1511 bp, Glycine max
  misc_feature (609)..(609): n is a, c, g, or t
  misc_feature (1002)..(1002): n is a, c, g, or t
  misc_feature (1088)..(1088): n is a, c, g, or t
  misc_feature (1395)..(1395): n is a, c, g, or t
  misc_feature (1441)..(1441): n is a, c, g, or t
  misc_feature (1452)..(1453): n is a, c, g, or t
  misc_feature (1475)..(1475): n is a, c, g, or t
  misc_feature (1497)..(1497): n is a, c, g, or t
acacagacacactctcttcttcttgctattccttcctcgtcatggagtcgcgagtgctgtcacgcgccggaaccttgttctccctccctcacctccgcaagctgccgcgggaggtcggcgccggcccctccctcgtcgccgtgaaggccgtgggctccgtggcggacggcgggaacctgatttgggggaggcaactgcgcccagagctctgctcgccggcgctgaagaaggaggccgtcctcctccggccatgcctcgccgccgcctcctcgccggccgagggcagtgattccgccggagaagcaaaggttgctccggcggggtttttcgagaagtatccggctctggtgaccggattcttcttcttcacgtggtacttcttgaacgtgattttcaacatccttaacaagaagatctacaattacttcccctatccatacttcgtatcggttatccatttattcgtgggtgtggcgtactgtttggtgagctgggccgtgggacttcctaaacgtgctcctatagactccaacctactgaagttgctcattccggtggctgtgtgccatgcattaggccacgtgaccagcaatgtctcatttgctgcanttgctgtttctttcactcataccattaaagctcttgagccattcttcaatgctgctgcttcacagttcatacttggccaatcaatccccatcactttgtggctgtcactggctcctgttgttattggtgtgtccatggcatctttgaccgagctctcattcaactgggtcggcttcataagtgctatgatttcaaacatttccttcacgtaccgaagcatctattcaaagaaagccatgactgatatggacagtaccaatatctatgcctacatttccatcattgctctaattgtgtgtataccacctgccgtaattttggaagggcccacactgttgaagcacggcttcaatgatgctattgctaaagtaggtttggtcaagttcgtctcanatctcttctgggttggtatgttttaccatctctacaaccaggtggctaccaacacactggagagagtggctcctctcactcatgcngttgggaacgtactgaaacgtgtatttgtcattggattctctattatagtcttcggtaacaagattagcacccaaactggtattggaacagccattgcaattgctggtgtggcactctactcgttcatcaaagccagaatggaggaagaaaagcgacaagcaaaagcagcataagaggaaagtcgtcaacctggaggatgtcttgcactgtaaatcaccacaaatttccttcaaaataattgagtgactggttcagtgttgtactatccttgtgatagcgcccttttatttttccttctatttttgncaaatattttctttttcctttttttcctttttctctcttcattcanaaaacaatgtnntcgctgctgattatcagtcttntcgtgttgactggaaaatgtcntacccttgattccc

SEQ ID NO: 14269 - protein, 419 aa, Glycine max
  misc_feature (203)..(203): Xaa can be any naturally occurring amino acid
  misc_feature (334)..(334): Xaa can be any naturally occurring amino acid
  misc_feature (362)..(362): Xaa can be any naturally occurring amino acid
TDTLSSSCYSFLVMESRVLSRAGTLFSLPHLRKLPREVGAGPSLVAVKAVGSVADGGNLIWGRQLRPELCSPALKKEAVLLRPCLAAASSPAEGSDSAGEAKVAPAGFFEKYPALVTGFFFFTWYFLNVIFNILNKKIYNYFPYPYFVSVIHLFVGVAYCLVSWAVGLPKRAPIDSNLLKLLIPVAVCHALGHVTSNVSFAAXAVSFTHTIKALEPFFNAAASQFILGQSIPITLWLSLAPVVIGVSMASLTELSFNWVGFISAMISNISFTYRSIYSKKAMTDMDSTNIYAYISIIALIVCIPPAVILEGPTLLKHGFNDAIAKVGLVKFVSXLFWVGMFYHLYNQVATNTLERVAPLTHXVGNVLKRVFVIGFSIIVFGNKISTQTGIGTAIAIAGVALYSFIKARMEEEKRQAKAA

SEQ ID NO: 14270 - protein, 406 aa, Glycine max
  misc_feature (190)..(190): Xaa can be any naturally occurring amino acid
  misc_feature (321)..(321): Xaa can be any naturally occurring amino acid
  misc_feature (349)..(349): Xaa can be any naturally occurring amino acid
MESRVLSRAGTLFSLPHLRKLPREVGAGPSLVAVKAVGSVADGGNLIWGRQLRPELCSPALKKEAVLLRPCLAAASSPAEGSDSAGEAKVAPAGFFEKYPALVTGFFFFTWYFLNVIFNILNKKIYNYFPYPYFVSVIHLFVGVAYCLVSWAVGLPKRAPIDSNLLKLLIPVAVCHALGHVTSNVSFAAXAVSFTHTIKALEPFFNAAASQFILGQSIPITLWLSLAPVVIGVSMASLTELSFNWVGFISAMISNISFTYRSIYSKKAMTDMDSTNIYAYISIIALIVCIPPAVILEGPTLLKHGFNDAIAKVGLVKFVSXLFWVGMFYHLYNQVATNTLERVAPLTHXVGNVLKRVFVIGFSIIVFGNKISTQTGIGTAIAIAGVALYSFIKARMEEEKRQAKAA

SEQ ID NO: 14271 - DNA, 470 bp, Glycine max
tcgcattatctttcctcactacactgctccaaacaaaaccctaaatcagcgactagcaatggcttcctctcaagtcgtaatcatgacagcaatggcggtccttctcgccgtcgtctccgccgctcacgccgccgatgcgccggcacctagcccctcctctcccgcctccgtcatctctccgtccttcgccgtcggttttctcaccgccgctgttgctctcgtcttcggttcttctctcaggatctgaacatgctgcgctccgccctctggattttcactttcttttctatttttttgtgtggatttatcagagatcgaggcttgactagtagtagagtatagtttcccctgtattgatgtgcagagatttcatgtgttcgtttcaggatcttatgtaattttgctatctcatggctattatcatttgttaacattgggtttggtacataatgaattttatttgatattct

SEQ ID NO: 14272 - protein, 81 aa, Glycine max
RIIFPHYTAPNKTLNQRLAMASSQVVIMTAMAVLLAVVSAAHAADAPAPSPSSPASVISPSFAVGFLTAAVALVFGSSLRI

SEQ ID NO: 14273 - protein, 64 aa, Glycine max
MRRHLAPPLPPPSSLRPSPSVFSPPLLLSSSVLLSGSEHAALRPLDFHFLFYFFVWIYQRSRLD

SEQ ID NO: 14274 - protein, 62 aa, Glycine max
MASSQVVIMTAMAVLLAVVSAAHAADAPAPSPSSPASVISPSFAVGFLTAAVALVFGSSLRI

SEQ ID NO: 14275 - DNA, 848 bp, Glycine max
aaaatactacaagcatttcattgtatttttccattccttataaaacccgaaaacaaaaaccacgcaatggtcacgtccaacaccaacaacaccatcctcaaaatctccaaactcgcgatcctcctcgttttgttcgcttcagtctgcaacgtcgctatgtcggactccaccgccaaacccctcgaccagcacgccaccacgggctctgaccctactgcgccagcggttcacatcgtgtacaccgagagaccacagaacgaggagcctgaggcctaccacatcagaaccctcacttcagtccttggcagtgaggaggctgcaaaggaagctttgttgtatagttacaagtctgcagccagtgggttctcagctaagcttactccggagcaggttgaacagatttcaagtgttcttcaagttgttcctagcaggacatatcagctccatggaccaaataacctgcagtagagaatgttcacctaaagttgtatcggttaaaccgttatctatgccatgtataaactaaactagtgtggctctagacttgtgccaataagaacatggaattaatatataataatacattactaatatttgtgctatatgtttatcaatgtgtcatgtattcaaagtggcaccaatggaccctgtgttgtgcttgtgcatattatcctgtaaaaccattgagaacttgttttgatgctttgagatgtaaatcctagtcaccgaggttgtgaccattaacttaattcggttcatttggtattaaacgtacgttgttaaccaattgttgaactgaattatttatttatatttattttgacagggaatatatcacttattcagat

SEQ ID NO: 14276 - protein, 155 aa, Glycine max
KILQAFHCIFPFLIKPENKNHAMVTSNTNNTILKISKLAILLVLFASVCNVAMSDSTAKPLDQHATTGSDPTAPAVHIVYTERPQNEEPEAYHIRTLTSVLGSEEAAKEALLYSYKSAASGFSAKLTPEQVEQISSVLQVVPSRTYQLHGPNNLQ

SEQ ID NO: 14277 - protein, 133 aa, Glycine max
MVTSNTNNTILKISKLAILLVLFASVCNVAMSDSTAKPLDQHATTGSDPTAPAVHIVYTERPQNEEPEAYHIRTLTSVLGSEEAAKEALLYSYKSAASGFSAKLTPEQVEQISSVLQVVPSRTYQLHGPNNLQ

SEQ ID NO: 14278 - protein, 103 aa, Glycine max
MSDSTAKPLDQHATTGSDPTAPAVHIVYTERPQNEEPEAYHIRTLTSVLGSEEAAKEALLYSYKSAASGFSAKLTPEQVEQISSVLQVVPSRTYQLHGPNNLQ

SEQ ID NO: 14279 - DNA, 588 bp, Glycine max
  misc_feature (540)..(540): n is a, c, g, or t
  misc_feature (569)..(569): n is a, c, g, or t
gtaaaaccctaacaagtgacctcaaatttctcaaccagaggttctgtcggtgttctctcccttccgtttcgtggcgtgtgttccaaatggcgaagcgtttgattccactgttcaatcgggttttggtggagaaaatcgtgcctccatcaaagaccaacgctggcattttgttacccgagaaatcctccaagctaaattctggaaaagttattgctgttggccctggctttcacagtaaggatgggaagctaattcctgtggctgttaaggaaggtgatactgttcttttgcctgaatatgggggaactgaggtgaagcttgataacaaagagtatcatctgtttagagacgatgatattctggggacattgcatgattgatgtcaaaatgatccgcggaaatttacatgctaggtgttctgctacatttgaggagtttctttctgttctgatttttatgtatgatgtctaaatcaacattttgttgtggagcaaaacactttaactttttttttaaaaacttacaatgaatgttattttntgcaacaactgggaaaactattttgttgntcatgaaatttattgtctt

SEQ ID NO: 14280 - protein, 125 aa, Glycine max
KTLTSDLKFLNQRFCRCSLPSVSWRVFQMAKRLIPLFNRVLVEKIVPPSKTNAGILLPEKSSKLNSGKVIAVGPGFHSKDGKLIPVAVKEGDTVLLPEYGGTEVKLDNKEYHLFRDDDILGTLHD

SEQ ID NO: 14281 - protein, 97 aa, Glycine max
MAKRLIPLFNRVLVEKIVPPSKTNAGILLPEKSSKLNSGKVIAVGPGFHSKDGKLIPVAVKEGDTVLLPEYGGTEVKLDNKEYHLFRDDDILGTLHD

SEQ ID NO: 14282 - DNA, 704 bp, Glycine max
tctgtgaatcggtgttgtcttgttggtaaagaaagaaagagaagagaagaatcgaagacgaagatggaggacgcatcagcatcaaagttcattccacaccaaatcggaggggtccaaaacgacgcgcttcgattcggtctccatggagtcaagagcgacatcgttggttctcaccctcttcaatcttcactccaatctacaaggagaatggatgaagcgatgaagaggcaatgcaaagttaacctgtacggaactgcctttcccatgaaggaggagcttgacaggcaaatcctgtccaggttccagcggcctcctggaccaattccttcttcaatgctgggtttggagactgttacaggaagtgttgatcactttggttttgaggattgtctaaatgacccccgtgagtcagagactttccggccattagacatgcatcatgggatggaagttcgccttggtctatctaagggaccagtgtacccaagtattatataattaaatttgactgttattctagtaccagaaaacagtattttgtgatcgaagcttcttgttattcattaaaatggaagtgtccgaggattctccatatgtagtcgtggacttgtgttttcctatgctttggatgctagaaatgttatggtccatataaacagagcatgtctttcaaattaaagcagaatttatgcatgaggcatttg

SEQ ID NO: 14283 - protein, 165 aa, Glycine max
SVNRCCLVGKERKRREESKTKMEDASASKFIPHQIGGVQNDALRFGLHGVKSDIVGSHPLQSSLQSTRRMDEAMKRQCKVNLYGTAFPMKEELDRQILSRFQRPPGPIPSSMLGLETVTGSVDHFGFEDCLNDPRESETFRPLDMHHGMEVRLGLSKGPVYPSII

SEQ ID NO: 14284 - protein, 144 aa, Glycine max
MEDASASKFIPHQIGGVQNDALRFGLHGVKSDIVGSHPLQSSLQSTRRMDEAMKRQCKVNLYGTAFPMKEELDRQILSRFQRPPGPIPSSMLGLETVTGSVDHFGFEDCLNDPRESETFRPLDMHHGMEVRLGLSKGPVYPSII

SEQ ID NO: 14285 - protein, 96 aa, Glycine max
MDEAMKRQCKVNLYGTAFPMKEELDRQILSRFQRPPGPIPSSMLGLETVTGSVDHFGFEDCLNDPRESETFRPLDMHHGMEVRLGLSKGPVYPSII

SEQ ID NO: 14286 - DNA, 1510 bp, Glycine max
gggaacctgaaaatctagtttcttacaaggctctactctactgcttcaccttctgctctagaaaattcagtggtgatacatggcttcggctactctctctgtagccaaaccagcccttcaggcaaatgggaaaggcttctctgaattctctggcctccgcagctcatcaggcttccttcccttttctagaaaatcttcagaggatttccattctgtcattgccttccagacctatgcagttggaagcagtggaggatacaagaagggtgtgacagaagcaaaactgaaggttgccataaacggatttggaaggattggaaggaacttcttgaggtgctggcacggtcgcaaagactcccctcttgatgtcattgccatcaacgacaccggtggcgtgaaacaagcctctcaccttctcaagtacgattcgatcctcggaaccttcgatgctgatgtcaagcctgttggcagcgacatcatctctgtcgatggaaaggaaatcaaagttgtctctgaccgcaaccctgccaaccttccttggaaggatttggggatagacttggtgattgaaggaactggggtgtttgtagacagagaaggtgcagggaaacacattcaagcaggagctaagaaggtgctcattactgctcctggtaaaggagacatccccacatatgtggttggtgtcaatgagtatgattacagccctgatgaacccatcatcagcaatgcatcttgcaccactaactgccttgcaccctttgtcaaggtccttgatcagaaattcggtatcatcaagggcaccatgaccaccactcactcctacaccggcgaccaaaggcttctcgacgcgagccaccgtgacctgaggcgcgccagggcggcagctctcaacattgtccccacttcaacaggagcagcaaaggcagtggcccttgtcctcccaaccctcaagggcaaactcaatggcattgcactccgtgtgccaaccaccaaacgtctcagtggtggacctcgttgttcaggtctcaaagaagacctttgcagaagaagtgaatgcagcattcagagagagtgcagacaatgagctccagggaatcctctctgtgtgtgatgagccacttgtgtctgttgacttcaggtgcactgatgtgtcctcaaccgttgactcatcgttgaccatggtcatgggagatgacatggttaaggtgattgcttggtatgacaatgagtggggctactcccaaagggttgtggatttggctgacattgttgccaacaagtggaagtgagagccatcaaattctgaattggtaattcaattattatatgtatgtaccatgccattgtagttttgtatgcttactactactactactaccactacaaacacttgttgcttcatttttcattctaaaacttgtactgagaaacagaaccatcaattttctctgccttctcattgtgcaataaaattcttaccttgaaatctgaatgttgattatgattc

SEQ ID NO: 14287 - protein, 335 aa, Glycine max
MASATLSVAKPALQANGKGFSEFSGLRSSSGFLPFSRKSSEDFHSVIAFQTYAVGSSGGYKKGVTEAKLKVAINGFGRIGRNFLRCWHGRKDSPLDVIAINDTGGVKQASHLLKYDSILGTFDADVKPVGSDIISVDGKEIKVVSDRNPANLPWKDLGIDLVIEGTGVFVDREGAGKHIQAGAKKVLITAPGKGDIPTYVVGVNEYDYSPDEPIISNASCTTNCLAPFVKVLDQKFGIIKGTMTTTHSYTGDQRLLDASHRDLRRARAAALNIVPTSTGAAKAVALVLPTLKGKLNGIALRVPTTKRLSGGPRCSGLKEDLCRRSECSIQRECRQ

SEQ ID NO: 14288 - DNA, 719 bp, Glycine max
aaaaaagcccaacaaactccaaaccctaattcaataaattgcttaatccccaaaccctaattcgtgccgcaaacagagatgacgacccgattcaagaagaaccgcaagaagcgcggccacgtgagcgccggtcatggccgtatcggaaagcaccgtaagcaccccggcggccggggaaacgccggtggcatgcatcaccacaggatcctgttcgacaagtaccatccgggcttcttcgggaaggtgggaatgaggtacttccataagcttcgcaataaattctactcccccatcgtcaacgtcgaaaagctatggtctctcataccccaagacgcgaaggaaaaagccctaaaatcgaaggacactgcccctctaatcgacgtcacacagcacgggtacttcaaggtcctcggaaaaggtgttctgccccaaaatcagccttttgttgttaaggccaagcttatttccaagatcgccgagaagaagattaaggaagccggtggcgctgttcttctcaccgcttaagtttaaaaactgttttttaattgtgttgttttgtttcaagataacttttttgattatatattgcaagtgatacattgtgtttttttttagtgtttttgttgttggatttaggttgattaaaaggtttatgcgaacagttttgacctaatatcctaaaaccttgttttaatgagttgtgataggaaatttattgg

SEQ ID NO: 14289 - protein, 148 aa, Glycine max
MTTRFKKNRKKRGHVSAGHGRIGKHRKHPGGRGNAGGMHHHRILFDKYHPGFFGKVGMRYFHKLRNKFYSPIVNVEKLWSLIPQDAKEKALKSKDTAPLIDVTQHGYFKVLGKGVLPQNQPFVVKAKLISKIAEKKIKEAGGAVLLTA

SEQ ID NO: 14290 - protein, 111 aa, Glycine max
MHHHRILFDKYHPGFFGKVGMRYFHKLRNKFYSPIVNVEKLWSLIPQDAKEKALKSKDTAPLIDVTQHGYFKVLGKGVLPQNQPFVVKAKLISKIAEKKIKEAGGAVLLTA

SEQ ID NO: 14291 - protein, 91 aa, Glycine max
MRYFHKLRNKFYSPIVNVEKLWSLIPQDAKEKALKSKDTAPLIDVTQHGYFKVLGKGVLPQNQPFVVKAKLISKIAEKKIKEAGGAVLLTA

SEQ ID NO: 14292 - DNA, 727 bp, Glycine max
acatagtgtgttaagcctcgccgactcggttgctatcagcgagtgagagtgagtgagtggttctcttgcagcaacaaggtttagtgacaccaaacagactggaaatgggtcgtggggtcagtgctggtggtggacagagttccttggattatctctttggcagtggggtacctgccagcagtgcaaatggtgctcgcactcaaaatgcaagtgctccttcaccaccggttgataagcaaagtccagcaccagcagcagcagcagcacctgcacctgcagcagcagcagcaccagcacctgcaccagcaccagcaccagcaccagctgataagcaaattccagctggaattcctggaagtctcaaaaacaattaccatcgcgctgatgggcaaaactgtggcaactttctcactgatcggccatctaccaaggttcatgctgccccgggtggtggatcttccttgcattacctctttggtggtcctccagggaactgattcatacctaccatgtgatgtatcatgtgtaaaatggatagtgttgcattgtgtttagaccagtggactttgtttcttgttcaattgaatctcttgacaatgttggtgtggcttgatggccaaactaagctgattcataggtttgttgttctgtgttattgtgtgggtttcgattaatgaaattactgtgcgaatgagctaaagtggctcataaatgttctcttatcttt

SEQ ID NO: 14293 - protein, 130 aa, Glycine max
MGRGVSAGGGQSSLDYLFGSGVPASSANGARTQNASAPSPPVDKQSPAPAAAAAPAPAAAAAPAPAPAPAPAPADKQIPAGIPGSLKNNYHRADGQNCGNFLTDRPSTKVHAAPGGGSSLHYLFGGPPGN

SEQ ID NO: 14294 - protein, 122 aa, Glycine max
MVLALKMQVLLHHRLISKVQHQQQQQHLHLQQQQHQHLHQHQHQHQLISKFQLEFLEVSKTITIALMGKTVATFSLIGHLPRFMLPRVVDLPCITSLVVLQGTDSYLPCDVSCVKWIVLHCV

SEQ ID NO: 14295 - protein, 116 aa, Glycine max
MQVLLHHRLISKVQHQQQQQHLHLQQQQHQHLHQHQHQHQLISKFQLEFLEVSKTITIALMGKTVATFSLIGHLPRFMLPRVVDLPCITSLVVLQGTDSYLPCDVSCVKWIVLHCV

SEQ ID NO: 14296 - DNA, 702 bp, Glycine max
atctctcgaattttggtttccttctctctttcaccgataaaacaaactaaattcttcttctttctactgaaaacgatagtaatggcgacgaatccaatcgaagcggggaacggcgacgccgctcctaaccctaacgcgactaccaaaccctccgtctacctccaagacacggaggagctgaagcgagtcttcagccgcttcgacgctaattgcgacggcaagatctccgtcaccgagttggacaacgtcctccgctccctcggatccggcgtcccgccggaggatatccagcgcgtcatggacgacctcgacaccgaccacgacggattcattaacctctcggagttcgccgccttctgccgctccgacaccgcggatggcggcgacgccgagctccacgatgctttcaacctgtacgatcatgacaagaacggccatatctccgccacggagctctgccaggtgctgaaccgcctcggaatgaagtgctccgtcgaggaatgccacaacatgatcaaatccgtggattccgacggcgacggcaacgtcaacttccccgagttcaagcggatgatgagcaacaatcgtgaaaatgctagcaatggcgaagaaaaaaccgattaggcgctttggatttgatgtttatagctaggctgggcaaggcacaatccctcttgaataataaatctatgcctgtttgtc

SEQ ID NO: 14297 - protein, 207 aa, Glycine max
ISRILVSFSLSPIKQTKFFFFLLKTIVMATNPIEAGNGDAAPNPNATTKPSVYLQDTEELKRVFSRFDANCDGKISVTELDNVLRSLGSGVPPEDIQRVMDDLDTDHDGFINLSEFAAFCRSDTADGGDAELHDAFNLYDHDKNGHISATELCQVLNRLGMKCSVEECHNMIKSVDSDGDGNVNFPEFKRMMSNNRENASNGEEKTD

SEQ ID NO: 14298 - protein, 180 aa, Glycine max
MATNPIEAGNGDAAPNPNATTKPSVYLQDTEELKRVFSRFDANCDGKISVTELDNVLRSLGSGVPPEDIQRVMDDLDTDHDGFINLSEFAAFCRSDTADGGDAELHDAFNLYDHDKNGHISATELCQVLNRLGMKCSVEECHNMIKSVDSDGDGNVNFPEFKRMMSNNRENASNGEEKTD

SEQ ID NO: 14299 - protein, 108 aa, Glycine max
MDDLDTDHDGFINLSEFAAFCRSDTADGGDAELHDAFNLYDHDKNGHISATELCQVLNRLGMKCSVEECHNMIKSVDSDGDGNVNFPEFKRMMSNNRENASNGEEKTD

SEQ ID NO: 14300 - DNA, 1706 bp, Glycine max
gtgttttacaagagagagagagagagagagatattcaaggatctggtgccccttcttccttcttgtgttgggaccaattctttaatgagcgagagagagagggcgcaatagtagccatagccataatttattgttattatttagggatgagtgaagtgaatgaatgaaaacaaaaacaccgccatcgctcttgtctctcacggttgactctgcggttcttaatctctccgacatctccgatctctcccatgtccctgatcacatcctcctcgacctcttcctgagaatattgaaggctgggaagctgactgagaaagttctgagactttttatagcaactggtaaggatgaagtcctctcatttgttcaggcactcaatatccaacatattttgacccctgtgcttcccaccaggtgttctgaggcaaaatcagacttttagtttgtaagatagtctgtaccttgcaagatgtctcaagcagttatcaacgataatgaagtggacattgtgattggtgcactgcattctgatcttacaacttttatgaatgaatggaggccaattttctcccgctttcacctgataatagtaaaagatcctgacctcaaggaggaactccaaattcctgtaggcttcagcgtggatgtgtatacaaagtctcagattgagcaagtggtgggttcttccacttctgttcgcttctctggctatgcttgtagatattttggcttcctaatttcacggaaaaagtatgttgtctgcattgatgatgattgtgttcctgcaaaagataattcagggattttggtggatgctgtggctcagcatattgtgaacctccagactcctgccacccccttcttctttaatacactgtatgatccattctgtaagggtgcagattttgttcgtgggtacccattcagcctgcgaagtggggttgattgtgctctgtcatgtgggttatggctcaatctggccgaccttgatgctccaacacaagctctcaagccagggcagaggaatttgcgatatgtagatgcagttctgactgttccttcgagagccatggtgcccgtgagtggaatcaacgttgcctttaaccgtgaagctgttggtccagcattagtcccggctttgaggctggcaggggaagggaaattgaggtgggaaactatggaagatatatggtgtggaatgtgtgtgaaagttatatgtgatcacctaggccttggtgtgaaaagtgggttaccttatgtttggagaacagaaaggggtgatgcaatacagagcttgaagaaagagtgggaaggggtgaaattgatggaggatattgttcctttctttcagtcattaaggttgccacaatcagcaactacagcagaggcttgcgtggtcgaggtggccaaaacagtgaaggagcacctggggaaggttgatcctatgttttcagaggctgctcaagccatggaagagtgggtcaagctctggaagtcagttagatctggttaaagctcctgaacttgaggactcttgtaggagtgaaggttattgccttattggcttctatatttctttatgttatttaactaatttatagctgccttttttttccagtttgtagtgaactaagcttacattttacctgacacagactaaaggctgaataaaatgatgataatacttattggttttgtgacaattg

SEQ ID NO: 14301 - protein, 347 aa, Glycine max
MSQAVINDNEVDIVIGALHSDLTTFMNEWRPIFSRFHLIIVKDPDLKEELQIPVGFSVDVYTKSQIEQVVGSSTSVRFSGYACRYFGFLISRKKYVVCIDDDCVPAKDNSGILVDAVAQHIVNLQTPATPFFFNTLYDPFCKGADFVRGYPFSLRSGVDCALSCGLWLNLADLDAPTQALKPGQRNLRYVDAVLTVPSRAMVPVSGINVAFNREAVGPALVPALRLAGEGKLRWETMEDIWCGMCVKVICDHLGLGVKSGLPYVWRTERGDAIQSLKKEWEGVKLMEDIVPFFQSLRLPQSATTAEACVVEVAKTVKEHLGKVDPMFSEAAQAMEEWVKLWKSVRSG

SEQ ID NO: 14302 - protein, 322 aa, Glycine max
MNEWRPIFSRFHLIIVKDPDLKEELQIPVGFSVDVYTKSQIEQVVGSSTSVRFSGYACRYFGFLISRKKYVVCIDDDCVPAKDNSGILVDAVAQHIVNLQTPATPFFFNTLYDPFCKGADFVRGYPFSLRSGVDCALSCGLWLNLADLDAPTQALKPGQRNLRYVDAVLTVPSRAMVPVSGINVAFNREAVGPALVPALRLAGEGKLRWETMEDIWCGMCVKVICDHLGLGVKSGLPYVWRTERGDAIQSLKKEWEGVKLMEDIVPFFQSLRLPQSATTAEACVVEVAKTVKEHLGKVDPMFSEAAQAMEEWVKLWKSVRSG

SEQ ID NO: 14303 - DNA, 444 bp, Glycine max
gatctgatgactgcagctgcctggaattagtgctgtcccttcggaggacaatatgcggtatttcaatgtgatgatccttggcccgactcagtcgccatatgaagggggagttttcaagttggaattatttttgccagaagaatatccaatggctgctccaaaggttaggtttctgacaaaaatatatcatccgaacattgataagcttggcaggatatgtcttgacattctgaaagataagtggagtcctgcccttgggattcgcactgtacttttgagtattcaagctcttctaagtgcacctaacccagatgatccactttctgagaacattgccaagcattggaaatctaatgaggccgaggctgttgaaacaggtatgtcttttttgcttgtatgataatataaaatgttagttgttatttattaatgatggcatcaaac

SEQ ID NO: 14304 - protein, 115 aa, Glycine max
MRYFNVMILGPTQSPYEGGVFKLELFLPEEYPMAAPKVRFLTKIYHPNIDKLGRICLDILKDKWSPALGIRTVLLSIQALLSAPNPDDPLSENIAKHWKSNEAEAVETGMSFLLV

SEQ ID NO: 14305 - protein, 109 aa, Glycine max
MILGPTQSPYEGGVFKLELFLPEEYPMAAPKVRFLTKIYHPNIDKLGRICLDILKDKWSPALGIRTVLLSIQALLSAPNPDDPLSENIAKHWKSNEAEAVETGMSFLLV

SEQ ID NO: 14306 - protein, 83 aa, Glycine max
MAAPKVRFLTKIYHPNIDKLGRICLDILKDKWSPALGIRTVLLSIQALLSAPNPDDPLSENIAKHWKSNEAEAVETGMSFLLV

SEQ ID NO: 14307 - DNA, 442 bp, Glycine max
ttggccatcactgatacgaccattgatgggtatcacgtgcctgcggggaccaccgctatggttaatatgtgggccatagcaagggacccggaggtgtggctggacccacttgagttcaagcccgagaggttcatgggtctggaaaacgagttttctgttttcgggtcggatctgagactcgctccattcggttcgggtcggagaacatgccccgggaagactttgggtttgagcaccgtaaccttctgggtggcttggcttttgcatgagtttgaatggctaccgtctgatgaagccaaggttgatctaacggaggtgctgaggctctcgtgtgaaatggctaacccactcattgttaaagttcgccctaggcatggattaagcacttaatgataatataattaagcctatctacgttattaacttgaaatgttttaatggg

SEQ ID NO: 14308 - protein, 129 aa, Glycine max
LAITDTTIDGYHVPAGTTAMVNMWAIARDPEVWLDPLEFKPERFMGLENEFSVFGSDLRLAPFGSGRRTCPGKTLGLSTVTFWVAWLLHEFEWLPSDEAKVDLTEVLRLSCEMANPLIVKVRPRHGLST

SEQ ID NO: 14309 - protein, 110 aa, Glycine max
MVNMWAIARDPEVWLDPLEFKPERFMGLENEFSVFGSDLRLAPFGSGRRTCPGKTLGLSTVTFWVAWLLHEFEWLPSDEAKVDLTEVLRLSCEMANPLIVKVRPRHGLST

SEQ ID NO: 14310 - protein, 107 aa, Glycine max
MWAIARDPEVWLDPLEFKPERFMGLENEFSVFGSDLRLAPFGSGRRTCPGKTLGLSTVTFWVAWLLHEFEWLPSDEAKVDLTEVLRLSCEMANPLIVKVRPRHGLST

SEQ ID NO: 14311 - DNA, 644 bp, Glycine max
ggtgatttcattgcataatccattgactagaaatcccatattttccccccacattaactcacccaacccctctttctaaaaggcctcaaggatacactccggacttaattacgttattttgttagggtcaccgtttcgagatattctaaacttgtactgaaaaatatggagggaaaagaagaggacgtaagagttggagccaacaggtacggagagaggcagccaatagggaccgctgctcaggctaaagactacagagagccaccgtcggcgcctctcttcgaaccgggagagttgtcatcgtggtctttctatagggctggcatagcagagtttgtggccactttcttgttcctctacatcacagtgctgactgtgatgggtgtgttcaaatctaagagcaagtgttccactgtgggtatccaaggcattgcttgggcttttgggggaatgatctttgctcttgtttattccactgctggaatctcagggggtcatattaacccagcagtgacgtttgggctgttcttggcacgcaagctctctctgacaagggcaattttttacataatcatgcagtgcttgggagctatatgtggtgctggtgtagttaaggggttcgagccacacctctatgagaggct

SEQ ID NO: 14312 - protein, 159 aa, Glycine max
MEGKEEDVRVGANRYGERQPIGTAAQAKDYREPPSAPLFEPGELSSWSFYRAGIAEFVATFLFLYITVLTVMGVFKSKSKCSTVGIQGIAWAFGGMIFALVYSTAGISGGHINPAVTFGLFLARKLSLTRAIFYIIMQCLGAICGAGVVKGFEPHLYER

SEQ ID NO: 14313 - protein, 88 aa, Glycine max
MGVFKSKSKCSTVGIQGIAWAFGGMIFALVYSTAGISGGHINPAVTFGLFLARKLSLTRAIFYIIMQCLGAICGAGVVKGFEPHLYER

SEQ ID NO: 14314 - DNA, 920 bp, Glycine max
cccgtttcctacaagcatgcacttcctgcccaaattttgcatttgactggagcgtattgttagatatatatcttacctgcccctctactcagttctgggtttattacgcatgtttcatgtatccagccttcattggagcttgatcattatttgcatcccagacaaagaagatgaatcggggccaatcatacttcatttggattctttgggtcttcactctagtaaatcagtttttgataatattaaaagctatttgattgaagaaaagaactacatggatcgagaagacatggcttcagatgtttcaattgcggatagaatatggaagtgccttcctcgtagaatcgaatctcaaatcattcaggttccccaacagaagaatgactatgactgtggtctttttgtattgtacttcattgaacgtttcatggaggaggcaccggaaagactgaaaatgaaagatttagatatgtttggaaggcgatggttcaaacctcaagaggcgtccaatttgagagtgaaaatccgtaagttgcttgtagaaaaattacagaattcagtcacggataattgtaatttggaatcttctccttcatcatctgctggccctgcaactgattgtgttgagactgccagggattctcttactggccctgcaactgattgtgttgagaccaccgaggattctgtgacttaacatggcagaattgcaattgtcatttccttgaacgaacaatctgttgatattcgtatggttggtgccagttttttttttccttgtacagaagccagctattcagctggtaatttttggatagagttttcctatgacctggtaaatagtccatcagtctttaatccaagcaagggtggctaacagttggctgtgcagaaataacaaacaactctagttcctaacc

SEQ ID NO: 14315 - protein, 195 aa, Glycine max
MFHVSSLHWSLIIICIPDKEDESGPIILHLDSLGLHSSKSVFDNIKSYLIEEKNYMDREDMASDVSIADRIWKCLPRRIESQIIQVPQQKNDYDCGLFVLYFIERFMEEAPERLKMKDLDMFGRRWFKPQEASNLRVKIRKLLVEKLQNSVTDNCNLESSPSSSAGPATDCVETARDSLTGPATDCVETTEDSVT

SEQ ID NO: 14316 - protein, 140 aa, Glycine max
MDREDMASDVSIADRIWKCLPRRIESQIIQVPQQKNDYDCGLFVLYFIERFMEEAPERLKMKDLDMFGRRWFKPQEASNLRVKIRKLLVEKLQNSVTDNCNLESSPSSSAGPATDCVETARDSLTGPATDCVETTEDSVT

SEQ ID NO: 14317 - protein, 135 aa, Glycine max
MASDVSIADRIWKCLPRRIESQIIQVPQQKNDYDCGLFVLYFIERFMEEAPERLKMKDLDMFGRRWFKPQEASNLRVKIRKLLVEKLQNSVTDNCNLESSPSSSAGPATDCVETARDSLTGPATDCVETTEDSVT

SEQ ID NO: 14318 - DNA, 1330 bp, Glycine max
tttttttaaagataattacaagtactgcagtttgttttcctggaaacaactgaatgacaaattaatttttgttagtggatattttccccgtaatttttgttaattaattttcttttgcattgtcatgatcttcaaatttcatgaatgccaaatactaaagttagttgtatgacagattttgtaatatatcttggtgatgtcatcacggctaacaatataatgattgcaaatgcaagcttgtattgggatcaggcaaccgccccagcaagaaatagaggcataccatgggccagtgtatttggaaaccatgatgatgctgcatttgagtggccattgaagtggttctctgctcctggaatccctccaattcactgccctcaaaacacaacttcatattcaggagaagaagaatgtagcttcaaaggaacaggacgtttgaatctgatgacaaatgagatcaagcacaatggatcattttctagctatggccctagaaatctttggccaagtgtatccaattatgtccttcaagtttcatcaccaaatgatccacaaacaccagtggctttcctttacttccttgattctggaggcggttcctatccggaagtcatatctagtggccaggtagaatggtttcggcagaaagctgaagaagttaaccctgactcaagggttcccgagattattttctggcacattccaagtacagcttataaggtggtggcccccaagtttggcataccaaagccttgcgtaggatcaatcaacaaggaaactgttgctgctcaagaagttgaaacgggtatgatggaccttcttgtgaacagaacttctgtcaaggcaatttttgttggacacaaccatggattggactggtgctgcccttacgagaaactatggttatgctatgctaggcacactggttatggtggctatggagattggcctagaggagcacgaattttagagatcactcagacacccttttcccttcaatcttggataaggatggaggatggcaatgtgcacagcgaagttgtcttgagttgaaagtctttgggtgtgcttaactttttagttttcaagatataattaaacaaggtttgctcatacaactggtaaagggtgaaacaagacatggagcatagtgtgaaatcgaagggaggctaaataaacagaaaacaaaaagatgagaaaacatgtcctagttgtttctgtttagtttttaaaacaattttccaaacttgataagttttttaatgaaacaataatatatgtacatgtgaattctttatagtttacaaaaatattatccatttttctttgg

SEQ ID NO: 14319 - protein, 302 aa, Glycine max
MPNTKVSCMTDFVIYLGDVITANNIMIANASLYWDQATAPARNRGIPWASVFGNHDDAAFEWPLKWFSAPGIPPIHCPQNTTSYSGEEECSFKGTGRLNLMTNEIKHNGSFSSYGPRNLWPSVSNYVLQVSSPNDPQTPVAFLYFLDSGGGSYPEVISSGQVEWFRQKAEEVNPDSRVPEIIFWHIPSTAYKVVAPKFGIPKPCVGSINKETVAAQEVETGMMDLLVNRTSVKAIFVGHNHGLDWCCPYEKLWLCYARHTGYGGYGDWPRGARILEITQTPFSLQSWIRMEDGNVHSEVVLS

SEQ ID NO: 14320 - protein, 294 aa, Glycine max
MTDFVIYLGDVITANNIMIANASLYWDQATAPARNRGIPWASVFGNHDDAAFEWPLKWFSAPGIPPIHCPQNTTSYSGEEECSFKGTGRLNLMTNEIKHNGSFSSYGPRNLWPSVSNYVLQVSSPNDPQTPVAFLYFLDSGGGSYPEVISSGQVEWFRQKAEEVNPDSRVPEIIFWHIPSTAYKVVAPKFGIPKPCVGSINKETVAAQEVETGMMDLLVNRTSVKAIFVGHNHGLDWCCPYEKLWLCYARHTGYGGYGDWPRGARILEITQTPFSLQSWIRMEDGNVHSEVVLS

SEQ ID NO: 14321 - protein, 277 aa, Glycine max
MIANASLYWDQATAPARNRGIPWASVFGNHDDAAFEWPLKWFSAPGIPPIHCPQNTTSYSGEEECSFKGTGRLNLMTNEIKHNGSFSSYGPRNLWPSVSNYVLQVSSPNDPQTPVAFLYFLDSGGGSYPEVISSGQVEWFRQKAEEVNPDSRVPEIIFWHIPSTAYKVVAPKFGIPKPCVGSINKETVAAQEVETGMMDLLVNRTSVKAIFVGHNHGLDWCCPYEKLWLCYARHTGYGGYGDWPRGARILEITQTPFSLQSWIRMEDGNVHSEVVLS

SEQ ID NO: 14322 - DNA, 1321 bp, Glycine max
agagtagaagcaattagtagagtgtcataaaaagctgtaggctttccttcaatgggtgctcctaagcagaaatggactgcggaagaagaagcggcgctgaaagctggagtactcaaacatggggcaggaaaatggcgcaccatacttacagatcctgagttcagtgccatcttgcgtatgcgttcgaatgtggatctcaaggataaatggaggaatataaatgtgacagcgatatggggatcccggcagaaggcaaagcttgctcttaaaaggaacctaccagcccccaaaattgataataaccatatggccttgagtaccatagttcgaaatgatgaagttcttgatactaagcccatagcagtttctggtggaccattgcaatcccccaatttgaaagaacaaatatcaaggttggtggataatcatatattagaggccattgtcaatatgaaggagcagaagggttctgacaaggttgccattgcttctttcatagagaaaaatatcggtcaccacctaatctcagtaaattgctgtcaaccaaactgaagcatatggtggcaagtggcaaaatagtcaagcataagtacagaattgcgccaagttcaactgtctctgagaaaagaagatgctcttcattggtacttttggaagagaagcccaaagatccttcagaagtacataagaatgatgatgtcaacatcctttcaaaatcccaaattgatgcagagatttcgaaagtgaagggcttgacagctcaagaggcagctgctgcagctgcaaaagcagttgcagaggcagaggctgcaattgcacaggctgaggcagcagctagggaggctgaggctgcagaagctgaggctgaggctgctcaagtgtttgcaaaagcagcaatgaaggcgctaaaatgcaaaatgcttcatatttgatggtgtggacttacacatgctcatcatcagcagagttggcttgagatgatagttctgctgctgtgcttcctgccagtttttttcgtaactgtacataattttcggcttgtaaatctggaatatgcaggatgattcatgaaatattctgtcaggaatcaataacagcttttttttttttcaattcatttttattttaaccttttcttataaaggaagacaatgaggggaaagctacaaagcagtaacggaagagtggaaatagcgatgtttttttgtaatggaataattgacatccgcgtagagtaaatgaaggaaacaatttttagtgttcaaatagcaatatggattgtcattgacatgcagatcatatattcaaggatgcttgttct

SEQ ID NO: 14323 - protein, 166 aa, Glycine max
MGAPKQKWTAEEEAALKAGVLKHGAGKWRTILTDPEFSAILRMRSNVDLKDKWRNINVTAIWGSRQKAKLALKRNLPAPKIDNNHMALSTIVRNDEVLDTKPIAVSGGPLQSPNLKEQISRLVDNHILEAIVNMKEQKGSDKVAIASFIEKNIGHHLISVNCCQPN

SEQ ID NO: 14324 - protein, 124 aa, Glycine max
MVASGKIVKHKYRIAPSSTVSEKRRCSSLVLLEEKPKDPSEVHKNDDVNILSKSQIDAEISKVKGLTAQEAAAAAAKAVAEAEAAIAQAEAAAREAEAAEAEAEAAQVFAKAAMKALKCKMLHI

SEQ ID NO: 14325 - protein, 124 aa, Glycine max
MRSNVDLKDKWRNINVTAIWGSRQKAKLALKRNLPAPKIDNNHMALSTIVRNDEVLDTKPIAVSGGPLQSPNLKEQISRLVDNHILEAIVNMKEQKGSDKVAIASFIEKNIGHHLISVNCCQPN

SEQ ID NO: 14326 - DNA, 1030 bp, Glycine max
gattgaaaatcacgaaaatgatgtcaggaaattacacctccatcgatagccaaaaggtttcaggatctgtacctgctgttgatcctccacccttccaattctcagattcaaatcttcagacatttcctccatctggagcacagggcaagattggtggtggctcgagacatccacgtgatgttgatgatacgttttcaaaaccagtgtctggttctgatgaaccccagcagcagagtggttggtttaaggctttctcacttgcttcttacaaaccatactttgatgttgacactatagatgttctagacaggattaaagactcactctatccattcaatggaacattcaatgaaaaaactgcttcccaccctgatttgtatggaccgttctggatttgcaccacattaatatttgtagcagcatctattggcacatttgtgacatacatagctcacaaactgaaggaccaggaatggaactatgacataaatctggtgacttggtctgccggcttgttctatggttatgtcaccattgttcctctttgtttgtatgtaatcctcaagtacttctctgtaccatcgggctttgtccaactactctgtctctatggatattccttgtttgtctttattccagcactgtgtatgtctgttgtgccattggagatattcagatggatggttgctggtgtggctgggttcatgtcagcaacttttgtggcactaaacctccgagcacatattatgtcagcaggtgaaagatgggttttgattgttgctagcatttttgtattgcagttggctctagctgtcgcattaaaggtctgcctcttcacagtaacagtatgagagtaaagtagtattatcatcattcagcatcaatgaattgtagataacgaagagagaactttttgctgttttaaatttagttatataatttgtaggtgaaatgcggttatcagattaaactgtcatttaattcattcatggcgatatagaggcaaataaaaatagtttgtacgttggat

SEQ ID NO: 14327 - protein, 282 aa, Glycine max
LKITKMMSGNYTSIDSQKVSGSVPAVDPPPFQFSDSNLQTFPPSGAQGKIGGGSRHPRDVDDTFSKPVSGSDEPQQQSGWFKAFSLASYKPYFDVDTIDVLDRIKDSLYPFNGTFNEKTASHPDLYGPFWICTTLIFVAASIGTFVTYIAHKLKDQEWNYDINLVTWSAGLFYGYVTIVPLCLYVILKYFSVPSGFVQLLCLYGYSLFVFIPALCMSVVPLEIFRWMVAGVAGFMSATFVALNLRAHIMSAGERWVLIVASIFVLQLALAVALKVCLFTVTV

SEQ ID NO: 14328 - protein, 277 aa, Glycine max
MMSGNYTSIDSQKVSGSVPAVDPPPFQFSDSNLQTFPPSGAQGKIGGGSRHPRDVDDTFSKPVSGSDEPQQQSGWFKAFSLASYKPYFDVDTIDVLDRIKDSLYPFNGTFNEKTASHPDLYGPFWICTTLIFVAASIGTFVTYIAHKLKDQEWNYDINLVTWSAGLFYGYVTIVPLCLYVILKYFSVPSGFVQLLCLYGYSLFVFIPALCMSVVPLEIFRWMVAGVAGFMSATFVALNLRAHIMSAGERWVLIVASIFVLQLALAVALKVCLFTVTV

SEQ ID NO: 14329 - protein, 276 aa, Glycine max
MSGNYTSIDSQKVSGSVPAVDPPPFQFSDSNLQTFPPSGAQGKIGGGSRHPRDVDDTFSKPVSGSDEPQQQSGWFKAFSLASYKPYFDVDTIDVLDRIKDSLYPFNGTFNEKTASHPDLYGPFWICTTLIFVAASIGTFVTYIAHKLKDQEWNYDINLVTWSAGLFYGYVTIVPLCLYVILKYFSVPSGFVQLLCLYGYSLFVFIPALCMSVVPLEIFRWMVAGVAGFMSATFVALNLRAHIMSAGERWVLIVASIFVLQLALAVALKVCLFTVTV

SEQ ID NO: 14330 - DNA, 1242 bp, Glycine max
  misc_feature (508)..(508): n is a, c, g, or t
atgagaatagacccaccccttcacattcgagacccctctctgactcttcctcatcataacaataaactcaaaaggtgcatgtgtacctaaaaagaggagaaacaaaattgaaacagtttgtgtgaatttgtgtgacaaattagagatatggaaggaattaatgtgtgcaagaagagttcaaagttaggaaagaaagatgacctctatcatgttattcataaggtgccttatggagatagcccttatgtcaaagccaagcatgctcagttggttgataaggaccctgaagcagctatagtattgttttggaaggcaataaatgctggggataaagtggacagtgccctgaaggacatggctgttgtgatgaagcagttagatagatctgaagaagcaattgaagccatcaaatcttttagaggcctttgttccaaacactcacaagagtcacttgataatgttcttcttgacctttacaagaagtgtggaaaaatagaggagcaaattnaattgttaaagagaaagctaagattaatttaccaaggagaggcctttaatggaaggaccacgaggactgctcgctctcatggcaagaagttccaagtctccatcaagcaagaaactgcaagattattgggaaacttgggttgggcctacatgcaaaaggaaaactacatgatggctgaggttgtgttcaagaaagcacagatggtagatgctgatgccaacaaggcttgcaacttgggcttatgcctcatgagacaatgtcgttatgaggaagcctattacattctagaagaagtgttacagggaaaacatcaagggtctgatgaaatcaaatcaagaaaaagagctgaggaattgcttgaagagttgaatgcaaatctcccccaacctgagtttatggctgatttggaccttgacgatgattttgtgaaagggatagatgacatgctagatgcatggaacacaaatagatcaagaaggcttccaatctttgaggaaatctcttcctttagagatcaattggcatgttaataacttgtccttatcttgtagtattgtgtattgctcttaggtttaggctcctgcaaatagccccttaatttcttctctagttgcctgttcttcctctaccctttttcttcctaaaatggtgagggggaaaaaaggataaggtttgcttgtatcttgtaatttaaataataaatagcaatcaataaataaaaatataatcagtcg

SEQ ID NO: 14331 - protein, 296 aa, Glycine max
  misc_feature (121)..(121): Xaa can be any naturally occurring amino acid
MEGINVCKKSSKLGKKDDLYHVIHKVPYGDSPYVKAKHAQLVDKDPEAAIVLFWKAINAGDKVDSALKDMAVVMKQLDRSEEAIEAIKSFRGLCSKHSQESLDNVLLDLYKKCGKIEEQIXLLKRKLRLIYQGEAFNGRTTRTARSHGKKFQVSIKQETARLLGNLGWAYMQKENYMMAEVVFKKAQMVDADANKACNLGLCLMRQCRYEEAYYILEEVLQGKHQGSDEIKSRKRAEELLEELNANLPQPEFMADLDLDDDFVKGIDDMLDAWNTNRSRRLPIFEEISSFRDQLAC

SEQ ID NO: 14332 - protein, 227 aa, Glycine max
  misc_feature (52)..(52): Xaa can be any naturally occurring amino acid
MAVVMKQLDRSEEAIEAIKSFRGLCSKHSQESLDNVLLDLYKKCGKIEEQIXLLKRKLRLIYQGEAFNGRTTRTARSHGKKFQVSIKQETARLLGNLGWAYMQKENYMMAEVVFKKAQMVDADANKACNLGLCLMRQCRYEEAYYILEEVLQGKHQGSDEIKSRKRAEELLEELNANLPQPEFMADLDLDDDFVKGIDDMLDAWNTNRSRRLPIFEEISSFRDQLAC

SEQ ID NO: 14333 - protein, 223 aa, Glycine max
  misc_feature (48)..(48): Xaa can be any naturally occurring amino acid
MKQLDRSEEAIEAIKSFRGLCSKHSQESLDNVLLDLYKKCGKIEEQIXLLKRKLRLIYQGEAFNGRTTRTARSHGKKFQVSIKQETARLLGNLGWAYMQKENYMMAEVVFKKAQMVDADANKACNLGLCLMRQCRYEEAYYILEEVLQGKHQGSDEIKSRKRAEELLEELNANLPQPEFMADLDLDDDFVKGIDDMLDAWNTNRSRRLPIFEEISSFRDQLAC

SEQ ID NO: 14334 - DNA, 1237 bp, Glycine max
aacacacgtcatagaaatggagatggactacatcaacacttcccacccaaattttattggtggaagtaaggcaatagaagctgcagtgcaacaaaccaggtcttctagagttggtttaccagtttctagggtgaaggatgcactggaatctgataagggaccagctactgagagaagtgggaagtctcgatctattcttgcaagacatgcaaatggagtagtggctgatcagggtgttcgtgctacatcagatgttgaaaaagtagtgacctctggaaacacaggtggatcaagttgggggatctcatccattttcggtggaggtgataaccgtgtgtctgtgaaggaaatgacagctagtaaaccacatactactgaaccaatgcataatgtgcagtcattctctacaattcatttgagagagcccccttctgtcttgagaccattggagagcaattcagagaccgaagctgttgaaatcacagtaacaaagttgcttttgaaatcatactatgacattgtcaggaaaaatgttgaggatcttgtccccaaagcaattatgcacttcttggtaaataacacaaagagagagcttcacaatgtcttcattgaaaaactatacagagaggatctgtttgaagagatgttgcaagaacctgaagaggtagccaagaaaagaaaaaactgtcgagaactgctccgagcttatcaacaggcttttaaagacttgaacgaactgcctcttgaagctgaaacagttgaaaggggatacagtttgcctgaaattactaccggcttacctaaaattcgtggattgccaacttcatctatgtattctactagcagttcgggagactattatgaagcttctcccaagaacacaaagtctaaaaataaaaagtcttcacattctggggaactccaatctccatttcaggattcaaacggaaatggagggccatacacgtcaggttatccaatggctggtgaatgaactcgctgattgtgcttgttagtccaagaaatttgactcagcgtttaattatttgtttatgcttatgcaatttttgaggtttgcaactcctcctggagctggactgcattcagttactatttttcccattaaaatggtcctgagtgttggtgggtgctttctttatctaagttcccttttgttcgcatatagcgttatttaccaaggctccggaaagaataataggagcagatgatttttcag

SEQ ID NO: 14335 - protein, 330 aa, Glycine max
THVIEMEMDYINTSHPNFIGGSKAIEAAVQQTRSSRVGLPVSRVKDALESDKGPATERSGKSRSILARHANGVVADQGVRATSDVEKVVTSGNTGGSSWGISSIFGGGDNRVSVKEMTASKPHTTEPMHNVQSFSTIHLREPPSVLRPLESNSETEAVEITVTKLLLKSYYDIVRKNVEDLVPKAIMHFLVNNTKRELHNVFIEKLYREDLFEEMLQEPEEVAKKRKNCRELLRAYQQAFKDLNELPLEAETVERGYSLPEITTGLPKIRGLPTSSMYSTSSSGDYYEASPKNTKSKNKKSSHSGELQSPFQDSNGNGGPYTSGYPMAGE

SEQ ID NO: 14336 - protein, 325 aa, Glycine max
MEMDYINTSHPNFIGGSKAIEAAVQQTRSSRVGLPVSRVKDALESDKGPATERSGKSRSILARHANGVVADQGVRATSDVEKVVTSGNTGGSSWGISSIFGGGDNRVSVKEMTASKPHTTEPMHNVQSFSTIHLREPPSVLRPLESNSETEAVEITVTKLLLKSYYDIVRKNVEDLVPKAIMHFLVNNTKRELHNVFIEKLYREDLFEEMLQEPEEVAKKRKNCRELLRAYQQAFKDLNELPLEAETVERGYSLPEITTGLPKIRGLPTSSMYSTSSSGDYYEASPKNTKSKNKKSSHSGELQSPFQDSNGNGGPYTSGYPMAGE

SEQ ID NO: 14337 - protein, 323 aa, Glycine max
MDYINTSHPNFIGGSKAIEAAVQQTRSSRVGLPVSRVKDALESDKGPATERSGKSRSILARHANGVVADQGVRATSDVEKVVTSGNTGGSSWGISSIFGGGDNRVSVKEMTASKPHTTEPMHNVQSFSTIHLREPPSVLRPLESNSETEAVEITVTKLLLKSYYDIVRKNVEDLVPKAIMHFLVNNTKRELHNVFIEKLYREDLFEEMLQEPEEVAKKRKNCRELLRAYQQAFKDLNELPLEAETVERGYSLPEITTGLPKIRGLPTSSMYSTSSSGDYYEASPKNTKSKNKKSSHSGELQSPFQDSNGNGGPYTSGYPMAGE

SEQ ID NO: 14338 - DNA, 724 bp, Glycine max
cagctacgtaggccccccccccccgattttgttgtttgctgatctactgcagggagatgatccagcataggccttacacacaaaaagtggatgtatatagctttgggattgttctatgggaactcattaccggtatgcttccatttcagaacatgacagcagtacaggctgcatttgcagttgtcaacaaaaatgttcgtccaatcatacccaacgattgcctacctgttctccgtgacatcatgacaagatgctgggatcccaaccctgatgttaggccaccatttgctgaaattgtaggaatgcttgagaatgcagagaatgagatcatgacaacagttcggaaggcccggttcaggtgttgcatgactcaaccaatgactgctgactgatcctgtgaaagcaaatgcaaatgcaaatgcaaatgcaaaaaagtcataaaaacatagactggaatatttgggggcaagatgaaactctggtagtgaaggggtgactatattatagctttgtgtatctgtgtgttttatttatttcttctgaagaaaaaaatgaaaatcttatctggagaccttttgcttattcggtttctgtttactgaatgtctgttctgaattagtaaaaagaagatgctgtatgtaatacatgcatgttttacagttatgtatagcttgagttctgaagtcagataaaatgagattatgggcgaaaacttttgctttgt

SEQ ID NO: 14339 - protein, 111 aa, Glycine max
MIQHRPYTQKVDVYSFGIVLWELITGMLPFQNMTAVQAAFAVVNKNVRPIIPNDCLPVLRDIMTRCWDPNPDVRPPFAEIVGMLENAENEIMTTVRKARFRCCMTQPMTAD

SEQ ID NO: 14340 - protein, 85 aa, Glycine max
MLPFQNMTAVQAAFAVVNKNVRPIIPNDCLPVLRDIMTRCWDPNPDVRPPFAEIVGMLENAENEIMTTVRKARFRCCMTQPMTAD

SEQ ID NO: 14341 - protein, 79 aa, Glycine max
MTAVQAAFAVVNKNVRPIIPNDCLPVLRDIMTRCWDPNPDVRPPFAEIVGMLENAENEIMTTVRKARFRCCMTQPMTAD

SEQ ID NO: 14342 - DNA, 1807 bp, Glycine max
gaagggatcgtcttctgcagaaatttgcgccatcgtcgagagaagcgtgagagacttctcgtttatgatgagagctaagatagtttagttgtcaagtcataaatcagtatcatcactttaaatttcattagaagctgtcaaaatgtcacggaagggtttgatggagcaagacctgagtaagttggatgtaacaaagttgcatccactttctccagaagtcatatctcggcaggctactattaatatcggcactataggtcacgtggcccatggcaagtcaacagttgtgaaagcaatatcaggtgtccagactgtgcgtttcaaaaatgagttggagcgtaacattacaatcaagcttggctatgcaaatgcaaaaatatacaagtgtgaagatgaacgatgtccaaggcctatgtgctacaaggcttatggaagtggaaaggaagatagtcctatgtgtgacgtgccagggtttgaaaacagcaagatgaaattgctaaggcatgtttcatttgtggattgtccgggacatgatattcttatggctacaatgcttaatggagcagcaatcatggatggagcgttgctactcatagctgctaatgaaagctgcccacaaccacaaacatctgagcatttagctgctgtagaaatcatgcgtctacagcacataataatccttcagaacaaggtagacttgattcaagaaaatgtcgcaatcaatcagcatgaggcaatttcaaagtttatacaaggaactgttgctgatggtgcaccagtagtacctatttcagcacagttgaagtataatattgatgttgtgtgcgaatatattgtgaagaagatcccaatccctgaaaggaactttgtttctccacctaacatgattgttattcggtcatttgatgtcaataaacctggttatgaggttgatgaaattaaaggaggtgtagctggtggaagcattctgaggggtgttttgaaggtcaatcaattcattgaagttcgtcctggcattgttgttaaagacgagagtggaaatatcagatgcacacccatatactcaagaatagtttcattgtacgctgaacaaaatgagcttcaatttgctgtgcctggaggcctaattggtgttgggacaacaatggatcccactttgacacgcgctgataggttggtaggtcaagttttaggagaggttggatcactacctgaggtttttgttgaactggaggtaaactttttcctgcttcgacgacttcttggtgtccgaacaaaagggtctgagagacaggggaaggtatccaagctggccaaaggagagatgctaatgttgaacattggatcaatgtcgacgggggctagagtagttgctgtgaagaatgacttggcgaagttgcaacttacttcccctgtgtgcactagcaagggtgagaagattgcacttagtcgacgtgttgagaagcattggcgtcttatcgggtggggacaaatccaagctggaatcactcttgatgtccctcccgccccccatctgagttgaacactgatcacaagaaacaccagcagctataaaaaactgagatgaatttagatatgtgggaagggaggcaattgttgggaaccatttttgtgaggtggagaagaaaacgttttttgattgttgtcttctattttgttttcacatcgttattggtttattttcccaactgtacctcttattgaagttgtatcctatgctgtgattgaattcaggctgggagtgagaatctcagcaagcacttgtttcaatctatggtatcttatc

SEQ ID NO: 14343 - protein, 466 aa, Glycine max
MSRKGLMEQDLSKLDVTKLHPLSPEVISRQATINIGTIGHVAHGKSTVVKAISGVQTVRFKNELERNITIKLGYANAKIYKCEDERCPRPMCYKAYGSGKEDSPMCDVPGFENSKMKLLRHVSFVDCPGHDILMATMLNGAAIMDGALLLIAANESCPQPQTSEHLAAVEIMRLQHIIILQNKVDLIQENVAINQHEAISKFIQGTVADGAPVVPISAQLKYNIDVVCEYIVKKIPIPERNFVSPPNMIVIRSFDVNKPGYEVDEIKGGVAGGSILRGVLKVNQFIEVRPGIVVKDESGNIRCTPIYSRIVSLYAEQNELQFAVPGGLIGVGTTMDPTLTRADRLVGQVLGEVGSLPEVFVELEVNFFLLRRLLGVRTKGSERQGKVSKLAKGEMLMLNIGSMSTGARVVAVKNDLAKLQLTSPVCTSKGEKIALSRRVEKHWRLIGWGQIQAGITLDVPPAPHLS

SEQ ID NO: 14344 - protein, 460 aa, Glycine max
MEQDLSKLDVTKLHPLSPEVISRQATINIGTIGHVAHGKSTVVKAISGVQTVRFKNELERNITIKLGYANAKIYKCEDERCPRPMCYKAYGSGKEDSPMCDVPGFENSKMKLLRHVSFVDCPGHDILMATMLNGAAIMDGALLLIAANESCPQPQTSEHLAAVEIMRLQHIIILQNKVDLIQENVAINQHEAISKFIQGTVADGAPVVPISAQLKYNIDVVCEYIVKKIPIPERNFVSPPNMIVIRSFDVNKPGYEVDEIKGGVAGGSILRGVLKVNQFIEVRPGIVVKDESGNIRCTPIYSRIVSLYAEQNELQFAVPGGLIGVGTTMDPTLTRADRLVGQVLGEVGSLPEVFVELEVNFFLLRRLLGVRTKGSERQGKVSKLAKGEMLMLNIGSMSTGARVVAVKNDLAKLQLTSPVCTSKGEKIALSRRVEKHWRLIGWGQIQAGITLDVPPAPHLS

SEQ ID NO: 14345 - protein, 376 aa, Glycine max
MCYKAYGSGKEDSPMCDVPGFENSKMKLLRHVSFVDCPGHDILMATMLNGAAIMDGALLLIAANESCPQPQTSEHLAAVEIMRLQHIIILQNKVDLIQENVAINQHEAISKFIQGTVADGAPVVPISAQLKYNIDVVCEYIVKKIPIPERNFVSPPNMIVIRSFDVNKPGYEVDEIKGGVAGGSILRGVLKVNQFIEVRPGIVVKDESGNIRCTPIYSRIVSLYAEQNELQFAVPGGLIGVGTTMDPTLTRADRLVGQVLGEVGSLPEVFVELEVNFFLLRRLLGVRTKGSERQGKVSKLAKGEMLMLNIGSMSTGARVVAVKNDLAKLQLTSPVCTSKGEKIALSRRVEKHWRLIGWGQIQAGITLDVPPAPHLS

SEQ ID NO: 14346 - DNA, 837 bp, Glycine max
acagaaagactacttgggatggactggtactatggatgtgaaagtagtgattttcttgttcccaaagatcaagaagatttattggaaaggcatccttcaccagaaaattggtcagaatggggaataaatgcacctgaaggctttaattcaccccaggagtatttgatcatggacacagatgaaacagaagtagaattcaatttcattgatgaaagtttcaaaaatgaaattgagtttgacccttgtctgtatgataaagatcagtctagcagttcaagtgcatgtggaggattgcctgagcaatcgtttcaacaaacggaactttcgtgtgatcaccagcttcaagaccaatcaactttagaacagaaggatgacattttcttggattctgtacttgaagattttccatgtgttgaaagcctacgcaaatctttcttttaccctgaaaaccagtgcagcaacacaactggtggagtgcagaaagatattgcagcttcagggtttgttccatgtaactcagactccaaggattgcctggatatagagttcaatgaagatgacatcatggttgagcagttatctcttgaggaatttacactgcagggttttgagatgttaattgcacagttcactgagaagactcgtatttgtttccgagatgccctttaccgtcttgctagaaatacaaaacaacatgtagtagaggacctggatggagatcttaacatgcatcaggaaatgccagactcagtttacaatgataccatgaggtctgaggacagtacaccaatggaatcagagaccaacagtattgacagagcagttgcaaatctcatg

SEQ ID NO: 14347 - protein, 279 aa, Glycine max
TERLLGMDWYYGCESSDFLVPKDQEDLLERHPSPENWSEWGINAPEGFNSPQEYLIMDTDETEVEFNFIDESFKNEIEFDPCLYDKDQSSSSSACGGLPEQSFQQTELSCDHQLQDQSTLEQKDDIFLDSVLEDFPCVESLRKSFFYPENQCSNTTGGVQKDIAASGFVPCNSDSKDCLDIEFNEDDIMVEQLSLEEFTLQGFEMLIAQFTEKTRICFRDALYRLARNTKQHVVEDLDGDLNMHQEMPDSVYNDTMRSEDSTPMESETNSIDRAVANLM

SEQ ID NO: 14348 - protein, 273 aa, Glycine max
MDWYYGCESSDFLVPKDQEDLLERHPSPENWSEWGINAPEGFNSPQEYLIMDTDETEVEFNFIDESFKNEIEFDPCLYDKDQSSSSSACGGLPEQSFQQTELSCDHQLQDQSTLEQKDDIFLDSVLEDFPCVESLRKSFFYPENQCSNTTGGVQKDIAASGFVPCNSDSKDCLDIEFNEDDIMVEQLSLEEFTLQGFEMLIAQFTEKTRICFRDALYRLARNTKQHVVEDLDGDLNMHQEMPDSVYNDTMRSEDSTPMESETNSIDRAVANLM

SEQ ID NO: 14349 - protein, 223 aa, Glycine max
MDTDETEVEFNFIDESFKNEIEFDPCLYDKDQSSSSSACGGLPEQSFQQTELSCDHQLQDQSTLEQKDDIFLDSVLEDFPCVESLRKSFFYPENQCSNTTGGVQKDIAASGFVPCNSDSKDCLDIEFNEDDIMVEQLSLEEFTLQGFEMLIAQFTEKTRICFRDALYRLARNTKQHVVEDLDGDLNMHQEMPDSVYNDTMRSEDSTPMESETNSIDRAVANLM

SEQ ID NO: 14350 - DNA, 1390 bp, Glycine max
aatgaataacaagttatggaaagatatctactccatcacctcgaacaggaaaagaggggaaacaagataatggagaggtgacagacaaggatgattatctctatttttgtttcctttattggctggtttgtctgagcttagctttgacccaaggtctgagataaggcaaagcgccttgaaagtcctgtttgaaaccttatgcaaccatggccacctcttttcactacctttatgggaaagagtatttgaatcagtcctatttccaatatttgattatgttcttcatgctattgatccttcagggagtagtacctcagaggtcaatgaagtagagactgatggtcagcttgatcaagatgcatggctttacgagacatgcacattagccctccaattggttgtagatctttttgtcaacttctataacaccatcaatccacttttaagaaaggtgttgatgctcctggtaagctttataaagcgccctcatcaaagcctggctggcattggtattgctgcatttgttcgtttgatgagtaatgctggggagctgttttctgataagaagtggttttgtcactaaaagaagcagcaaatgcaacactacctaacttttcattccttggcagtggaaactttgtgactgtcaatcatgagcatgcttcaatggctgaagatgacagggatcctgctgagtctggctcacatgataatttagaaagcccgaggactcaaaatctttatgcatatttatctgatgcaaagtgccgagcttctgttcagcttttattgatccaggcggtgttggagatctataacatgtaccgatctcgactttcagcaaaaaccatactagtcttgtttgaggctttgcatgatgtggcattacatgctcacaagattaacagcaatattattttacgttcaaagttacaagagtttggctctatgactcaaatgcaagaccctccactgttacgcctggagaatgcatgaatcctaccaactatgcctcacatttttacagaacctcactgtggacagacctcctagttatgaggaggttgaggtcgagacacatctcattcgattttgtatattgaagttgcaggttctggaaaagtatctgaatcttttcatggtagacagctgcattggttctcaccactcttcaagctatttgtaatttgggagatatatcttttgagaagaacctggctcattttttccatgtgattttgtgtttagatataccttccccgttcttctatattttagaagcctagagttaccaatccgaattgatctgtattaccaggaggtttaatgttgtatcttgtatgcttgattattttatcccaatttttttaaaagaattttgagtttttcc

SEQ ID NO: 14351 - protein, 109 aa, Glycine max
MAEDDRDPAESGSHDNLESPRTQNLYAYLSDAKCRASVQLLLIQAVLEIYNMYRSRLSAKTILVLFEALHDVALHAHKINSNIILRSKLQEFGSMTQMQDPPLLRLENA

SEQ ID NO: 14352 - protein, 65 aa, Glycine max
MHESYQLCLTFLQNLTVDRPPSYEEVEVETHLIRFCILKLQVLEKYLNLFMVDSCIGSHHSSSYL

SEQ ID NO: 14353 - protein, 58 aa, Glycine max
MYRSRLSAKTILVLFEALHDVALHAHKINSNIILRSKLQEFGSMTQMQDPPLLRLENA

SEQ ID NO: 14354 - DNA, 587 bp, Glycine max
gtcagctacgtaggcccccccccccccagaacaaagaaggaatgaaaattgtggctatggtgcggcagattggagcttcaatgctagtggttgggcttcatgatcagagttttctttacagcttggctatggtccatagcaacatagctaactactttaactgtagagtccttgccatcaatcagcctcctgcgtccccactgagtccaatggtaggagtccaaggaagttcagccaacatggacttttcacagatcgacatatctagattacaagttcctgaacgccctccaccaaaggtaaaatatcggatttgtcctgatccgactgcaattatctacagattaaggaggtcaaggagaagaagatgaaaggaaagatcaacacctcaaacatctctcgaagctgactgagttaattttgattaagaaaaaattattttaattaaaatggtccctgaaaatttgggatcatgatcttttttatttaacttttaaatttcttatatattcgcctgccataaatacataaaaaagtgcaattagctttgtatacatttattttgattgtatagagtatcttgtggt

SEQ ID NO: 14355 - protein, 122 aa, Glycine max
QLRRPPPPQNKEGMKIVAMVRQIGASMLVVGLHDQSFLYSLAMVHSNIANYFNCRVLAINQPPASPLSPMVGVQGSSANMDFSQIDISRLQVPERPPPKVKYRICPDPTAIIYRLRRSRRRR

SEQ ID NO: 14356 - protein, 109 aa, Glycine max
MKIVAMVRQIGASMLVVGLHDQSFLYSLAMVHSNIANYFNCRVLAINQPPASPLSPMVGVQGSSANMDFSQIDISRLQVPERPPPKVKYRICPDPTAIIYRLRRSRRRR

SEQ ID NO: 14357 - protein, 104 aa, Glycine max
MVRQIGASMLVVGLHDQSFLYSLAMVHSNIANYFNCRVLAINQPPASPLSPMVGVQGSSANMDFSQIDISRLQVPERPPPKVKYRICPDPTAIIYRLRRSRRRR

SEQ ID NO: 14358 - DNA, 1249 bp, Glycine max
attcactctcttctatcccttgcctcaccaccttaaatttgttatgcgcgaacacttgaaaaataatagtgaaaatgtggagtgctcccacagatgaacgatgtttggttgtttatctgaccttcttgaacaatatttgtggaagctgaatttctgttttcaaactggggtctgttgaaagatggactgtcttgagggagcacctgctggattcgttgatgacttgatggtcctctaaaggaagtccccaaactaatcatggctcccatctaatgtatcacccttggtagggactggtggaaatggtatcctataggtaaatacgctggaaagatcttaatgggctggtaatctgacttaccttcccacttctttcctctcccttgggtgtttccaacttcctgttgagagcatagcctgtgccacggttggctgttaaaattgaaattatctatttatttagtagtttctatattgccctacagagtttttagatattcaatcaaaactctgaagtaaataattgggtgttctaaggttgtggcataacatgactttctgatctggcaaaagattatccatccaggttcaattgagttcatgaatggtctggatttcactacatcaatgccctctggctatcaagaggctggagagcctgtattgttgatcagttaatttggaaagtgaatttcgaaaaagttaattatttttgcgtatgaatttactttggaaaagagagaactattttctgattattttttcgtcttccagcaggactctttaaggggtggtggtaaatggagcaatggagctgagatgactgaggaagaagcattagcagagcagcaaaggatgtttgcagaggcgcgtgctaggatgaacggtggagccattgcttccaagcagccagatgctgaccaaagtttagatagctaactttaggatcttcattgaagcatagacaaagcaccaccctgactcctgtctgtgcttccaatgagctcgatggtgtacaaaaaccattcactagtttgctggcccatgtggatgtgctcatttgtattctttcgataaatccatatttgtaagtcaatgtaattagtgagagatcatgaaaaccctcccgtttagcatttacttgtaattatttaatttacgtttttgtatcttctacatactaacaactcctagcttgattctgacagtagctactatgttagattgtaacaaattattaaatatgtag

SEQ ID NO: 14359 - protein, 39 aa, Glycine max
MTEEEALAEQQRMFAEARARMNGGAIASKQPDADQSLDS

SEQ ID NO: 14360 - protein, 31 aa, Glycine max
FTLFYPLPHHLKFVMREHLKNNSENVECSHR

SEQ ID NO: 14361 - DNA, 1422 bp, Glycine max
ccccccccaatggctttagaaacaatgttgaagcttctttaaataacagtgaattacggaaagattcagccattctaataaatgagatgggggtcaatggagattgttatgatggtagaaacaaggaagttaacccagttcttggcgaaagctcagaatgggaaattcaatgggaggatcttgatattggtgagcgtattggtattggttcttatggtgaagtttatcgtgctgaatgcaatggcactgaagttgctgtaaagaagtttctggaccaagatttctctggtgatgcgctagctcagttcaaatctgaagttgagatcatgataaggctgcggcatcctaatgtcgtgctcttcatgggagctattactcgctccccacatttctctatcttgacagagtttcttccaagaggcagtttatataggctattgcatcgtcccaatcttcgacttgatgagaagaaacggttgcgcatggctctagatgtggctaagggaatgaattacttgcacacgagccatcctcccattgtccaccgagatttaaagtctccaaatcttcttgttgacaggcattgggttgttaaggtctgtgattttggtctgtcacgaatgaagcaccatacatatttgtcatccaaatcctgtgctggaacgcctgagtggatggcaccagaagtcttgagaaatgagccagccaatgagaagtgtgatgtgtatagttttggtgtgatcttgtgggagttgactaccacaagaattccctggcaaggtttgaacccaatgcaggttgttggagctgttggattccaaaataaacggcttgaaattccagaagatgtcaatccagtagtggcacaaataatacgtgattgctggcaaacggagccacacttgcggccatcattctcacaactgatgtctcgtctttaccgacttcaacatttgattgtcccaaaaacaagctcaacacattaaacgaagttgtctataacatagctattgtaataatacttaaagctgttccttggttcaaagaaccagaacagctaaagtttttcttttcttttctttttttcgtccatcttgacatatcaagatattgctgaactggtaagtgtcaggtacattctaagttgggactggacacaacccattcagaaaagagcagggtccctccccaatatctgcataagtgcagtggaggtttagttggagtaggtacaaatgaagaatccccagagggaagaaaggcaagaaacataaaggaaaaaaaaaaagtacaaaattattctttgtctgtagaggtcttatttggaattgtaacatgcgatctctcaggttctcatgcaaatgtaaaaaagaaaaagaacaaaaaaaaaacagaaaaaaagaacattatgtatttcccgtt

SEQ ID NO: 14362 - protein, 327 aa, Glycine max
PPNGFRNNVEASLNNSELRKDSAILINEMGVNGDCYDGRNKEVNPVLGESSEWEIQWEDLDIGERIGIGSYGEVYRAECNGTEVAVKKFLDQDFSGDALAQFKSEVEIMIRLRHPNVVLFMGAITRSPHFSILTEFLPRGSLYRLLHRPNLRLDEKKRLRMALDVAKGMNYLHTSHPPIVHRDLKSPNLLVDRHWVVKVCDFGLSRMKHHTYLSSKSCAGTPEWMAPEVLRNEPANEKCDVYSFGVILWELTTTRIPWQGLNPMQVVGAVGFQNKRLEIPEDVNPVVAQIIRDCWQTEPHLRPSFSQLMSRLYRLQHLIVPKTSSTH

SEQ ID NO: 14363 - protein, 299 aa, Glycine max
MGVNGDCYDGRNKEVNPVLGESSEWEIQWEDLDIGERIGIGSYGEVYRAECNGTEVAVKKFLDQDFSGDALAQFKSEVEIMIRLRHPNVVLFMGAITRSPHFSILTEFLPRGSLYRLLHRPNLRLDEKKRLRMALDVAKGMNYLHTSHPPIVHRDLKSPNLLVDRHWVVKVCDFGLSRMKHHTYLSSKSCAGTPEWMAPEVLRNEPANEKCDVYSFGVILWELTTTRIPWQGLNPMQVVGAVGFQNKRLEIPEDVNPVVAQIIRDCWQTEPHLRPSFSQLMSRLYRLQHLIVPKTSSTH

SEQ ID NO: 14364 - protein, 219 aa, Glycine max
MIRLRHPNVVLFMGAITRSPHFSILTEFLPRGSLYRLLHRPNLRLDEKKRLRMALDVAKGMNYLHTSHPPIVHRDLKSPNLLVDRHWVVKVCDFGLSRMKHHTYLSSKSCAGTPEWMAPEVLRNEPANEKCDVYSFGVILWELTTTRIPWQGLNPMQVVGAVGFQNKRLEIPEDVNPVVAQIIRDCWQTEPHLRPSFSQLMSRLYRLQHLIVPKTSSTH

SEQ ID NO: 14365 - DNA, 1283 bp, Glycine max
aaaatcttctgcagcattgtcttatgttgaagcacaagcaaggatggatgatagtcgtttgatggatccaattactgctgatttgaggaatatgaatagtttagctaagaaaatgagattaaggcgtattgagagaggagctttgactcttgcatctgctgaagtcaaatttcagattgacacagagactcatgacccccttgatattggaatgtaccagatccgggaggccaatcaaatggtggaggagtttatgcttgctgctaatgtttccgttgcacaacaaattcttaatagttttccattggtctcattattaaggcgtcatccaacaccaactagagagatgcttgaacccttgttacagactgctgctgcagttggcttgcacttggatgtctcatcatcaaaagcgttggctgattctcttgaccatgctgtgggtgatgatccttacttcaataagttaatccgtatactggcaactaggtgcatgactcaggcagtttatttctgcagtggtgatcttagccctccagaatatcatcattatgggcttgcagctcctttgtatacccatttcacatcacctataagaagatatgcagatgtcattgtgcacaggctacttgctgcttctttaggaatatccaagttaccgtctgtatttcaagacagactccagctcactagtattgcagacaatttaaattatcggcacaggaatgcccagtatgctgggcgggcatctgtagagctacatactctaatttatttcaggaagaggcctacagacaccgaggctagaatagtgaaaataagatctaatggattttttgtgtttgttcccaaatatggcatagaaggacctgtatatttgacaaaagcagaaaagggaagtggagaatggtatgtagatgatcaacagcagaagattaaaaagatggacggtagcctttcatacagtgttttgcagacagtccaaattcacatggaggttgtggagcctcagccaaaccgaccaaaacttcagcttaccctcatctagagcatgaaaaaattgtcgaaggaaccaaacattgatggagatgttggctggagaatttttttgtagatggaacaaaagatttacggttgatgaggtaacttttagttagtccttttacaactatttacttttaaattgtgaagtgggacgtggaatttttatacatgtgatgctgtaagcaagtgtgaacagctcaggtaaaaaaaaaataaaattacgttagcttaaatgtgcc

SEQ ID NO: 14366 - protein, 348 aa, Glycine max
KSSAALSYVEAQARMDDSRLMDPITADLRNMNSLAKKMRLRRIERGALTLASAEVKFQIDTETHDPLDIGMYQIREANQMVEEFMLAANVSVAQQILNSFPLVSLLRRHPTPTREMLEPLLQTAAAVGLHLDVSSSKALADSLDHAVGDDPYFNKLIRILATRCMTQAVYFCSGDLSPPEYHHYGLAAPLYTHFTSPIRRYADVIVHRLLAASLGISKLPSVFQDRLQLTSIADNLNYRHRNAQYAGRASVELHTLIYFRKRPTDTEARIVKIRSNGFFVFVPKYGIEGPVYLTKAEKGSGEWYVDDQQQKIKKMDGSLSYSVLQTVQIHMEVVEPQPNRPKLQLTLI

SEQ ID NO: 14367 - protein, 334 aa, Glycine max
MDDSRLMDPITADLRNMNSLAKKMRLRRIERGALTLASAEVKFQIDTETHDPLDIGMYQIREANQMVEEFMLAANVSVAQQILNSFPLVSLLRRHPTPTREMLEPLLQTAAAVGLHLDVSSSKALADSLDHAVGDDPYFNKLIRILATRCMTQAVYFCSGDLSPPEYHHYGLAAPLYTHFTSPIRRYADVIVHRLLAASLGISKLPSVFQDRLQLTSIADNLNYRHRNAQYAGRASVELHTLIYFRKRPTDTEARIVKIRSNGFFVFVPKYGIEGPVYLTKAEKGSGEWYVDDQQQKIKKMDGSLSYSVLQTVQIHMEVVEPQPNRPKLQLTLI

SEQ ID NO: 14368 - protein, 328 aa, Glycine max
MDPITADLRNMNSLAKKMRLRRIERGALTLASAEVKFQIDTETHDPLDIGMYQIREANQMVEEFMLAANVSVAQQILNSFPLVSLLRRHPTPTREMLEPLLQTAAAVGLHLDVSSSKALADSLDHAVGDDPYFNKLIRILATRCMTQAVYFCSGDLSPPEYHHYGLAAPLYTHFTSPIRRYADVIVHRLLAASLGISKLPSVFQDRLQLTSIADNLNYRHRNAQYAGRASVELHTLIYFRKRPTDTEARIVKIRSNGFFVFVPKYGIEGPVYLTKAEKGSGEWYVDDQQQKIKKMDGSLSYSVLQTVQIHMEVVEPQPNRPKLQLTLI

SEQ ID NO: 14369 - DNA, 1324 bp, Glycine max
tttatacttctgatcatttctaattttgaattcttaattcatgcatgtactcacatgctttgaaagatctttttgttattaagaatacatcagagtcaatatttttatccttgactggtttcaattgatgtttacatgcaactgtttttgtttgcttgcttttatagcatttacataacggttttaattgatgtttacatgcaactgtttatgtttgcttatatagtatttacaacagttccttgcatttaacttcccaggttaatgccttcagggaaaggagagcacttgctttgacattgaatgataccaaaacggcagtgaacaaacttcatcgaatgctcaattttatagttggaattattatactggttatttggctcttgatattggaacttgccaccaccaaatttcttctctttgtgagctcacaggttgtcgtggttgcatttatatttggaaacacctgcaagaccatatttgaagcaattattttcttatttgtcatgcacccatttgatgtgggagatagatgtgaaattgatggggttcagatggttgtagaagaaatgaacatattgacaaccatatttctgagatttgataatcaaaaggtcatcatccctaacaatgtccttgctaccaaggccatatataactattaccggagtcctgacatgggagatgctatcgaattctgtgtacatatatctaccccagttgaaaagatttcactcattaaacacagaatacaaagttacattgataacaagaaggagcactggtatccttcacctttgattgtatacagggattatgaccaattaaacatggtgaggttggctatctggccaactcatagaatgaacttccaagacatgggagaaaggtttgtgaggagatcccttttgcttgaagagatgatcaagattttcagggagcttgacattaattaccggctcttgcccatggacattaatgtgagagccactcctaccacttctgatcggcttccacctagttggacatcagttccaactccaagttgagtagaagaaggaaattcataacctcatgtcatcttgtgtgtgtggaaaacccgcggcattaactgctaggaaatgctatattttagctggatagcatattgtaaagagagggtcttttgtttttagattagcttgatatgtactgaggttagtttgtagtagctatgaagccatgcctaggtttcccatgtagtagttttgttcaaatgattagagggttaatcgctacgtcttttatactataaccatattcagtataagatttctatatgtct

SEQ ID NO: 14370 - protein, 236 aa, Glycine max
MLNFIVGIIILVIWLLILELATTKFLLFVSSQVVVVAFIFGNTCKTIFEAIIFLFVMHPFDVGDRCEIDGVQMVVEEMNILTTIFLRFDNQKVIIPNNVLATKAIYNYYRSPDMGDAIEFCVHISTPVEKISLIKHRIQSYIDNKKEHWYPSPLIVYRDYDQLNMVRLAIWPTHRMNFQDMGERFVRRSLLLEEMIKIFRELDINYRLLPMDINVRATPTTSDRLPPSWTSVPTPS

SEQ ID NO: 14371 - protein, 180 aa, Glycine max
MHPFDVGDRCEIDGVQMVVEEMNILTTIFLRFDNQKVIIPNNVLATKAIYNYYRSPDMGDAIEFCVHISTPVEKISLIKHRIQSYIDNKKEHWYPSPLIVYRDYDQLNMVRLAIWPTHRMNFQDMGERFVRRSLLLEEMIKIFRELDINYRLLPMDINVRATPTTSDRLPPSWTSVPTPS

SEQ ID NO: 14372 - protein, 164 aa, Glycine max
MVVEEMNILTTIFLRFDNQKVIIPNNVLATKAIYNYYRSPDMGDAIEFCVHISTPVEKISLIKHRIQSYIDNKKEHWYPSPLIVYRDYDQLNMVRLAIWPTHRMNFQDMGERFVRRSLLLEEMIKIFRELDINYRLLPMDINVRATPTTSDRLPPSWTSVPTPS

SEQ ID NO: 14373 - DNA, 1212 bp, Glycine max
aaaaaaatgaattcatctacctcttccgggatagagtgtcaagctgccaaacggcagaaattagaaggcggtagcttgcacaaggttggtgatgtgaagcagcaagttaattttgtccacaaggcacctaagaaggttgcaactgttgatcaaaattctggacattccaagctgaagattactatccctagagagcctgacctagaaacggctcacagagcacaaaggattagacctaaaattgctgcagaggcagaagttgtgacagtggctgcccccatattcagagcacgcccgttaaacagaaaaattctaaatgctccttcgttgccacttcccaagaggagcactccacgattgccagaatttcaagaatttcatctcaagacacaagagagggccatgcagcatacatctgcgacttctacgtcttcacttcattgcaatgattctgataaggatttggacaaacatagagctgtttctgctcaagaaaatagaatcagggatttgagaaggccatctgccatgggtgctccaaagcatgatggattggattttgcacatagttttaaagctcgtcctcttaataagaagattctttcaagtaaaggagatattggtgttttccggaacagaaagcaggaaaccacagtgccaatggaatttaatttccatacggaaaagagggttcagcataacccaccaatcgaactctttagcaagatgtccctaacatccgaagtccagtcaaataatggatctcagttgaaactgcttcggcattccagagtgttcagagaggattcaaaagaaaatataagaagttcttttcatctggatgtgaagtgtataggaaacgcctttcgtatttgggggaaggcaaattcacagtgggagggaaggttgcgacagtgaagctggtactgtgttgacagcaaggaggagcttgggaattcgatgatcgcaatacagacaagggccaatgtgcaacatagctgagaaagtattttctctgccagagttgaacttccatggcaacatagctgaatctaacaggcgcctaacaacttttctcagatttttttttattggtacacagaatcttagaaaattactgttaggacagaagttagccgtctaaattctgcatcacttgtatcttgtacaactccccccgatcataatccaataataaaatcgttaataggc

SEQ ID NO: 14374 - protein, 305 aa, Glycine max
KKMNSSTSSGIECQAAKRQKLEGGSLHKVGDVKQQVNFVHKAPKKVATVDQNSGHSKLKITIPREPDLETAHRAQRIRPKIAAEAEVVTVAAPIFRARPLNRKILNAPSLPLPKRSTPRLPEFQEFHLKTQERAMQHTSATSTSSLHCNDSDKDLDKHRAVSAQENRIRDLRRPSAMGAPKHDGLDFAHSFKARPLNKKILSSKGDIGVFRNRKQETTVPMEFNFHTEKRVQHNPPIELFSKMSLTSEVQSNNGSQLKLLRHSRVFREDSKENIRSSFHLDVKCIGNAFRIWGKANSQWEGRLRQ

SEQ ID NO: 14375 - protein, 303 aa, Glycine max
MNSSTSSGIECQAAKRQKLEGGSLHKVGDVKQQVNFVHKAPKKVATVDQNSGHSKLKITIPREPDLETAHRAQRIRPKIAAEAEVVTVAAPIFRARPLNRKILNAPSLPLPKRSTPRLPEFQEFHLKTQERAMQHTSATSTSSLHCNDSDKDLDKHRAVSAQENRIRDLRRPSAMGAPKHDGLDFAHSFKARPLNKKILSSKGDIGVFRNRKQETTVPMEFNFHTEKRVQHNPPIELFSKMSLTSEVQSNNGSQLKLLRHSRVFREDSKENIRSSFHLDVKCIGNAFRIWGKANSQWEGRLRQ

SEQ ID NO: 14376 - protein, 171 aa, Glycine max
MQHTSATSTSSLHCNDSDKDLDKHRAVSAQENRIRDLRRPSAMGAPKHDGLDFAHSFKARPLNKKILSSKGDIGVFRNRKQETTVPMEFNFHTEKRVQHNPPIELFSKMSLTSEVQSNNGSQLKLLRHSRVFREDSKENIRSSFHLDVKCIGNAFRIWGKANSQWEGRLRQ

SEQ ID NO: 14377 - DNA, 1147 bp, Glycine max
cgtgtatgtgtatcagcctctcttctcctcttctattcttcactgcactcccacccctcttattattaatatcagtgcttggaaagaaaaggaagcaaaagaaaagagaagatccatagctaataagctaggttcagtagttagtgagtgatcgatatctggagatgggtcgaggcaagattgagataaagttgattgagaaccccaccaacaggcaagtcacttactccaagcgaaggaatggtatcttcaagaaagctcatgaactcagtgttctctgtgatgccaaggtttcacttatcatgttctctaaaaacaacaagatgcatgaatacattagccctggcctcacgacaaaaaggatcattgatcagtatcagaagactttgggggatattgatctgtggcgttctcactatgagaaaatgcttgaaaacttgaagaagctgatagatattaacaacaagctcagaagacagatcaggcataggataggtgagggtttggacatggacgacatgagcttccagcaactgcgcactcttgaagaggatttggtttcttccatagggaaaatacgagaacgaaagttccacgtgatcaaaacacggactgatacctgcaggaaaaaggttaaaagcctggagcagatgaatagagatctgctgtttgaacttaaggaaaagtgtgcgatccatccacaatttattttgcacgatgaaggagacgaggaatcagcagttgcactggccaacggcgcctccaccctgtatgcgttctgtcatcagcaccattctcatctgaaccttccctcccaccattctcacggagaagaaccctttaaaactgatgaccttcgccttgcttaattgagtgcaacaattaactagcaatgtaaattaactagctagcaagcaagcactaagcacttgttaattatgctttgtattatcctatattggacctgttaaacttaaacgcaacgttgcttccaacctctctagtctctatccagatcgagaattagctgaagcttatatatattatgtagtatttggcaagagtgtggtatgaaaaacagaaagactgtattttatttgttattataagtttacattgagtggttatgtaatattaattgcttggt

SEQ ID NO: 14378 - protein, 234 aa, Glycine max
MGRGKIEIKLIENPTNRQVTYSKRRNGIFKKAHELSVLCDAKVSLIMFSKNNKMHEYISPGLTTKRIIDQYQKTLGDIDLWRSHYEKMLENLKKLIDINNKLRRQIRHRIGEGLDMDDMSFQQLRTLEEDLVSSIGKIRERKFHVIKTRTDTCRKKVKSLEQMNRDLLFELKEKCAIHPQFILHDEGDEESAVALANGASTLYAFCHQHHSHLNLPSHHSHGEEPFKTDDLRLA

SEQ ID NO: 14379 - protein, 188 aa, Glycine max
MFSKNNKMHEYISPGLTTKRIIDQYQKTLGDIDLWRSHYEKMLENLKKLIDINNKLRRQIRHRIGEGLDMDDMSFQQLRTLEEDLVSSIGKIRERKFHVIKTRTDTCRKKVKSLEQMNRDLLFELKEKCAIHPQFILHDEGDEESAVALANGASTLYAFCHQHHSHLNLPSHHSHGEEPFKTDDLRLA

SEQ ID NO: 14380 - protein, 181 aa, Glycine max
MHEYISPGLTTKRIIDQYQKTLGDIDLWRSHYEKMLENLKKLIDINNKLRRQIRHRIGEGLDMDDMSFQQLRTLEEDLVSSIGKIRERKFHVIKTRTDTCRKKVKSLEQMNRDLLFELKEKCAIHPQFILHDEGDEESAVALANGASTLYAFCHQHHSHLNLPSHHSHGEEPFKTDDLRLA

SEQ ID NO: 14381 - DNA, 566 bp, Glycine max
aaaacccatcaaattctttctaactcttacgtctattttcccccctcttcctctctctctttctctaatggagttcctcactttactttatggtgctatggcattgtacttgtgtttcctgatctggaaactgtttgatcagagaagggaccaagagagttacatattggactaccaactttacaagccaagcgatgaaagaaagcttggaactgaactctgtgggaagatcatagggaggaacaagcaattgggtctgaacgagtacaagttcctcctcaaggccattgtcaactctggcattggtgaggaaacttatgccccaagaaacgtcatcgagggccgagagacgaatccaacattggatgatagtgtcacagaaatggaggagtttttccatgacagcattgccaaactcctcgaaaggtcagggatttccccctcacagatcgatgtgcttgtggtgaatgtgtccatgttcgctgtagttccttccttaacttcaagaatcattaaccactacaagatgagggaggacataaaggcttacaacctcactgggatgg

SEQ ID NO: 14382 - protein, 188 aa, Glycine max
KPIKFFLTLTSIFPPLPLSLSLMEFLTLLYGAMALYLCFLIWKLFDQRRDQESYILDYQLYKPSDERKLGTELCGKIIGRNKQLGLNEYKFLLKAIVNSGIGEETYAPRNVIEGRETNPTLDDSVTEMEEFFHDSIAKLLERSGISPSQIDVLVVNVSMFAVVPSLTSRIINHYKMREDIKAYNLTGM

SEQ ID NO: 14383 - protein, 166 aa, Glycine max
MEFLTLLYGAMALYLCFLIWKLFDQRRDQESYILDYQLYKPSDERKLGTELCGKIIGRNKQLGLNEYKFLLKAIVNSGIGEETYAPRNVIEGRETNPTLDDSVTEMEEFFHDSIAKLLERSGISPSQIDVLVVNVSMFAVVPSLTSRIINHYKMREDIKAYNLTGM

SEQ ID NO: 14384 - protein, 156 aa, Glycine max
MALYLCFLIWKLFDQRRDQESYILDYQLYKPSDERKLGTELCGKIIGRNKQLGLNEYKFLLKAIVNSGIGEETYAPRNVIEGRETNPTLDDSVTEMEEFFHDSIAKLLERSGISPSQIDVLVVNVSMFAVVPSLTSRIINHYKMREDIKAYNLTGM

SEQ ID NO: 14385 - DNA, 1193 bp, Glycine max
gattttcactctaccaaaggtacacacgttgagagagacaggttagttggatacaaaagtggcatcgctcgcagtttgatagggtgcgtgacaagtataaaagggacaacattgaagacaacgttatcatatccttctttgcttggaatggaacaagctgggaagcaaggaattatggtggcgtctcagagtcaaaaccccattgagcaaatccaagcgcgcttcaaggacttggaaactggattccgcctctggctctccaagcagtccctccccgtcgaggccgccgtcgtcaccaccaccagcgccgcccagggcgccgccatcggcgccttcatgggcaccctcaccgccgacgcctcctccaccttccccacccctcctcccaacgcctctctcaatccccaagccatggcgtctcttaaacaagcgcaggctctagctggaggtcctttaattcaggcgcgaaactttgctgtgatgacgggagtgaacgctgggatttcctgtgtcttgaaaaggataaggggaaaggaagatgtccagtctagcatggcggcagcttttggttcaggggccttgttttcattagtaagtggcatgggtggaccaaatcaagcaacaaatgcactcacttctggacttttctttgcacttgttcaaggtggacttttccagataggacaaaagttttctcaaccacctgctgaagatactcactatgctaaaacaagacacatgttgaacaatcttggccttcagagttacgaaaagaatttcaagaaaggcttgttaacagacaacactctgcctttactcacagacagtgctctcagagatgtgaggattcctcctggacctaggcttttgattcttgaccacatccagagggacgcggatttgaaagataagcgaggaagccgaaagtgactgatatgaatagtttgctggcttggaactttgaaagccattgaaaaatggatagtagaaagtttgtgttgcaaatgaattttgtcttttttgtttgttagctctgttccattgttgttgcagtgtacttgataaaatttggttaactaatcagttattttagttgtgccatgacacgtaaatggcttgaaagtaaattagggagcacgaatttgttaactctaaaataagaaaagttattgcttccttgtgtaggaattgtt

SEQ ID NO: 14386 - protein, 309 aa, Glycine max
DFHSTKGTHVERDRLVGYKSGIARSLIGCVTSIKGTTLKTTLSYPSLLGMEQAGKQGIMVASQSQNPIEQIQARFKDLETGFRLWLSKQSLPVEAAVVTTTSAAQGAAIGAFMGTLTADASSTFPTPPPNASLNPQAMASLKQAQALAGGPLIQARNFAVMTGVNAGISCVLKRIRGKEDVQSSMAAAFGSGALFSLVSGMGGPNQATNALTSGLFFALVQGGLFQIGQKFSQPPAEDTHYAKTRHMLNNLGLQSYEKNFKKGLLTDNTLPLLTDSALRDVRIPPGPRLLILDHIQRDADLKDKRGSRK

SEQ ID NO: 14387 - protein, 260 aa, Glycine max
MEQAGKQGIMVASQSQNPIEQIQARFKDLETGFRLWLSKQSLPVEAAVVTTTSAAQGAAIGAFMGTLTADASSTFPTPPPNASLNPQAMASLKQAQALAGGPLIQARNFAVMTGVNAGISCVLKRIRGKEDVQSSMAAAFGSGALFSLVSGMGGPNQATNALTSGLFFALVQGGLFQIGQKFSQPPAEDTHYAKTRHMLNNLGLQSYEKNFKKGLLTDNTLPLLTDSALRDVRIPPGPRLLILDHIQRDADLKDKRGSRK

SEQ ID NO: 14388 - protein, 251 aa, Glycine max
MVASQSQNPIEQIQARFKDLETGFRLWLSKQSLPVEAAVVTTTSAAQGAAIGAFMGTLTADASSTFPTPPPNASLNPQAMASLKQAQALAGGPLIQARNFAVMTGVNAGISCVLKRIRGKEDVQSSMAAAFGSGALFSLVSGMGGPNQATNALTSGLFFALVQGGLFQIGQKFSQPPAEDTHYAKTRHMLNNLGLQSYEKNFKKGLLTDNTLPLLTDSALRDVRIPPGPRLLILDHIQRDADLKDKRGSRK

SEQ ID NO: 14389 - DNA, 1304 bp, Glycine max
actaataattttatggctaaatgtaatgatttagtctttaacaatgtttgcatgtctatttattgtattacttttagttgctaattcttcagcatgaacaattaagattttccaaggataattctggtcacatattattaaaattacttactttgataggaataggctaataaataatgataataataataatccatcacatgggaaaggtgtattgaaaagatgctgttgaatttaccgatgaagttcctagttgggccaccttgtacaactaaatataatgcactatgtttctataaagattttgatatatggtgatcctatctaatttcgtatgatattaaactatcatcatctgatgcgatattacctgatatatctctggagacgatgggggcttattgtatactgagttactttacaggtgatgaatgaaggacctggacacatcccaatgcacaagattcctgaaaacatgcagaaacagttagaatggtgtagtgaagcgcctttttacactcttggtcctttaacaactgatattgcccccggctatgatcacatcacctctgcaattggtgctgccaatattggggcacttggtactgctcttctctgttatgtgactccaaaggaacatcttgggttgccaaaccgggatgacgtgaaggctggagttatagcctacaagatagcggctcatgctgctgatttagccaaaggtcatccatatgctcaagcctgggatgatgcattaagcaaggcaagatttgagttccgatggatggaccagtttgctttgtcattggatccgatgacagccatgtccttccatgacgaaaccctgccagcagatggtgcaaaagtggctcatttctgctcaatgtgtggccctaaattctgctctatgaagataacggaggatgtgaggaagtatgctgaggaacatggctatggaactgatgaagctttgcagcgtgggatggatgctatgagtgctgaatttcaagctgccaagaaaactatcagcggggagcaacatggtgaagctggcggagagatttacttgccagaagaatacgttagttccaagaggacttaaatggagcaaatcagttggaagaacttggagctagcttcccaactggcttatcagggtgtggagaagcattattaagccttaggaataggagagtaagtactgtttgtgaatgtctttggtttaagaactccgtcttatgtcaacttgtattctgttatacagttctcagcaataaactgctctggcaatctagtttcatgtg

SEQ ID NO: 14390 - protein, 224 aa, Glycine max
MNEGPGHIPMHKIPENMQKQLEWCSEAPFYTLGPLTTDIAPGYDHITSAIGAANIGALGTALLCYVTPKEHLGLPNRDDVKAGVIAYKIAAHAADLAKGHPYAQAWDDALSKARFEFRWMDQFALSLDPMTAMSFHDETLPADGAKVAHFCSMCGPKFCSMKITEDVRKYAEEHGYGTDEALQRGMDAMSAEFQAAKKTISGEQHGEAGGEIYLPEEYVSSKRT

SEQ ID NO: 14391 - protein, 215 aa, Glycine max
MHKIPENMQKQLEWCSEAPFYTLGPLTTDIAPGYDHITSAIGAANIGALGTALLCYVTPKEHLGLPNRDDVKAGVIAYKIAAHAADLAKGHPYAQAWDDALSKARFEFRWMDQFALSLDPMTAMSFHDETLPADGAKVAHFCSMCGPKFCSMKITEDVRKYAEEHGYGTDEALQRGMDAMSAEFQAAKKTISGEQHGEAGGEIYLPEEYVSSKRT

SEQ ID NO: 14392 - protein, 208 aa, Glycine max
MQKQLEWCSEAPFYTLGPLTTDIAPGYDHITSAIGAANIGALGTALLCYVTPKEHLGLPNRDDVKAGVIAYKIAAHAADLAKGHPYAQAWDDALSKARFEFRWMDQFALSLDPMTAMSFHDETLPADGAKVAHFCSMCGPKFCSMKITEDVRKYAEEHGYGTDEALQRGMDAMSAEFQAAKKTISGEQHGEAGGEIYLPEEYVSSKRT

SEQ ID NO: 14393 - DNA, 1219 bp, Glycine max
aaggtggagctaaaattaagagcaccggaaaaaaaggatcaattcatctgataaaaaaaatgaagttgcgaatggcgagaggggaagtttatctaagggtctcagcaatactggttttggtattaacagcatgtttggttgctttagatactcaaaccaaggttgtgttcttatctattgagaagaaggctacatgcagagacttgaacgctctcaagatcttggtgtatgttacatctgcgtctgctggttataatctgcttctattgtgcaaacactccatttggtctagaaaaaacttcaaagggtcttatctatgcatggcttggatttgtttcttgttggatcaggtaaattactatttcctaattatctattatgtatatgtttgtattaaaacgctttcctatgtgcatactttgatcaagatatcatcgtagcctgccactggagaagggaatactttactaaagcagattcagaatcttcaaagggtcatgttgtttattcaaggaaaagtctgaagtctgaacctaaatatggatcatacatggaattaaatttggtagagggtcaccactagctagttttaagttgtggtaatatatttgttcaatatataataccatcagaatctaattaaccagatgtattaaaacaaaaaagattctctgtttgaaatttgataattaatcatttgattaatatttggtttatgttaaaatttgtgaacatgtagatcgccgtgtacatgacatttgctgcaaacactgcagcaatgggagccgcgatgctagcaataactggatcagatgcctttcagtggctaaaggtatgtgacaaattcacaagattctgcgtccaaataggaggggctttgttatgcggctatgcagcgtccatcataatggctctaatatccactatctcagcctaccaagtgttcaggatgtactcgccaaagtggttcttgcgtttgaagaacatgtgatcattatctatcttttcagcaaggagcaaaaatatgaagaaaagctcgtcaaagggtagtatagttttgcctttgttctcaactgctattaggctgatgtattattttccttctcttttttacttgtgtgtttccccccgcctaaagtacttactctttgtccagtgaaagaaattaagcaaaaaagaaataacaaaaatagaatgaaaaaaaaattgtattattttt

SEQ ID NO: 14394 - protein, 145 aa, Glycine max
GGAKIKSTGKKGSIHLIKKMKLRMARGEVYLRVSAILVLVLTACLVALDTQTKVVFLSIEKKATCRDLNALKILVYVTSASAGYNLLLLCKHSIWSRKNFKGSYLCMAWICFLLDQVNYYFLIIYYVYVCIKTLSYVHTLIKISS

SEQ ID NO: 14395 - protein, 126 aa, Glycine max
MKLRMARGEVYLRVSAILVLVLTACLVALDTQTKVVFLSIEKKATCRDLNALKILVYVTSASAGYNLLLLCKHSIWSRKNFKGSYLCMAWICFLLDQVNYYFLIIYYVYVCIKTLSYVHTLIKISS

SEQ ID NO: 14396 - protein, 122 aa, Glycine max
MARGEVYLRVSAILVLVLTACLVALDTQTKVVFLSIEKKATCRDLNALKILVYVTSASAGYNLLLLCKHSIWSRKNFKGSYLCMAWICFLLDQVNYYFLIIYYVYVCIKTLSYVHTLIKISS

SEQ ID NO: 14397 - DNA, 1316 bp, Glycine max
attgttgaccaacactgattttgatgctaaaccaatggtcatgcttcttggtcaatattcaacaggaaaaactacatttataaaacatttgttaaaatgtgattatccaggagcacacgttggaccagaacctaccactgatagatttgttgttgtcatgtctggacctgatgagagaagtattcctggaaatactattgctgttgatgctgacatgccttttggtggcctgacaacatttggaggttcatttttatcaaagttccaatgctctcagatgccacaccctttgttagatgaagtaacatttgtggacactcctggtgtcctatctggagagaaacaaaggactcaaagaagctatgatttcactggtgttgtatcttggtttgctgcaaaatgtgatctcattcttctcctatttgatcctcataaactagacatcagtgatgagtttaagcgtgtaatcgcatgtctacgtggtaacgatgacaagatacgagtggttttgaacaaggcagaccaagttaatactcaacaacttatgagagtttatggagcattgatgtggtcactgggtaaagttctaaatactcctgaagttacacgtgtatacataggctcatttaatgataagcctatggatgaaggcttcgtcagtccattaggacaggatctctttgagaaggaacagaataatctgcttgctgatttgatggatattcccaagaaggcatgcgatcgtcggatcaatgaatttgtcaaacgtgcaagatctgctaaaattcatgcatatataattagtcaccttaagaaggagatgcctgctataatgggtaaagccaaggctcaacaaagacttcttgataatcttgaggaagaatttgcaaaggtccaaagggagtttcatctaccggccggtgattttcccaacgttgaacacttcagagaagttctaagtggttatagcattgacaaatttgagaaactaaagcccaaaatgattcaagcagtagatgacatgcttgggtatgaaataccagagctattgaagaaattcagaaatccttacgattaaaataaaaaatgttgtcatttttttatgtatgtttcaccaagtttgagatcttaatgtctaagttcattattaatggattgtggatggtttcaaaaaaaaaaaaaaaaaaaaaaaaaaaaaaaaaaaaaaaaaaaaaaaaaaaaaaaaaaaaaaaaaaaaaagaaaaaaaaaaaaaaaaaagatttcctgcaccccggggaatccacaatttctaaaggggccgccaccggggggaagc

SEQ ID NO: 14398 - protein, 358 aa, Glycine max
LLTNTDFDAKPMVMLLGQYSTGKTTFIKHLLKCDYPGAHVGPEPTTDRFVVVMSGPDERSIPGNTIAVDADMPFGGLTTFGGSFLSKFQCSQMPHPLLDEVTFVDTPGVLSGEKQRTQRSYDFTGVVSWFAAKCDLILLLFDPHKLDISDEFKRVIACLRGNDDKIRVVLNKADQVNTQQLMRVYGALMWSLGKVLNTPEVTRVYIGSFNDKPMDEGFVSPLGQDLFEKEQNNLLADLMDIPKKACDRRINEFVKRARSAKIHAYIISHLKKEMPAIMGKAKAQQRLLDNLEEEFAKVQREFHLPAGDFPNVEHFREVLSGYSIDKFEKLKPKMIQAVDDMLGYEIPELLKKFRNPYD

SEQ ID NO: 14399 - protein, 347 aa, Glycine max
MVMLLGQYSTGKTTFIKHLLKCDYPGAHVGPEPTTDRFVVVMSGPDERSIPGNTIAVDADMPFGGLTTFGGSFLSKFQCSQMPHPLLDEVTFVDTPGVLSGEKQRTQRSYDFTGVVSWFAAKCDLILLLFDPHKLDISDEFKRVIACLRGNDDKIRVVLNKADQVNTQQLMRVYGALMWSLGKVLNTPEVTRVYIGSFNDKPMDEGFVSPLGQDLFEKEQNNLLADLMDIPKKACDRRINEFVKRARSAKIHAYIISHLKKEMPAIMGKAKAQQRLLDNLEEEFAKVQREFHLPAGDFPNVEHFREVLSGYSIDKFEKLKPKMIQAVDDMLGYEIPELLKKFRNPYD

SEQ ID NO: 14400 - protein, 345 aa, Glycine max
MLLGQYSTGKTTFIKHLLKCDYPGAHVGPEPTTDRFVVVMSGPDERSIPGNTIAVDADMPFGGLTTFGGSFLSKFQCSQMPHPLLDEVTFVDTPGVLSGEKQRTQRSYDFTGVVSWFAAKCDLILLLFDPHKLDISDEFKRVIACLRGNDDKIRVVLNKADQVNTQQLMRVYGALMWSLGKVLNTPEVTRVYIGSFNDKPMDEGFVSPLGQDLFEKEQNNLLADLMDIPKKACDRRINEFVKRARSAKIHAYIISHLKKEMPAIMGKAKAQQRLLDNLEEEFAKVQREFHLPAGDFPNVEHFREVLSGYSIDKFEKLKPKMIQAVDDMLGYEIPELLKKFRNPYD

SEQ ID NO: 14401 - DNA, 609 bp, Glycine max
acgcatcacctttgaggagtttaaggcatttgctgacttgcgacaaagattggagccactgtcgatggctatctttgctcatgggaaagtgaatggattattgacaaaggaggatctaaaacgtgcaacacaacatgtttgtggtgtcaacttaactgatagagtggtagacatcattttccatgtgttcgacacaaatcaggatgggaacctgagctcggaagagttcttaagagcattagaaagaagagaaactgatattcgtcaaccaacaataccaggtccatggggttttttgtcttgctggttcagtggtaggaagtgttcacttaaacaggtggtgctctgatttggcccctacttgatcctcactgaatctgtcatccaccttcaattgtcatctcccggtacgtatgtcatctcctgttgcaggaggtaatcacgaagcagtgcctagctgatcggtaaaacgactttgttgtacatgtcgtctccgtgtccgaagcttgcctagcagtagcagctgtaattgtaagtagtgccagccctagggctgatccttgtggattctcatatgtcaatcaaaccccacacgatttaaatatatga

SEQ ID NO: 14402 - protein, 115 aa, Glycine max
RITFEEFKAFADLRQRLEPLSMAIFAHGKVNGLLTKEDLKRATQHVCGVNLTDRVVDIIFHVFDTNQDGNLSSEEFLRALERRETDIRQPTIPGPWGFLSCWFSGRKCSLKQVVL

SEQ ID NO: 14403 - protein, 94 aa, Glycine max
MAIFAHGKVNGLLTKEDLKRATQHVCGVNLTDRVVDIIFHVFDTNQDGNLSSEEFLRALERRETDIRQPTIPGPWGFLSCWFSGRKCSLKQVVL

SEQ ID NO: 14404 - DNA, 1121 bp, Glycine max
  misc_feature (1022)..(1022): n is a, c, g, or t
atcacagctgcaatcaacaagacttagaatgcgatgagcaaaaatagacctcaattccgaattcagagatagcacgcaccaggagaagccatggctactcaatccccttcacctcagaacctaggtggtgaaattgagcaaacagaaaatgtagatcagcataataggggagaagagcttggtaaacagagttcagacacatcggtgtttgtgaactcagagccattgcgtgaggaacaaattcagaatgctgtgaaatttctgtcgcacccgaaagttagaggttctcctgtcatccacagacgatcgtttctggagaagaagggccttacgaaggaggagattgatgaagcctttcggcgtgtgcctgattcacctccaagtgtgcagacagctggcataaatcaagatggacaattgaagccatcatcaaacattcagcagcaaggccaaccacaggctttgcagctgactgtaccagcttctactggtgttactactacgcttggaaccttatctcgccgcagttttcactggtcacatgcccttattgcagttggattactggctgcttcaggtgctggtacagttatagtaattaagaattctattctccctcggttaaaatcctggatacgcaatgttgtcctagaagaggatcatgaccaatcaaagagaacaggctcaaaaccaacattggcagaagaagctgcacaggctgcaaaagcagctgcagttgcagctgctgatattgcaaaagcaagccaagaattactgagttcaaaaattgaagagaagagatattttgtagaagttgtgaaccttttggataagcaagtgcaggaaatgaagttgatgactaatgcaataggaagattggaagcttctggtggactctctgtctcaaagcaagaagaccgcttagtcactcaaacaggttcaaagacacagcaactgatcgtgaatgggaagtcagactatgagtcccgatcagtgagatcttcatcccctcctgtatctgntgaaccatctagtgctcctcatcctaaatcatatatggagataatggccatgatccaaagaggggagaagccttctaacattagggaaattgatgattc

SEQ ID NO: 14405 - protein, 343 aa, Glycine max
  misc_feature (311)..(311): Xaa can be any naturally occurring amino acid
MATQSPSPQNLGGEIEQTENVDQHNRGEELGKQSSDTSVFVNSEPLREEQIQNAVKFLSHPKVRGSPVIHRRSFLEKKGLTKEEIDEAFRRVPDSPPSVQTAGINQDGQLKPSSNIQQQGQPQALQLTVPASTGVTTTLGTLSRRSFHWSHALIAVGLLAASGAGTVIVIKNSILPRLKSWIRNVVLEEDHDQSKRTGSKPTLAEEAAQAAKAAAVAAADIAKASQELLSSKIEEKRYFVEVVNLLDKQVQEMKLMTNAIGRLEASGGLSVSKQEDRLVTQTGSKTQQLIVNGKSDYESRSVRSSSPPVSXEPSSAPHPKSYMEIMAMIQRGEKPSNIREIDD

SEQ ID NO: 14406 - DNA, 544 bp, Glycine max
ttacattatgccaaactttgtacctcgggatattgtcaatgatttggattccagaacattttgtgatactggaagcaaatctgatagtccaaaagatcctaacttccaaatgaagcttggatctcagaatgaagtcagagaatctattgaggataagcatcctatcaaaagtgtcacagagaagtttgaaaaaactttaacaccagacagattttctgaccaagataaatgtaatcaatcctctccatacagcaaggagatgagtccagttaaatatgtcaatggagttgctgttttacaaggaaggacccgttctttggttgagaggtttgaaagaagggaaagaactcccaccgatgagaatcaagctaatgcaacccccaccacaatattcgaaaataaggaaaaaattctcaaagaagatcaaactaatgcatcccccatcaccagcataacatctgagaagggtgaaagatttcctttcggcgatgatcaaaacaatatgcccaatgttcccaacacaaccagtgaaactgacaagtct

SEQ ID NO: 14407 - protein, 181 aa, Glycine max
YIMPNFVPRDIVNDLDSRTFCDTGSKSDSPKDPNFQMKLGSQNEVRESIEDKHPIKSVTEKFEKTLTPDRFSDQDKCNQSSPYSKEMSPVKYVNGVAVLQGRTRSLVERFERRERTPTDENQANATPTTIFENKEKILKEDQTNASPITSITSEKGERFPFGDDQNNMPNVPNTTSETDKS

SEQ ID NO: 14408 - protein, 179 aa, Glycine max
MPNFVPRDIVNDLDSRTFCDTGSKSDSPKDPNFQMKLGSQNEVRESIEDKHPIKSVTEKFEKTLTPDRFSDQDKCNQSSPYSKEMSPVKYVNGVAVLQGRTRSLVERFERRERTPTDENQANATPTTIFENKEKILKEDQTNASPITSITSEKGERFPFGDDQNNMPNVPNTTSETDKS

SEQ ID NO: 14409 - protein, 145 aa, Glycine max
MKLGSQNEVRESIEDKHPIKSVTEKFEKTLTPDRFSDQDKCNQSSPYSKEMSPVKYVNGVAVLQGRTRSLVERFERRERTPTDENQANATPTTIFENKEKILKEDQTNASPITSITSEKGERFPFGDDQNNMPNVPNTTSETDKS

SEQ ID NO: 14410 - DNA, 1463 bp, Glycine max
cccaaagcctttgccatgcagttatcacttgaagagacattgttgacaactcagacaatgtatttacaagtagcattgctatatactgcatcttgtggtgaaaggcgaataagagtacacacaatggcagttccagtagttacagagttagcagatatatatcggctggctgatactggtgcaattgtatcactgttaagtaggctagcaattgagaaaacattgtcccaaaaactggaagatgcacggagtgctgttcaactaagagttgtaaaagccctcagggaatatcgaaatctttatgctgtgcaacatcgcttggcaaacagaatgatatatcctgagtctttaaagttcttaatgttgtatggattagccctttgtagatcaacagctttacgtggagggtatggtgatgttccactggatgaacgatgtgcagcaggacacataatgatgactgtatcaataagaagactgttgaaacttctctatcctagcttgattcgacttgatgaatatcttctgaaggcatctgtacaggctaatgacttaaaaagtgttgagagaaggttacctttgactggggagagcttagactctagaggtctttatatttatgatgatggcatccggttcattatatggtttggtagggtgatttcacctgatatagcaaagaatttacttggggcagactttgctgcagaattatcaaagactactctcagtgagcatgataatgaaatgtcaaggaggctggtgaaggtacttgagaagttgagaaatacagatcgtgcatattaccagttgtgccaccttgtgaggcaaggtgaacagcccaaagagggattcctccttcttgcaaaccttgttgaggaccagatgggtggtaacagtgggtatgctgaatggatgctgcagatatctcgacaagtgcagcaatcataatatatagcttccctggctaaataagcaagtcagatctgctatttgtctcacaagtgacgaccatttctttctgcattggaggtatattaaatctgtcctttggggtgcttggagaagcattcttgacctggctaattgatcgtgacctgtgagaagcatgcttttgagagattgttgattcatcctgggatatatccgttaggtgaattctaccacagattgaatttaaacgtgtgttcatgtttttgatatagagggaagaaagaaacacttttttggttactttaccttgtgagataagttgtcactttctgtcttatatttccttttgtcgtcgtcttatggttgattctttcattgtagaaaaagtagacagagaactaagaagagatggcatgtcaaattggtcttgcaaaatcttagattttgtttgttgacaattatttattctggtatttaatgttgaaactttgttttctttcaacttgaaatttaatttatttttttggtcc

SEQ ID NO: 14411 - protein, 316 aa, Glycine max
PKAFAMQLSLEETLLTTQTMYLQVALLYTASCGERRIRVHTMAVPVVTELADIYRLADTGAIVSLLSRLAIEKTLSQKLEDARSAVQLRVVKALREYRNLYAVQHRLANRMIYPESLKFLMLYGLALCRSTALRGGYGDVPLDERCAAGHIMMTVSIRRLLKLLYPSLIRLDEYLLKASVQANDLKSVERRLPLTGESLDSRGLYIYDDGIRFIIWFGRVISPDIAKNLLGADFAAELSKTTLSEHDNEMSRRLVKVLEKLRNTDRAYYQLCHLVRQGEQPKEGFLLLANLVEDQMGGNSGYAEWMLQISRQVQQS

SEQ ID NO: 14412 - protein, 311 aa, Glycine max
MQLSLEETLLTTQTMYLQVALLYTASCGERRIRVHTMAVPVVTELADIYRLADTGAIVSLLSRLAIEKTLSQKLEDARSAVQLRVVKALREYRNLYAVQHRLANRMIYPESLKFLMLYGLALCRSTALRGGYGDVPLDERCAAGHIMMTVSIRRLLKLLYPSLIRLDEYLLKASVQANDLKSVERRLPLTGESLDSRGLYIYDDGIRFIIWFGRVISPDIAKNLLGADFAAELSKTTLSEHDNEMSRRLVKVLEKLRNTDRAYYQLCHLVRQGEQPKEGFLLLANLVEDQMGGNSGYAEWMLQISRQVQQS

SEQ ID NO: 14413 - protein, 297 aa, Glycine max
MYLQVALLYTASCGERRIRVHTMAVPVVTELADIYRLADTGAIVSLLSRLAIEKTLSQKLEDARSAVQLRVVKALREYRNLYAVQHRLANRMIYPESLKFLMLYGLALCRSTALRGGYGDVPLDERCAAGHIMMTVSIRRLLKLLYPSLIRLDEYLLKASVQANDLKSVERRLPLTGESLDSRGLYIYDDGIRFIIWFGRVISPDIAKNLLGADFAAELSKTTLSEHDNEMSRRLVKVLEKLRNTDRAYYQLCHLVRQGEQPKEGFLLLANLVEDQMGGNSGYAEWMLQISRQVQQS

SEQ ID NO: 14414 - DNA, 836 bp, Glycine max
gtaggccccccccccggcattcttcacttgaatcctttctcttctttctctctcgctctttcttcaattccaagctttattcctcatgtctttcagaggcctcagccggccaaatgcctcatcaggcatgggtgttgctgatcacagcaagaacaccttcatggaattgaagcagaagaaggttcaccgttatctgatctttaaggttgatgagaagaaaagggaagttgtggttgagaagactggtgacccggctgagagctatgaggatttcgctgcatctttgcctgagaatgattgcagatatgctgtctttgactatgatttcgtcacttctgagaactgtcaaaagagcaaaatcttcttcattgcatggtccccttcaacgtctcgaatccgagccaagatgctctatgccactactaaagacaggtttagacgagagctagatggtgtccattatgaaattcaggctactgaccccacagaaatggatcttgaagtactgagagaccgtgcacattgaaatgtttaagcactgaattcattttcttatcagaatctactaggttttaaagttttacttttaatgaattacctcttcatgctttgtcatcaatagaacccatcttgccacaggaatatacctccactaatatgaatctgaaggctgatgggtttaaagcttttggcagttattgttgtaaatcccagtgttctggacttgtattgtgtatgagcgtgactctatggatcctgatagatttcttggataaaaaagtcccttgttctaactttggcaaggtatctaaaaaacttcaaaacttgcattatcg

SEQ ID NO: 14415 - protein, 146 aa, Glycine max
MSFRGLSRPNASSGMGVADHSKNTFMELKQKKVHRYLIFKVDEKKREVVVEKTGDPAESYEDFAASLPENDCRYAVFDYDFVTSENCQKSKIFFIAWSPSTSRIRAKMLYATTKDRFRRELDGVHYEIQATDPTEMDLEVLRDRAH

SEQ ID NO: 14416 - protein, 132 aa, Glycine max
MGVADHSKNTFMELKQKKVHRYLIFKVDEKKREVVVEKTGDPAESYEDFAASLPENDCRYAVFDYDFVTSENCQKSKIFFIAWSPSTSRIRAKMLYATTKDRFRRELDGVHYEIQATDPTEMDLEVLRDRAH

SEQ ID NO: 14417 - protein, 121 aa, Glycine max
MELKQKKVHRYLIFKVDEKKREVVVEKTGDPAESYEDFAASLPENDCRYAVFDYDFVTSENCQKSKIFFIAWSPSTSRIRAKMLYATTKDRFRRELDGVHYEIQATDPTEMDLEVLRDRAH

SEQ ID NO: 14418 - DNA, 1162 bp, Glycine max
ggtgtgtgttgttatcactcctctaaatataaagatcagcgaaaacaagcgcagcttcattgtttgactctgactcactcgctcgctccctccctcagaaaccatggccgaatttgccatcaacaacaacaacaacggttcccattccagcattaacagcccccatcctgattatgcggagattgttgtggtgcgtcatggcgaaacagcttggaatgctactgcaaaaatccaggggcacctggatgttgaattaaatgaaaatggaagacagcaagcagctgtagtggctgatagactatccagggaacctaaggcctctgttatatattcttctgacttgaaacgggcttttgaaacagcactgatagttgcatccaagtgtggagggatcgaggttgtcaaggattctgacctacgggagagacacctaggggatcttcaaggccatgtttttcatgaaatagcaaaaactaatcccacagcttacaaggcttttgtgtctaagaacgaagatcaagaaataccaggtggtggagaaagtcttgttcaactttatgatcgcagcacatctgcattgcttaaaattggcttaaagcataaaggggagcgagtaattgttgtctctcatggaggattcatcagagccctttacaagtgggcatgcccaaatggtaagcctgggaaggtactcaatacatgtgttagtgtttttcacttgtacggtgaggacaaatggaccttaaaagtgtggggtgatgtcagtcatctgaacgaaactggatttctagagtctggttttggaggtgatagaaattctggttaggccattgtttcctatttaaggtaataaaggtttgattgtttcccatccgaagttaataaaagattagagaaagagcagaaaatggatattaatcagtggtgctaaatatgattttggcccctatttatgttttgtatcttagcatgcaaatatatggtcaccatgtaaggatatgcctaaactatttaattttgtggaggtgatgtcaatctcctttatagaattgtttcttttaaaatcttttcgaagctttcatggagtgatgaatgtaatgatacacttttcatgttagtatttttaatttgtataacaaaaaaaaaaaaaacaaactcgaag

SEQ ID NO: 14419 - protein, 240 aa, Glycine max
MAEFAINNNNNGSHSSINSPHPDYAEIVVVRHGETAWNATAKIQGHLDVELNENGRQQAAVVADRLSREPKASVIYSSDLKRAFETALIVASKCGGIEVVKDSDLRERHLGDLQGHVFHEIAKTNPTAYKAFVSKNEDQEIPGGGESLVQLYDRSTSALLKIGLKHKGERVIVVSHGGFIRALYKWACPNGKPGKVLNTCVSVFHLYGEDKWTLKVWGDVSHLNETGFLESGFGGDRNSG

SEQ ID NO: 14420 - DNA, 937 bp, Glycine max
ttacctccaggtcgccctcctgctccatctcaaatgatacctcatccaaatgttggtgcatatatgtcaagccaacagccaactgttggatatactaatttaattagttctctaatgtcgcaaggtgtgatctcattggctaaccagctgcctgcacaggattctgttggaactgagtttaatccagatattctgaaggttcgtcatgagtctgcagtcaatgccttatatggtgatctccctagacaatgcacaacttgtgggctgagattcaaatgccaagaggaacacagtagtcatatggattggcatgtgactaagaatcggatgtctaaaacccgtaagcagaaaccctctcggaagtggtttgttagtgacaggatgtggctcagtggtgcagaggcattgggaacagaatcagctccaggttttttgccaacagaaaccatagaagaaaggaaagatgatgaagagttggcagtgcctgcagaagaagaccagaatacatgtgcattatgcggagagccttttgatgagttttacagtgatgaaatggaggaatggatgtatcgaggagcagtatacctcaatgcacctacgggaacaacagcaggcatggataggactcagttaggccccataattcatgctaaatgcagatcagaatctaatatggccacctctgaagatcttggaccagatgaaaagggtgccgatgaagagggttcccaaaggaaacgaatgcgaagttgatcaatgttgaccagttttgtgcattgtaacttatgattttccgttggtgtatctcatagagttgaatcttgcaataccatggccattctgccaaagtcatgtacatgtatagttggactagtaacgttcatattttcttgcagccaacggttacattttaacttaaaattatttcgtcccttgc

SEQ ID NO: 14421 - protein, 250 aa, Glycine max
LPPGRPPAPSQMIPHPNVGAYMSSQQPTVGYTNLISSLMSQGVISLANQLPAQDSVGTEFNPDILKVRHESAVNALYGDLPRQCTTCGLRFKCQEEHSSHMDWHVTKNRMSKTRKQKPSRKWFVSDRMWLSGAEALGTESAPGFLPTETIEERKDDEELAVPAEEDQNTCALCGEPFDEFYSDEMEEWMYRGAVYLNAPTGTTAGMDRTQLGPIIHAKCRSESNMATSEDLGPDEKGADEEGSQRKRMRS

SEQ ID NO: 14422 - protein, 239 aa, Glycine max
MIPHPNVGAYMSSQQPTVGYTNLISSLMSQGVISLANQLPAQDSVGTEFNPDILKVRHESAVNALYGDLPRQCTTCGLRFKCQEEHSSHMDWHVTKNRMSKTRKQKPSRKWFVSDRMWLSGAEALGTESAPGFLPTETIEERKDDEELAVPAEEDQNTCALCGEPFDEFYSDEMEEWMYRGAVYLNAPTGTTAGMDRTQLGPIIHAKCRSESNMATSEDLGPDEKGADEEGSQRKRMRS

SEQ ID NO: 14423 - protein, 229 aa, Glycine max
MSSQQPTVGYTNLISSLMSQGVISLANQLPAQDSVGTEFNPDILKVRHESAVNALYGDLPRQCTTCGLRFKCQEEHSSHMDWHVTKNRMSKTRKQKPSRKWFVSDRMWLSGAEALGTESAPGFLPTETIEERKDDEELAVPAEEDQNTCALCGEPFDEFYSDEMEEWMYRGAVYLNAPTGTTAGMDRTQLGPIIHAKCRSESNMATSEDLGPDEKGADEEGSQRKRMRS

SEQ ID NO: 14424 - DNA, 764 bp, Glycine max
attttatatactgggactcactaccagacatgcaagagcttactgggttgaactcaaaatgggcatcaaccttgatggctcagcatcttctagcagcagctgatcgatatggcttagagagacttaggctgatgtgtgaagcgagtctctgtgaagatgttgctattaatactgtggctacaactctagccttggcagagcagcaccattgtttccaactgaaagctgtctgtctcaagtttattgctacctctgaaaatcttagagctgtgatgcaaactgacggatttgagtacttgaaggaaagctgcccatctgttctgactgagctattggagtacgtggccagatttactgagcattcggacatcatgtgcaagcataggaatgaagcattacttgatggcagtgacataaatgggaggcgggtgaagcaaaggctctaatatgtgaagaacactgcacagctttctgtacatccctcttctactctccgttttaaaagatagcgagagcatggttagagggagaatatatataatcttttataggatcagaggcaatttttaattttcttagcttattcatgtgtaagagatgtaaatgtaatttgtgttgttgctgttactgttctgtttcacgtgtaggtttctgtaatatcttcagtatcactttttactggaaaacatgccttgcaagtgttgatcattactttttatattctgtatgcttattattcaaatgtagtagcgtaagtgcccttg

SEQ ID NO: 14425 - protein, 147 aa, Glycine max
FIYWDSLPDMQELTGLNSKWASTLMAQHLLAAADRYGLERLRLMCEASLCEDVAINTVATTLALAEQHHCFQLKAVCLKFIATSENLRAVMQTDGFEYLKESCPSVLTELLEYVARFTEHSDIMCKHRNEALLDGSDINGRRVKQRL

SEQ ID NO: 14426 - protein, 138 aa, Glycine max
MQELTGLNSKWASTLMAQHLLAAADRYGLERLRLMCEASLCEDVAINTVATTLALAEQHHCFQLKAVCLKFIATSENLRAVMQTDGFEYLKESCPSVLTELLEYVARFTEHSDIMCKHRNEALLDGSDINGRRVKQRL

SEQ ID NO: 14427 - protein, 123 aa, Glycine max
MAQHLLAAADRYGLERLRLMCEASLCEDVAINTVATTLALAEQHHCFQLKAVCLKFIATSENLRAVMQTDGFEYLKESCPSVLTELLEYVARFTEHSDIMCKHRNEALLDGSDINGRRVKQRL

SEQ ID NO: 14428 - DNA, 654 bp, Glycine max
gtgatttcttatgttggtttttataaaaaaacataaagaagaaaataaattgaattgattgcagggggtttgctcggtttgtgaatattagagatggtagaggtgcaacacctttgcatttagcagctcgtcaaagacggcctgaatgtgtacatattctattgtacagtggagctcttgtttctgcttcaactggaagatatggatgtcctgggagcactcctcttcatcttgcagccaaagggggatctttggattgcatccgggaactattggcatggggtgcagatcgccttcaacgtgatgcttctgggcgaataccgtatgtagttgctctgaaacacagacatggagcatgtgcagcattgctgaatctttcgtctgctgagcctcttgtatggccatcatctttgaagataatcagtgagcttaatccagacgccaaagagttattagagcgggccctgatgggatgcaacagggaaagggagaaaaacatattgaaagggagtgattactctcttccatctccatcacattctgatggggtagatgacaatatctctgaggttagtgagacagaattatgctgcatctgctttgagcaagtgtgtacaattgaagtccaagactgtggtcaccagatgtgtgcac

SEQ ID NO: 14429 - protein, 62 aa, Glycine max
MGCNREREKNILKGSDYSLPSPSHSDGVDDNISEVSETELCCICFEQVCTIEVQDCGHQMCA

SEQ ID NO: 14430 - protein, 52 aa, Glycine max
MCTYSIVQWSSCFCFNWKIWMSWEHSSSSCSQRGIFGLHPGTIGMGCRSPST

SEQ ID NO: 14431 - protein, 42 aa, Glycine max
MDVLGALLFILQPKGDLWIASGNYWHGVQIAFNVMLLGEYRM

SEQ ID NO: 14432 - DNA, 719 bp, Glycine max
aaccacaacacaacacaacacaacacaattacacacacgaatttccttagttaggcattgctttgcgatggaaaaaatggaactggcagagacacctctacctttgctttcactaaaccacgtttcttttgtatgtaagagtgtgagtgagtcagtgaaattctatgaggatgtccttggatttttgctcatcaagaggccatcttctttcaaatttgaaggggcctggttattcaattatggcattggcattcacctgttggagtcagaaaaggttccggtgaaaaaaagagagatcaacccaaaagaaaatcatatatcgtttcaatgctcagacatgaaagttataatgcagaaactggatgcaatgaagattgagtatgtgacagcagttgtggaagaaggtggaattaaagttgatcagctgttctttcatgacccagatggatatatgatagaaatatgcaactgccaaaatcttcctgtgcttccaatttcttcctgccctctaaagcagctcggaggagaagctacattcaagattaattgctttgcagaagaatctatgtctatgctgatgatggacaatttcgtgatggatatgttgaagatttcaatataattaaagctttttgtaaaaaaaaatatttgtaaaagcctttttgtccgacgagagaagaggggaaataaaaagtgtaagagtaaattatatcacttcc

SEQ ID NO: 14433 - protein, 206 aa, Glycine max
TTTQHNTTQLHTRISLVRHCFAMEKMELAETPLPLLSLNHVSFVCKSVSESVKFYEDVLGFLLIKRPSSFKFEGAWLFNYGIGIHLLESEKVPVKKREINPKENHISFQCSDMKVIMQKLDAMKIEYVTAVVEEGGIKVDQLFFHDPDGYMIEICNCQNLPVLPISSCPLKQLGGEATFKINCFAEESMSMLMMDNFVMDMLKISI

SEQ ID NO: 14434 - protein, 184 aa, Glycine max
MEKMELAETPLPLLSLNHVSFVCKSVSESVKFYEDVLGFLLIKRPSSFKFEGAWLFNYGIGIHLLESEKVPVKKREINPKENHISFQCSDMKVIMQKLDAMKIEYVTAVVEEGGIKVDQLFFHDPDGYMIEICNCQNLPVLPISSCPLKQLGGEATFKINCFAEESMSMLMMDNFVMDMLKISI

SEQ ID NO: 14435 - protein, 181 aa, Glycine max
MELAETPLPLLSLNHVSFVCKSVSESVKFYEDVLGFLLIKRPSSFKFEGAWLFNYGIGIHLLESEKVPVKKREINPKENHISFQCSDMKVIMQKLDAMKIEYVTAVVEEGGIKVDQLFFHDPDGYMIEICNCQNLPVLPISSCPLKQLGGEATFKINCFAEESMSMLMMDNFVMDMLKISI

SEQ ID NO: 14436 - DNA, 1262 bp, Glycine max
attatctgtccatggaagtcctctgcgcgaggacgttcatggggccatcaaggatcaccataattcaaagaaaaggtgaatattactgaacagacttggtagctgtttcctggcacataaacatcagctatgtctggtaactggttatactatagctcctaacttgtatttgtgtttcttttttaattgctttcagaaagataacgcccaaatggatggatcgtgtaagagtgagctgtgagagtggtcttgaaggaccacatgaagatggttacaactggagaaaatatggtcagaaagacatccttggagccaaatatcccaggtgagagaacttccctcggtcctgctttaaaaagaactacaagttttcttaaggataaaattgccttcaccttggccagcttctaattaacgactcattgtgacaatttgcagaagttactataggtgcaccttccgcagcactcagggctgttgggcaacaaagcaagtgcagagatcagatgaagatcccacaatgtttgacataacttacagaggaaatcatacctgttctcagggaaacaatgccgttctgccacccaagtcaccagaaaaacatgagaaaccagcacacagtcataacattgacattcaccatgcacaggcatcacaagaaagccttgcaaagttcagaagtatcttgtctgtcaacacagataatctggacaatggagatatggcatatgctttcactttcccttccacttcatttggatgcatgaaacaagacaaccacagcttgattcctttggccctggagaatgactccttcttaagcgacctataccaaacacacctgttatccccaacaacaccagaatcaaattatttcccatctccaactttccagatgaatgagtttgatgggatctacaacaggtcacattcgaaatccgatatcaatgagatcatttccaccaacacatcagcaaccaattctccaattcctgatttcaatttctcacttgatccggtggaaattgatccaaatttccctttcaataccccaggatttttgtgctgattgcactataaatggaatactataagaatgtagtcttcataaaacgggacaatttcagacagcagtagaattgtagaataaagaatgagcaactgcagcacttatgaacgtccttgtagtcaatatcagaattgcaattttggctccgtgttagcaattagcagtatgcactttcaaataaaatagtttctgc

SEQ ID NO: 14437 - protein, 182 aa, Glycine max
MFDITYRGNHTCSQGNNAVLPPKSPEKHEKPAHSHNIDIHHAQASQESLAKFRSILSVNTDNLDNGDMAYAFTFPSTSFGCMKQDNHSLIPLALENDSFLSDLYQTHLLSPTTPESNYFPSPTFQMNEFDGIYNRSHSKSDINEIISTNTSATNSPIPDFNFSLDPVEIDPNFPFNTPGFLC

SEQ ID NO: 14438 - protein, 115 aa, Glycine max
MAYAFTFPSTSFGCMKQDNHSLIPLALENDSFLSDLYQTHLLSPTTPESNYFPSPTFQMNEFDGIYNRSHSKSDINEIISTNTSATNSPIPDFNFSLDPVEIDPNFPFNTPGFLC

SEQ ID NO: 14439 - protein, 101 aa, Glycine max
MKQDNHSLIPLALENDSFLSDLYQTHLLSPTTPESNYFPSPTFQMNEFDGIYNRSHSKSDINEIISTNTSATNSPIPDFNFSLDPVEIDPNFPFNTPGFLC

SEQ ID NO: 14440 - DNA, 1318 bp, Glycine max
acttattacccaaaagcttctgcacagtatcatgagtcccgcatggctattattgttgacccaaagtcttctggtggcggtgactacttcggaggccaagaacaatgtcccagccgtgattgttttcggagactcctcggtggattctgggaacaacaacgtcatagccactgttttgaagagcaatttcaagccttatggtcgtgacttcgaaggtggtcgtcccacgggacggttctgcaatggtcgtgtccctccagatttcattgctgaggcttttggcattaaacgtacggttcctgcatacttggatcctgcttataccattcaggatttcgccactggggtttgctttgcctctgctggaactggatatgataatgctacttctgctgtactaaatgtgataccactgtggaaggagatagagtattacaaggagtatcaagccaaattaagaacccatcttggtgtagaaaaagccaataagatcataagcgaagccttgtacttgatgagtttaggaaccaacgatttcctcgaaaactattacgtgttcccaacgcgaagactccacttcaccgtgtcacaatatcaggattttctactgcgtattgcggagaatttcgttagggaattgtacgcacttggagttaggaaattgtccataactggtcttgttcccgtaggatgtctccccttagagagggccacgaacatcttaggcgaccacggttgcaatcaggaatacaacgacgtggctttgagcttcaataggaagttggagaatgtgatcacgaagcttaatagggagcttccacggttgaaagcgttgtcggcaaatgcatattccatcgtcaatgatatcatcacaaaaccttccacatatggatttgaggttgtagagaaggcgtgttgttcgacaggaacatttgagatgagctacttgtgcagtgacaagaatccacttacatgcacagacgccgaaaagtacgtgttttgggatgcatttcatcctacggagaagacaaatcgcattgtctcaagttatttgattccaaagcttctagaaacctttagatgatgattatccattattttccatttgaaaaatcacatagtcttgcctagggcgacatgaaaaaaaatacatttagcgagatttaatgtcgggttgccatgcttgatatggatactttttttgtgtgttcaattgttataacaaataaatttacacctgaaatcatgtagtcatgtacacccacatttgaccttttgtaccttcccatgctatactgtgcttgggttttttcttccg

SEQ ID NO: 14441 - protein, 360 aa, Glycine max
LITQKLLHSIMSPAWLLLLTQSLLVAVTTSEAKNNVPAVIVFGDSSVDSGNNNVIATVLKSNFKPYGRDFEGGRPTGRFCNGRVPPDFIAEAFGIKRTVPAYLDPAYTIQDFATGVCFASAGTGYDNATSAVLNVIPLWKEIEYYKEYQAKLRTHLGVEKANKIISEALYLMSLGTNDFLENYYVFPTRRLHFTVSQYQDFLLRIAENFVRELYALGVRKLSITGLVPVGCLPLERATNILGDHGCNQEYNDVALSFNRKLENVITKLNRELPRLKALSANAYSIVNDIITKPSTYGFEVVEKACCSTGTFEMSYLCSDKNPLTCTDAEKYVFWDAFHPTEKTNRIVSSYLIPKLLETFR

SEQ ID NO: 14442 - protein, 350 aa, Glycine max
MSPAWLLLLTQSLLVAVTTSEAKNNVPAVIVFGDSSVDSGNNNVIATVLKSNFKPYGRDFEGGRPTGRFCNGRVPPDFIAEAFGIKRTVPAYLDPAYTIQDFATGVCFASAGTGYDNATSAVLNVIPLWKEIEYYKEYQAKLRTHLGVEKANKIISEALYLMSLGTNDFLENYYVFPTRRLHFTVSQYQDFLLRIAENFVRELYALGVRKLSITGLVPVGCLPLERATNILGDHGCNQEYNDVALSFNRKLENVITKLNRELPRLKALSANAYSIVNDIITKPSTYGFEVVEKACCSTGTFEMSYLCSDKNPLTCTDAEKYVFWDAFHPTEKTNRIVSSYLIPKLLETFR

SEQ ID NO: 14443 - protein, 189 aa, Glycine max
MSLGTNDFLENYYVFPTRRLHFTVSQYQDFLLRIAENFVRELYALGVRKLSITGLVPVGCLPLERATNILGDHGCNQEYNDVALSFNRKLENVITKLNRELPRLKALSANAYSIVNDIITKPSTYGFEVVEKACCSTGTFEMSYLCSDKNPLTCTDAEKYVFWDAFHPTEKTNRIVSSYLIPKLLETFR

SEQ ID NO: 14444 - DNA, 1251 bp, Glycine max
ttttatatttagggaccacttaggagagaaggtaattaatacttaaacgatgaaattagtgatttattcgattcgattctagattgaagtctatttgcaatacatattcagagaatatagttgtaattatgtatgagacatttacctcatttatctcacaatctgttcacattatgcaagtttcgagtattgggcttttgagattatggttttcttagctggattattgcctgacccaacaatatcgacttcattgattgcaatatgcacaaacacagaactaattgcctatctgatcacttatggtctcagtgcagctgcaaggttagtaagttaagaatgttctccttttgtttgcattgttgtgtatcttctgaatcggcacacattatacaatttttgaatagctaaaaaaattgagtatgatattagtacaagggtctccaatgaattgggatcaggccacctggatcgagctaagcatgcaatgggtgtcagtctcaagctctctctcctccttggtttatgttttgttttggcacttgcatttggtcacaatatatggattcagatgttcagtgatagttctaaaattaaagaggagttggcttcactgacaccctttctttccatttccatattactagattctgtccaaggtgtcttatcaggtttgaataattcctcattttccttttaacctttgttatatttgcttcttgatctttaacttaaaaaaatcaattagtggaaattaaaatacctttgatactgcaggggtgatcagagggtgtggttggcagcacttggctgcctatgtcaacctagcaactttttatcttattggtttgccaatatcaggccttcttggatttaagttcaatttgcaggttaagggtttatggattggcctgatttgtgggttggcttgtcaaactgggactctctcatttttggcatggcgtgccaaatggactaaactgaatgtctccttggacagagatgaaatccaaccaccatctgcttaactgattgcttgctagtatgggtcaatgaaaatagtccacggagtctactatttttagattcaattgcttgcaagagaatgaaaattggttggtcaaattttcctcagtatccttccattccctctttttcattcctccatgaactccttgattttgttagaaatacctacaatgcaatgacattctctatgtattatatatactgatggcactccatttccct

SEQ ID NO: 14445 - protein, 70 aa, Glycine max
MGVSLKLSLLLGLCFVLALAFGHNIWIQMFSDSSKIKEELASLTPFLSISILLDSVQGVLSGLNNSSFSF

SEQ ID NO: 14446 - protein, 64 aa, Glycine max
MILVQGSPMNWDQATWIELSMQWVSVSSSLSSLVYVLFWHLHLVTIYGFRCSVIVLKLKRSWLH

SEQ ID NO: 14447 - protein, 56 aa, Glycine max
MNWDQATWIELSMQWVSVSSSLSSLVYVLFWHLHLVTIYGFRCSVIVLKLKRSWLH

SEQ ID NO: 14448 - DNA, 1078 bp, Glycine max
aaaaaccagtaagttatcttctagtatttttcaagtaacttaaggtttcaaacctaggaagttggaagtcatggcagcaacattgatggcagcaacaagttctggcactcttaaagcaactcctttcctaggccaaggcaagggtgccaatgccaatgctcttagggatgttgtttccatgggaactgggaagtacaccatgggcaatgatttgtggtatggaccagacagagtgaaatacttgggacccttttcagctcagaccccttcatacttgaaaggagaattcccaggggattatggatgggacactgctggcttatctgctgacccggaagcatttgccaagaacagggctcttgaggttatccatgggagatgggccatgcttggagcactaggatgcatcaccccagaggtgctagagaagtggttgagagtggacttcaaggagccagtgtggttcaaagctggagcccaaatattctcagaaggtgggcttgactatttggggaacccaaaccttgtccatgcacaaagcatcctggcagtgctgggcttccaagttatcctaatgggccttgttgaagggtaccgcatcaatgggcttgatggggtgggagagggcaatgacctctaccctgggggccagtactttgacccactgggccttgctgatgacccagtcacttttgctgagctcaaagtcaaggagatcaagaatggaaggctggccatgttctctatgtttggattctttgttcaagctattgtcactggaaaaggcccattggagaacctcttggaccaccttgacaaccctgtggctaacaatgcttgggtctatgccactaagtttgccccaggatcttaaatgtatatgacttcttcttccctaatccctatgatcatatcccttgtgtttgcctttgtgatttatgtgtagattatatgatcataataattgttggattagtgtacttcttaaggactaaggttcaatttaaacctgggatgcccttgtttgttgatctagtttttgtctgaagcaaccaatgagaaagctatagcaatgttt

SEQ ID NO: 14449 - protein, 267 aa, Glycine max
MAATLMAATSSGTLKATPFLGQGKGANANALRDVVSMGTGKYTMGNDLWYGPDRVKYLGPFSAQTPSYLKGEFPGDYGWDTAGLSADPEAFAKNRALEVIHGRWAMLGALGCITPEVLEKWLRVDFKEPVWFKAGAQIFSEGGLDYLGNPNLVHAQSILAVLGFQVILMGLVEGYRINGLDGVGEGNDLYPGGQYFDPLGLADDPVTFAELKVKEIKNGRLAMFSMFGFFVQAIVTGKGPLENLLDHLDNPVANNAWVYATKFAPGS

SEQ ID NO: 14450 - protein, 262 aa, Glycine max
MAATSSGTLKATPFLGQGKGANANALRDVVSMGTGKYTMGNDLWYGPDRVKYLGPFSAQTPSYLKGEFPGDYGWDTAGLSADPEAFAKNRALEVIHGRWAMLGALGCITPEVLEKWLRVDFKEPVWFKAGAQIFSEGGLDYLGNPNLVHAQSILAVLGFQVILMGLVEGYRINGLDGVGEGNDLYPGGQYFDPLGLADDPVTFAELKVKEIKNGRLAMFSMFGFFVQAIVTGKGPLENLLDHLDNPVANNAWVYATKFAPGS

SEQ ID NO: 14451 - protein, 231 aa, Glycine max
MGTGKYTMGNDLWYGPDRVKYLGPFSAQTPSYLKGEFPGDYGWDTAGLSADPEAFAKNRALEVIHGRWAMLGALGCITPEVLEKWLRVDFKEPVWFKAGAQIFSEGGLDYLGNPNLVHAQSILAVLGFQVILMGLVEGYRINGLDGVGEGNDLYPGGQYFDPLGLADDPVTFAELKVKEIKNGRLAMFSMFGFFVQAIVTGKGPLENLLDHLDNPVANNAWVYATKFAPGS

SEQ ID NO: 14452 - DNA, 1777 bp, Glycine max
acaatcgctctcaatctttccagattttctcccaaaccgttcaaacccgtatcgcgtgtcaaattgttcttctgattttctcattgatcgcgattatcgcatctcaaatcgaacttgaatcagagaagacgttgaatttttgaaaagtgagaaaagagggattctggaacgtctctatcgtggtttgtcagtaccctatctcaaacgaaaatgtcatctttatatggaggggaatccaagaggtacaataatatacccagaggacaccatcatttgacaacacagaagaaacaggagattagggaagcctttgaattattcaatactgatggctcaggtactattgatgccaaggatctgaatgttgccatgagggccattggatttgaaatgacagaagagctcattaatcaaatgaaagcagatttggacaaggatggaagtggagcaattgattatgaagaatttgagtacatgatgacaaccaaaataggagagcgggacagtaaagagggaaagatatctgcatcagacatcaagtgcattgcgaaagagccaggtcaaaatttcactaacagagacattcaggagatggttgacgaagcagaccaagatagtaagttattccaatcttatccttgtcaacattctaattttacagcaaaacttttacttctaatactgtggatttttattctgaggtttactgggtgtggatgcatgggagtgatgggaccatggacttcagatcttgctgacataatgtgtgtatataaaaaaaatactatcatttctttgaaattcaaattggccgttttctgcattaaaataaataaatggacaatacagaggccaaaagattaaaaaaaaaagtattcatgaatcattatgataagaggtcactaaattgtatacaagactcactggaaaaataagtagtttgtagttttacctcagtaacactaatcagtttaccaaaaaaatgatacaaagtggtatatatgtttgaaaaattaaataggaatatttcttattcaaaagttatttttcaatgtagtttttaaaagtatattgggatgtttgcattggaatcataatgctcaggggaggtcaatgtattatacactcttgtctgttggatgacaaattctattatataaatgataaaggaacactatatttgccattattttatttttaatgatagatttagtgatcaaccttgacttgttttatttgttcgacattgcataggtttaatgtctgttaatttattattcatgttaattaccatagaattgaaaatatcacagcctgaggtcttaaaaggaaaaggaagaaaacattaccttttgcgaaaagtattttaaagcttgctaggatagaggcttaatcgtggttcaattataatttataacaggggtgcctcattttttattttgcttccccattagtgtactatttcttctcatgattatcagatgttatatctatttttaagttataaaatatgcagattgtcctgaagttagtgcagaggagtttataaggatgttgttcgatcccccctactacggccactaatcgtacagaaattaatgcagtcatattttcataaatttaaattggagatgctagttatgatcaaacaacctcgaacctcgaagttatcgtgtgtaatttttaatttcttttatcaatctatatattgttcattttcataaatttaaattggagatcctagttatgatcaaacaacctcgaagttctcgtgttt

SEQ ID NO: 14453 - protein, 217 aa, Glycine max
MSSLYGGESKRYNNIPRGHHHLTTQKKQEIREAFELFNTDGSGTIDAKDLNVAMRAIGFEMTEELINQMKADLDKDGSGAIDYEEFEYMMTTKIGERDSKEGKISASDIKCIAKEPGQNFTNRDIQEMVDEADQDSKLFQSYPCQHSNFTAKLLLLILWIFILRFTGCGCMGVMGPWTSDLADIMCVYKKNTIISLKFKLAVFCIKINKWTIQRPKD

SEQ ID NO: 14454 - protein, 164 aa, Glycine max
MRAIGFEMTEELINQMKADLDKDGSGAIDYEEFEYMMTTKIGERDSKEGKISASDIKCIAKEPGQNFTNRDIQEMVDEADQDSKLFQSYPCQHSNFTAKLLLLILWIFILRFTGCGCMGVMGPWTSDLADIMCVYKKNTIISLKFKLAVFCIKINKWTIQRPKD

SEQ ID NO: 14455 - protein, 157 aa, Glycine max
MTEELINQMKADLDKDGSGAIDYEEFEYMMTTKIGERDSKEGKISASDIKCIAKEPGQNFTNRDIQEMVDEADQDSKLFQSYPCQHSNFTAKLLLLILWIFILRFTGCGCMGVMGPWTSDLADIMCVYKKNTIISLKFKLAVFCIKINKWTIQRPKD

SEQ ID NO: 14456 - DNA, 1092 bp, Glycine max
attgttagcttcttctggaaaatcaatcaagaaggaagagacatcatctgaaaatgatacattggaccaagggaaaaaacctggcagtggtccttctgacgctccaaaagtaccttctgatgctccaaaaatatgttacaagtgtaagaaggcaggtcacttatctcgggattgtaaggagcaaccagatggtcttttgcataggaatgcaattggtgaagctgaagaaaatcccaaatcgactgctattgacacttcccaagcagatagggtggcaatggaagaagatgatattaatgaaataggagaagaagagaaagaaaaattaaatgacgtagattacttgacagggaatccacttcctaatgacattctcttatatgctgttcctgtttgtggtccttatagtgcagttcagtcttacaaatatcgggtgaagataattcctggaccggcgaagaaagggaaagctgcaaaaactgctatgaacctattcagccacatgtcagaagcaacaacccgggagaaggagttgatgaaagcctgtacagatccagagctagttgctgcaattgttggtaatgtgaaaatatcagcagctggccttactcaattgaagcaaaaacaaaagaaaggcaagaagagcagcaaacaagagagttagccaacacatggatccatcttaagactaactgcacctcacacagttttaatcctatgtcctctgcaactctagttctatttttttcctctctattaataagcccttggattaaaactgcatgttcctgcagtttttttttccaatcctggaacctggatcctaaatccccaaccccgtgtaggatttactcaggagaagttttgttttattttttcctttcttttctttagctagagttaagaaattcgtatgttgtatatcctattatccttctgagttctaacactgtagagaagttttcctccgttcagttctgctggctaggatatttttggttttctgctatttactgtcaaagaccaagtcactggatattttttaatcagaggatatatcataaacaatttgtttaattagccaaattttct

SEQ ID NO: 14457 - protein, 220 aa, Glycine max
LLASSGKSIKKEETSSENDTLDQGKKPGSGPSDAPKVPSDAPKICYKCKKAGHLSRDCKEQPDGLLHRNAIGEAEENPKSTAIDTSQADRVAMEEDDINEIGEEEKEKLNDVDYLTGNPLPNDILLYAVPVCGPYSAVQSYKYRVKIIPGPAKKGKAAKTAMNLFSHMSEATTREKELMKACTDPELVAAIVGNVKISAAGLTQLKQKQKKGKKSSKQES

SEQ ID NO: 14458 - protein, 128 aa, Glycine max
MEEDDINEIGEEEKEKLNDVDYLTGNPLPNDILLYAVPVCGPYSAVQSYKYRVKIIPGPAKKGKAAKTAMNLFSHMSEATTREKELMKACTDPELVAAIVGNVKISAAGLTQLKQKQKKGKKSSKQES

SEQ ID NO: 14459 - DNA, 1588 bp, Glycine max
gaaaagagaagaacaaagatgatactgcagttcttcgtgctttcacagagaggcgataacatcgtctaccgcgactctcaaaagggaagcgctgagacatttttccgaaaagtcaagttctggaaagagaatgctgagggagatgctccacctgtttttgtagaatatagatggtgtgaactacttccacgtgaaggctgctggattgctatttgttgctactactagagtcaatgtctccccttctcttgttttggaactcttacaaagaattgcacgtgtcatcaaagattaccttggtgttctcaatgaagattcctttagaaagaacttcgtgctcgtttatgaattgctggatgaagtcatagattttggttatgtgcaaacaacatccactgagttttgaagtcatatgttttcaatgagccaattgtgattgatgctgcacggatgcctccacttggccctgcttccatttttatgactcctatattttcagcaagggaccaaacgaatgccaggtacagctattacaaagtctgtggttactaatgaacctggtggaaggaagagggatgagatctttgttgatgtaattgagaaaataagtgttacattcaactctagtggatatatacttactagtgagatagatggaaccattcaaatgaagagttatcttactggtaacccggagattcgacttgctctcaatgaggacctgagtataggaacaagtgattatagaggttcaggtgctgtcattttagatgattgtaacttccatgagtctgtacaccttgatagttttgatgttgatagaactttgtcattggtacaaccagaaggctgaagtgaccattaaagtgcgagctgaattcaactcaagtatcaatgctaacactgttcttgtagagatgcctctgccatcatttacagctcgtgttaattttgagttagaacctggagcagttggacacaccactgattttaaggaagcaaataaaagactggaatggggcctgaaaaaggttggtgatggatctgaacatactttacgagcaaagctaacgttttcacggagttacatggaaatatcatgaaagaagcagggcctgttagcatggctttcaccatacctatgtacaatgcttcaaggcttcaggttaagtatttgcaaatagcaaagaaatcaactgcgcataatccttatcgctgggttagatatgtaacccaagcaaactcatacgtagcccggttgtaattggaatctctaagtccaaattccaagttaaatttggggggatggcagcatgtcaggtgaaaagatggcaggttctctgcttctacaagtgaagatgattttctctagataatgaatggctaagtggaactcgagtaaagtgaagatgtacaagacaaatcttaaaactgtgtaatgtggagggcagacatctaaatctaaaaattattaaagactttatgtaatataaatagtcttatgatgcgtttagcctccttagtaatgtgttggactagagatattcgtttgaatgtatatgccattgaacctgagctggttttgacg

SEQ ID NO: 14460 - protein, 112 aa, Glycine max
MPGTAITKSVVTNEPGGRKRDEIFVDVIEKISVTFNSSGYILTSEIDGTIQMKSYLTGNPEIRLALNEDLSIGTSDYRGSGAVILDDCNFHESVHLDSFDVDRTLSLVQPEG

SEQ ID NO: 14461 - protein, 110 aa, Glycine max
MIVTSMSLYTLIVLMLIELCHWYNQKAEVTIKVRAEFNSSINANTVLVEMPLPSFTARVNFELEPGAVGHTTDFKEANKRLEWGLKKVGDGSEHTLRAKLTFSRSYMEIS

SEQ ID NO: 14462 - protein, 105 aa, Glycine max
MSLYTLIVLMLIELCHWYNQKAEVTIKVRAEFNSSINANTVLVEMPLPSFTARVNFELEPGAVGHTTDFKEANKRLEWGLKKVGDGSEHTLRAKLTFSRSYMEIS

SEQ ID NO: 14463 - DNA, 614 bp, Glycine max
tgtctcaactctatcaaacttcaaagttcacacacacaaaagaatcagcatggctttcaatcaagagttagaagctgtaacccaagctttctcagggcatggagtggatgagaaatcattggtaacattactgggaaaatgggatcctctggagagagaatctttcaggaagaagacaccacatttgttcagtgaagatcatgaacgccattttcagaggtgggatgatcaatatgtccgtcttctcaagcatgaattcgtgcgttttaagaatgctgtggtgctttggtccatgcacccttgggaaagagatgcccgtttagtaaaagaggccctaaagaagggtccaaatgcatatggagtgctgattgaggtttcatgcactagatcctcagaagagctattgggagctaggaaggcataccattccctctttgaccactccattgaagaagatgttgcctctcacatccatggcattgaaagaaagctattggttgccctactaagtgcctatagatacgaaggaacaaaggttaaagatgacactgcaaaatcagaagccaaaatcctttccaatggcattaagaatgctcataagaagcctattaatg

SEQ ID NO: 14464 - protein, 204 aa, Glycine max
VSTLSNFKVHTHKRISMAFNQELEAVTQAFSGHGVDEKSLVTLLGKWDPLERESFRKKTPHLFSEDHERHFQRWDDQYVRLLKHEFVRFKNAVVLWSMHPWERDARLVKEALKKGPNAYGVLIEVSCTRSSEELLGARKAYHSLFDHSIEEDVASHIHGIERKLLVALLSAYRYEGTKVKDDTAKSEAKILSNGIKNAHKKPIN

SEQ ID NO: 14465 - protein, 188 aa, Glycine max
MAFNQELEAVTQAFSGHGVDEKSLVTLLGKWDPLERESFRKKTPHLFSEDHERHFQRWDDQYVRLLKHEFVRFKNAVVLWSMHPWERDARLVKEALKKGPNAYGVLIEVSCTRSSEELLGARKAYHSLFDHSIEEDVASHIHGIERKLLVALLSAYRYEGTKVKDDTAKSEAKILSNGIKNAHKKPIN

SEQ ID NO: 14466 - protein, 107 aa, Glycine max
MHPWERDARLVKEALKKGPNAYGVLIEVSCTRSSEELLGARKAYHSLFDHSIEEDVASHIHGIERKLLVALLSAYRYEGTKVKDDTAKSEAKILSNGIKNAHKKPIN

SEQ ID NO: 14467 - DNA, 516 bp, Glycine max
gatgcatgttgaccggtaaacatggcgaccttccacacagaaaccgtgcaatcagggttggccttgagcagactccacatcctattccactcggtggcactcttgtttctctattactaccgcataagccacatcttactggaaccaagctttgtatggattttcatgaccatagcggagcttatcttcggcgagctctggctcttcaaacaggcgttccggtggcggcccgtgtcgagggccgtcatgccggagaagctgccgagcgacggcaagcttccggcgctcgacatcttcgtctgcacggttgaccccgaaaaggagccgacggtgcaggtgatggacaccgtcatctccgccattgccatggactacccctccaacaagctcgccgtgtacctttccgacgatggcgggtgtccggtgactctgtatgggatcagagaggcttctcggttcgcaaaggagtgggttccgttctgcagaaagtatgggatcaattcacggtgcctgcag

SEQ ID NO: 14468 - protein, 165 aa, Glycine max
MATFHTETVQSGLALSRLHILFHSVALLFLYYYRISHILLEPSFVWIFMTIAELIFGELWLFKQAFRWRPVSRAVMPEKLPSDGKLPALDIFVCTVDPEKEPTVQVMDTVISAIAMDYPSNKLAVYLSDDGGCPVTLYGIREASRFAKEWVPFCRKYGINSRCLQ

SEQ ID NO: 14469 - protein, 117 aa, Glycine max
MTIAELIFGELWLFKQAFRWRPVSRAVMPEKLPSDGKLPALDIFVCTVDPEKEPTVQVMDTVISAIAMDYPSNKLAVYLSDDGGCPVTLYGIREASRFAKEWVPFCRKYGINSRCLQ

SEQ ID NO: 14470 - protein, 102 aa, Glycine max
CMLTGKHGDLPHRNRAIRVGLEQTPHPIPLGGTLVSLLLPHKPHLTGTKLCMDFHDHSGAYLRRALALQTGVPVAARVEGRHAGEAAERRQASGARHLRLHG

SEQ ID NO: 14471 - DNA, 1338 bp, Glycine max
ttttttttttttgccttcttttcattcctttcttttcttcaaatcaaggaactcagctatgactaccagagaaatccttcaaaagatgaaggtaaaagttggtttgggttcatcagaccctgactcagggaaaggaaagagcaagatgtcaaagaacataactcatggttatcatttggtgaaaggaaaatcatatcatgacatggaggattacgttgtggctcaatttaagcaaatagataacaatgaattgggtttgtttgcaatattcgacggccatgcgggtcagaacgtacctaattacttgcggtcccatttgtttgataatatcttacatgagcctgacttctggaaagaacctgcagatgctgtgaagagagcatacagtaaaactgattctaatattttagatatgtcgggtgaattaggtagagggggttcaactgcagttacagcaatattagtcaattgtcagaagttaatagtagccaacattggggattctagggccgtcttatgcaagaagggtgtggccaagcaactatcagtggatcatgagccaaccgcagaacatgaggatattaaaaatagaggtggttttgtatcaaactttccaggggatgttcctcgtgttgatggacggctggcagtgtcaagggcatttggtgacaaaagcttgaagaaacacttgagttcagagccatttgtgactgtggagaatataggtgatgatgcagagtttgttatattagccagtgatggattatggaaggtaatgtcaaatcaagaagcagctaattgtataaaaaatataaaggatgctcggtcttcagcaaagcgccttactgaagaagcagttaacaggaaaagcaccgatgatatctcctgcatcgttgtgaaatttcagtgatctcaaggctcgcatgatagactttgatccagcaacttgcaagtgtaacataaacttcggtgtaatgaataaaacgataatgcttcatagccatcaggtggtgttattatgttgagtcattcatgcaaattaaatgggacaactgtgttatttaaagtaataatgtgggaaagatgtagattctgattatgtatagaccaaactttaatatgtgagtttgcaaggaagtttgtcagtgatcttgaaagcttgctttcagatcactgcctaggcccataagattttagattaagttattcgattgtattattggccaacactcctacctttgttggataattagagtctagagtgtgtgggaagctttctcacaatttcttgtaatttttcagaacgaacctgggaatgaccttcaacgatatcttttc

SEQ ID NO: 14472 - protein, 302 aa, Glycine max
FFFLPSFHSFLFFKSRNSAMTTREILQKMKVKVGLGSSDPDSGKGKSKMSKNITHGYHLVKGKSYHDMEDYVVAQFKQIDNNELGLFAIFDGHAGQNVPNYLRSHLFDNILHEPDFWKEPADAVKRAYSKTDSNILDMSGELGRGGSTAVTAILVNCQKLIVANIGDSRAVLCKKGVAKQLSVDHEPTAEHEDIKNRGGFVSNFPGDVPRVDGRLAVSRAFGDKSLKKHLSSEPFVTVENIGDDAEFVILASDGLWKVMSNQEAANCIKNIKDARSSAKRLTEEAVNRKSTDDISCIVVKFQ

SEQ ID NO: 14473 - protein, 283 aa, Glycine max
MTTREILQKMKVKVGLGSSDPDSGKGKSKMSKNITHGYHLVKGKSYHDMEDYVVAQFKQIDNNELGLFAIFDGHAGQNVPNYLRSHLFDNILHEPDFWKEPADAVKRAYSKTDSNILDMSGELGRGGSTAVTAILVNCQKLIVANIGDSRAVLCKKGVAKQLSVDHEPTAEHEDIKNRGGFVSNFPGDVPRVDGRLAVSRAFGDKSLKKHLSSEPFVTVENIGDDAEFVILASDGLWKVMSNQEAANCIKNIKDARSSAKRLTEEAVNRKSTDDISCIVVKFQ

SEQ ID NO: 14474 - protein, 274 aa, Glycine max
MKVKVGLGSSDPDSGKGKSKMSKNITHGYHLVKGKSYHDMEDYVVAQFKQIDNNELGLFAIFDGHAGQNVPNYLRSHLFDNILHEPDFWKEPADAVKRAYSKTDSNILDMSGELGRGGSTAVTAILVNCQKLIVANIGDSRAVLCKKGVAKQLSVDHEPTAEHEDIKNRGGFVSNFPGDVPRVDGRLAVSRAFGDKSLKKHLSSEPFVTVENIGDDAEFVILASDGLWKVMSNQEAANCIKNIKDARSSAKRLTEEAVNRKSTDDISCIVVKFQ

SEQ ID NO: 14475 - DNA, 1710 bp, Glycine max
aaatttggacagtgaggccattttggtcatggtgtgatcattttctctgctcttattcttaatgaggcttatatccaagtttggccggttgcatattgcacaaggcgtctataaaagtaacatcactgaaatcattgtcaaattgacactgcttttctctaaaaggacttcaaagttctgttagatatacagtgttattctgctttcgatcgctctattattcatttgctaagaccttagagaagacagaggatgggtaccctgcttccagatgaaaaatcagagaatccaaatgctttggaacaacttcaacaccaaaaagatgtggatgcaggcgctctctttgtcctcaaatccaaaggttcttggatgcattgtgggtaccacttgacaacttcgatcgtggcaccacctcttctaagtcttccttatgcattcaccttccttggatggacggctgggatcttaagcttagtgattggagctttggtcactttctattcatacaatttaatatctagggttcttgaacaccacgctcagatgggtatgcgtcagctacgctttagagacatggctcgcgatattttaggtccagggtggggtcgttattttgtcggcccaattcaattcgcagtctgttatggtgctgtagtagcttgtactctcttgggaggacaatgcatgaaggcaatttacttgctgtcaaatccaaacgggaccatgaagctttacgagtttgtaattatatttggatgcttcatgctgattttggctcaaatcccatctttccactctttgaggcacattaatctagtgtccttggttctgtgcttagcctatagtgccggtgctactattggttccatttacattggagactcatcaaaaggaccagaaaaggattattctttgaaaggtgattcagtgaatcgcttatttggaatcttcaatgcaattgctatcattgccacgacttatggaaatggaatcattccagaaattcaggcaacattagcaccacccgtaaaagggaagatgctcaagggactatgtgtttgttatcttgttcttatagttaccttctttagtgtatctgtatccggttattgggcatttggtaatgaatcagaaggcctcatcttaagcaacttcgtggacaatgggaagcctctggtgcccaagtggttcatttacatgaccaacattttcactataacacaattatctgcggttggtgtggtttatttgcaaccaacaaatgaagtgctagagcaaacatttggagacccaaaaagccccgagttctccaaacgcaatgtaatccctagagtgatatctcggtcattagctattgctatttcaaccactatagcagccatgcttccattttttggagacataaactctcttataggagcttttggctttatcccacttgacttcatcttgccaatggttttctacaatttgacatttaagccatctaagcgaagccctgttttctggttgaatgtgataattgttgtggctttctccgcattgggagctatagcagcagttgcagcagttaggcagatagttcttgatgctaaaaattattaattatttgctaatgtatgatcatgttggaccatccaatgaagttttgttgttctatgtatcatggttcatactctagtagtttaaaaccaatcattgagttatttc

SEQ ID NO: 14476 - protein, 450 aa, Glycine max
MGTLLPDEKSENPNALEQLQHQKDVDAGALFVLKSKGSWMHCGYHLTTSIVAPPLLSLPYAFTFLGWTAGILSLVIGALVTFYSYNLISRVLEHHAQMGMRQLRFRDMARDILGPGWGRYFVGPIQFAVCYGAVVACTLLGGQCMKAIYLLSNPNGTMKLYEFVIIFGCFMLILAQIPSFHSLRHINLVSLVLCLAYSAGATIGSIYIGDSSKGPEKDYSLKGDSVNRLFGIFNAIAIIATTYGNGIIPEIQATLAPPVKGKMLKGLCVCYLVLIVTFFSVSVSGYWAFGNESEGLILSNFVDNGKPLVPKWFIYMTNIFTITQLSAVGVVYLQPTNEVLEQTFGDPKSPEFSKRNVIPRVISRSLAIAISTTIAAMLPFFGDINSLIGAFGFIPLDFILPMVFYNLTFKPSKRSPVFWLNVIIVVAFSALGAIAAVAAVRQIVLDAKNY

SEQ ID NO: 14477 - protein, 411 aa, Glycine max
MHCGYHLTTSIVAPPLLSLPYAFTFLGWTAGILSLVIGALVTFYSYNLISRVLEHHAQMGMRQLRFRDMARDILGPGWGRYFVGPIQFAVCYGAVVACTLLGGQCMKAIYLLSNPNGTMKLYEFVIIFGCFMLILAQIPSFHSLRHINLVSLVLCLAYSAGATIGSIYIGDSSKGPEKDYSLKGDSVNRLFGIFNAIAIIATTYGNGIIPEIQATLAPPVKGKMLKGLCVCYLVLIVTFFSVSVSGYWAFGNESEGLILSNFVDNGKPLVPKWFIYMTNIFTITQLSAVGVVYLQPTNEVLEQTFGDPKSPEFSKRNVIPRVISRSLAIAISTTIAAMLPFFGDINSLIGAFGFIPLDFILPMVFYNLTFKPSKRSPVFWLNVIIVVAFSALGAIAAVAAVRQIVLDAKNY

SEQ ID NO: 14478 - protein, 353 aa, Glycine max
MGMRQLRFRDMARDILGPGWGRYFVGPIQFAVCYGAVVACTLLGGQCMKAIYLLSNPNGTMKLYEFVIIFGCFMLILAQIPSFHSLRHINLVSLVLCLAYSAGATIGSIYIGDSSKGPEKDYSLKGDSVNRLFGIFNAIAIIATTYGNGIIPEIQATLAPPVKGKMLKGLCVCYLVLIVTFFSVSVSGYWAFGNESEGLILSNFVDNGKPLVPKWFIYMTNIFTITQLSAVGVVYLQPTNEVLEQTFGDPKSPEFSKRNVIPRVISRSLAIAISTTIAAMLPFFGDINSLIGAFGFIPLDFILPMVFYNLTFKPSKRSPVFWLNVIIVVAFSALGAIAAVAAVRQIVLDAKNY

SEQ ID NO: 14479 - DNA, 1301 bp, Glycine max
atagaaaccttctgaaagatctcattgttcagtgtttgctaagactgaaagagccttctgtcttattgagatgtcggaaagatgacctgcacttggtagagaatgtgctggattcagctgctcaggagtatgctgagaaagcaaatgttgatcccccagagatcattgttgacaaccaagtctatcttccacctggactcactcatcaaaattctcatgatctctactgctctggtggggtggtgttggcttctcgtgatggaaagattgtgtgtgaaaatacacttgatgcacgtcttgatgtagttttccgtaaaaagcttccagaggtaaaaaagaactgagtatagcagttcttattctgtgatgttagatatttgttgctgaattgtttttactgttgactctcgtattgctctcactcaaataacttgtatgcagcatttatgattcacttcccttctgcaagatagtagtatgtattttcttgggtagtgctattcacttcattccgcaatattatatacactttctattgattgtattgaaattataaccaactaaaaattacttttgatttggttttaaaaccaatgagtctttttttccctccctatttctgttcctttgtatttgctagactggtccaagtgatctttttcactaattgttccttactttctttctccttcctatcaaatgtactgtattcccatgaattcattattggccaactttcgtctactctattttgttgactttggatattgcatcggaagcaaaatttggaaggtcataggtttagttgaagctgtggcagccactcattcatttcttctttcttttattttctcttgggaaaggggtttaaggttaatacttttaaggggtgaacgggttaaccatgtctaacgactagattcttatgaaatttcttgctccttattgcagatccgaaagcagctctttggacaaattgttgcttgaagattttgattgtattgtttggttaccgctggaatgttaatatcccaaagcaaaagctttgtcttcatgtccttgacctgaatagctatcaagccattgcttctgtgaacttataattattgtcttttaaataacattattttcggtagtccagttgtccggtgttcttgatttgatttacttctgattgttatgacctaagtttttccggcttatttcagctttgagcttcttggcaataaagtagcaagatgtaaacattactgttaatgttattaaaaaaaacattactgtcaatattgtgacagaaacac

SEQ ID NO: 14480 - protein, 113 aa, Glycine max
RNLLKDLIVQCLLRLKEPSVLLRCRKDDLHLVENVLDSAAQEYAEKANVDPPEIIVDNQVYLPPGLTHQNSHDLYCSGGVVLASRDGKIVCENTLDARLDVVFRKKLPEVKKN

SEQ ID NO: 14481 - protein, 70 aa, Glycine max
MYCIPMNSLLANFRLLYFVDFGYCIGSKIWKVIGLVEAVAATHSFLLSFIFSWERGLRLILLRGERVNHV

SEQ ID NO: 14482 - protein, 67 aa, Glycine max
MCWIQLLRSMLRKQMLIPQRSLLTTKSIFHLDSLIKILMISTALVGWCWLLVMERLCVKIHLMHVLM

SEQ ID NO: 14483 - DNA, 535 bp, Glycine max
gacatatattcactaaaatggccttggaagtaactcatatatgcaaaagaactgtggtgagcaccaaggcagtggagccaggaaagtacttccccttgtctgttttggatcgctacatggagaacaaccacattaggatggtgtactattaccaaacctcaagagaagtggaacttggaaaagtgaccaagaagttgagagagaccttgtcagagatgcttacccattttcccatagtgagtggaaggttggtaagagatgatgagacagggcattggaagatcaagtgcaatgatgctggagttagagtggtggaggccaaagccaaagggagtgtaggagggtggctagctaaccttgatagggaaaaggaactccaacttgtgcattgggaggacatgtttcacaagccctattattggtcccaccttttatgtccagctaactgaattcgaagaaggtggattagcaattggcctaagctgctttcatctcttggtagattccacttgtgcaacattattcatgaaagcct

SEQ ID NO: 14484 - protein, 148 aa, Glycine max
HIFTKMALEVTHICKRTVVSTKAVEPGKYFPLSVLDRYMENNHIRMVYYYQTSREVELGKVTKKLRETLSEMLTHFPIVSGRLVRDDETGHWKIKCNDAGVRVVEAKAKGSVGGWLANLDREKELQLVHWEDMFHKPYYWSHLLCPAN

SEQ ID NO: 14485 - protein, 143 aa, Glycine max
MALEVTHICKRTVVSTKAVEPGKYFPLSVLDRYMENNHIRMVYYYQTSREVELGKVTKKLRETLSEMLTHFPIVSGRLVRDDETGHWKIKCNDAGVRVVEAKAKGSVGGWLANLDREKELQLVHWEDMFHKPYYWSHLLCPAN

SEQ ID NO: 14486 - protein, 110 aa, Glycine max
MENNHIRMVYYYQTSREVELGKVTKKLRETLSEMLTHFPIVSGRLVRDDETGHWKIKCNDAGVRVVEAKAKGSVGGWLANLDREKELQLVHWEDMFHKPYYWSHLLCPAN

SEQ ID NO: 14487 - DNA, 697 bp, Glycine max
ttgctttctacctatgtctccaaattcttagtgatttcaaatttgttttctctaagattttagaagcaggaaaaaccatactttgtcagcaatgttgctgaaattttctgactattctcagttgtaatgtttcattactgatgcaggagggacaaattttgtgagtgctatgtctgcaatattctccttgtttttaattatatctactaccttataattaactatcaggtgcgaacactggatcccaaagctgtcaatgatgaaaattgcactggaaatactagtgatggtggcaacaacacatggtgaagtgcaggctcggagaagaacaagatgaaagtgaggaggaagctaagagagccacggttttgtttccaaacaagaaatgatgtagatgtgcttgatgattgttacaaatgtaagaagtatggttagaaagttgtgaagaatagccttcacccaagcaaaatgaaaagaaagatgactccaatgaagtgccaagtagcaattatacagggattgagacagaaaaggatttttaggttgacacaataagccttagtgaggactcatctatacaataatgtatactagtggaactactggtgaaatgacattatgcaactttggttattcatagtaagtgttgtttttgtaaatagtttctttagtaaaggctaaatgatgacatacttgc

SEQ ID NO: 14488 - protein, 33 aa, Glycine max
MKVRRKLREPRFCFQTRNDVDVLDDCYKCKKYG

SEQ ID NO: 14489 - protein, 32 aa, Glycine max
AFYLCLQILSDFKFVFSKILEAGKTILCQQCC

SEQ ID NO: 14490 - DNA, 814 bp, Glycine max
cccccccccaatggaccttggccttaatccatctgcaacaatgtcacaggatgggaagtttggtgccaatgcttctatgataggaggggagactgaggcactgcagaggctcaaaaaatttgcagctgagtgtgcagctcagccaaacaaggggtttaaggatgggacacagagtatatatggtgccaacttctcctgcaagatttctccgtggttggcaatgggatgcctctcccctcgcacgatgtatgaagaactaaagaagactaccagcagagccatttctgcttcggcggacaagaacgatggtggtaatggctcgtccagaaacggtacaaattggttgatgtttgagttgctatggagggacttctttaggtttataacaaaaaaatacagttctgcaaagaaacagctggaagctgctccggtcactgcatgtgctggagcatatgcttaagctggaagttctagtgggcattaaagagtttgtttcagggtgtgggttggttccctacgcagacatggcagtagggtgctcgatgaacaagatttggttccccttctgaagttctgttgtaactgacagatacattatatttcaatatggaagctttacattattttctcgaaggcaagtgttggtattcttagagtaacatttcgtctgcatcgggcatcttttgagtagatctttgagtccaaaattcatgtctttgtctctcccccagtaactcgatattgtgggtgaaatttgaaaattaaaaatggatgtaattactacggcatctatatttttaataataccaggatg

SEQ ID NO: 14491 - protein, 152 aa, Glycine max
PPPMDLGLNPSATMSQDGKFGANASMIGGETEALQRLKKFAAECAAQPNKGFKDGTQSIYGANFSCKISPWLAMGCLSPRTMYEELKKTTSRAISASADKNDGGNGSSRNGTNWLMFELLWRDFFRFITKKYSSAKKQLEAAPVTACAGAYA

SEQ ID NO: 14492 - protein, 149 aa, Glycine max
MDLGLNPSATMSQDGKFGANASMIGGETEALQRLKKFAAECAAQPNKGFKDGTQSIYGANFSCKISPWLAMGCLSPRTMYEELKKTTSRAISASADKNDGGNGSSRNGTNWLMFELLWRDFFRFITKKYSSAKKQLEAAPVTACAGAYA

SEQ ID NO: 14493 - protein, 139 aa, Glycine max
MSQDGKFGANASMIGGETEALQRLKKFAAECAAQPNKGFKDGTQSIYGANFSCKISPWLAMGCLSPRTMYEELKKTTSRAISASADKNDGGNGSSRNGTNWLMFELLWRDFFRFITKKYSSAKKQLEAAPVTACAGAYA

SEQ ID NO: 14494 - DNA, 418 bp, Glycine max
aaatgctgtgtgaagcaaataagtgccttagaagaaagctggaggagaccagcaaccaggtgcatggccaagtgtgggagcacggtgccaacttactcggctacgagaggcactctcctcaacagcaggccccatcacatgttggcaatggtttgttctttcatcccctggaagctgcagcagagccaaccctgcagatcgggttcgctcctgagcatatgaataacttcatgccaacatggctaccctgaagatggatcttgaggcaaaggaaataaataaagatgcggtggcagcatcatactctatgcaagctaagagtgacagctgtgtttcagtcacatatatgatctagtctgtgtgtcaatgtgtcgaaaaacatgtctgtgattttgttatatgaatgtaacgcgcaatg

SEQ ID NO: 14495 - protein, 82 aa, Glycine max
MLCEANKCLRRKLEETSNQVHGQVWEHGANLLGYERHSPQQQAPSHVGNGLFFHPLEAAAEPTLQIGFAPEHMNNFMPTWLP

SEQ ID NO: 14496 - protein, 73 aa, Glycine max
KCCVKQISALEESWRRPATRCMAKCGSTVPTYSATRGTLLNSRPHHMLAMVCSFIPWKLQQSQPCRSGSLLSI

SEQ ID NO: 14497 - protein, 52 aa, Glycine max
MAKCGSTVPTYSATRGTLLNSRPHHMLAMVCSFIPWKLQQSQPCRSGSLLSI

SEQ ID NO: 14498 - DNA, 1116 bp, Glycine max
tttgaattttattagaatatggaaattgagcattatggttagtgccaaaatgatatgaaaatttagaattgagactgtacaactcctttgcagtttggttatttctgtgttctgtctcaatttgaatatgcagagtgtggaaaacggacatggtttggggacaaaagagaggaacaagctccaattgagtcaaatgaatttcttccaaggttaaggaggcaaaagtcagtaacttctaggtctcagtatataaacaaaaaggaactaagagtttgtgttggaacatggaatgttggaggaaagcttccacctgatgacctagatattgaggggggggggggcattaacgagctagctgatatctatgttcttagtcttcaggagattgtaccattaaatccgggtaacattttttgtgttgaagacactcgaccgagacagaaatgggaaaacattattcgagatgcacttaatagagttagatcaaaagcaccaaagatgaaatccttcagtgatcccccatcaccatcaaaatttaagccatcaaatgatgcgccagacatagaagaagaaacattacttgaaagtgatggtgatattggtgaggaagtccatcctttggatgaagaacacaatgtttatgatggaggtgcaaataaaccaaccacatatgaagaagccttgaatactaattttcaggcttcagatgttgttgatattgccaacacaaaagagccaataggcaatgatttaaagagacagatttatgatggaaagaggtgatgccttggctgtattgaagaatagtatgagtgaccctaacaatgttcttcaaagttggaattgtacccttgtcactccttgcacatggtttcatgttaattgcaacagtgaaaatagcgtgacccgtgttgatcttggaaatgcaaacctttcgggtcatcttgttccacagcttggtcagctcctaattttggaatgcttgtaagttacaaaacagatatgacattattggctcaaatatgcttaattttactagtaattcttgattgttggctgaaatagatatgaccaggcaaaggttatgctaaaagtaaatatgataacggttatttt

SEQ ID NO: 14499 - protein, 94 aa, Glycine max
MKSFSDPPSPSKFKPSNDAPDIEEETLLESDGDIGEEVHPLDEEHNVYDGGANKPTTYEEALNTNFQASDVVDIANTKEPIGNDLKRQIYDGKR

SEQ ID NO: 14500 - protein, 73 aa, Glycine max
MMERGDALAVLKNSMSDPNNVLQSWNCTLVTPCTWFHVNCNSENSVTRVDLGNANLSGHLVPQLGQLLILECL

SEQ ID NO: 14501 - protein, 72 aa, Glycine max
MERGDALAVLKNSMSDPNNVLQSWNCTLVTPCTWFHVNCNSENSVTRVDLGNANLSGHLVPQLGQLLILECL

SEQ ID NO: 14502 - DNA, 535 bp, Glycine max
  misc_feature (20)..(22): n is a, c, g, or t
ggcatcatcacagacatggnnntctctgcctctgcaattcagcgggctcaagtgctccccactctcatcttcttctctcttctttaaaccttctctttggacccaacaatcccaaaagcgcgtttcaattaccattgcgaactcaatagcaatagccaatgcgcagaacaaagagagagcgaggcttaagaaactcttcgaagaagcctacgagagatgccgcaatgctccaatggaaggtgtctccttcaccatcgaagacttcactgctgctcttgacaagtacgacttcgattctgaagttggcggcaagattaaaggcactgtgttctacacagataacaatggagcagttgttgatatcactgcaaagtcttcggcatatttgccactgcaagaggcgtgcatccacagggttaagcatgttgaagaagcaggcttagttcctgggttcaaagaggagtttttgatcattggtgagaactcaatagatgatagcttggtcttgagtttaaggtctcttcagtttgacctt

SEQ ID NO: 14503 - protein, 178 aa, Glycine max
  misc_feature (7)..(7): Xaa can be any naturally occurring amino acid
ASSQTWXSLPLQFSGLKCSPLSSSSLFFKPSLWTQQSQKRVSITIANSIAIANAQNKERARLKKLFEEAYERCRNAPMEGVSFTIEDFTAALDKYDFDSEVGGKIKGTVFYTDNNGAVVDITAKSSAYLPLQEACIHRVKHVEEAGLVPGFKEEFLIIGENSIDDSLVLSLRSLQFDL

SEQ ID NO: 14504 - protein, 101 aa, Glycine max
MEGVSFTIEDFTAALDKYDFDSEVGGKIKGTVFYTDNNGAVVDITAKSSAYLPLQEACIHRVKHVEEAGLVPGFKEEFLIIGENSIDDSLVLSLRSLQFDL

SEQ ID NO: 14505 - protein, 94 aa, Glycine max
MRRTKRERGLRNSSKKPTRDAAMLQWKVSPSPSKTSLLLLTSTTSILKLAARLKALCSTQITMEQLLISLQSLRHICHCKRRASTGLSMLKKQA

SEQ ID NO: 14506 - DNA, 1078 bp, Glycine max
gttatatacagctttttctttgttcgcaaaatcatcgcccacatggtcaccttcttcttctactgtgttgtgattccccttacaatcctggtccctgaggttcatgttccaatctggggagctgtttatattccttctgtcatcaccattctcaattcagttggaacaccaaggtccattcaccttctgttctattggatcctctttgagaatgtgatgtctttgcaccgtaccaaggcaacatttataggtctcttagagtatgggagggctaatgaatgggttgtgactgaaaaacttggtgactctgtcaacaataataataagaataaatcaggagatgctgccaagaagaataatgccatcaaggccacccccaaaaagactcgatccaaatttgttgaaagacttaatttactggagctgggatttgctgtcttcctcttcgtatgtggatgctatgattatgttcatgggaaacacaactacttcatctatctcttccttcagaccttaacattctcaattgtaggatttggctacgttggcaccatcgtgtaaacctcattgagccaaatttctcaagttacttaagtttcaccaatgttgtgtccatatttttctagtttctcctaaaaaaaatacatcaagggaggctgatttcttcaagcaacaaacgcagtaccaaaatcatctacagctagtttagctcaaatcattttcaattcggaaagaaaaaagtcctttccaagatttcattgccatccatcatcaagaagatacaaatcatcacagacaaagtgctgttattactagaattgcattatacaggcttaagtgcagctatgaagaagtacccaaaaaaagtggttaaattagagccttagaaattaagtagacagtgtgattttgtttgcatagattgttttgtgagattttatagttatatatttcgtgagtccttttattttaggtttgcttagtctgagcccaataatgtggtggataaaaatgcgcttctaattcatgttatttgtcattttttcaccacgaaatgaattttattttccatagatgc

SEQ ID NO: 14507 - protein, 186 aa, Glycine max
VIYSFFFVRKIIAHMVTFFFYCVVIPLTILVPEVHVPIWGAVYIPSVITILNSVGTPRSIHLLFYWILFENVMSLHRTKATFIGLLEYGRANEWVVTEKLGDSVNNNNKNKSGDAAKKNNAIKATPKKTRSKFVERLNLLELGFAVFLFVCGCYDYVHGKHNYFIYLFLQTLTFSIVGFGYVGTIV

SEQ ID NO: 14508 - protein, 172 aa, Glycine max
MVTFFFYCVVIPLTILVPEVHVPIWGAVYIPSVITILNSVGTPRSIHLLFYWILFENVMSLHRTKATFIGLLEYGRANEWVVTEKLGDSVNNNNKNKSGDAAKKNNAIKATPKKTRSKFVERLNLLELGFAVFLFVCGCYDYVHGKHNYFIYLFLQTLTFSIVGFGYVGTIV

SEQ ID NO: 14509 - protein, 114 aa, Glycine max
MSLHRTKATFIGLLEYGRANEWVVTEKLGDSVNNNNKNKSGDAAKKNNAIKATPKKTRSKFVERLNLLELGFAVFLFVCGCYDYVHGKHNYFIYLFLQTLTFSIVGFGYVGTIV

SEQ ID NO: 14510 - DNA, 1335 bp, Glycine max
gaatttgctctagacaagtttggtgattgacgatgtcgggcttgaagcttggcacgactgcttccatctacgttcgaacagcgaaaaccaaaagcaaacccctcttatcatggagaagcccaccccaacacccccgcagccgcaggtacatgctttccccttccaaaaatcaaatcctagggttcacacctagaaacaaattcccatgctattctttgggaagggctggtcttgtcacagattttggttcgtcagtgccccaacctcaacctcaacctcagccaaagccagagccagaaccagaacctgaaccttccaaattgcttacgttgccaacaattttgactctaggccgtgtcgccgctgtcccacttcttgttgctactttctacatggacggttggcgtggaactgctgctactaccagcattttcgtcgctgcatcaatcactgattggcttgatggctatcttgctcgcaagatgaagttaaaatcttcattcggtgcattcttagatccagttgctgacaagcttatggttgctgctacactggtcttattatgtactagacctttggatggtggtgtgtttggacaagcgccgtggctactcactatacctgcaattgccataattggtagagagataaccatgtctgcagtcagggagtgggctgcttcccaggatagcaagcttttagaggctgttgctgtaaataacttggggaagtggaaaacagccacacagatgacagcattaaccatccttcttgcgacccgggactggagccatggaggaggagctgccattgtagtaggctctggtgttgctttgctttatacttcagcagggcttgccttatggtcgttggttgtatatatgaagaaaatatggagggtgttgttgaggtagcttgcgaacatttaccaatgtcacgaaagggggctgcaattttagtggcatgcaaatgtttttttttttcctgcgcaatctctaaccccatgcagtgtcatttctcctactcgtgtattttctgcgcatttttttggtcctctaaaaaagataagggccactagccatgcttaagcgttacagcagtgattgtgttgggaaaacgttgtgttgtaagttgtaacccacgttttccccaaatccatgaaggcacttgcttctccgtttgatgctttggaaagtgtgaacacacgcattttgttttaggccctaactcaatttagagtcattgaaagtttgagaattgcgaccagagaaaattcacaacaggtcaggaattattgtataatggttgatttgttctgatatagttcaacgatgc

SEQ ID NO: 14511 - protein, 293 aa, Glycine max
MSGLKLGTTASIYVRTAKTKSKPLLSWRSPPQHPRSRRYMLSPSKNQILGFTPRNKFPCYSLGRAGLVTDFGSSVPQPQPQPQPKPEPEPEPEPSKLLTLPTILTLGRVAAVPLLVATFYMDGWRGTAATTSIFVAASITDWLDGYLARKMKLKSSFGAFLDPVADKLMVAATLVLLCTRPLDGGVFGQAPWLLTIPAIAIIGREITMSAVREWAASQDSKLLEAVAVNNLGKWKTATQMTALTILLATRDWSHGGGAAIVVGSGVALLYTSAGLALWSLVVYMKKIWRVLLR

SEQ ID NO: 14512 - protein, 254 aa, Glycine max
MLSPSKNQILGFTPRNKFPCYSLGRAGLVTDFGSSVPQPQPQPQPKPEPEPEPEPSKLLTLPTILTLGRVAAVPLLVATFYMDGWRGTAATTSIFVAASITDWLDGYLARKMKLKSSFGAFLDPVADKLMVAATLVLLCTRPLDGGVFGQAPWLLTIPAIAIIGREITMSAVREWAASQDSKLLEAVAVNNLGKWKTATQMTALTILLATRDWSHGGGAAIVVGSGVALLYTSAGLALWSLVVYMKKIWRVLLR

SEQ ID NO: 14513 - protein, 173 aa, Glycine max
MDGWRGTAATTSIFVAASITDWLDGYLARKMKLKSSFGAFLDPVADKLMVAATLVLLCTRPLDGGVFGQAPWLLTIPAIAIIGREITMSAVREWAASQDSKLLEAVAVNNLGKWKTATQMTALTILLATRDWSHGGGAAIVVGSGVALLYTSAGLALWSLVVYMKKIWRVLLR

SEQ ID NO: 14514 - DNA, 1197 bp, Glycine max
taggaaatgtgttgcagatacatttaaggactacccatctaccgcggtaaagcttatagagaccctactttctgtagagccagcacatcgagggtctgcagcagctgctctgaaaagtgagttctttacgtcagagcctctgccttgtgatccatcaagtttaccaaaatatgctcccagcaaggagattgatgctaaattacgggatgaagccagaaggcaaagagctgttggaggtagggaacaaaaagttgcctcaggagttggacaggaaaaagggcatagagcaaatgttgcaacaaaagacaatgctgacccaggcttattggtgcagcaaggacgttattccagctcaaggaaccaaagtgaattatccaaccctcatagaggaacggtgtctggaattctggttttccctcacaaacagtcagaaaaagaaatggataataatttctctgggcatatctataagaggccttcacattccggcccattggttcctggttctgtctgggcaaaaggcaggaaggaagttgatgatgtacctcctgtttcaaacagagtgaacctatcaaaactatctgggctagtggcatctaggactttgcctgaagatcaggaggttaaaccggttcacttgcaccacagaaaaccaattgaagtaagaaaatctgtggagtcaactaatggatcagagtcaagaagaaggcaggatcaaaaacggattgttgatctcaatcaaattgaaagtagaagggtcgcggctgaaaaatcaactccgggcgggcgcgagtccatgggaaacaagatatacctctcaggtccattaatggtttcgtcaagcaacatggatcagatgctcaaagatcatgacagaaagatccaagagttttcaagacgagcgagagtcgacaagtcaagagcaagaggtgagaaagttcgtgctctgcggaagtagtcgaattcgataaactatttctgatgttcagctgcttacatatttttatgacaccatttatttatctcaaacctaatgagagaaaggagcggggagaggaagatagtgtattcaatcttactgtagcatatataatgtaaattgcaggctttataagaagagattgatctttcttcaactcttcatgtttcacccttatataaaatataagcaattcaatttattatgttctttccccc

SEQ ID NO: 14515 - protein, 318 aa, Glycine max
RKCVADTFKDYPSTAVKLIETLLSVEPAHRGSAAAALKSEFFTSEPLPCDPSSLPKYAPSKEIDAKLRDEARRQRAVGGREQKVASGVGQEKGHRANVATKDNADPGLLVQQGRYSSSRNQSELSNPHRGTVSGILVFPHKQSEKEMDNNFSGHIYKRPSHSGPLVPGSVWAKGRKEVDDVPPVSNRVNLSKLSGLVASRTLPEDQEVKPVHLHHRKPIEVRKSVESTNGSESRRRQDQKRIVDLNQIESRRVAAEKSTPGGRESMGNKIYLSGPLMVSSSNMDQMLKDHDRKIQEFSRRARVDKSRARGEKVRALRK

SEQ ID NO: 14516 - protein, 172 aa, Glycine max
MDNNFSGHIYKRPSHSGPLVPGSVWAKGRKEVDDVPPVSNRVNLSKLSGLVASRTLPEDQEVKPVHLHHRKPIEVRKSVESTNGSESRRRQDQKRIVDLNQIESRRVAAEKSTPGGRESMGNKIYLSGPLMVSSSNMDQMLKDHDRKIQEFSRRARVDKSRARGEKVRALRK

SEQ ID NO: 14517 - DNA, 1401 bp, Glycine max
aaaatcattaaaatcttttttttgcccttatgaacaccttcgtaaagaagactagaggcatcatctcccttgccaccagaggtttcgccagctcttccggagccatcaaagttaaacttctcccctccgatacttacaacctcgaaggcagaaagatccccactgaaactgaaaccaacgctgaggaacttatgcactacttcaaggaaatgtccatgatgagaagaatggaaatcgctctcgacaacctctacaaggctcgtgaaatcagaggtttctgccatttgtacgatggtcaggaatctattgccatgggtatcgaagctgccgttacttttgaagattgtttgatcactgcttacagagaccattgccaagcttactgcagaggtgattccgtccatcaaattatcgctgaattgatgggtaagagaaccggttcaaccaacggtaagggtggttctatgcatttctacagaaagaagaccaacttctatggtggtcacggtattgtcggtgctcaatgtgccctcggtactggtttgggcttcgctttgaagtaccaaaagaagcccaatgttgccattactatgtacggtgatggtgctgccaaccaaggacaattgttcgaagctgccaatatggctgctttgtggaagctccccgtcctctacgtctgtgaaaacaaccattacgccatgggtacctccaccgccagaggtgctgccagtactgaatactataaaagacttatgcccgtccccggtattagatttgctgccaacaacgtctttgccgttagagaagtcaccaaattcgccaaggaatactccatcaaagaaggtcccatctgcctcgaaatgcaaacatacagataccacggtcactctatgtctgatcccggtgttacttacagaaagaagcaagaaatcgatgaatacagaaagactaaggattgtatcacccttgtcaagcaactcatcattgacaataaggtcgccactgaggaggatcttaaggaagttgaaagagccatcaagaaggaagtcgatgaaaccgtcgaaaaggtccgtgaagatgcttatcccgatgccaaggatctcctcaaggatgtgtatattgaagaccccaaggaaccccaacacatcagaggtgttgaatacgacaagtctttcgcccccagaggattgccttaagagatttccgcatactagaaatagtagaaattttataagtctataaatgaatttaatgccttgattaaaaatttcttgttaaagaaatctggaaaaagggatttcaaaatgatttattaaatgcgtatttattttatatgacttatattcgctatatagcttggacagcatacatcatcctcatataaaaaattcctcttaactc

SEQ ID NO: 14518 - protein, 388 aa, Glycine max
MNTFVKKTRGIISLATRGFASSSGAIKVKLLPSDTYNLEGRKIPTETETNAEELMHYFKEMSMMRRMEIALDNLYKAREIRGFCHLYDGQESIAMGIEAAVTFEDCLITAYRDHCQAYCRGDSVHQIIAELMGKRTGSTNGKGGSMHFYRKKTNFYGGHGIVGAQCALGTGLGFALKYQKKPNVAITMYGDGAANQGQLFEAANMAALWKLPVLYVCENNHYAMGTSTARGAASTEYYKRLMPVPGIRFAANNVFAVREVTKFAKEYSIKEGPICLEMQTYRYHGHSMSDPGVTYRKKQEIDEYRKTKDCITLVKQLIIDNKVATEEDLKEVERAIKKEVDETVEKVREDAYPDAKDLLKDVYIEDPKEPQHIRGVEYDKSFAPRGLP

SEQ ID NO: 14519 - protein, 334 aa, Glycine max
MHYFKEMSMMRRMEIALDNLYKAREIRGFCHLYDGQESIAMGIEAAVTFEDCLITAYRDHCQAYCRGDSVHQIIAELMGKRTGSTNGKGGSMHFYRKKTNFYGGHGIVGAQCALGTGLGFALKYQKKPNVAITMYGDGAANQGQLFEAANMAALWKLPVLYVCENNHYAMGTSTARGAASTEYYKRLMPVPGIRFAANNVFAVREVTKFAKEYSIKEGPICLEMQTYRYHGHSMSDPGVTYRKKQEIDEYRKTKDCITLVKQLIIDNKVATEEDLKEVERAIKKEVDETVEKVREDAYPDAKDLLKDVYIEDPKEPQHIRGVEYDKSFAPRGLP

SEQ ID NO: 14520 - protein, 328 aa, Glycine max
MSMMRRMEIALDNLYKAREIRGFCHLYDGQESIAMGIEAAVTFEDCLITAYRDHCQAYCRGDSVHQIIAELMGKRTGSTNGKGGSMHFYRKKTNFYGGHGIVGAQCALGTGLGFALKYQKKPNVAITMYGDGAANQGQLFEAANMAALWKLPVLYVCENNHYAMGTSTARGAASTEYYKRLMPVPGIRFAANNVFAVREVTKFAKEYSIKEGPICLEMQTYRYHGHSMSDPGVTYRKKQEIDEYRKTKDCITLVKQLIIDNKVATEEDLKEVERAIKKEVDETVEKVREDAYPDAKDLLKDVYIEDPKEPQHIRGVEYDKSFAPRGLP

SEQ ID NO: 14521 - DNA, 1480 bp, Glycine max
aggaaagaaaagaaaaacatggttggtgaaggagaaaagccgaaggcagtgataataggaggtagcatagcagggatatcaagtgcacatgctctcaccttagctggttgggatgtacttgtgcttgagaaaaccacctcacctccaactggaagccccactggtgcaggtcttggactcaattctttgtcccaacaaatcatccactcttggcttccaccacaccaaaaacaactccttcacaacaccactttaacactcaccattgatcagaaccatgcaactgatagtgagaagaagtttagctggacattgacaagagatgagagttttaacttcagagcagcacattgggctgatctccatggccttctgtacaatgcactgccaccaaatgtatttttgtggggtcacctttttctctcagtccatgttgctgatgataagggttcagtcatagtaaaggctaaagtactagaaactggcaagattatagagatagtaggggattttcttgttgcggcagatggttgtctctcttccctccgccagaaatatctccccgattttaaactcagatattctggctattgtgcttggagaggggttcttgatttttcaaaaattgagaattcagaaaccatcaatggtatcagaaaggcataccctgatctaggaaaatgcttgtactttgacttggcctctggcacacacactgtgttgtatgagctgcaaaacaagaagctcaattggatttggtatgtgaatcagcctgagcctgaagttaagggaacatcggtgacaatgaaagtaaacaatgacatgatccagaaaatgcaccaagaagcggaacaagtttggattcctgagttggtaaaggtcataaaggaaacaaaggaccctttcttaaatttcatatatgatagtgatcccttagagaagatcttttgggacaatgtggtattggtaggggatgcagctcaccccacaactcctcactgccttagaagcactaacatgtcaatattggatgcagcagtgttaggcaaatgcatagagaagtggggaccagaaaagcttggatcagctttagaagagtatcagttcgttaggctaccagtcacttccaaggaagttctgtactcaaggcgtcttggccgattgaaacaagggctagttctacctgatagagaaccttttgacccaaagttaattaggccagaggactgccaggagcttctactgaggaacacaccattttttaatgatgagccgttgtcactgctttgataccatcttacatttcttcatctgattgcttatagcagtgagttttatgactgctttgaaaatagatgtcttacttagcaccatccatacatctgtttgcacactgataatattttggaccctttcccataactgatttggtgccttttggcctcaaatttttgtttttgctattaatagttttatcatc

SEQ ID NO: 14522 - protein, 429 aa, Glycine max
RKEKKNMVGEGEKPKAVIIGGSIAGISSAHALTLAGWDVLVLEKTTSPPTGSPTGAGLGLNSLSQQIIHSWLPPHQKQLLHNTTLTLTIDQNHATDSEKKFSWTLTRDESFNFRAAHWADLHGLLYNALPPNVFLWGHLFLSVHVADDKGSVIVKAKVLETGKIIEIVGDFLVAADGCLSSLRQKYLPDFKLRYSGYCAWRGVLDFSKIENSETINGIRKAYPDLGKCLYFDLASGTHTVLYELQNKKLNWIWYVNQPEPEVKGTSVTMKVNNDMIQKMHQEAEQVWIPELVKVIKETKDPFLNFIYDSDPLEKIFWDNVVLVGDAAHPTTPHCLRSTNMSILDAAVLGKCIEKWGPEKLGSALEEYQFVRLPVTSKEVLYSRRLGRLKQGLVLPDREPFDPKLIRPEDCQELLLRNTPFFNDEPLSLL

SEQ ID NO: 14523 - protein, 423 aa, Glycine max
MVGEGEKPKAVIIGGSIAGISSAHALTLAGWDVLVLEKTTSPPTGSPTGAGLGLNSLSQQIIHSWLPPHQKQLLHNTTLTLTIDQNHATDSEKKFSWTLTRDESFNFRAAHWADLHGLLYNALPPNVFLWGHLFLSVHVADDKGSVIVKAKVLETGKIIEIVGDFLVAADGCLSSLRQKYLPDFKLRYSGYCAWRGVLDFSKIENSETINGIRKAYPDLGKCLYFDLASGTHTVLYELQNKKLNWIWYVNQPEPEVKGTSVTMKVNNDMIQKMHQEAEQVWIPELVKVIKETKDPFLNFIYDSDPLEKIFWDNVVLVGDAAHPTTPHCLRSTNMSILDAAVLGKCIEKWGPEKLGSALEEYQFVRLPVTSKEVLYSRRLGRLKQGLVLPDREPFDPKLIRPEDCQELLLRNTPFFNDEPLSLL

SEQ ID NO: 14524 - DNA, 955 bp, Glycine max
acatgccaaaattaacacccctgaatttcacactccctctcccaaactcatcatcctataatacaaagggtttggaatatatatcaaatatcaaaatacatcacaacatcaaaatggcctcaattgttactatggccaccattgtcacattagtcctcgcactagcatgttgtggcatgtctgccccgacctcagtgccgaaaaccactgcagcggccccggccccggagagcaatggctgcttgatggcactagcaaacatgtcagattgtctgacctatgttgaggatgggagtaagttgtcaaagcccgacaaagggtgctgccctgagttggcagggttggttgatagcaaccccatttgcttgtgtgagatgctaggcaaacctgactctattggcatcaaaattgatttgaacaaagccctcaagcttccttctgtttgtggagtgaccactccccctgttagcacctgtttccgctgtgggagtccccgtgtccttgcctccatcaatgagtgaaggtccaagtattgcaccgggagccttcagtccttcaaatgcagatgctgcgaatcctgcttcaagtcctaactctgcttctagtcctgcaggtgggctaggcccttcgtccgaggatgctgctgccagcccttctcaaaacaaaaatgaagtttcagccattcacccttctgctttgactaatttcttttttggccttttcactttatttgtctctgtattcttctgattttacacacatttattctgtgtcattattttagtggatattttatttcctcattatttgtatgttgtgagccactttgattaaagcttttgttgtaattttatgcactgttgcaatattgttactgtcattattagtgagccatacactttaattaggaacttcatgcctgcatttttacgccggagatattcattttttttgg

SEQ ID NO: 14525 - protein, 172 aa, Glycine max
MPKLTPLNFTLPLPNSSSYNTKGLEYISNIKIHHNIKMASIVTMATIVTLVLALACCGMSAPTSVPKTTAAAPAPESNGCLMALANMSDCLTYVEDGSKLSKPDKGCCPELAGLVDSNPICLCEMLGKPDSIGIKIDLNKALKLPSVCGVTTPPVSTCFRCGSPRVLASINE

SEQ ID NO: 14526 - protein, 135 aa, Glycine max
MASIVTMATIVTLVLALACCGMSAPTSVPKTTAAAPAPESNGCLMALANMSDCLTYVEDGSKLSKPDKGCCPELAGLVDSNPICLCEMLGKPDSIGIKIDLNKALKLPSVCGVTTPPVSTCFRCGSPRVLASINE

SEQ ID NO: 14527 - protein, 129 aa, Glycine max
MATIVTLVLALACCGMSAPTSVPKTTAAAPAPESNGCLMALANMSDCLTYVEDGSKLSKPDKGCCPELAGLVDSNPICLCEMLGKPDSIGIKIDLNKALKLPSVCGVTTPPVSTCFRCGSPRVLASINE

SEQ ID NO: 14528 - DNA, 369 bp, Glycine max
  misc_feature (151)..(153): n is a, c, g, or t
  misc_feature (208)..(211): n is a, c, g, or t
gtagaaacagaacttcgttgcaaaatatgggtgcttctgacgacaaccccacaactttctccaagttgtcttcaataactttgatgttcttgcactgcccttggttacgcttgtttaccctttatatgcttcaattaaggccatcgagacnnngtctactactgacgatcaacaatggctcacgtattggattctgtattccattctnnnnaatctttgagctcacatttgccaaagttcttgaactgcttcccatttggctttttgccaagttgatattcacttgctggttggttctgcctcacttcaatggggctgcggctgtttataggaattacatcagaccattttatatgaacccccaaatcc

SEQ ID NO: 14529 - protein, 122 aa, Glycine max
  misc_feature (50)..(51): Xaa can be any naturally occurring amino acid
  misc_feature (69)..(70): Xaa can be any naturally occurring amino acid
RNRTSLQNMGASDDNPTTFSKLSSITLMFLHCPWLRLFTLYMLQLRPSRXXLLLTINNGSRIGFCIPFXXIFELTFAKVLELLPIWLFAKLIFTCWLVLPHFNGAAAVYRNYIRPFYMNPQI

SEQ ID NO: 14530 - protein, 114 aa, Glycine max
  misc_feature (42)..(43): Xaa can be any naturally occurring amino acid
  misc_feature (61)..(62): Xaa can be any naturally occurring amino acid
MGASDDNPTTFSKLSSITLMFLHCPWLRLFTLYMLQLRPSRXXLLLTINNGSRIGFCIPFXXIFELTFAKVLELLPIWLFAKLIFTCWLVLPHFNGAAAVYRNYIRPFYMNPQI

SEQ ID NO: 14531 - protein, 95 aa, Glycine max
  misc_feature (23)..(24): Xaa can be any naturally occurring amino acid
  misc_feature (42)..(43): Xaa can be any naturally occurring amino acid
MFLHCPWLRLFTLYMLQLRPSRXXLLLTINNGSRIGFCIPFXXIFELTFAKVLELLPIWLFAKLIFTCWLVLPHFNGAAAVYRNYIRPFYMNPQI

SEQ ID NO: 14532 - DNA, 1300 bp, Glycine max
gaactgaacttcatcttctctactgccatggccatttcatctgcatccgatttcataaatgatttgcacagcatatgttatgccttgcaatttcaagatgtgatttgactcaacttctgggatttgagaaattcattccaccctttgcaaacactagtggttcaaacatacttaaaggtgttaactatgcatcaggtggagctggaatacgcattgaaaccggctcggacatgggtgctactatcagcttgggattacagttagcaaatcacagagtcatagtttctgaaattgctacgaaacttggaagtcctgacttagctcgacaataccttgaaaagtgcttgtattatttgaacataggcaacaatgattacatgggcaactacttccgtccccagctctacccagcaagccgcatttatagccttgagcagtatgcacaagctctgattgaagagttatctctgaatttgcaggctttacatgaccttggagcgagaaagtatgtgttggctgggttgggccttataggatgcacaccagctgtgatgcattctcatgggacaaatggatcttgtgttgaagagcataatgctgctacatacgattataataacaagcttaaagctctagtggatcagttcaataacaggttctctgctaattccaaattcatccttatacacaatggatcaaacgcccttgacattgcacatgggtttttggtttcggatgctgcttgctgcccatcagggtgtaatcccaaccaaaagccgtgcaataataggagtgactatgtgttttgggatgaagttcatcccaccgaggcatggaacctagttaatgcaatatcagcttataattctaccattgatccagcctttacttatccaatgaatatcaagcaacttgtagactgtgaagttaagagggaattggagttcaggaatgagtccacttcacagctcagtgccactgaataagttctggctatcacctagtctttcatttggagctaaattaattgagttgaatatgtacgaagtaatggcctgctactgaattgaacgacaaaggggaatgaatcaagcacagttgctgttatggaatccaattcaaaatcattaagccataatgatttggtttcaaaatcctctcctgaaatttgattttgtactgtttatactcttttctttgtttagaaccaatatattgacatgagttatactatttatgtaatatttctttacaacattattatttctctctttcttaatcacatcattcatcttatttc

SEQ ID NO: 14533 - protein, 303 aa, Glycine max
MLCLAISRCDLTQLLGFEKFIPPFANTSGSNILKGVNYASGGAGIRIETGSDMGATISLGLQLANHRVIVSEIATKLGSPDLARQYLEKCLYYLNIGNNDYMGNYFRPQLYPASRIYSLEQYAQALIEELSLNLQALHDLGARKYVLAGLGLIGCTPAVMHSHGTNGSCVEEHNAATYDYNNKLKALVDQFNNRFSANSKFILIHNGSNALDIAHGFLVSDAACCPSGCNPNQKPCNNRSDYVFWDEVHPTEAWNLVNAISAYNSTIDPAFTYPMNIKQLVDCEVKRELEFRNESTSQLSATE

SEQ ID NO: 14534 - protein, 251 aa, Glycine max
MGATISLGLQLANHRVIVSEIATKLGSPDLARQYLEKCLYYLNIGNNDYMGNYFRPQLYPASRIYSLEQYAQALIEELSLNLQALHDLGARKYVLAGLGLIGCTPAVMHSHGTNGSCVEEHNAATYDYNNKLKALVDQFNNRFSANSKFILIHNGSNALDIAHGFLVSDAACCPSGCNPNQKPCNNRSDYVFWDEVHPTEAWNLVNAISAYNSTIDPAFTYPMNIKQLVDCEVKRELEFRNESTSQLSATE

SEQ ID NO: 14535 - protein, 202 aa, Glycine max
MGNYFRPQLYPASRIYSLEQYAQALIEELSLNLQALHDLGARKYVLAGLGLIGCTPAVMHSHGTNGSCVEEHNAATYDYNNKLKALVDQFNNRFSANSKFILIHNGSNALDIAHGFLVSDAACCPSGCNPNQKPCNNRSDYVFWDEVHPTEAWNLVNAISAYNSTIDPAFTYPMNIKQLVDCEVKRELEFRNESTSQLSATE

SEQ ID NO: 14536 - DNA, 1518 bp, Glycine max
attcacccaacacttcaactccatcttcttccatccatttcctctttctcgatctgttccaaattcacttcacacacaggaaagaagatggagactcgcgccgccgcaaagagaaaggcaaatgccgccaccatagtctttgtcgaaaaacaataccccaacaagaggcagcgggttgtgttgggtgaacttcccaatttacaaaaccttattgtctccgaaactcaaaattcgcgcaaagagaagctcctatgtcggaagaatcccaatgagaagaaaccatcacccacaaacaacaacacctttccttcccctcagatcaacgaatcttatgattcggatatccacgggtatcttcgtgaaatggagatgcagaataagagaagaccaatggttgactacattgaaaaggttcagaaaattgttaccccaaccatgagagcaatattggtggattggttagtggaggtagctgtggagtacaagcttctatcggatactcttcatctctctgtatcatacatcgataggtttttatcagttaatccagtcagtaaatccagacttcagttactgggtgtttcgtccatgctcattgctgcaaaatatgaggagatggatccacctggtgtggacgagttttgcagcatcactgatcacacttatgacaagacagaggttgtgaagatggaagctgacatacttaagtccctaatgtttgaaatgggaaatcctactgtaagcacctttctaaggaggtatgctgatgttgcttctaatgaccaaaaaactccaaatttgcagattgaatttttgggcagctatattggcgagctaagtttgttggactatgattgtttaagattcttgccttctattgtggctgcctcggttatatttcttgccaagttcattatctgtcctgaagtgcatccatggacttcttccttgtgtgaatgctcgggttacaagccagctgagttgaaagaatgtgtccttatcttgcatgacttgtatttgtcaagaaaggcagcatccttcaaagctgttcgggcaaaatacaagcagcaaaagttcgaatgtgtggcaaacctgcctacccctccatatgtaccgagttgttactttgaagaccagtggtgcagtgaattccttgataaatgatcaaaccgaccattgcttgcatgggcatggcttagaaatttgatgcgtaggtttttgtctttgaattgcaagagcaacaggatttcattagataccaaagttcaattcccattcctgatgaactatcagggagaagacctttaaataaggatcaaataacaagatcttagaatgtacaactgcatacttgcaacatgtattaggagaattacggtgtaggatgaaccgaaaattgcattgttcttacagagaatttttatcttagtgaagtagtttttagacatatttgttaggaattttataatttttaattaattaatatggattatatattataaaaaaaaaaaaaaaaaa

SEQ ID NO: 14537 - protein, 387 aa, Glycine max
IHPTLQLHLLPSISSFSICSKFTSHTGKKMETRAAAKRKANAATIVFVEKQYPNKRQRVVLGELPNLQNLIVSETQNSRKEKLLCRKNPNEKKPSPTNNNTFPSPQINESYDSDIHGYLREMEMQNKRRPMVDYIEKVQKIVTPTMRAILVDWLVEVAVEYKLLSDTLHLSVSYIDRFLSVNPVSKSRLQLLGVSSMLIAAKYEEMDPPGVDEFCSITDHTYDKTEVVKMEADILKSLMFEMGNPTVSTFLRRYADVASNDQKTPNLQIEFLGSYIGELSLLDYDCLRFLPSIVAASVIFLAKFIICPEVHPWTSSLCECSGYKPAELKECVLILHDLYLSRKAASFKAVRAKYKQQKFECVANLPTPPYVPSCYFEDQWCSEFLDK

SEQ ID NO: 14538 - protein, 358 aa, Glycine max
METRAAAKRKANAATIVFVEKQYPNKRQRVVLGELPNLQNLIVSETQNSRKEKLLCRKNPNEKKPSPTNNNTFPSPQINESYDSDIHGYLREMEMQNKRRPMVDYIEKVQKIVTPTMRAILVDWLVEVAVEYKLLSDTLHLSVSYIDRFLSVNPVSKSRLQLLGVSSMLIAAKYEEMDPPGVDEFCSITDHTYDKTEVVKMEADILKSLMFEMGNPTVSTFLRRYADVASNDQKTPNLQIEFLGSYIGELSLLDYDCLRFLPSIVAASVIFLAKFIICPEVHPWTSSLCECSGYKPAELKECVLILHDLYLSRKAASFKAVRAKYKQQKFECVANLPTPPYVPSCYFEDQWCSEFLDK

SEQ ID NO: 14539 - protein, 266 aa, Glycine max
MEMQNKRRPMVDYIEKVQKIVTPTMRAILVDWLVEVAVEYKLLSDTLHLSVSYIDRFLSVNPVSKSRLQLLGVSSMLIAAKYEEMDPPGVDEFCSITDHTYDKTEVVKMEADILKSLMFEMGNPTVSTFLRRYADVASNDQKTPNLQIEFLGSYIGELSLLDYDCLRFLPSIVAASVIFLAKFIICPEVHPWTSSLCECSGYKPAELKECVLILHDLYLSRKAASFKAVRAKYKQQKFECVANLPTPPYVPSCYFEDQWCSEFLDK

SEQ ID NO: 14540 - DNA, 451 bp, Glycine max
  misc_feature (393)..(395): n is a, c, g, or t
acaaatgaactgctatcactgtggtcttgaatccagacatttgaaatatacttccttctttcacaatataaatgccagtgccctccggacaatgaaggatatgtttgctgaaagttccttcgataagcttttgaatcttgtggagatgaaccatcagttggcttgtgatctagaagctggtggctgtggcaagctcaaccacatccatcacttactttcaactccaccccatgtttttatgacagtcctaggttggcaaaatacatgtgagagtgccaatgatataacagagactctggcagccctgagcaccaatatagatatcagtgtcctttatcctggtttagatcctaaatgcatccataacttggtgtcagtggtttgctactacgnnnagcattatcattgctttgcttatagccataaccatgaacagtggattatgtatgat

SEQ ID NO: 14541 - protein, 150 aa, Glycine max
  misc_feature (131)..(132): Xaa can be any naturally occurring amino acid
QMNCYHCGLESRHLKYTSFFHNINASALRTMKDMFAESSFDKLLNLVEMNHQLACDLEAGGCGKLNHIHHLLSTPPHVFMTVLGWQNTCESANDITETLAALSTNIDISVLYPGLDPKCIHNLVSVVCYYXXHYHCFAYSHNHEQWIMYD

SEQ ID NO: 14542 - protein, 149 aa, Glycine max
  misc_feature (130)..(131): Xaa can be any naturally occurring amino acid
MNCYHCGLESRHLKYTSFFHNINASALRTMKDMFAESSFDKLLNLVEMNHQLACDLEAGGCGKLNHIHHLLSTPPHVFMTVLGWQNTCESANDITETLAALSTNIDISVLYPGLDPKCIHNLVSVVCYYXXHYHCFAYSHNHEQWIMYD

SEQ ID NO: 14543 - protein, 120 aa, Glycine max
  misc_feature (101)..(102): Xaa can be any naturally occurring amino acid
MKDMFAESSFDKLLNLVEMNHQLACDLEAGGCGKLNHIHHLLSTPPHVFMTVLGWQNTCESANDITETLAALSTNIDISVLYPGLDPKCIHNLVSVVCYYXXHYHCFAYSHNHEQWIMYD

SEQ ID NO: 14544 - DNA, 1300 bp, Glycine max
ttatgccttcgtgcttcgcattgtgcttttactggtgattgcttggatgactctccttgtcttcaactctgctctgatagttgtaccaatttcacttgggcgggcacttttcaattctattcctcgccttcccataactcatgggattaaatgcaatgatctgtatgcatttatcattggaagctatgtgatctggactgctgttgctggagttagatactcaattgagcaaataagaaaaaggagatcttcggttttgtttggccaattatggaagtggtgtggcattcttgtgaagagttctgcacttctgtctatatggatatttgttatcccagtgcttattgggcttctctgtgagcttttggtcattgtgccaatgagagttccagtggatgaaagtccagtattcctccttaatcaagactgggcattaggccttatatttctcaagatatggactagatcggttatgttggaccacatgatgccgctggtggatgaaagttggcgagtcaaatttgagcgagtgagagaggatggtttctccaggctgcaaggtctttgggtccttcgggaaattgtacttccgatcataatgaagctgttgacagcattgtgtgtaccctacgttttggccaaaggtgtatttccagtgcttgggtatcccttggtaataaattctgccgtctatcggtttgcatggttgggatgcctctctttcagttttgtgtgcttctgtgccaagagattccatgtctggttcacaaatctccataattcaatacgcgatgaccggtatctgattggccggaggttgcataactttggagaacatgctgagaaagcaaatgtagcagaaacttctacaggggagcaggaagctattttactaggtacaggtttaaaccaacaagatcacgaagcagatgttggactacggttgaggcacgtaaatcaacaggtgggctgaattgtattttcagggaggaaggccactgtgtaggttgtgaagcctcgtgctgacatggttcatgaatcactgatgtatactctacacttgtgttgggttagttataatacctcgtcatgacacacctgtgcttatagttaacgttaaacattttgtgcgtgtcgtttaaaatttagctaataggaggaaaataaaattgttgatagcgcatttttttttcaaagaaattctttgtgaaatagggaagctggtcttgatcgtctgtctgagatatacttaaataacatagttatagtagttaattgttatggtaattatttattaatc

SEQ ID NO: 14545 - protein, 323 aa, Glycine max
YAFVLRIVLLLVIAWMTLLVFNSALIVVPISLGRALFNSIPRLPITHGIKCNDLYAFIIGSYVIWTAVAGVRYSIEQIRKRRSSVLFGQLWKWCGILVKSSALLSIWIFVIPVLIGLLCELLVIVPMRVPVDESPVFLLNQDWALGLIFLKIWTRSVMLDHMMPLVDESWRVKFERVREDGFSRLQGLWVLREIVLPIIMKLLTALCVPYVLAKGVFPVLGYPLVINSAVYRFAWLGCLSFSFVCFCAKRFHVWFTNLHNSIRDDRYLIGRRLHNFGEHAEKANVAETSTGEQEAILLGTGLNQQDHEADVGLRLRHVNQQVG

SEQ ID NO: 14546 - protein, 308 aa, Glycine max
MTLLVFNSALIVVPISLGRALFNSIPRLPITHGIKCNDLYAFIIGSYVIWTAVAGVRYSIEQIRKRRSSVLFGQLWKWCGILVKSSALLSIWIFVIPVLIGLLCELLVIVPMRVPVDESPVFLLNQDWALGLIFLKIWTRSVMLDHMMPLVDESWRVKFERVREDGFSRLQGLWVLREIVLPIIMKLLTALCVPYVLAKGVFPVLGYPLVINSAVYRFAWLGCLSFSFVCFCAKRFHVWFTNLHNSIRDDRYLIGRRLHNFGEHAEKANVAETSTGEQEAILLGTGLNQQDHEADVGLRLRHVNQQVG

SEQ ID NO: 14547 - protein, 197 aa, Glycine max
MRVPVDESPVFLLNQDWALGLIFLKIWTRSVMLDHMMPLVDESWRVKFERVREDGFSRLQGLWVLREIVLPIIMKLLTALCVPYVLAKGVFPVLGYPLVINSAVYRFAWLGCLSFSFVCFCAKRFHVWFTNLHNSIRDDRYLIGRRLHNFGEHAEKANVAETSTGEQEAILLGTGLNQQDHEADVGLRLRHVNQQVG

SEQ ID NO: 14548 - DNA, 1041 bp, Glycine max
ataaaatggagccacaacatgtgactgatcagaatatagaaactaaaaaatcatcaacaaaaaggctagctgataaggtggcagttataactggtggtgcaagaggaattggtgcagctgcagctaaactgtttgctgaaaatggagcacatgtggtcattgctgatgtgcttgatgaactaggcaccaccgtggccaagtccattggcggccactacatacactgtgatgtgtcgaaggaagatgatgttgaatcagccataaaccttgcactatcatggaagggccatctagacatcatgctcagcaatgctggaattggaggcccagagggaagaagcatcacaacccttgaaatggaccgagtgaggcacttgttctccatcaatctttatggaacaatacatggaatcaagcatgctgcaagggcaatgatcaaaggtaacaacaaaggaggatccatcatatgtacttcaagtgctgcatccatcatgggtggattggccttgcatggatataccatgacaaaagcagcaattgatgggttggtgagaagtgctgcttgtgagttgggagagcatttgattcgtgttaactgcatttccccacatggagtcccctctgagatgcttctcagtgcttgtagaagatttggacatgatgatattacccctcaaggggtgaaggaaatgattgggagcagggcaagtttgcttaaggggaaaggtgcaaccattgaagatgtggcacatgctgctttgttcttggctagtgatgagtctggcttcattacagcacacaatcttcttattgatgggggacacacatctgctgatagcagaatgagttacatgtaccaagacccaaaatgatgagaattatgtaactatcgtttgtagaggaaacacaagaacttgatgatagaatataaaagatttacaataattacatatattctatcacttgatactcttaactttatctactatagttctttaatttccattcgaggaataatatatcgtttcttctttgggcctt

SEQ ID NO: 14549 - protein, 289 aa, Glycine max
KMEPQHVTDQNIETKKSSTKRLADKVAVITGGARGIGAAAAKLFAENGAHVVIADVLDELGTTVAKSIGGHYIHCDVSKEDDVESAINLALSWKGHLDIMLSNAGIGGPEGRSITTLEMDRVRHLFSINLYGTIHGIKHAARAMIKGNNKGGSIICTSSAASIMGGLALHGYTMTKAAIDGLVRSAACELGEHLIRVNCISPHGVPSEMLLSACRRFGHDDITPQGVKEMIGSRASLLKGKGATIEDVAHAALFLASDESGFITAHNLLIDGGHTSADSRMSYMYQDPK

SEQ ID NO: 14550 - protein, 288 aa, Glycine max
MEPQHVTDQNIETKKSSTKRLADKVAVITGGARGIGAAAAKLFAENGAHVVIADVLDELGTTVAKSIGGHYIHCDVSKEDDVESAINLALSWKGHLDIMLSNAGIGGPEGRSITTLEMDRVRHLFSINLYGTIHGIKHAARAMIKGNNKGGSIICTSSAASIMGGLALHGYTMTKAAIDGLVRSAACELGEHLIRVNCISPHGVPSEMLLSACRRFGHDDITPQGVKEMIGSRASLLKGKGATIEDVAHAALFLASDESGFITAHNLLIDGGHTSADSRMSYMYQDPK

SEQ ID NO: 14551 - protein, 190 aa, Glycine max
MLSNAGIGGPEGRSITTLEMDRVRHLFSINLYGTIHGIKHAARAMIKGNNKGGSIICTSSAASIMGGLALHGYTMTKAAIDGLVRSAACELGEHLIRVNCISPHGVPSEMLLSACRRFGHDDITPQGVKEMIGSRASLLKGKGATIEDVAHAALFLASDESGFITAHNLLIDGGHTSADSRMSYMYQDPK

SEQ ID NO: 14552 - DNA, 1325 bp, Glycine max
atttttcactacttcacttgactagtccaattatctgatgccatatcaaaaccatgtctgacccttctaccctcttaccctcctcccaccaccaccacaaccaccatgtgccactcatccaaggcggcgccaccgcaccctcctcctcctccaccaccctagcccgagaataccgcaagggcaactggaccatccaagagaccctcattctcaccactgcaaaaaagctcgacgacgagcgcaggctcaaaacccctgctgcatgtagcacctccaccaccaccaccagaaccagcggcgagctccggtggaaatgggtggagaactattgctggagccatggctgcttgcgaagccagaaccaatgcaacgacaaatgggacaacctcctccgcgattacaaaaaggttcgcgactacgagtccaaatcaaacgacaacgacaacaacaacaacaaacacttcccttcttattggaccctcaacaaacaacaacgtaaggaacagaacctcccctccaacatggtcttcgaagtctaccaaaccatcgccgatgtcctccaacgaaaacaaacacaatcccaaagacaacatcaacaacctctggctattccattagttacttcctcaccctcaccacttcaaacacttccaccacctcctctaccaccaccgccgcctccgccacctcctcctccgccagttagctccaccactccggtaggctcagagagatcggaatcatcaggaactgagcacagtgaggatgatgatgatgggtcggaatcaaaacgtaggaaagttaagaaccttggttcaagaataatgcaaagtgcatcggtgttggcacgagctcttaggagttgtgaggagaagaaggagaaacggcaccgtgaaatgattgagctggagcaaaggaggattcagatggaggaagctcggaatgaggttcaccggcaaggcatcgcgacccttgtcgccgccgtcaccaacctttccggtgccattgagtcactcattaataattctgaacgccatggccaaagataattaattaatatggcaccatataataataataatatatgcttcctcgcctagctagcagtttattattattatgtgattgatcagaaaatcatataatatctatcggccattctttccctcttcaaattcaattgttgtctaatatttttgagtcggttttaccaccaattgatttctcatgattatatgtcagcagctgatatgtgatcgatccatatggtatatgtttcattattctttggtggagatcaaaccaagccctaacattgattgttt

SEQ ID NO: 14553 - protein, 331 aa, Glycine max
MSDPSTLLPSSHHHHNHHVPLIQGGATAPSSSSTTLAREYRKGNWTIQETLILTTAKKLDDERRLKTPAACSTSTTTTRTSGELRWKWVENYCWSHGCLRSQNQCNDKWDNLLRDYKKVRDYESKSNDNDNNNNKHFPSYWTLNKQQRKEQNLPSNMVFEVYQTIADVLQRKQTQSQRQHQQPLAIPLVTSSPSPLQTLPPPPLPPPPPPPPPPPPVSSTTPVGSERSESSGTEHSEDDDDGSESKRRKVKNLGSRIMQSASVLARALRSCEEKKEKRHREMIELEQRRIQMEEARNEVHRQGIATLVAAVTNLSGAIESLINNSERHGQR

SEQ ID NO: 14554 - protein, 175 aa, Glycine max
MVFEVYQTIADVLQRKQTQSQRQHQQPLAIPLVTSSPSPLQTLPPPPLPPPPPPPPPPPPVSSTTPVGSERSESSGTEHSEDDDDGSESKRRKVKNLGSRIMQSASVLARALRSCEEKKEKRHREMIELEQRRIQMEEARNEVHRQGIATLVAAVTNLSGAIESLINNSERHGQR

SEQ ID NO: 14555 - DNA, 1293 bp, Glycine max
ttcatcctttcttcactcctaccaatatcaaatatggtatcaaccgaagcagatgcctcaacacaaaaggttctgttttgtgcctctgcaagtccaatgaatctgaatctcaagctccccaaccaggagatattcgtaaacaagaactgctagcccaaattgccatgcttcaaactcagaaagtttgtctcacagattattttgatgagagatctgaatacttaacccagtttggtgaagaagccaaggccgagtttgacaagattggaaaagatgccctccaaggattagatgaagctagtgccattgtatgcttcaacttttgagttaacaatgtagtgtatttttggtttttgcatttggaaagtctcaaaccatggtttggtaaaagtctgtctcttgtgccatacacactagccaatcaatcatcaagcacggcatggaggaaaatcgatatgtgaaaggtattttagtaatgaccgcttattgtgttcatttgtgtttggcagataacagcaaacatagagagccagatggtggagtttgaggaatctgcagaacttaacagacaagagattcaggagcatgaaaaagaactaggtgaatttgaagttcaaatggaggatggaagaaatgaagggctgttctttaagaacctcagaaggaggacacctgttgacaaatcaaaagccaaggaggaggcagagaaaatcaaagatgtagccagagaaaaagctggtagcagaacaaggaaaggcttttacctcctctttattggcctactgacctttgcaatagttgattctattgcctcatcatcaactgattggaaaaaaatagcagttcttggagctactcttgtggctttagtttctcagttcatctacgaacagaatgtcattagaaactggagaaaaaagaaagaccgacacagaagaggaaaataactgaagtttaattgttactgagattcaatgcaagtttctgtggaagacaaaaagtataatggatgttgcgtgatacaataaacccaagtggaagcttataacttgggcctgataacatcatgctaatttgctttggcatcaacaacagcagatattggtgatataactacaatcaccaaaatctgagtaactgggttaccaagtgatgctgatgaaacttttcacatcttatgtcaatacaaaaaaacatactcttattatcatactagtttttagacatgtacatttggaacctgacgtgtatctctgtgtcttatgtcatatatacaattaatgagaaactaat

SEQ ID NO: 14556 - protein, 137 aa, Glycine max
MVEFEESAELNRQEIQEHEKELGEFEVQMEDGRNEGLFFKNLRRRTPVDKSKAKEEAEKIKDVAREKAGSRTRKGFYLLFIGLLTFAIVDSIASSSTDWKKIAVLGATLVALVSQFIYEQNVIRNWRKKKDRHRRGK

SEQ ID NO: 14557 - protein, 109 aa, Glycine max
MEDGRNEGLFFKNLRRRTPVDKSKAKEEAEKIKDVAREKAGSRTRKGFYLLFIGLLTFAIVDSIASSSTDWKKIAVLGATLVALVSQFIYEQNVIRNWRKKKDRHRRGK

SEQ ID NO: 14558 - protein, 107 aa, Glycine max
HPFFTPTNIKYGINRSRCLNTKGSVLCLCKSNESESQAPQPGDIRKQELLAQIAMLQTQKVCLTDYFDERSEYLTQFGEEAKAEFDKIGKDALQGLDEASAIVCFNF

SEQ ID NO: 14559 - DNA, 1256 bp, Glycine max
cattacctagaaaatcctaatcgaaaaaattctgttgattcgcaattcaaattattcgtctcgctctcaatagagaagaaaaaaaaaactgcgtttttcaaatcggtaaattggctgacacatagtaaagaatcatattaatgtcgtcaagaacattgaggagaagactctatcatggggatgttgatggcaaaaggcaggagcatttggagacttcgggattggattctttgagtgagcccttgctggcagacgatgattatattgagaataagaagatatgtactcttgaagatctatgggatgatgagaagaagaaggcgcagtttcattggacattcatattctcaaaccttattgtgcaatgggctcagtggttagcaaatttggtattaggatctggatctattcttgggcgtcttttatcttttccttctgctgcactaaatatgcaaaacaataggatgtttcctccatctctaagccctctgcaggaagaaagactaagaaatctacgacaacggcttgaagttccctttgatggttctaaagcagagcaccaagacgcacttaaacaattgtggaaattggcttacccggacagggagcttccttcacttaaatcagacctttggaaggaaatgggatggcaaggttctgacccttcaacagattttaggggtggaggatttatttcattagagaatctcatcttctttgcgatgaagtatcctgattcattccagcgattattgcataaacaagatggaaccagagctgagtgggaatacccatttgcagtagctggaatcaatatttcttttatgttagcacagatgctggatcttcaagcagggcttccatcttctttgtccggaattcgttttctcaaattgcttgaagaagatgaaatggcatttgatatccttttttgtgttgcctttcaaatgatggatgctcagtggctagcaaagcgtgcgtcatatatggaatttaatgatgttttgagatccacaagaacgcagttagagcgtgagcttggtcttgaagacatcttcagcgtgaaagatttacctgcttacaacatgttgagatgattgacaattgcctttcagttcaacatttctcttcctttttttttttgtttcttttggcggagaatgttacatgaaatgtatctaaagcatttgtcattttatctctatatagaaacgtgaaaatcaaatatcagatcaatctttctgctgatttccatc

SEQ ID NO: 14560 - protein, 318 aa, Glycine max
MSSRTLRRRLYHGDVDGKRQEHLETSGLDSLSEPLLADDDYIENKKICTLEDLWDDEKKKAQFHWTFIFSNLIVQWAQWLANLVLGSGSILGRLLSFPSAALNMQNNRMFPPSLSPLQEERLRNLRQRLEVPFDGSKAEHQDALKQLWKLAYPDRELPSLKSDLWKEMGWQGSDPSTDFRGGGFISLENLIFFAMKYPDSFQRLLHKQDGTRAEWEYPFAVAGINISFMLAQMLDLQAGLPSSLSGIRFLKLLEEDEMAFDILFCVAFQMMDAQWLAKRASYMEFNDVLRSTRTQLERELGLEDIFSVKDLPAYNMLR

SEQ ID NO: 14561 - protein, 215 aa, Glycine max
MQNNRMFPPSLSPLQEERLRNLRQRLEVPFDGSKAEHQDALKQLWKLAYPDRELPSLKSDLWKEMGWQGSDPSTDFRGGGFISLENLIFFAMKYPDSFQRLLHKQDGTRAEWEYPFAVAGINISFMLAQMLDLQAGLPSSLSGIRFLKLLEEDEMAFDILFCVAFQMMDAQWLAKRASYMEFNDVLRSTRTQLERELGLEDIFSVKDLPAYNMLR

SEQ ID NO: 14562 - protein, 210 aa, Glycine max
MFPPSLSPLQEERLRNLRQRLEVPFDGSKAEHQDALKQLWKLAYPDRELPSLKSDLWKEMGWQGSDPSTDFRGGGFISLENLIFFAMKYPDSFQRLLHKQDGTRAEWEYPFAVAGINISFMLAQMLDLQAGLPSSLSGIRFLKLLEEDEMAFDILFCVAFQMMDAQWLAKRASYMEFNDVLRSTRTQLERELGLEDIFSVKDLPAYNMLR

SEQ ID NO: 14563 - DNA, 756 bp, Glycine max
agaacatcctaatcgaaaactttactgggattctggcccactgccttcgcttccatttcaggcattatttgcaaagctgcagcaattagcaactgtggctggagatgtattacttgggaaagaaaaatacagaaaatgttgctagctaggttaacagagactgttgtcatgtggttgtctgatgaacaagagttctggggtgtattagaggataaatcagctcctctgaagccacttggtttgcagcagttaattcttgatatgcacttcactgttgaaattgcgcgctttgcggggtatccgtctcgacacatccatcagatagcatcagctatcactgcacgtgccatccggaccttctctgctaggggcatagatccacaaagtgcacttcctgaggatgaatggtttgtggaaactgcaaagtcagcaataaacaagctcttgcttggggtatcagggtctgaggcatccgacaccgatgaagatcacatcattgatcatcatgatgaagttgtctcagactctgatactgtttcatccctgtcttctatggaatcaaccgagtcttttgcttccgctagcatggccgaacttgatagcccctctaacttgtctgacccagataattgattttttttctttctacattatttaaaatttgcccttgccgagtccgggtcttggatccgccaagaaaacatcgtccattttgaaaatattagaataatccaagaacaatttgtttcaatcatt

SEQ ID NO: 14564 - protein, 165 aa, Glycine max
MLLARLTETVVMWLSDEQEFWGVLEDKSAPLKPLGLQQLILDMHFTVEIARFAGYPSRHIHQIASAITARAIRTFSARGIDPQSALPEDEWFVETAKSAINKLLLGVSGSEASDTDEDHIIDHHDEVVSDSDTVSSLSSMESTESFASASMAELDSPSNLSDPDN

SEQ ID NO: 14565 - protein, 154 aa, Glycine max
MWLSDEQEFWGVLEDKSAPLKPLGLQQLILDMHFTVEIARFAGYPSRHIHQIASAITARAIRTFSARGIDPQSALPEDEWFVETAKSAINKLLLGVSGSEASDTDEDHIIDHHDEVVSDSDTVSSLSSMESTESFASASMAELDSPSNLSDPDN

SEQ ID NO: 14566 - protein, 123 aa, Glycine max
MHFTVEIARFAGYPSRHIHQIASAITARAIRTFSARGIDPQSALPEDEWFVETAKSAINKLLLGVSGSEASDTDEDHIIDHHDEVVSDSDTVSSLSSMESTESFASASMAELDSPSNLSDPDN

SEQ ID NO: 14567 - DNA, 1343 bp, Glycine max
gccttagtctgtgttgagacttgagagtaaggtttcaaattgaaaccttttttttcagtagtttttcacttgcgtatatcactatattcgttgtgttctgtaggttgtgtgcataacacaatcaattaagaagctgtgattctgattcagaatcagaatgttgcgaagatggagcaaagcagttactccaatctccaaatttggatcgcagcagagtcatttgaatttcgtgaaggacgtcacgcgccaaagctacgccggggttgcacccgcgccaacaacgatagaggataaacctcaaccccccgtggttaaacttgacaaaatgttttggtctaagccctgttcgctggccctgccccgggactcacccctcaaagctgaagaacctgattatcagggcatcaagcgtttcatgctcaagctcatgctgttttatagtaagcagagcaagtcaattcgaggcgctaatgttgtgtaccgaagaattgtttctcaaattgataaacctcccatttatgaagtgtttaacttggagaaaacattcaaaacaacattctctttacttgtacttcatatgtggttatgtttgcgtcgcttgaagcaagagggaaatgagggtgttgaatttggccagtacctttatgagatttacaatcatgatgtggagctaagagtctctaaagctggagttaacctactactgactaagtggatgaaagagctcgagaagattttttatgggaacattgttgcttatgatactgccatacttccagaagctaaaccgggtgatttttctaatgttatatggaggaatatattctctgaagatggttcttcaacaccagatgctgctgcatctcaatcagtacaggcgatggccagatatgctcgccgtgaagtaagttgcatgaccttaacagataaagaagcactatattcagggaattttatgttcacctctttgaagcatgagaacagaagcggaaaggggcctcaatgatgaagtggtgatttctaaatttgtgatttagcaaattgaaaatacacgctgttcttattttatttattttttacaaaaaaattgttgaataattatgacataaagctcatgtccttctccgtaaggcttttattatacttgattagcttggtgcccagaaactagaactctcatattcttgccctgtaaaatgagaaaagaaaaagggcagaagtgactgaaaaatgttgttctttctcatttttggtcatctgttcctctttactttgctttaacggcttcaatggtttgcctttgttatttgagacattacaaattttcaatacaatgcaatatt

SEQ ID NO: 14568 - protein, 282 aa, Glycine max
MLRRWSKAVTPISKFGSQQSHLNFVKDVTRQSYAGVAPAPTTIEDKPQPPVVKLDKMFWSKPCSLALPRDSPLKAEEPDYQGIKRFMLKLMLFYSKQSKSIRGANVVYRRIVSQIDKPPIYEVFNLEKTFKTTFSLLVLHMWLCLRRLKQEGNEGVEFGQYLYEIYNHDVELRVSKAGVNLLLTKWMKELEKIFYGNIVAYDTAILPEAKPGDFSNVIWRNIFSEDGSSTPDAAASQSVQAMARYARREVSCMTLTDKEALYSGNFMFTSLKHENRSGKGPQ

SEQ ID NO: 14569 - protein, 226 aa, Glycine max
MFWSKPCSLALPRDSPLKAEEPDYQGIKRFMLKLMLFYSKQSKSIRGANVVYRRIVSQIDKPPIYEVFNLEKTFKTTFSLLVLHMWLCLRRLKQEGNEGVEFGQYLYEIYNHDVELRVSKAGVNLLLTKWMKELEKIFYGNIVAYDTAILPEAKPGDFSNVIWRNIFSEDGSSTPDAAASQSVQAMARYARREVSCMTLTDKEALYSGNFMFTSLKHENRSGKGPQ

SEQ ID NO: 14570 - protein, 196 aa, Glycine max
MLKLMLFYSKQSKSIRGANVVYRRIVSQIDKPPIYEVFNLEKTFKTTFSLLVLHMWLCLRRLKQEGNEGVEFGQYLYEIYNHDVELRVSKAGVNLLLTKWMKELEKIFYGNIVAYDTAILPEAKPGDFSNVIWRNIFSEDGSSTPDAAASQSVQAMARYARREVSCMTLTDKEALYSGNFMFTSLKHENRSGKGPQ

SEQ ID NO: 14571 - DNA, 2021 bp, Glycine max
gaaaaactactttctgagacaacgacgacgttgtatagcagtccttcttcttctttctgtgttgacggtggcgttgatctgattggaattcaggatcaatggcaggggcagcctctgctctgttcctcctcgacatcaaaggccgcgtcctcatctggcgcgactaccgcggcgacgtctccgccctcgacgccgaacgcttcttcaccaaactcatcgaaaaacaggccgatccgcaagctcaagatccggttgtgcacgacaacggcgtgacctacatgttcatccagcacagcaacgtctacctcatgatagccaccagacataactgcaatgccgccagcctcctctttttcctgcaccgcatcgtcgatgtgtttaagcactactttgaagaattggaagaggaatcgcttcgggacaatttcgtcgtcgtgtatgagctacttgatgagattatggactttggctaccctcagtacaccgaggcgcagattcttagtgagtttattaagactgatgcttatagaatggaagttacgcagagacctcccatggctgtgactaatgccgtgtcgtggcgcagcgaagggataaactataagaaaaatgaggttttcttggatgtggtggagagtgttaatatacttgtcaatagcaatggacaaataattagatctgacgtcgttggggctttgaagatgagaacgtatttgagtggtatgcctgagtgcaaacttggtttaaatgatagagtattgttagaggcgcaaggtagaacaaccaagggaaaggctattgacttggaagacataaaatttcatcagtgtgtgcgtttggctcgatttgaaaacgatcgaacaatttcctttataccacctgatggatcgtttgatttgatgacatacaggctcagtacacaggttaagcctttaatttgggtggaagcaaatgttgaaaagcattcaaagagtcggattgagattatggtaaaagctaggagtcaatttaaggaacgtagcactgccacaaacgttgagattgagttgcctgtgcctgttgatgcaaccaatcctaatgttcgaacttcaatgggatctgcatcatatgcacccgaaaaagatgcgttaatctggaaaattagatccttccccggaggcaaggagtatatgttaagagcagagtttcatcttcccagtataacagatgaggaagcaactcctgagagaaaagctcctatacgtgtgaaatttgaaataccatattttactgtttctggaatacaggtaagatatttgaagattattgagaaaagtgggtatcaggctcttccatgggtgagatacataacgatggctggagagtatgaattgaggcttatttaagaatttgtatctttctttggtgctggaattccaccaaataatcgtgccaacttccatgatcaatggttttaaactggtggatgggagagggactcttgagtaaaattagagtttatttggcctgatcatatctcctcttgcgtcatgatagttttggcaacagatcgtaaattgctcattgtccgtaaagttcataacttcaagtcaggaattggcaagtgtaaggctgtatcttctgtgtaagtcctttttgttcaaatctgtttgttgggaaaatgtctgatttttttttcctcttgttttcttttcttttatttacgatctgtcaatctttgccattgtcttcaatttgatttatttgtaagagaattattagcttttgtattactaagattgaatattttccccatctttatttgtattcataacctgacccatcttgtgtattaatatggtgccatatccctccctttctgaacaaaaaccatgtatttttttaccattcattcaaaaagttgattgcaggtcaatggcagaaaagaaaaaaaaaaaaaaaaaaaaaaaaaaaaaaaaccaaaaaaaaaaaaaaaaaagcttatcgataccgtcgacctcgagggggggcccggtacccaa

SEQ ID NO: 14572 - protein, 428 aa, Glycine max
MAGAASALFLLDIKGRVLIWRDYRGDVSALDAERFFTKLIEKQADPQAQDPVVHDNGVTYMFIQHSNVYLMIATRHNCNAASLLFFLHRIVDVFKHYFEELEEESLRDNFVVVYELLDEIMDFGYPQYTEAQILSEFIKTDAYRMEVTQRPPMAVTNAVSWRSEGINYKKNEVFLDVVESVNILVNSNGQIIRSDVVGALKMRTYLSGMPECKLGLNDRVLLEAQGRTTKGKAIDLEDIKFHQCVRLARFENDRTISFIPPDGSFDLMTYRLSTQVKPLIWVEANVEKHSKSRIEIMVKARSQFKERSTATNVEIELPVPVDATNPNVRTSMGSASYAPEKDALIWKIRSFPGGKEYMLRAEFHLPSITDEEATPERKAPIRVKFEIPYFTVSGIQVRYLKIIEKSGYQALPWVRYITMAGEYELRLI

SEQ ID NO: 14573 - protein, 368 aa, Glycine max
MFIQHSNVYLMIATRHNCNAASLLFFLHRIVDVFKHYFEELEEESLRDNFVVVYELLDEIMDFGYPQYTEAQILSEFIKTDAYRMEVTQRPPMAVTNAVSWRSEGINYKKNEVFLDVVESVNILVNSNGQIIRSDVVGALKMRTYLSGMPECKLGLNDRVLLEAQGRTTKGKAIDLEDIKFHQCVRLARFENDRTISFIPPDGSFDLMTYRLSTQVKPLIWVEANVEKHSKSRIEIMVKARSQFKERSTATNVEIELPVPVDATNPNVRTSMGSASYAPEKDALIWKIRSFPGGKEYMLRAEFHLPSITDEEATPERKAPIRVKFEIPYFTVSGIQVRYLKIIEKSGYQALPWVRYITMAGEYELRLI

SEQ ID NO: 14574 - protein, 358 aa, Glycine max
MIATRHNCNAASLLFFLHRIVDVFKHYFEELEEESLRDNFVVVYELLDEIMDFGYPQYTEAQILSEFIKTDAYRMEVTQRPPMAVTNAVSWRSEGINYKKNEVFLDVVESVNILVNSNGQIIRSDVVGALKMRTYLSGMPECKLGLNDRVLLEAQGRTTKGKAIDLEDIKFHQCVRLARFENDRTISFIPPDGSFDLMTYRLSTQVKPLIWVEANVEKHSKSRIEIMVKARSQFKERSTATNVEIELPVPVDATNPNVRTSMGSASYAPEKDALIWKIRSFPGGKEYMLRAEFHLPSITDEEATPERKAPIRVKFEIPYFTVSGIQVRYLKIIEKSGYQALPWVRYITMAGEYELRLI

SEQ ID NO: 14575 - DNA, 1260 bp, Glycine max
gatcatccactacttgtagctattagcttataacagagagagagagagagagagagagagagagggagagatcacatttcctgaactataagctatatagcacttccataatcttacaacaatggaggggaccagcagccaaagcacgtttgccttcatccctagcacaattgagacaccaagtccaagcatccctgagatatcatcatcatcttcccctggctctcttgcaagaattgcacaaagttaccctcccggctttcccagaaaggtgttagcggagattatagggacatttttgttggtgtttgtgggaagtggttctgctgggctaagcaagattgatgagaggatggtgtcaaagcttggagcatcacttgcaggaggactcatagtgacggtcatgatatactcaattggacacatatcaggggcacacatgaatcccgcggtttctcttgctttcaccgccgtcaggcatcttccttggccacagctcccattttatatagcagctcaactcactggtgccatttctgcttcatacacattgcgagagctgttacgaccatcaaatgagattggaggaacatcacctgctggatcacacattcaagccctaatcatggaaatggtgaccacatataccatggtgttcatttccatggccgtggccactgactcaaacgcgacaggacagctatcaggagtagcagtaggttcttctgtttgcatagcaagcattgtagccggaccaatatcagggggatcaatgaatccagcaaggacattaggtcctgcaattgcgacatcatactacaagggactttgggtatattttgttggacctattactggggcggttttagcagcttggtcttacaatgtgattagggacactgaacaccctggttttcccatttcactatcctccatttcatccaaggtgcgccaaagcattggtggaactgaacaaaaaagcgaccaaagatgcttggtgtgaatgaaataataaacaacaatgttttttctgacaccacaccaccgcccaaatcaacatcaccttcaatttcttgtcttggaggatctcaagtttccacatgtattatcatgtatatgatcaaaaataccatgcctagatcatatggtattattagcttggccatgtatcgagttaatttcagggctatgagctagccatgtgtaatgcaaaagtgtgtagtgtgattttcctacattaatgaaatgtcagcttcatcc

SEQ ID NO: 14576 - protein, 293 aa, Glycine max
MEGTSSQSTFAFIPSTIETPSPSIPEISSSSSPGSLARIAQSYPPGFPRKVLAEIIGTFLLVFVGSGSAGLSKIDERMVSKLGASLAGGLIVTVMIYSIGHISGAHMNPAVSLAFTAVRHLPWPQLPFYIAAQLTGAISASYTLRELLRPSNEIGGTSPAGSHIQALIMEMVTTYTMVFISMAVATDSNATGQLSGVAVGSSVCIASIVAGPISGGSMNPARTLGPAIATSYYKGLWVYFVGPITGAVLAAWSYNVIRDTEHPGFPISLSSISSKVRQSIGGTEQKSDQRCLV

SEQ ID NO: 14577 - protein, 216 aa, Glycine max
MVSKLGASLAGGLIVTVMIYSIGHISGAHMNPAVSLAFTAVRHLPWPQLPFYIAAQLTGAISASYTLRELLRPSNEIGGTSPAGSHIQALIMEMVTTYTMVFISMAVATDSNATGQLSGVAVGSSVCIASIVAGPISGGSMNPARTLGPAIATSYYKGLWVYFVGPITGAVLAAWSYNVIRDTEHPGFPISLSSISSKVRQSIGGTEQKSDQRCLV

SEQ ID NO: 14578 - protein, 199 aa, Glycine max
MIYSIGHISGAHMNPAVSLAFTAVRHLPWPQLPFYIAAQLTGAISASYTLRELLRPSNEIGGTSPAGSHIQALIMEMVTTYTMVFISMAVATDSNATGQLSGVAVGSSVCIASIVAGPISGGSMNPARTLGPAIATSYYKGLWVYFVGPITGAVLAAWSYNVIRDTEHPGFPISLSSISSKVRQSIGGTEQKSDQRCLV

SEQ ID NO: 14579 - DNA, 1185 bp, Glycine max
ggtcaactagcacacttccctattcttaaaggggttcaggatctcaaggtacctgccaaggaacaaaagtctgtcaagttcaacttgccagaggaggatgaatttgatgccagtgatgatggttatgatgaggatggattaggccatggacatccaatgcagaacaagatcatgcccatgatgattaatcacaaccataaagacaattctggtgggagtaggaatattaatggaagtgttaagaaagctgacgtcattgatcaggcaatgctgttcaagggcaaaggtggaaatttcgatgaggcagaagctgacaatgatggaggaaagaaaggtagtagtagccaaaaagatgaaatcaagaagggggatttggataagcctaaggcagtcggtgaggtagattttcataagaaaaagaatgggaaaagtgagaatggattacttggtcggtttctaggctttgggaaaaagagcaagaaaggagaattagaagaaacaacttataccaataagagcaagaaccaaaacagtggtgctgaaaataagaaaggcaaggaagggaaattggaggatcatggtaacaatgactttgattttcatgattacgatgatacccctcctcatcccaaaaatggcaaaagtggtaagggtagtaacaatgtcaaagaaggccagatgggcccgggcccaataatgggtaataatcttccaatgcgtcatcagatggagaatattcaagcagtacaaggacttccggcgatgaatggtgatggtggctattatcaaggggtgcaaatgcaacatgctccatacaataaccttcagcagcactacatgggtatgatgatgaaccagcatcaacatcagcaagcaaatatgaacaacaacatgtacccaacacccatgatgtatggtaggccgcatccatctatgaactacatgccaccacctcctatgccatctcacccaattgccgatcctattactcataccttcagtgatgagaatgttgagagctgcagtatcatgtaattaattaattaattactagtgacaacttgcttttctgctctatgattcggtctttagggagttcattaaattttgtgtaggacggaaaatgtgggatgtttaggattatattattatattatatataaataaatagtatattgtttgctc

SEQ ID NO: 14580 - protein, 344 aa, Glycine max
GQLAHFPILKGVQDLKVPAKEQKSVKFNLPEEDEFDASDDGYDEDGLGHGHPMQNKIMPMMINHNHKDNSGGSRNINGSVKKADVIDQAMLFKGKGGNFDEAEADNDGGKKGSSSQKDEIKKGDLDKPKAVGEVDFHKKKNGKSENGLLGRFLGFGKKSKKGELEETTYTNKSKNQNSGAENKKGKEGKLEDHGNNDFDFHDYDDTPPHPKNGKSGKGSNNVKEGQMGPGPIMGNNLPMRHQMENIQAVQGLPAMNGDGGYYQGVQMQHAPYNNLQQHYMGMMMNQHQHQQANMNNNMYPTPMMYGRPHPSMNYMPPPPMPSHPIADPITHTFSDENVESCSIM

SEQ ID NO: 14581 - protein, 292 aa, Glycine max
MQNKIMPMMINHNHKDNSGGSRNINGSVKKADVIDQAMLFKGKGGNFDEAEADNDGGKKGSSSQKDEIKKGDLDKPKAVGEVDFHKKKNGKSENGLLGRFLGFGKKSKKGELEETTYTNKSKNQNSGAENKKGKEGKLEDHGNNDFDFHDYDDTPPHPKNGKSGKGSNNVKEGQMGPGPIMGNNLPMRHQMENIQAVQGLPAMNGDGGYYQGVQMQHAPYNNLQQHYMGMMMNQHQHQQANMNNNMYPTPMMYGRPHPSMNYMPPPPMPSHPIADPITHTFSDENVESCSIM

SEQ ID NO: 14582 - protein, 287 aa, Glycine max
MPMMINHNHKDNSGGSRNINGSVKKADVIDQAMLFKGKGGNFDEAEADNDGGKKGSSSQKDEIKKGDLDKPKAVGEVDFHKKKNGKSENGLLGRFLGFGKKSKKGELEETTYTNKSKNQNSGAENKKGKEGKLEDHGNNDFDFHDYDDTPPHPKNGKSGKGSNNVKEGQMGPGPIMGNNLPMRHQMENIQAVQGLPAMNGDGGYYQGVQMQHAPYNNLQQHYMGMMMNQHQHQQANMNNNMYPTPMMYGRPHPSMNYMPPPPMPSHPIADPITHTFSDENVESCSIM

SEQ ID NO: 14583 - DNA, 912 bp, Glycine max
gtcgagatccattcccaactgcacctgcgcgcctcgactggtagcccgaaccctagctagcaggtcggaggcgagagagcagccatggcgcggtgcctcgcgctcgtctccctccttctcctcggcctcgcctccgccgcctccgctgccgatgcgccctttgtcgtcgcgcacaagaaggtttcgctctcccgccccaagccgggcgtcgagcgcgtcgccgtctccctcgacctctacaaccagggatccgcgactgcctatgatgtgtcacttaatgacgactcttggccaacacaagcatttgagcttgtcactggagagaaatcgaagacattggaaaggcttgaccctggtgccactgctacacacacatatgtcctggagaccaaaacacagggcaggttccagggttcaccagctattattacgtaccgtgttcccacaaagactgctcttcaggaggcctactcaactcccatcttcccactggatattctcgctgagagacttcctgagaagaagtttgaatgggctaagaggcttgtggcgaaatatgggtcacttgtgtctgttgtctcatttgttggattgtttatctacctcgttgcgagcccgtcgaagagcagctcaaaaggaagcaagaagagacgttgatctacttatagttcggcgcagttgaagttgtagctggtggtttttgcctggaggaactcttggtagtttgagctgagcgaaagctttaaattttacatttactcaccacaccatgaactgcaacgaagtgagcatctgttagaaaagtggaccagtaattttggttggttatttatttcctgtttctctgtcagactcttaactcggaggacctgtaactaggaaagttacttttgcttgaaagaacattttggg

SEQ ID NO: 14584 - protein, 226 aa, Glycine max
SRSIPNCTCAPRLVARTLASRSEAREQPWRGASRSSPSFSSASPPPPPLPMRPLSSRTRRFRSPAPSRASSASPSPSTSTTRDPRLPMMCHLMTTLGQHKHLSLSLERNRRHWKGLTLVPLLHTHMSWRPKHRAGSRVHQLLLRTVFPQRLLFRRPTQLPSSHWIFSLRDFLRRSLNGLRGLWRNMGHLCLLSHLLDCLSTSLRARRRAAQKEARRDVDLLIVRRS

SEQ ID NO: 14585 - protein, 190 aa, Glycine max
MARCLALVSLLLLGLASAASAADAPFVVAHKKVSLSRPKPGVERVAVSLDLYNQGSATAYDVSLNDDSWPTQAFELVTGEKSKTLERLDPGATATHTYVLETKTQGRFQGSPAIITYRVPTKTALQEAYSTPIFPLDILAERLPEKKFEWAKRLVAKYGSLVSVVSFVGLFIYLVASPSKSSSKGSKKRR

SEQ ID NO: 14586 - protein, 176 aa, Glycine max
MRPLSSRTRRFRSPAPSRASSASPSPSTSTTRDPRLPMMCHLMTTLGQHKHLSLSLERNRRHWKGLTLVPLLHTHMSWRPKHRAGSRVHQLLLRTVFPQRLLFRRPTQLPSSHWIFSLRDFLRRSLNGLRGLWRNMGHLCLLSHLLDCLSTSLRARRRAAQKEARRDVDLLIVRRS

SEQ ID NO: 14587 - DNA, 886 bp, Glycine max
ataagtatttcattttcagcgttccatgggttgggtttggaccaatccatagccgaagaagagaaaaaagagacaaggaccgtcttgagttaatttgattcagtgtagcagccagcagccataagcaacgcaacaattccatttccagtttctgattcgtcacgtcagacaaaggaaggggttagggtgtgacctgagatcaaaatgttgcggaggcttctctcttctcacctcaaaaccctagcctcctccgccgccgccgccgccaccgccactccccgatctgcttccgcctccgccagattcgccgctctctctcgctcctgcctctacttctcaacccaatccgaggatgctactgcgatcaaaaagaaggttgaggacataatgccaatcgctactggccacgagcgcgaggagcttcaggctgagctcgagggaaggaatattcttgaaatagaccatcccgaaggtccattcggcacaaaggaagcacctgctgttgtcaaatcttactatgataaaaggatagtcggatgcccaggaggtgaaggtgaggatgagcatgatgttgtctggttttggctggagaaagacaagccccatgaatgtccagtgtgcgcacagtattttgttcttgaagtggtaggacctggtggaccacccgatggacatggtgatgatgatcaccattgattgcatccttcaattaaatctggaataaattctggaaagatggagagacattgtttagcatacactctggcctttcaaaatcctgtggcctaagtttgattttgatttgtctataccttattgtgtcacaacttttgagatagaaagtttatgcgattatttgaacgcaggatgctcatttgcttgagct

SEQ ID NO: 14588 - protein, 163 aa, Glycine max
MLRRLLSSHLKTLASSAAAAATATPRSASASARFAALSRSCLYFSTQSEDATAIKKKVEDIMPIATGHEREELQAELEGRNILEIDHPEGPFGTKEAPAVVKSYYDKRIVGCPGGEGEDEHDVVWFWLEKDKPHECPVCAQYFVLEVVGPGGPPDGHGDDDHH

SEQ ID NO: 14589 - protein, 102 aa, Glycine max
MPIATGHEREELQAELEGRNILEIDHPEGPFGTKEAPAVVKSYYDKRIVGCPGGEGEDEHDVVWFWLEKDKPHECPVCAQYFVLEVVGPGGPPDGHGDDDHH

SEQ ID NO: 14590 - DNA, 1737 bp, Glycine max
aaaaaattaacattgaattttgacctgttacataagagtttgggatcaagaatcatggtgaatcacctatctttctataaataccacaaaattgaagctgaacgcatgagttctaatatatcattcaaaagtttttgaaatgttgtcaccccttcttctatttctatgcctaactcttcctttgtttttgttgtccttcttcaaataccgtaaaaccttcaagaatccaccacttccaccaggtcctagaggccttcccataatagggaatcttcatcaactagatagtccttctcttcatgagcagctatggcatctctcaaagaaatatggtcctttattttcccttcaatttggattaaggccagccatagttgtttcctctccaaaattggccaaagaggtaatgaaagacaatgaccttgagtgctgtggacgacctaaattactaggccaacagaaactaacctataatgggttagacatgggattttcctcatacgatagttattggagagaaatcagaaaaatttgtgttgtccatgtccttagctccaaacgtgtccaaagctttacctcaataagacattttgaggtcaagcagatgataaaaaaaatatctaggcatgcctcatcttcaaaagttacaaatttaaatgaagtgcttatatcccttattagtactattgtatgtagaattgttttggggagaaggtatgaagaggagggatctgaaggtagcagattccataagttgttcaatgagtgtgaagctatgttgggtaacttctttgtttcagattatattcctttcatgggttggattgataaactcaggggactggatgcacgtcttgaacgcaatttcaaggagatggataagttctaccaagaagccattgatgaacacatgaattctaagaaaaaaactccagaggaagaggatttagttgatgtcttacttcaactgaaagagaacaacacgtttcccatagatctcaccaatgataacatcaaagcagtgctcttgaacttacttgtaggagctacaggtacaactgaagtcacaacaatctgggccatgactgaactaataaaaaatccaagcattatgaagaaagtgcaagaagaaattagaggcttaagtggtaagaaagatttcttggatgaagatgatattcaaaagttttcctacttaagggcagtgataaaagagacacttagattgcacttaccagcaccactacttataccaagagaaacaaataaaaaatgcatgttagatggctacgaaattccagccaagacattattatatgtgaatgcttgggcaattcatagagatcctaaggcttggaaagatccagaagagtttatacctgagaggtttttaaattgcgacatagatctttatggacaagattttgagtttattccattcggtgctggtcgtagattgtgccctggtatgaatatggcatttgctgcattggatcttatacttgctaatcttctttattcctttgactgggaattgccccaaggaatgaaaaaggaagacattgatactgaagtgttgccaggagttacacagcataagaagaatcctctgtgtgttgtggccaagtgctatatgtaaaatccaaaagtcgtaactactgctgaaaaaaataaaataaaataattaatgattgtactcttccaacgaagattattaaataaagatgtaagccctcc

SEQ ID NO: 14591 - protein, 499 aa, Glycine max
MLSPLLLFLCLTLPLFLLSFFKYRKTFKNPPLPPGPRGLPIIGNLHQLDSPSLHEQLWHLSKKYGPLFSLQFGLRPAIVVSSPKLAKEVMKDNDLECCGRPKLLGQQKLTYNGLDMGFSSYDSYWREIRKICVVHVLSSKRVQSFTSIRHFEVKQMIKKISRHASSSKVTNLNEVLISLISTIVCRIVLGRRYEEEGSEGSRFHKLFNECEAMLGNFFVSDYIPFMGWIDKLRGLDARLERNFKEMDKFYQEAIDEHMNSKKKTPEEEDLVDVLLQLKENNTFPIDLTNDNIKAVLLNLLVGATGTTEVTTIWAMTELIKNPSIMKKVQEEIRGLSGKKDFLDEDDIQKFSYLRAVIKETLRLHLPAPLLIPRETNKKCMLDGYEIPAKTLLYVNAWAIHRDPKAWKDPEEFIPERFLNCDIDLYGQDFEFIPFGAGRRLCPGMNMAFAALDLILANLLYSFDWELPQGMKKEDIDTEVLPGVTQHKKNPLCVVAKCYM

SEQ ID NO: 14592 - protein, 410 aa, Glycine max
MKDNDLECCGRPKLLGQQKLTYNGLDMGFSSYDSYWREIRKICVVHVLSSKRVQSFTSIRHFEVKQMIKKISRHASSSKVTNLNEVLISLISTIVCRIVLGRRYEEEGSEGSRFHKLFNECEAMLGNFFVSDYIPFMGWIDKLRGLDARLERNFKEMDKFYQEAIDEHMNSKKKTPEEEDLVDVLLQLKENNTFPIDLTNDNIKAVLLNLLVGATGTTEVTTIWAMTELIKNPSIMKKVQEEIRGLSGKKDFLDEDDIQKFSYLRAVIKETLRLHLPAPLLIPRETNKKCMLDGYEIPAKTLLYVNAWAIHRDPKAWKDPEEFIPERFLNCDIDLYGQDFEFIPFGAGRRLCPGMNMAFAALDLILANLLYSFDWELPQGMKKEDIDTEVLPGVTQHKKNPLCVVAKCYM

SEQ ID NO: 14593 - protein, 384 aa, Glycine max
MGFSSYDSYWREIRKICVVHVLSSKRVQSFTSIRHFEVKQMIKKISRHASSSKVTNLNEVLISLISTIVCRIVLGRRYEEEGSEGSRFHKLFNECEAMLGNFFVSDYIPFMGWIDKLRGLDARLERNFKEMDKFYQEAIDEHMNSKKKTPEEEDLVDVLLQLKENNTFPIDLTNDNIKAVLLNLLVGATGTTEVTTIWAMTELIKNPSIMKKVQEEIRGLSGKKDFLDEDDIQKFSYLRAVIKETLRLHLPAPLLIPRETNKKCMLDGYEIPAKTLLYVNAWAIHRDPKAWKDPEEFIPERFLNCDIDLYGQDFEFIPFGAGRRLCPGMNMAFAALDLILANLLYSFDWELPQGMKKEDIDTEVLPGVTQHKKNPLCVVAKCYM

SEQ ID NO: 14594 - DNA, 731 bp, Glycine max
  misc_feature (586)..(589): n is a, c, g, or t
agcatcaattaataaaactattcaactcacttaagcctgcacaaaaacaacttaatagaagatgccttccaagaggcttcaatggagatccttagtacttggttgtttcaaggccaccaagaaccaatccttggaatctccaaacatagtttccaagaaatcatcttcaagtagaatcttcctttctgatttaagcctaagcgattattcatcagtttctatcatgagtgatttgtccaattctctcgtgggatcaaatcttcgtattttcacctaccaagagctctctgaggttacacacaacttcagcaaatccaactatcttggggaaggtgggtttgggaaggtgtataaaggatttattgatgacaatcttaaacgtggattgaaagctcagactgtggcagttaaggccttaaacttggatggaaaacaaggccacagagagtggttggctgaagtaatctttctggggcaattgaaacatcgccatctggttaacttaattggctactgctgtgaagatgagcataggcttcttgtgtatgagtacatggagaggggcaatctagaggaaaagcttttnnnnggttatttagcagccttgccttggctaacaagaatcaaaatagcaattggggccgcaaagggacttatgtttcttcatgaagaagagaaaccagtcatatatagagatatcaaggcctcaaacattctattagactctgatt

SEQ ID NO: 14595 - protein, 223 aa, Glycine max
  misc_feature (175)..(176): Xaa can be any naturally occurring amino acid
MPSKRLQWRSLVLGCFKATKNQSLESPNIVSKKSSSSRIFLSDLSLSDYSSVSIMSDLSNSLVGSNLRIFTYQELSEVTHNFSKSNYLGEGGFGKVYKGFIDDNLKRGLKAQTVAVKALNLDGKQGHREWLAEVIFLGQLKHRHLVNLIGYCCEDEHRLLVYEYMERGNLEEKLXXGYLAALPWLTRIKIAIGAAKGLMFLHEEEKPVIYRDIKASNILLDSD

SEQ ID NO: 14596 - protein, 169 aa, Glycine max
  misc_feature (121)..(122): Xaa can be any naturally occurring amino acid
MSDLSNSLVGSNLRIFTYQELSEVTHNFSKSNYLGEGGFGKVYKGFIDDNLKRGLKAQTVAVKALNLDGKQGHREWLAEVIFLGQLKHRHLVNLIGYCCEDEHRLLVYEYMERGNLEEKLXXGYLAALPWLTRIKIAIGAAKGLMFLHEEEKPVIYRDIKASNILLDSD

SEQ ID NO: 14597 - DNA, 1852 bp, Glycine max
aaacataattcgttcctgggagtctctctgtcttctacttgtttgttagggttccttttcccgtttcgtttcgtttcgttttttttgcaatggaagaaagccctcgtggtcgcagaaagcgagcacacccttcttctccttctcctccttcgccaatctccaagaagccccaaaccttcccttcgttccaagacatccccaatctcccttctaacatcaaatccctctgccacctcatcgccaccacctccgccgccaccgtcgagcactccctccaatccgccgccatctccgtcatccctcacgacgtcgaagaagtcctcaaactctcctacggcttcccgggccaatccgtcaaattcttccgctggagcggccgccacctcaacgacaaccacacgccctattcctggaacctcgttgtcgatatcctcggcagaaaccgcttcttcgaccccatgtgggacgccgttaagtcaatgaacaaagaagggttactctcgctcgccacattcgcctccgtcttcagcagctatgttgccgctgacagaatccgtgaagcaattatggcgtttgagattatggacaattacggttgtgtgagggatgcttttgctttgaattcgcttttgagtgcaatttgtagcaatggtaggactcttgatgcttgtgattacttgcaggttgctaagaaattcgtccgaccggatacggatacttacgcgattttaatggaggggtgggaaggggagaagagtatggttagtgctaaggagacatttgctgagatggtgattgagattggatgggatcctgcgaatgtgccggcttatgattcgttcttgtgtacacttgttagagggcatgatggattgcttgaggctattaagtttgttgattccatgagggataggaggtgttaccccggtgtgaggtttctgaaggctgcattggatgagtgtgttaagtgccatgatgttaggacagctgagtttttctgggaggtgttggtggttgggaaggtgttgcagcccacctctgagatgtacaatttgatgatcggtttgtgttgctatcgcggtgacaccgatgctgcaaggaggatgctccatgagatggtttaccaaggggcttttcctgatgtggtgacttataacttgttgtttaagttcttgctcaaggggaggaaactgagggaggcttcgtcggtgtttgcggagatggtgcagaatgagtgtgtgccggagcaggataactgtgatttggcagttaaggcgtatgtggattgcggggagcctgttatggcgatcaaggtttggaagtgtttggtggagaattataagaagggtttggagcagaccgcgaattttctggttgtggggctttgcaatttgaacaggccacaggtggcggttaagtatgccgaggatatgattggcaggggaatcagtttgtcctcttccacattgtcgaagctgagacaaagccttgtcaaggagagaagagaatatgtgtatgaggatcttttgagaaagtggaaatctcactaggtagtttggattttttttgctaaaactgtgtaacttaatattagtgccgaatttgaatgttttgcttttgtctgatagagaggggaagaattttgaagtggttattattatctaaaagatgatactttggttctgcattgggataaataggctccagcatgtgttatctttgtatatagttactgcaaaagatcctactagaattgctttagaaggttaaaggtagaggaagtttatataggtttttgtatcaaacttatattataaaaaataaaaaaaagctttatctatttacctatctt

SEQ ID NO: 14598 - protein, 486 aa, Glycine max
MEESPRGRRKRAHPSSPSPPSPISKKPQTFPSFQDIPNLPSNIKSLCHLIATTSAATVEHSLQSAAISVIPHDVEEVLKLSYGFPGQSVKFFRWSGRHLNDNHTPYSWNLVVDILGRNRFFDPMWDAVKSMNKEGLLSLATFASVFSSYVAADRIREAIMAFEIMDNYGCVRDAFALNSLLSAICSNGRTLDACDYLQVAKKFVRPDTDTYAILMEGWEGEKSMVSAKETFAEMVIEIGWDPANVPAYDSFLCTLVRGHDGLLEAIKFVDSMRDRRCYPGVRFLKAALDECVKCHDVRTAEFFWEVLVVGKVLQPTSEMYNLMIGLCCYRGDTDAARRMLHEMVYQGAFPDVVTYNLLFKFLLKGRKLREASSVFAEMVQNECVPEQDNCDLAVKAYVDCGEPVMAIKVWKCLVENYKKGLEQTANFLVVGLCNLNRPQVAVKYAEDMIGRGISLSSSTLSKLRQSLVKERREYVYEDLLRKWKSH

SEQ ID NO: 14599 - protein, 363 aa, Glycine max
MWDAVKSMNKEGLLSLATFASVFSSYVAADRIREAIMAFEIMDNYGCVRDAFALNSLLSAICSNGRTLDACDYLQVAKKFVRPDTDTYAILMEGWEGEKSMVSAKETFAEMVIEIGWDPANVPAYDSFLCTLVRGHDGLLEAIKFVDSMRDRRCYPGVRFLKAALDECVKCHDVRTAEFFWEVLVVGKVLQPTSEMYNLMIGLCCYRGDTDAARRMLHEMVYQGAFPDVVTYNLLFKFLLKGRKLREASSVFAEMVQNECVPEQDNCDLAVKAYVDCGEPVMAIKVWKCLVENYKKGLEQTANFLVVGLCNLNRPQVAVKYAEDMIGRGISLSSSTLSKLRQSLVKERREYVYEDLLRKWKSH

SEQ ID NO: 14600 - protein, 356 aa, Glycine max
MNKEGLLSLATFASVFSSYVAADRIREAIMAFEIMDNYGCVRDAFALNSLLSAICSNGRTLDACDYLQVAKKFVRPDTDTYAILMEGWEGEKSMVSAKETFAEMVIEIGWDPANVPAYDSFLCTLVRGHDGLLEAIKFVDSMRDRRCYPGVRFLKAALDECVKCHDVRTAEFFWEVLVVGKVLQPTSEMYNLMIGLCCYRGDTDAARRMLHEMVYQGAFPDVVTYNLLFKFLLKGRKLREASSVFAEMVQNECVPEQDNCDLAVKAYVDCGEPVMAIKVWKCLVENYKKGLEQTANFLVVGLCNLNRPQVAVKYAEDMIGRGISLSSSTLSKLRQSLVKERREYVYEDLLRKWKSH

SEQ ID NO: 14601 - DNA, 1031 bp, Glycine max
atcatgatcaataacagtcttaaaaaaagaagtttgaagacctatttagaaaatttcaaatcgtttagggccagttgagtagtttaacgatttttgaattacacctgaacaccaggtacgtaaaaaataaaacaaaacaaaaacacttcctcttcctcctttcccccgaaaaacccttaaaccacgaccttcatatttgcagtgctagtctgtttatttcttcagctatgtttttgtcaagaacacttggacgaacactctttgctgctgctgccagatcaaaacaatatgccactacagcagctgctgctagcagagaaggacacaacccccttcaggagttttttgaggcagacaggagccctgaagatgacaaacctgttgtttatggtcggagttggaaggcgtgtgaactgcgtctgaagtcttgggatgaccttcataagttgtggtatgtgttgttaaaggaaaagaacatgttgatgactcaacgtcaaatgcttaatgcacagaacctgcgttttcctaacccagagcgcatccctaaggtgaggaagtcaatgtgtcgcatcaagcatgtacttactgagagagcaattgaagaaccagatccgaggaggtctgctgagatgaagagaatgataaatgctctttgatggcttaaaatggacctgttcctttagtagcattactgggtatgttgttagaataggacctctacatttgcggatgtaaggttgctaacttgaagcattgtcctaatatattgtttacgaaggagtttacctgtgaatgatttctatttcttgataaagtgttaagtgggttacatcccaaatattttgctgtcctaatttctatttcctacttttagatgtatcaagcaaacaagtgttatcatattatcgtgttagaggttatgcaaaatgttagggaggaagggttgttcctgctttcatgtaataaaaatgtttttccctgttactttaaagggcaacctttgaaaaatgaatagtataattttacctgcc

SEQ ID NO: 14602 - protein, 142 aa, Glycine max
MFLSRTLGRTLFAAAARSKQYATTAAAASREGHNPLQEFFEADRSPEDDKPVVYGRSWKACELRLKSWDDLHKLWYVLLKEKNMLMTQRQMLNAQNLRFPNPERIPKVRKSMCRIKHVLTERAIEEPDPRRSAEMKRMINAL

SEQ ID NO: 14603 - DNA, 557 bp, Glycine max
tttttccccttccccacccctaagccgccgtcttccttctccacctcctaccgcaacacaggacgccacaacttccagcaacggcgcggttgctcttgaatcaggctgaaaaatgatgggttcacgaggtaccagtgttgtgctctcaagagctgctcggatgaggcaaaagctgcagtctgctttggaggccagtgcactagatattgaagatgtttcttaccaacatgctgggcatgcagctgtgaaggacaatgcaaatgagacgcattttaacatcaaggtaatttcacccaagtttgaagggcagaaccttgtgaagcgtcataggatggtgtacgatctcttgaccgatgagttgaactcgggtcttcatgctatctccattgttgcgaaaactccaacagagtcgggatcatgaatgtaattttttttgacttgattaatgtttgttccagaataagttgattgcagcaatagcatgtagccccgaatcggttggtaaaacaatgttatggcatgcatatttcttcatgataaagacatattgttgcctg

SEQ ID NO: 14604 - protein, 102 aa, Glycine max
MMGSRGTSVVLSRAARMRQKLQSALEASALDIEDVSYQHAGHAAVKDNANETHFNIKVISPKFEGQNLVKRHRMVYDLLTDELNSGLHAISIVAKTPTESGS

SEQ ID NO: 14605 - protein, 101 aa, Glycine max
MGSRGTSVVLSRAARMRQKLQSALEASALDIEDVSYQHAGHAAVKDNANETHFNIKVISPKFEGQNLVKRHRMVYDLLTDELNSGLHAISIVAKTPTESGS

SEQ ID NO: 14606 - protein, 86 aa, Glycine max
MRQKLQSALEASALDIEDVSYQHAGHAAVKDNANETHFNIKVISPKFEGQNLVKRHRMVYDLLTDELNSGLHAISIVAKTPTESGS

SEQ ID NO: 14607 - DNA, 966 bp, Glycine max
gggtacactcaccacacactacacactagtttgtgtttttcgcgccactcagttattcatttagaaagctactgctgagttcacaagtttctcaagcttgatggggacacaaaagtctaatatgtttgatgcacctttcaaatacatggtgcctgaagataaggaaattcccgacagacctttgccatcacattggactccttctatgcaggcatataacacttctgggtctactccaactccctttttaaatcaacaggcagctggttctcacatgcctctctacatgtgggtaaatcaggtaaacaacacactacttcaatccgatgctttgcatgatccaaggatgctctccagtaaacccacagtagctggggattttccttcaactaagaagcagcactgtaatttgatgcttgaaaatgcaagttcaaccaaactgaatcaggatttggagacaggcctagatgcatctgacgctaatgctcaacttgtaaatttggaaaaggatgaaataagaagagaaagaaaaagacagtcaaacagggaatcggcgaggagatcaaggatgcggaaagagaaagaatgtgaagagctacataaacaaatggaaatgcttaaggatgaaaactccgtgctcacacagaggctcaagagtctttctgaggagtgcctggagatctgcaatgaaaacgatgccatcgaggaagagctgattaaaatgtatggaccagaatcaatagcagatctattgctcttcaagcctacctgaccctgttgctggttaaggaagaaagcatcttacaactaatcagaatatattgtttcattttttattagggccagttgaattctgaacttgcttatgtcggcttaggttaaggaaggaaatgtaaggttacaaaaaatagggattattataataaaggatttatgaatgaaaattgtagctaaaaaaaaaaaaaa

SEQ ID NO: 14608 - protein, 223 aa, Glycine max
MGTQKSNMFDAPFKYMVPEDKEIPDRPLPSHWTPSMQAYNTSGSTPTPFLNQQAAGSHMPLYMWVNQVNNTLLQSDALHDPRMLSSKPTVAGDFPSTKKQHCNLMLENASSTKLNQDLETGLDASDANAQLVNLEKDEIRRERKRQSNRESARRSRMRKEKECEELHKQMEMLKDENSVLTQRLKSLSEECLEICNENDAIEEELIKMYGPESIADLLLFKPT

SEQ ID NO: 14609 - protein, 216 aa, Glycine max
MFDAPFKYMVPEDKEIPDRPLPSHWTPSMQAYNTSGSTPTPFLNQQAAGSHMPLYMWVNQVNNTLLQSDALHDPRMLSSKPTVAGDFPSTKKQHCNLMLENASSTKLNQDLETGLDASDANAQLVNLEKDEIRRERKRQSNRESARRSRMRKEKECEELHKQMEMLKDENSVLTQRLKSLSEECLEICNENDAIEEELIKMYGPESIADLLLFKPT

SEQ ID NO: 14610 - protein, 208 aa, Glycine max
MVPEDKEIPDRPLPSHWTPSMQAYNTSGSTPTPFLNQQAAGSHMPLYMWVNQVNNTLLQSDALHDPRMLSSKPTVAGDFPSTKKQHCNLMLENASSTKLNQDLETGLDASDANAQLVNLEKDEIRRERKRQSNRESARRSRMRKEKECEELHKQMEMLKDENSVLTQRLKSLSEECLEICNENDAIEEELIKMYGPESIADLLLFKPT

SEQ ID NO: 14611 - DNA, 499 bp, Glycine max
ctagaacatcctaatcgaaaaattgttttgtataaaagcgaagtttgtgctataaggtattttgacctcgtaagcttttcagttttcaccgccgtcactcatggcttcccaatctcaggttcagatcagcaagctccgtgtttcggttttaccggaaagtgacagtggaacgacgtcgtcgcccaaagggcagtgcctctgttctccaacgacacatgaaggctccttccggtgccgttttcatcgatcagtcgcagcttcatcatctccaccttcttggatgaaacgctccgacaacaattagcaaccctgtcgtttatgtctctctctcgatccattggttcgtgtctatgttgttagtccttatgtttatccatcaataactacgtagtactttcagaatttgcacagttaattaatttatcatgtgctaaattctatgtaagtgcttatatactctaaagagaggtaataattaatgcttgtgttgtgtagctcc

SEQ ID NO: 14612 - protein, 67 aa, Glycine max
MASQSQVQISKLRVSVLPESDSGTTSSPKGQCLCSPTTHEGSFRCRFHRSVAASSSPPSWMKRSDNN

SEQ ID NO: 14613 - protein, 53 aa, Glycine max
LEHPNRKIVLYKSEVCAIRYFDLVSFSVFTAVTHGFPISGSDQQAPCFGFTGK

SEQ ID NO: 14614 - DNA, 868 bp, Glycine max
atatcgatcccaagcctccctccgtagccagttagttctcatttctaatattgcttccaaaatctctctctctctctctctctggggggtatgtgtgttgttcagtacaactagttttggtatagctagctgctcttcatttgattttgctcgcagtcgcagctccaatccaaatatggaggcgatcactgcttccttagagaggtctcttcaaaactgttccttaaacaataccaacaacaaccatcagcagagcaggaggccggaagaagatgatgggtcagctacagatggaggcataggaatctcatcctgctcagacgatgtcccggacccggataatagtcatatctccgacaccactttagagctcaactcccacatctcactcccttatcattgggagcaatgcctagatttaaagacgggggaaatatattacattaactggaggaacgggatgaaagcaaaggaggatccaagaagcaggagggcagattatagtgtaagtagggattgtgagtccgaagaagaagaagaagaagagagctggtacgacagcgaagagtcttcatcggagtcatgcccttcttcatccaaagagcactatgatgagggacaggtagagaaacagaataacaatgttctggtggtggctgggtgcaagggctgtctcatgtatttcatggtgcccaaacaggttgaagactgcccaaaatgtactggtcaactcctccacttcgatcgatccgaaaatggctctccatgattaattcccactcctcttttctccttgtgtttccttcttcgcttctcttttctttttgctgtgactgtcaaattaaactatagttctctctttttttgt

SEQ ID NO: 14615 - protein, 255 aa, Glycine max
YRSQASLRSQLVLISNIASKISLSLSLWGVCVLFSTTSFGIASCSSFDFARSRSSNPNMEAITASLERSLQNCSLNNTNNNHQQSRRPEEDDGSATDGGIGISSCSDDVPDPDNSHISDTTLELNSHISLPYHWEQCLDLKTGEIYYINWRNGMKAKEDPRSRRADYSVSRDCESEEEEEEESWYDSEESSSESCPSSSKEHYDEGQVEKQNNNVLVVAGCKGCLMYFMVPKQVEDCPKCTGQLLHFDRSENGSP

SEQ ID NO: 14616 - protein, 197 aa, Glycine max
MEAITASLERSLQNCSLNNTNNNHQQSRRPEEDDGSATDGGIGISSCSDDVPDPDNSHISDTTLELNSHISLPYHWEQCLDLKTGEIYYINWRNGMKAKEDPRSRRADYSVSRDCESEEEEEEESWYDSEESSSESCPSSSKEHYDEGQVEKQNNNVLVVAGCKGCLMYFMVPKQVEDCPKCTGQLLHFDRSENGSP

SEQ ID NO: 14617 - DNA, 585 bp, Glycine max
caccaccacggtgcaagttgaagacgaaccacaatctgggaaaaggcaagacaaaaaaagtgcgcagggttaaggttgtggtttatagtttagtttatctatggctagcggcaccacaagaatgctagtgaaggagatgttgcaactctcttcttccacacttcacttctcttcttcggcgcttcgcggcctctctcctcctctgcccttctcaattcaattgcgacgctcgcgggggcgccctgcaattcgatgtgcttcctcttcctcagactcagatgcttccaacaaagtctcgtctcgtctgtcgcaggttcagcatcttcttcagcaggccgaacaccgcgctctctccgccgaccagggcccacctcctaaaatcaccttagatcatgttacggtgagctttgccagaagtggaggacctgggggtcagaatgtcaataaagtgaacaccaaggtggacatgcgcttcaatgttaaaaatgcatattggttgagtgacaggatcagagacaagattttgcaaacggagaaaaaccgtattaactgtttaaacacaataaagttggaacgggagggggg

SEQ ID NO: 14618 - protein, 161 aa, Glycine max
MASGTTRMLVKEMLQLSSSTLHFSSSALRGLSPPLPFSIQLRRSRGRPAIRCASSSSDSDASNKVSSRLSQVQHLLQQAEHRALSADQGPPPKITLDHVTVSFARSGGPGGQNVNKVNTKVDMRFNVKNAYWLSDRIRDKILQTEKNRINCLNTIKLEREG

SEQ ID NO: 14619 - protein, 154 aa, Glycine max
MLVKEMLQLSSSTLHFSSSALRGLSPPLPFSIQLRRSRGRPAIRCASSSSDSDASNKVSSRLSQVQHLLQQAEHRALSADQGPPPKITLDHVTVSFARSGGPGGQNVNKVNTKVDMRFNVKNAYWLSDRIRDKILQTEKNRINCLNTIKLEREG

SEQ ID NO: 14620 - protein, 149 aa, Glycine max
MLQLSSSTLHFSSSALRGLSPPLPFSIQLRRSRGRPAIRCASSSSDSDASNKVSSRLSQVQHLLQQAEHRALSADQGPPPKITLDHVTVSFARSGGPGGQNVNKVNTKVDMRFNVKNAYWLSDRIRDKILQTEKNRINCLNTIKLEREG

SEQ ID NO: 14621 - DNA, 931 bp, Glycine max
ctctttcctcttgtgcgtgcagtagtgactagtgagcaaaaacgaaagaaagagccaccgtaaccgtaatcgcactgttagtaatatcaattctatagtttgttactgacgctgcacccaccgctaaactaaacttccccaatcaccatgggagattctaaacatatttccgttcaccgtcttctcggcgaaggcttaattgctgatgtggtgctgtggaagaattggcgcggagcggttgcggtgcttgtatctgccaccgcattgtggtacctcttcgagcgagccggttacaatttcttgtccttcgtcgccaatgtagtgttgcttcttgttgttattctctttttctgggccaaagctgctaaccttctcaatagacctcttcctcctctccccgatctggagatctcagaggaaactattgccagggttgctgatgcactgcaaatttggatgaatcgggctttgtccgttgcacatgacatagcaattgagaggaatttgctgctttgcctccaggttgttggtgtattgtgggtaatatcttacattggtagtttgttcaactttttgactttgatctattttggtgttcttctttgcttgtctcttcctgtgttgtatgacaagtaccaggaccaagttgatgacaggctgtgtgtgattcatgggattattcagacacagtatacaaaagttcacagtactgttttaagcaagattccaaaactctcaaacaaagaaaagaaggtgcagtaggaacatggtaagagcattctataatttggcatgtatttgatgcaaatagttactcaaaagcatattatcttacttatgtttgtagccaacttgtctattgaatgattaaatgtccatgattctactgttaatagcaatgtaacttattttagttctgcctgtggaagag

SEQ ID NO: 14622 - protein, 204 aa, Glycine max
MGDSKHISVHRLLGEGLIADVVLWKNWRGAVAVLVSATALWYLFERAGYNFLSFVANVVLLLVVILFFWAKAANLLNRPLPPLPDLEISEETIARVADALQIWMNRALSVAHDIAIERNLLLCLQVVGVLWVISYIGSLFNFLTLIYFGVLLCLSLPVLYDKYQDQVDDRLCVIHGIIQTQYTKVHSTVLSKIPKLSNKEKKVQ

SEQ ID NO: 14623 - DNA, 932 bp, Glycine max
aacttattcagccaacatagtaaggtgcaacagatagtaaccaagtgaagattccattcaagatgaaactctttgctcactttttctttatgttgttgttcttggtggccttttccaacatccaagtttgtttgggggactgtgataatcttcaggacacttgtccagcagttccacccaataagcagaccatattcatcaatggtcttcaatgcaaaaacccagttaatgtaacagctcaagatttcaggaccacagaactaagcaaaactggccctagagacatttttggtgcatctttgaaaattgtgagtgctgctgagttcattggcctcaatactcttggcctctccattggaagaactgaccttgatgggaatggcctggtgaacttccactatcatcctagggctactgagataatctatgtcaccaaaggggtgttgttggctggttttgttgacaccaaaaaccagtatttccagaagtttcttaaagtaggtgatgtctttgtgttccccaaggctttgttccacttctttctaaatactgattttgaagaagccactgttttctcagtgtacaacagccagaatcctggctttgtgtcccttagtcctacaacttttgacacaacattggagtcattggacaagatcaagaagagactcatctcactctctgcctctgaagctcaagctcaagctcaagatgtcaacagtttcatctctccagaattggaaaccatttacagttagccatttcaaattgcgtcaaattttgttatttacagcatttatttttcaaatatatagcgcttatccaaaaaagcgctgtatatattctccataacagcacttcaggcagtacatatatagcatttttttaaggagaagcgctatatattctggtatatatacagcacctgtttg

SEQ ID NO: 14624 - protein, 231 aa, Glycine max
MKLFAHFFFMLLFLVAFSNIQVCLGDCDNLQDTCPAVPPNKQTIFINGLQCKNPVNVTAQDFRTTELSKTGPRDIFGASLKIVSAAEFIGLNTLGLSIGRTDLDGNGLVNFHYHPRATEIIYVTKGVLLAGFVDTKNQYFQKFLKVGDVFVFPKALFHFFLNTDFEEATVFSVYNSQNPGFVSLSPTTFDTTLESLDKIKKRLISLSASEAQAQAQDVNSFISPELETIYS

SEQ ID NO: 14625 - protein, 222 aa, Glycine max
MLLFLVAFSNIQVCLGDCDNLQDTCPAVPPNKQTIFINGLQCKNPVNVTAQDFRTTELSKTGPRDIFGASLKIVSAAEFIGLNTLGLSIGRTDLDGNGLVNFHYHPRATEIIYVTKGVLLAGFVDTKNQYFQKFLKVGDVFVFPKALFHFFLNTDFEEATVFSVYNSQNPGFVSLSPTTFDTTLESLDKIKKRLISLSASEAQAQAQDVNSFISPELETIYS

SEQ ID NO: 14626 - DNA, 766 bp, Glycine max
tactcgagtttttctgggtgcatcagcagttttgtctaatggaacagtatattcaagagtggggactgcatgtgttgcaatggttgctcatgcattccgtgtacctgtcatagtatgttgtgaggcctataaatttcatgaacgggtacagttggattcaatatgctcaaatgaacttggcaatccagatgtcatttcaaatgtactgggtagagaggatgtcaaacacttggatggctgggccaatattgaaaatctgcaacttttaaatctggtttatgatgcaacaccttcagattatgtttcaatgattgtcacagattatggcatggttccccccacaagtgtgcctgtaattgtaagagaatatgggagagaacaggtctggatataataaattaggcaaatgtgtaccatctcaattttgtgggcatgcaaaatccctatttagcagccaaatggcctgcttgtttctgtattattttcccaccttggaagaataatgtaatgagccttcctgttctgaaatttttggacatttctgtattcacctgtcctagtgaagagtgccatttttcgcctctccaggaagatttagccatgcattttcatcgtctgtaacggttcattttagactattattcaatttttggataatcattcggtcacaattttggtttagcaagtttttagttgtggttagttagcagttagccccatctctgcttactgtactgtaattacgaaaaccatcgtcacatagatg

SEQ ID NO: 14627 - protein, 130 aa, Glycine max
TRVFLGASAVLSNGTVYSRVGTACVAMVAHAFRVPVIVCCEAYKFHERVQLDSICSNELGNPDVISNVLGREDVKHLDGWANIENLQLLNLVYDATPSDYVSMIVTDYGMVPPTSVPVIVREYGREQVWI

SEQ ID NO: 14628 - protein, 104 aa, Glycine max
MVAHAFRVPVIVCCEAYKFHERVQLDSICSNELGNPDVISNVLGREDVKHLDGWANIENLQLLNLVYDATPSDYVSMIVTDYGMVPPTSVPVIVREYGREQVWI

SEQ ID NO: 14629 - DNA, 436 bp, Glycine max
  misc_feature (142)..(142): n is a, c, g, or t
actagaatacgaatagactaaaggggtgttttgaaaagatggagcagaaagaaaatcatgctagaaggaaaaagggagggctcatcacaatgcccttcatctttggtaatgaggtttgtgagaagctggctgtggtaggttntcaacacaaacatgattagctacttgacaacacagcttcacatgccattgaccaaagcagctaacaccctcactaactttggtggaactgcaagcttgacaccattgcttggtgctttcattgctgattcttatgccggaaagttctggactgtcacccttgcttccattatataccagatagtaaagaccctcccctaactctttcttgtgttgaagtgaattgagaaagtattatacatatgcgttacaactcagattttaacttcttggtgctacaataaaacttaagtcg

SEQ ID NO: 14630 - protein, 62 aa, Glycine max
MISYLTTQLHMPLTKAANTLTNFGGTASLTPLLGAFIADSYAGKFWTVTLASIIYQIVKTLP

SEQ ID NO: 14631 - protein, 52 aa, Glycine max
MPLTKAANTLTNFGGTASLTPLLGAFIADSYAGKFWTVTLASIIYQIVKTLP

SEQ ID NO: 14632 - protein, 40 aa, Glycine max
  misc_feature (35)..(35): Xaa can be any naturally occurring amino acid
MEQKENHARRKKGGLITMPFIFGNEVCEKLAVVGXQHKHD

SEQ ID NO: 14633 - DNA, 1438 bp, Glycine max
agttaaacctctggtcttcggcatgaacgaaaacctgttcgaacgaatgttgtgctccttcaaagcttctagtgttcttccaatttcgctccttcaacacttcggccccaattgctgttagtggtcgtcttctttgttcaaccacgcttctctctagtctctatgaatagcgcgcatttgtagaatctgttctggagatacgagtaagcccacagattttttttttgtttttcctgtgggtgtgcatggtttacatgtgatgcaaggtttctgttaagctagcttggcaatcatttggctggcatggacatagcacattgctatttaaagggtaatgctgatgctgtggagttttgtccacatgatccctaccataatgttttagcagtatccacttacacattacaagaaggttctcagccctgtcgacatggaagcatttcactcttcaatgttgatgtggaaccaggtcaccttgacatggtttttagtgaggaaactgctgggatttttgacataaagtggaatccacctggcgggcatgcaagtccttttctagctcaagcagatgctgatggatacttgagaattaaaatgctggagggttgctgtaatggagtggaaggggttaatctaaaggagatcacaaatgaaaaaatcagtaactctatgtgcttgtacctggattggaacccttcagccacatccatcacagtggggctttctgacggctctgtgtctattgtttcttttcttgaatccaagctggaaattcaagaagagtggaaagctcatgattatgaactttggacaacctcctttgatatccaccaaccaaatttggtatacactggctctgatgattgtaaattcagttgttgggatttgcgagataaacctcccaatgtggtatttcagagctctaaagtccacaaaatgggtgtttgttgcattgagaagagtccacatgacccaaataccttgttaactggcagttatgatgaattcctaagggtatgggatttaagatcaatctcaaaaccccttaattcaattaacttggggggaggagtttggagggttaagcaccaccccttcattccaggcttggttttggctgcttgtatgcacaatggttttgctattgtcgccattaaaggcaacaatgccgaagtgtcggaaacttacaagaagcatgattctcttgcctatggagcagattggcagaaaggagaagcaaatcacataggtgggaataccaaaccactggtggctacttgctcattctacgacaaacttgttcgggtgtggaggccaggaaatgatcttatcttgtagaatgtagattgatgcttaacgttaagtcatgaacccacttgaaaatgtgatacgtagtttatttattgaattatggttgaattacatgacactttcattt

SEQ ID NO: 14634 - protein, 344 aa, Glycine max
MDIAHCYLKGNADAVEFCPHDPYHNVLAVSTYTLQEGSQPCRHGSISLFNVDVEPGHLDMVFSEETAGIFDIKWNPPGGHASPFLAQADADGYLRIKMLEGCCNGVEGVNLKEITNEKISNSMCLYLDWNPSATSITVGLSDGSVSIVSFLESKLEIQEEWKAHDYELWTTSFDIHQPNLVYTGSDDCKFSCWDLRDKPPNVVFQSSKVHKMGVCCIEKSPHDPNTLLTGSYDEFLRVWDLRSISKPLNSINLGGGVWRVKHHPFIPGLVLAACMHNGFAIVAIKGNNAEVSETYKKHDSLAYGADWQKGEANHIGGNTKPLVATCSFYDKLVRVWRPGNDLIL

SEQ ID NO: 14635 - protein, 285 aa, Glycine max
MVFSEETAGIFDIKWNPPGGHASPFLAQADADGYLRIKMLEGCCNGVEGVNLKEITNEKISNSMCLYLDWNPSATSITVGLSDGSVSIVSFLESKLEIQEEWKAHDYELWTTSFDIHQPNLVYTGSDDCKFSCWDLRDKPPNVVFQSSKVHKMGVCCIEKSPHDPNTLLTGSYDEFLRVWDLRSISKPLNSINLGGGVWRVKHHPFIPGLVLAACMHNGFAIVAIKGNNAEVSETYKKHDSLAYGADWQKGEANHIGGNTKPLVATCSFYDKLVRVWRPGNDLIL

SEQ ID NO: 14636 - protein, 247 aa, Glycine max
MLEGCCNGVEGVNLKEITNEKISNSMCLYLDWNPSATSITVGLSDGSVSIVSFLESKLEIQEEWKAHDYELWTTSFDIHQPNLVYTGSDDCKFSCWDLRDKPPNVVFQSSKVHKMGVCCIEKSPHDPNTLLTGSYDEFLRVWDLRSISKPLNSINLGGGVWRVKHHPFIPGLVLAACMHNGFAIVAIKGNNAEVSETYKKHDSLAYGADWQKGEANHIGGNTKPLVATCSFYDKLVRVWRPGNDLIL

SEQ ID NO: 14637 - DNA, 663 bp, Glycine max
atattcaaaagccgaacccaaataacacaacacaaaacgatcttttatttctctgtctagagaagaatctagcaagccttgctcgtcacaaaatcaaaggttgcaactgagaactcactccttcgaatcaaaatcaaaaaatgtcggtgactctgcacacaaacctaggcgacatcaagtgtgaaatcttctgcgacgaggtccctaaaacctccgagaattttttagcgctatgtgcaagtggttactatgatgggactatatttcaccgcaacattaagggttttatgattcaaggtggagatccaactggaactggcaaagggggaaccagtatatggggcaagaaatttaacgatgagataagagaatctctgaagcacaatgcaagaggaatattagcaatggccaatagtggtccaaatactaatggaagccaatttttcttgacttatgcaaagctttatccaatcactgtgtgtggtgtgtgcttaagttaaaaacttgccttccaattaatgtaacgagtgtttcctttctcatttccttttgccacagaattgtgagagtcagttgatatctttgtatgtgacttcaataaattttaataaaagaaagcatcatttaaaaaaaaaaaaaaaaaagcttatcgataccgtcgac

SEQ ID NO: 14638 - protein, 119 aa, Glycine max
MSVTLHTNLGDIKCEIFCDEVPKTSENFLALCASGYYDGTIFHRNIKGFMIQGGDPTGTGKGGTSIWGKKFNDEIRESLKHNARGILAMANSGPNTNGSQFFLTYAKLYPITVCGVCLS

SEQ ID NO: 14639 - protein, 70 aa, Glycine max
MIQGGDPTGTGKGGTSIWGKKFNDEIRESLKHNARGILAMANSGPNTNGSQFFLTYAKLYPITVCGVCLS

SEQ ID NO: 14640 - DNA, 632 bp, Glycine max
gctctttgcagtacatgtttagttgtttgctgaagccaaaccaaataattcttcatttgatcactgtgtctttattttgattcaaaggctacaagacttcataactacctactaaatgcttatcttgttcctcatttcctggatcataacccaacctcttcattttgcctcatcaattcctcttcttagagatggcttgtgaaaccaagacatggttggttatggttcttcttttcttggctgctaactacttgcaagattgtgttcatggggtatcccaagttccttgccttttcatctttggggactctttatctgacagtggaaacaacaatgaacttccaacctctgcaaaatctaattacagaccatatgggatcgactttccattaggaccaacaggaagatttaccaatggcagaacagaaattgacataattactcaacttctgggatttgagaaattcatcccaccctttgcaaacactagtggttcagacatacttaaaggtgtgaactatgcatcaggtggagctggaatacgcgttgaaaccagctcgcatttgggtgctactatcagctttggattacagttagcaaatcacagagtcatagtttctcaaattgctagc

SEQ ID NO: 14641 - protein, 147 aa, Glycine max
MACETKTWLVMVLLFLAANYLQDCVHGVSQVPCLFIFGDSLSDSGNNNELPTSAKSNYRPYGIDFPLGPTGRFTNGRTEIDIITQLLGFEKFIPPFANTSGSDILKGVNYASGGAGIRVETSSHLGATISFGLQLANHRVIVSQIAS

SEQ ID NO: 14642 - protein, 137 aa, Glycine max
MVLLFLAANYLQDCVHGVSQVPCLFIFGDSLSDSGNNNELPTSAKSNYRPYGIDFPLGPTGRFTNGRTEIDIITQLLGFEKFIPPFANTSGSDILKGVNYASGGAGIRVETSSHLGATISFGLQLANHRVIVSQIAS

SEQ ID NO: 14643 - DNA, 667 bp, Glycine max
aaaaaggacgcgaaggagaaaaaagcagatccttcccgagagagagagatcagtagtgtcagagatggcgagagggcaagttctgagcgcgtaccgggcgcttctgaaagcgacacggaaatcattttccggcgacaccatgatgctgaaggaatcagcgttggaagtgaggaacaagttcgaggaaaacaagagcgtgagctcccaggcggagatccagaagcttctcctagaggctgaagaggcctcccatttcatcaccaccatgatcgtccaggcgcaactcaatcccgattctggcacctacttggtgaagccgggtaaagagcatgctggggcaacgcttgaacttccctcggaagaaattattcggaaatcaggataagacaggagagaagaggttagaacaaagtgtttcctcttctagttttttttttcctgtttaggatcaataagtagtgttgacagtgattttatgggggtgtttgaattgttctgcttagattcctttatgtggttgtagctttgttttttttttgctcccaatcctatgtttcctttcaaatctatctagcagagtggacaggatataaatcttaccggtaaaagtatatgataccctttttttgttgtatgattacataatgtatcccaactgtttttgttt

SEQ ID NO: 14644 - protein, 127 aa, Glycine max
KRTRRRKKQILPERERSVVSEMARGQVLSAYRALLKATRKSFSGDTMMLKESALEVRNKFEENKSVSSQAEIQKLLLEAEEASHFITTMIVQAQLNPDSGTYLVKPGKEHAGATLELPSEEIIRKSG

SEQ ID NO: 14645 - protein, 106 aa, Glycine max
MARGQVLSAYRALLKATRKSFSGDTMMLKESALEVRNKFEENKSVSSQAEIQKLLLEAEEASHFITTMIVQAQLNPDSGTYLVKPGKEHAGATLELPSEEIIRKSG

SEQ ID NO: 14646 - protein, 81 aa, Glycine max
MMLKESALEVRNKFEENKSVSSQAEIQKLLLEAEEASHFITTMIVQAQLNPDSGTYLVKPGKEHAGATLELPSEEIIRKSG

SEQ ID NO: 14647 - DNA, 473 bp, Glycine max
aacttccaacgagactgcgtgtggtatccttatagattggctgcaatattaccctttttcatttttgaagtatcgtttgaaattgaagtacaatggcactttccttcagggaagaaagagatacctttggagccattcaagttccctccgagaaattatggggagcacaaactcaaagatcgttgcagaacttcgatatcggtgggccccgcgaacgcatgcccgaacccatcattcgcgcctttggcgtcttgaagaaatgcgctgctaaggtcaacattcattttttcacttcttctgcactgcatgcagccatgcaccatcccttcttagctacttgctgcacagttaccccaggactgtggtaactactaggcaaaatgacacagttgtcatagttttgacttttgaattttgatatatactgtgtcgtacatctggtcattagtagttgaataattctaaatcctctc

SEQ ID NO: 14648 - protein, 91 aa, Glycine max
MALSFREERDTFGAIQVPSEKLWGAQTQRSLQNFDIGGPRERMPEPIIRAFGVLKKCAAKVNIHFFTSSALHAAMHHPFLATCCTVTPGLW

SEQ ID NO: 14649 - protein, 89 aa, Glycine max
TSNETACGILIDWLQYYPFSFLKYRLKLKYNGTFLQGRKRYLWSHSSSLREIMGSTNSKIVAELRYRWAPRTHARTHHSRLWRLEEMRC

SEQ ID NO: 14650 - protein, 84 aa, Glycine max
NFQRDCVWYPYRLAAILPFFIFEVSFEIEVQWHFPSGKKEIPLEPFKFPPRNYGEHKLKDRCRTSISVGPANACPNPSFAPLAS

SEQ ID NO: 14651 - DNA, 1199 bp, Glycine max
acaaccaataccatcaacacttcatttcttactctcactgaaaaaaaatagcttgttcacaccatcctattttttcaactcatatatacaaatatatataacatggcttctaccttctctcgaagcctagcacttgtaagcttttacattgtcgtttgtgctgccggtaacttgaaccaagactttcagcttacgtggggagatggtcgtgctaaaatactcaacaacgaaaatcttctcactctctcccttgacaaggcctctggctctggcttccaatccaaaaacgaatacttatatggcaagattgacatgcagctcaagctcgttcctggaaactctgctggcactgtcaccgcctattatctgtcttcaaaaggatcaacatgggatgagattgacttcgagttcttggggaatctgagtggcgatccatacattctacacaccaatgtgttcagccaaggcaagggcaacagagagcaacaattctatctctggtttgacccaactgcagatttccacacttattcaattctttggaatccccaacgcattgttttttctgtggatggcacccccatcagggaattcaagaatttggaatcaataggagttccttttccaaagagccaaccgatgaggatatactcaagcctatggaacgctgatgattgggccacaaggggtggactcatcaagactgactggtccaaagctcctttcactgcatcctacagaaacttcaacgccaatgcttgtgtttggaactctggaaaatcctcatgcaaatcaaattcttcaccttcctctgcatctcccactaatgcatggttatcacaagagcttgattccactgctcagcagaggttgcgttgggtgcagaagaactacttgatttacaattactgcaccgacaacaagagatttcctcaaggccttccactcgaatgcaaacactcctagagcctataggactcacatctcgcactacccataacaagtgttgcaatataatcttatgaaccattcttttaatttttgtattcctttttttttttttgttcgatgcttgagtgctatagtgctgttattatacaaatatacaatgtaaaaatatcccatgtaaaataatgcttctgtttttttttttaaaaaaaaaataatgcttctcttgtttgtatgactgaattttgtgt

SEQ ID NO: 14652 - protein, 287 aa, Glycine max
MASTFSRSLALVSFYIVVCAAGNLNQDFQLTWGDGRAKILNNENLLTLSLDKASGSGFQSKNEYLYGKIDMQLKLVPGNSAGTVTAYYLSSKGSTWDEIDFEFLGNLSGDPYILHTNVFSQGKGNREQQFYLWFDPTADFHTYSILWNPQRIVFSVDGTPIREFKNLESIGVPFPKSQPMRIYSSLWNADDWATRGGLIKTDWSKAPFTASYRNFNANACVWNSGKSSCKSNSSPSSASPTNAWLSQELDSTAQQRLRWVQKNYLIYNYCTDNKRFPQGLPLECKHS

SEQ ID NO: 14653 - protein, 217 aa, Glycine max
MQLKLVPGNSAGTVTAYYLSSKGSTWDEIDFEFLGNLSGDPYILHTNVFSQGKGNREQQFYLWFDPTADFHTYSILWNPQRIVFSVDGTPIREFKNLESIGVPFPKSQPMRIYSSLWNADDWATRGGLIKTDWSKAPFTASYRNFNANACVWNSGKSSCKSNSSPSSASPTNAWLSQELDSTAQQRLRWVQKNYLIYNYCTDNKRFPQGLPLECKHS

SEQ ID NO: 14654 - DNA, 1304 bp, Glycine max
gcaatttttttgtcaatttagctgttgcaactgatactctaacagtgttttattctatgcatctctttaccaaattgcccctgctcaaagttgaaattctatagtcactttttaatttttttttttgttctgggtgtttttcttatctgtgttttgtttcaattgcgcgaggtgggtttttctagggtttggaggctatgccgaaagcgggttgaataagctcaggtgaagaaaatgattctcacaaagcagtaccgatgcatacactcagctagctgtcaatgtactaaagggcatttaagtgaagatgtgatattcttagtatttcataatttgaattggaatcccaagctaattgctactctatcatgtgtgtgcaaatggtttgatgatcttgccaagcgagttctatggaaagagttttgtagaacaagagctccgaaaatgttgtgtgatctgcaatctaatgggagccacattgttgatgggaactggagggccctagggaagcttcttatatactgttcaggatgcacaaaaggtggcttgttcaatagcattcagatccctggtcactttgtttatcagacacgattttctagaacatcaggaaagagctttcttttgccacaatgcagaactgatgttttgtatgtgtctgatccttgtgagcatcttgaccaaggtgaagaaggagatgtaggattcttccgtggcattttcaagtcatttgcaacctcaaaggtcaggaagatgcttattaataaaggtgccaagctccatccaacagaagtctgcccttattgtaaggcaaagttgtggagcatgctgcaagccaaaatgatccctcaaagtgctagttgcaggttgggttcttatgatgattgtattgagtattatgtgtgcctcaacggccacatgcttgggatatgtacactgttaccattgtctgattcagaagaggcatctgaattggagtaatacctaaatgattttcaggttggcagtaaatcttcacaagttggctaaacactgctggtatactccaggctcaattcaactaatcagcacctaaaatatgccattaacttaccctcaagcttgatgctgcaatctcacccaacccaagccacaatttccaaggaaggacggagatgatcaatttttagtatgaatcgttatactgaagtttgttactgtgaactatgtgatatcccatgtagattgatacgcggtgtctctacctgtgacaaatatgcgtgtgtaataattcatacttgttcaatataatcaggattcattct

SEQ ID NO: 14655 - protein, 248 aa, Glycine max
MILTKQYRCIHSASCQCTKGHLSEDVIFLVFHNLNWNPKLIATLSCVCKWFDDLAKRVLWKEFCRTRAPKMLCDLQSNGSHIVDGNWRALGKLLIYCSGCTKGGLFNSIQIPGHFVYQTRFSRTSGKSFLLPQCRTDVLYVSDPCEHLDQGEEGDVGFFRGIFKSFATSKVRKMLINKGAKLHPTEVCPYCKAKLWSMLQAKMIPQSASCRLGSYDDCIEYYVCLNGHMLGICTLLPLSDSEEASELE

SEQ ID NO: 14656 - protein, 178 aa, Glycine max
MLCDLQSNGSHIVDGNWRALGKLLIYCSGCTKGGLFNSIQIPGHFVYQTRFSRTSGKSFLLPQCRTDVLYVSDPCEHLDQGEEGDVGFFRGIFKSFATSKVRKMLINKGAKLHPTEVCPYCKAKLWSMLQAKMIPQSASCRLGSYDDCIEYYVCLNGHMLGICTLLPLSDSEEASELE

SEQ ID NO: 14657 - DNA, 963 bp, Glycine max
agaacacctaatcgaaaaatttttacggcactgagtgaggtggttcactgtctctgcctctttctcttctttgttcctagaaacaaaccatcatcttcttagatctataccaacgtcgaaggaaataatctcttgccaaaagcaaaaccctaaacacttcctccgagtatttaccagaaccatagtttttaaaagctgagagcgtcaaaggcacagctgtcgcgtgggaagatcccaatgtgtgctagaaattaaaaagatcattgacaccattgccgaagaaggggtctgtgacctcactcgcgtccctcttcccagtagaggaggtgcagaaggtggccaagcgcattgaagacaccattgccgacaagcagagcgaaattaaccgcgtacgaggttttgtcgtcgacaaaacagcctcatcaacctcgtccacaagctccttgaacagctctcctacgacatcatggttccgtttgggaaagcaacattcttcccaggtcgtttgattcacaccaatgagttcctggttcttttgggagaaggatattatgctgagagaacttcgaagcaaaccgttgagattttacagcgaagagggaagtccttggattcgcgggttgattctcttgaggccaatatcaaggaccctgaagcagaggcttcatttctcaatgccacggcttcatttttggttgctaggttcttttgggagaagggtattatgttgaatttttaatgctgaaatgctgaatttgttctatgttaattcttccattaaaaatattgggaattttgattttttatctcaaacgtgtagagagactggagagcctgtgaccgtcaatttttatgtgtacaatggaagcaatttttcatgttaattctgcagttcaattcaacttcaaaaaaaaaaaaaaaaaagcttatcgataccgtcgacctcgagggggggcccggtac

SEQ ID NO: 14658 - protein, 90 aa, Glycine max
MVPFGKATFFPGRLIHTNEFLVLLGEGYYAERTSKQTVEILQRRGKSLDSRVDSLEANIKDPEAEASFLNATASFLVARFFWEKGIMLNF

SEQ ID NO: 14659 - protein, 70 aa, Glycine max
MSSWFFWEKDIMLRELRSKPLRFYSEEGSPWIRGLILLRPISRTLKQRLHFSMPRLHFWLLGSFGRRVLC

SEQ ID NO: 14660 - protein, 59 aa, Glycine max
MLRELRSKPLRFYSEEGSPWIRGLILLRPISRTLKQRLHFSMPRLHFWLLGSFGRRVLC

SEQ ID NO: 14661 - DNA, 1294 bp, Glycine max
attcaaccaaataaccactccccccttcgtagtagtgggtgcacccatccacgcaccacaaaattaataacccaaaaaatacaaaaacaactttgcaatttcgtaggagatgctcaggagcagcacgctaacacagagtgttacagtcacctgtgttcgtcacagtcacagacaatggttccaatcaattcccgtaaattatagattctttgacgctgctcggaactctctatcatcacccaactccgcgatcttcaaatggaaaagaaaggccaattataaccgtcatagttctggaatggggaccttcaccactcgcgcgttggcgcagccgcttcagaacgccgacgaactcatcgactccgtcgagacatttatcttcgattgtgacggagttatatggaaaggtgataaattaatagacggagtgcctgaaacgcttgacatgcttcggtcaaagggcaaaagattagtttttgtcaccaataactcaacaaagtctaggaagcaatatggaaagaagtttgaaacacttggcctgaatgtcagcgaggaggagattttcgcatcattctttgcagctgctgcatatctgaagtccattgatttcccaaaagataaaaaggtttatgtcatcggagaagatggcatcttgaaggagcttgagcttgctggataccagtaccttggtgggccggaagatggtgggaaaaaaatagaactgaagccaggatttttgatggagcatgatgaagatgttggagcagttgttgttgggtttgatcgctacttcaactactataaaatccagtatgggacactctgtatacgtgaaaaccctggatgtcttttcattgctacaaaccgagatgctgttactcatctcacagatgctcaagaatgggcaggtgggggctcaatggttggcgctctcagtggatctactcaacgtgagccattagttgttggaaaaccctcaacgtttatgatggattacttggcaaacaaatttggcatttcgaagtcacagatatgtatggttggggacagattagacactgatatcttgtttggacaaaatggtggttgcaaaactcttcttgtgctctcaggggtcaccacactggccatgcttcagagccctaacaactccatacagccagacttttataccaataaaatttcagattttctttccctgaaagctgcagctgtatgactataatatttatacattatccccacacgatggtgggaaaagccatgtatttaagaagtaagttgaattttatcc

SEQ ID NO: 14662 - protein, 369 aa, Glycine max
MLRSSTLTQSVTVTCVRHSHRQWFQSIPVNYRFFDAARNSLSSPNSAIFKWKRKANYNRHSSGMGTFTTRALAQPLQNADELIDSVETFIFDCDGVIWKGDKLIDGVPETLDMLRSKGKRLVFVTNNSTKSRKQYGKKFETLGLNVSEEEIFASFFAAAAYLKSIDFPKDKKVYVIGEDGILKELELAGYQYLGGPEDGGKKIELKPGFLMEHDEDVGAVVVGFDRYFNYYKIQYGTLCIRENPGCLFIATNRDAVTHLTDAQEWAGGGSMVGALSGSTQREPLVVGKPSTFMMDYLANKFGISKSQICMVGDRLDTDILFGQNGGCKTLLVLSGVTTLAMLQSPNNSIQPDFYTNKISDFLSLKAAAV

SEQ ID NO: 14663 - protein, 306 aa, Glycine max
MGTFTTRALAQPLQNADELIDSVETFIFDCDGVIWKGDKLIDGVPETLDMLRSKGKRLVFVTNNSTKSRKQYGKKFETLGLNVSEEEIFASFFAAAAYLKSIDFPKDKKVYVIGEDGILKELELAGYQYLGGPEDGGKKIELKPGFLMEHDEDVGAVVVGFDRYFNYYKIQYGTLCIRENPGCLFIATNRDAVTHLTDAQEWAGGGSMVGALSGSTQREPLVVGKPSTFMMDYLANKFGISKSQICMVGDRLDTDILFGQNGGCKTLLVLSGVTTLAMLQSPNNSIQPDFYTNKISDFLSLKAAAV

SEQ ID NO: 14664 - protein, 257 aa, Glycine max
MLRSKGKRLVFVTNNSTKSRKQYGKKFETLGLNVSEEEIFASFFAAAAYLKSIDFPKDKKVYVIGEDGILKELELAGYQYLGGPEDGGKKIELKPGFLMEHDEDVGAVVVGFDRYFNYYKIQYGTLCIRENPGCLFIATNRDAVTHLTDAQEWAGGGSMVGALSGSTQREPLVVGKPSTFMMDYLANKFGISKSQICMVGDRLDTDILFGQNGGCKTLLVLSGVTTLAMLQSPNNSIQPDFYTNKISDFLSLKAAAV

SEQ ID NO: 14665 - DNA, 522 bp, Glycine max
aacaaaaatcatttacatcctaaagaatttggagctcaaaaacttccatcttctttacaagtcttatttgacactctcttcataagtttgaacacatacaacaatgggttttcgcttacctggaatcaggaagacatcgttttctgcaaacaaatttgcatcttcaaaagtcatggatgtgccgaagggctaccttgcagtctatgttggagagaaaatgaggcggtttgtgattccagtatcatacttgaaccaaccattattccaggacttgttaagtcaagctgaggaagattttggatatcatcatccaatgggcggcctcacaattccttgcagtgaagatgtattccaacatataacttcttgcttgaattgacaacaaagctcacactaggagactgacatagattaattaagacattttgtacacaatagggtgttgtcaacttgtaaagatattcctttctcgagaaagagggaaaagaaacattatagaatgacaaaagttacagtatttcc

SEQ ID NO: 14666 - protein, 95 aa, Glycine max
NKNHLHPKEFGAQKLPSSLQVLFDTLFISLNTYNNGFSLTWNQEDIVFCKQICIFKSHGCAEGLPCSLCWRENEAVCDSSIILEPTIIPGLVKSS

SEQ ID NO: 14667 - protein, 91 aa, Glycine max
MGFRLPGIRKTSFSANKFASSKVMDVPKGYLAVYVGEKMRRFVIPVSYLNQPLFQDLLSQAEEDFGYHHPMGGLTIPCSEDVFQHITSCLN

SEQ ID NO: 14668 - protein, 68 aa, Glycine max
MDVPKGYLAVYVGEKMRRFVIPVSYLNQPLFQDLLSQAEEDFGYHHPMGGLTIPCSEDVFQHITSCLN

SEQ ID NO: 14669 - DNA, 1643 bp, Glycine max
acattgtaacagccaaaggcaggtggaatccaattctcaaaccccaatcgttagactaagcaagaggtcgttcagtgtaagtactccttgttcttgtttctgtttcatcatttttgatcttatgctagtcgaatcaattgtgatgcttagaattagtcaatgaagctccctgtgcgttacttgattgttattttgaccttcgtctgcacctcggtttgctacatcgaacgagttgggttttccatcgcgtacacagttgctgctgacggtgccggagtgaatcaatcgagcaaaggtacaatactgtccaccttctattacggatacgcctgttctcaagttcccggaggatgggcagctcagaaaatcggggggaggagggtcctgcttctttcctttctgttgtggtcattaacttgtgcactacttcctctagatcccaatcgcgttatgcttttagtcattgctcgtttgctcgttggtatagcacaaggcttcattttcccctccatccacacagttctagctcaatgggttccccctcacgagagatctagatccgtctctctcaccacttctgggatgtacctaggtgcagctctaggtatgcttcttcttcctactctagtcaagttcagaggtcctcaatctgtgtttcttgcggaggccgcattgggcgcttcatggtctttactttggttcaaatacgccactgatcccaaatccactgcctctggtgtcggggaatcagtcttgcccgtcaataaaaaaattgacactcacaacaaaaaaccgctttcagccaaaatcccctgggtcaaaattttaaccagcttccctgtgtgggcgattgttgtcaacaatttcacctttcactatgctttatatgtgctcatgaactggctcccaacctactttgaattgggccttcagcttagcctgcaagatatgggttcctctaaaatgatgccctatctcaacatgttcctcttctccaacattggcggtgttgtcgcggactacttgatcaccaggagaatattatctgtcaccaaaaccaggaaattcttgaacactgtcggattcttggttgcttctcttgccttggtgatcattcccagtttcagaacttctggtggtgctgtcttctgttcttccgtggctcttggtttcttggcacttggcagagctggctttgccgtgaaccacatggacattgctcctagatacgctggaatagtgatgggtgtttctaatactgccggtacgttagctggcattgttggcgttgacctgactgggaagcttcttgaagctgctaaggctgctaattctgatctttcaagtccagaaagctggagggcagtgttttccattcctgggtttctatgcatttttagttcttttgtatttctactattttcaactggggagagaatttttgattgaggtaaccttgtcattttcatgactcatcagctgttgttattctgaggatttactttttattacatctccatgttatatcattcttggataggagagctcatattgtcataattggatatgaatttttgttgttattattattatttccccatcttgtaaaaaaaaaaaaaaaaaagcttatcgataccgtcgac

SEQ ID NO: 14670 - protein, 429 aa, Glycine max
MKLPVRYLIVILTFVCTSVCYIERVGFSIAYTVAADGAGVNQSSKGTILSTFYYGYACSQVPGGWAAQKIGGRRVLLLSFLLWSLTCALLPLDPNRVMLLVIARLLVGIAQGFIFPSIHTVLAQWVPPHERSRSVSLTTSGMYLGAALGMLLLPTLVKFRGPQSVFLAEAALGASWSLLWFKYATDPKSTASGVGESVLPVNKKIDTHNKKPLSAKIPWVKILTSFPVWAIVVNNFTFHYALYVLMNWLPTYFELGLQLSLQDMGSSKMMPYLNMFLFSNIGGVVADYLITRRILSVTKTRKFLNTVGFLVASLALVIIPSFRTSGGAVFCSSVALGFLALGRAGFAVNHMDIAPRYAGIVMGVSNTAGTLAGIVGVDLTGKLLEAAKAANSDLSSPESWRAVFSIPGFLCIFSSFVFLLFSTGERIFD

SEQ ID NO: 14671 - protein, 332 aa, Glycine max
MLLVIARLLVGIAQGFIFPSIHTVLAQWVPPHERSRSVSLTTSGMYLGAALGMLLLPTLVKFRGPQSVFLAEAALGASWSLLWFKYATDPKSTASGVGESVLPVNKKIDTHNKKPLSAKIPWVKILTSFPVWAIVVNNFTFHYALYVLMNWLPTYFELGLQLSLQDMGSSKMMPYLNMFLFSNIGGVVADYLITRRILSVTKTRKFLNTVGFLVASLALVIIPSFRTSGGAVFCSSVALGFLALGRAGFAVNHMDIAPRYAGIVMGVSNTAGTLAGIVGVDLTGKLLEAAKAANSDLSSPESWRAVFSIPGFLCIFSSFVFLLFSTGERIFD

SEQ ID NO: 14672 - protein, 288 aa, Glycine max
MYLGAALGMLLLPTLVKFRGPQSVFLAEAALGASWSLLWFKYATDPKSTASGVGESVLPVNKKIDTHNKKPLSAKIPWVKILTSFPVWAIVVNNFTFHYALYVLMNWLPTYFELGLQLSLQDMGSSKMMPYLNMFLFSNIGGVVADYLITRRILSVTKTRKFLNTVGFLVASLALVIIPSFRTSGGAVFCSSVALGFLALGRAGFAVNHMDIAPRYAGIVMGVSNTAGTLAGIVGVDLTGKLLEAAKAANSDLSSPESWRAVFSIPGFLCIFSSFVFLLFSTGERIFD

SEQ ID NO: 14673 - DNA, 683 bp, Glycine max
tacctagaacatcctaatcgaaaaatgtatcataggtcctgtatacccaactttttggttatccagattctttgcagacatgtggatgaacttccccaaagaggaagagtatcttgaatggtttaaaaggctgatttcagaaatatcaagttgaaaaggataggtccaaaatggtatcgtggcgtaacacgacatggcctcaacatgggttgttctgtgactggaatcaaacctttgtctggggactctcccctcaagcttggtcctaagacagaggatgtaaagaagccagtaattcccttgttgcttctctcgcggttcattcttggtacaattgcagctacttactatgtactagtttcagtttacatgtggatcaaggacaaaattattccaaagggcatacccatctaagattggaaaatgaagttggggtaggatttggacttgtacatctctaaaataactatgatggtaacatatgattctttcttgcatttttccgtcttgtcaacttattagggaagagttgacatatctgcatctaaaccgttttgccttgtgccactagctagcttatagcagatatgccaaatttgatatgtatataatatgtgaacatgctaagcctttagtagacaactatacacaatgtgccaggttgcctcagcattgtctggagg

SEQ ID NO: 14674 - protein, 69 aa, Glycine max
MGCSVTGIKPLSGDSPLKLGPKTEDVKKPVIPLLLLSRFILGTIAATYYVLVSVYMWIKDKIIPKGIPI

SEQ ID NO: 14675 - protein, 38 aa, Glycine max
YLEHPNRKMYHRSCIPNFLVIQILCRHVDELPQRGRVS

SEQ ID NO: 14676 - DNA, 525 bp, Glycine max
gctcaagtttccaagaccaagccaatggaaaacctttcaccattgatttacaaaaaccccattagaagaacttctaggcgatctacaatgtatcttggtgtgagaaaaaggccatggggaagatatgctgctgagattaggaacccatacaccaaagagagacactggctaggcacatttgacactgctgaagaggctgctatagcttatgatctttcatctatcaagatttgtggcattaatgctcgaactaattttcactacccttttgtgtctcttccaccacttcctatgtcgtcattgcctcctccaccgccaccgccgaccccagagttggatccaagtgttgaagtttgtctagagatgatgaatgctgcttcttacgatggtgatgatgaatctcttgttattgcttccattttgcaaagtttttctaattctggtaactgttctttttagtttttggttccaatgaggctatggcctgcctcttatcaaatcaataattctattttttttctttgc

SEQ ID NO: 14677 - protein, 152 aa, Glycine max
AQVSKTKPMENLSPLIYKNPIRRTSRRSTMYLGVRKRPWGRYAAEIRNPYTKERHWLGTFDTAEEAAIAYDLSSIKICGINARTNFHYPFVSLPPLPMSSLPPPPPPPTPELDPSVEVCLEMMNAASYDGDDESLVIASILQSFSNSGNCSF

SEQ ID NO: 14678 - protein, 144 aa, Glycine max
MENLSPLIYKNPIRRTSRRSTMYLGVRKRPWGRYAAEIRNPYTKERHWLGTFDTAEEAAIAYDLSSIKICGINARTNFHYPFVSLPPLPMSSLPPPPPPPTPELDPSVEVCLEMMNAASYDGDDESLVIASILQSFSNSGNCSF

SEQ ID NO: 14679 - protein, 123 aa, Glycine max
MYLGVRKRPWGRYAAEIRNPYTKERHWLGTFDTAEEAAIAYDLSSIKICGINARTNFHYPFVSLPPLPMSSLPPPPPPPTPELDPSVEVCLEMMNAASYDGDDESLVIASILQSFSNSGNCSF

SEQ ID NO: 14680 - DNA, 566 bp, Glycine max
aatttgtctcttttattcgacctcaactcagtctccttcactccatatccatatcttcctctctcacactctctaagtgatggctttcaattccaaaagggcaccgatctcaagttcaaaagccatagctgatgcagcctcatggtgctgtgcatgttttcttgtgtccctcttattgctatgcatattcagagacatctctgcccttcatgatgatcaagggaacttgatgatgagaagcagccatgtcttgtccaagccatcatgtgatgaaatatatgtggttggagaaggtgagacacttcatacaatcagtgacaagtgtggtgatccctttattgtggaaaagaaccctcatatccatgaccctgatgatgtcttcccaggacttgttctcaagattacacgctcacaaacaacatagcttgaataattgaaagttaattcctatacatgtatgtatctttcttcaatatagaacaaggaaaaaaaacttccttatgggcatcctctaaagtttttagttttggtttgcttgttgtatgtactacactttgcctagcaag

SEQ ID NO: 14681 - protein, 114 aa, Glycine max
MAFNSKRAPISSSKAIADAASWCCACFLVSLLLLCIFRDISALHDDQGNLMMRSSHVLSKPSCDEIYVVGEGETLHTISDKCGDPFIVEKNPHIHDPDDVFPGLVLKITRSQTT

SEQ ID NO: 14682 - protein, 64 aa, Glycine max
MMRSSHVLSKPSCDEIYVVGEGETLHTISDKCGDPFIVEKNPHIHDPDDVFPGLVLKITRSQTT

SEQ ID NO: 14683 - protein, 63 aa, Glycine max
MRSSHVLSKPSCDEIYVVGEGETLHTISDKCGDPFIVEKNPHIHDPDDVFPGLVLKITRSQTT

SEQ ID NO: 14684 - DNA, 1705 bp, Glycine max
aaaatgtctcttttccctctctcactgtttttataagtttgattgccaaatcaatatccatggcttcggaggacagaaacgaagaagagcttcacgttctattggtggcattctctgcccaaggtcacatcaaccctttgcttaggcttggcaaaaaactactaagcagaggcctccacgtcaccctcgccaccaccgaattagtttaccaccgcgtcttcaagtcctccgccgccacccccaccgccaccgtccccacttcaatcaccaccaacggaatccaagtgctattcttctccgacggcttcggaaccggcctagacaacaagaccatcacccccgaccaatacatggaactcataggaaaatttggtcccatcagcctctccaacatcatcaaagaccacttcctcaacggttcccaaaaactcgtttgcatcatcaacaacccctttgtcccatgggttgcagatgtagctgccaacttcaacatcccatgcgcatgtctctggatccaaccctgtgctctctacgccatatactaccgtttctacaacaaccttaacacgttccccactctggaggacccttcaatgaatgtcgagttaccaggtcttcccttactacaaccccaagaccttccttctttcgttctcccatcaaacccccatggaagtattcccaaggtgctgtcttcgatgttccaacacatgaagaagctgaagtgggtactcgcgaactcgtttcacgaactggagaaagaggtaatagactccatggctgagttatgccccataacaacggtgggcccactagtccctccatcgttactcggccaagacgaaaacatcgaaggagacgtgggaatcgaaatgtggaagccacaggactcgtgcatggagtggctaaaccagcaacctccttcttcggttatctacgtttcctttgggagcattattgtgcttaccgctaaacaattggagagcatagcgagggctcttaggaacagtgaaaaaccttttctttgggtggttaagcgtcgagatggagaagaagcgcttccacttccagaagggtttgttgaagagaccaaagagaagggcatggtggtgccgtggtgcccgcaaacgaaggtgctgagtcacccttcggtggcgtgtttcttaacgcactgtggttggaattcgatgctggaagcaatcactgcgggcacgcccatgattgcttggccgcaatggaccgaccaacccaccaacgcgaaactgatttcggatgtgtttcgtttggggattcggctcgcgcaggagagtgatgggttcgttgcgacggaggaaatggaaagggcttttgagcggattttctcggcgggggactttaagagaaaggcgtcggagctaaaacgggcggcgagagaagcggtggctcagggtggctcgtcggagcagaatatccaatgcttcgtggatgaaattatagggacaaagtctacttgatggttggaccaggaccagatacagctttggtaacttcttgtcggtattggagattaagattctgctagagtttggagttttatgatcattatatttatcgccttcttccaaaaaaagttgtggttattatttttaattcctagttttgtgcttactatgattcggtgattacataattatagaacaagaacaagggtcacaggactttgtgg

SEQ ID NO: 14685 - protein, 496 aa, Glycine max
NVSFPSLTVFISLIAKSISMASEDRNEEELHVLLVAFSAQGHINPLLRLGKKLLSRGLHVTLATTELVYHRVFKSSAATPTATVPTSITTNGIQVLFFSDGFGTGLDNKTITPDQYMELIGKFGPISLSNIIKDHFLNGSQKLVCIINNPFVPWVADVAANFNIPCACLWIQPCALYAIYYRFYNNLNTFPTLEDPSMNVELPGLPLLQPQDLPSFVLPSNPHGSIPKVLSSMFQHMKKLKWVLANSFHELEKEVIDSMAELCPITTVGPLVPPSLLGQDENIEGDVGIEMWKPQDSCMEWLNQQPPSSVIYVSFGSIIVLTAKQLESIARALRNSEKPFLWVVKRRDGEEALPLPEGFVEETKEKGMVVPWCPQTKVLSHPSVACFLTHCGWNSMLEAITAGTPMIAWPQWTDQPTNAKLISDVFRLGIRLAQESDGFVATEEMERAFERIFSAGDFKRKASELKRAAREAVAQGGSSEQNIQCFVDEIIGTKST

SEQ ID NO: 14686 - protein, 477 aa, Glycine max
MASEDRNEEELHVLLVAFSAQGHINPLLRLGKKLLSRGLHVTLATTELVYHRVFKSSAATPTATVPTSITTNGIQVLFFSDGFGTGLDNKTITPDQYMELIGKFGPISLSNIIKDHFLNGSQKLVCIINNPFVPWVADVAANFNIPCACLWIQPCALYAIYYRFYNNLNTFPTLEDPSMNVELPGLPLLQPQDLPSFVLPSNPHGSIPKVLSSMFQHMKKLKWVLANSFHELEKEVIDSMAELCPITTVGPLVPPSLLGQDENIEGDVGIEMWKPQDSCMEWLNQQPPSSVIYVSFGSIIVLTAKQLESIARALRNSEKPFLWVVKRRDGEEALPLPEGFVEETKEKGMVVPWCPQTKVLSHPSVACFLTHCGWNSMLEAITAGTPMIAWPQWTDQPTNAKLISDVFRLGIRLAQESDGFVATEEMERAFERIFSAGDFKRKASELKRAAREAVAQGGSSEQNIQCFVDEIIGTKST

SEQ ID NO: 14687 - protein, 380 aa, Glycine max
MELIGKFGPISLSNIIKDHFLNGSQKLVCIINNPFVPWVADVAANFNIPCACLWIQPCALYAIYYRFYNNLNTFPTLEDPSMNVELPGLPLLQPQDLPSFVLPSNPHGSIPKVLSSMFQHMKKLKWVLANSFHELEKEVIDSMAELCPITTVGPLVPPSLLGQDENIEGDVGIEMWKPQDSCMEWLNQQPPSSVIYVSFGSIIVLTAKQLESIARALRNSEKPFLWVVKRRDGEEALPLPEGFVEETKEKGMVVPWCPQTKVLSHPSVACFLTHCGWNSMLEAITAGTPMIAWPQWTDQPTNAKLISDVFRLGIRLAQESDGFVATEEMERAFERIFSAGDFKRKASELKRAAREAVAQGGSSEQNIQCFVDEIIGTKST

SEQ ID NO: 14688 - DNA, 656 bp, Glycine max
gaggaagtgagtccagagacagggatcagttatggctccgtgttcagtttttttcaattttcttcttctgcttcttctttctttcaccaaagaagctttaggtgtttcagagcaagaagctgacagagtgcatggactacccggacagcctccggtgaagttcaaacaatattctggttatatcactgtcaatgaaacccatggaagagcactcttctattggttctttgaggccactcataaaccagaagaaaagcctcttctcttatggctcaatggaggccctggttgttcctcaattggttatggagaagcagaggagctaggacccttctttcctcaggacagcagccaaccaaagctaaagttaaatccttattcttggaataacgctgccaatcttttgtttttggaatcccctgttggggtggggttctcctacaccaacaccagcagtgatataagtgagcttggtgacaccattaccgctaaagattcacacacctttatcatcaagtggtttagaagatttccacaattcagatcacacgaattctacatttccggtgaaagctatgcagggcactatgttccgcaactttcagagctcattttcgataataatcgcaatcctgtcgagaaagactacattaact

SEQ ID NO: 14689 - protein, 208 aa, Glycine max
MAPCSVFFNFLLLLLLSFTKEALGVSEQEADRVHGLPGQPPVKFKQYSGYITVNETHGRALFYWFFEATHKPEEKPLLLWLNGGPGCSSIGYGEAEELGPFFPQDSSQPKLKLNPYSWNNAANLLFLESPVGVGFSYTNTSSDISELGDTITAKDSHTFIIKWFRRFPQFRSHEFYISGESYAGHYVPQLSELIFDNNRNPVEKDYIN

SEQ ID NO: 14690 - DNA, 505 bp, Glycine max
acaagggaggcttggagatttctttattcttctggtcttaccaatcaaattgacctttttttgctttgccccggtatgattccttgtgatcaacgtcacttgttaatggtgcatgcaatatgaataagtagtgtatggaacagtgccaccataaggtttcttttgttgtattctttcttataacatggtagcagcggaggatttctgcacctttacggcatttttcttatgtccatagagcatggatgctacatcctcaccgtttgtttcctcaagaagaatgggtgtatatgatcctatccaccaaattagcacgtgggaagaaaatttcaaaagtaatgatactaataatttaactgtatccacatccataattggggaggtggacatgaagttagataatcagtttcaggtgcaatcagaggatgatactcatggaatatttggcacatctgtgaagtacgaccaagacactaacagacttactgataagacacaacgacgt

SEQ ID NO: 14691 - protein, 88 aa, Glycine max
MDATSSPFVSSRRMGVYDPIHQISTWEENFKSNDTNNLTVSTSIIGEVDMKLDNQFQVQSEDDTHGIFGTSVKYDQDTNRLTDKTQRR

SEQ ID NO: 14692 - protein, 75 aa, Glycine max
MGVYDPIHQISTWEENFKSNDTNNLTVSTSIIGEVDMKLDNQFQVQSEDDTHGIFGTSVKYDQDTNRLTDKTQRR

SEQ ID NO: 14693 - DNA, 876 bp, Glycine max
agtttatcaatggcacttctccacccaaatcttcttcccactttcaattccaacactcttacctttccttccatcaaactcaaaccctcactctcgcacgtgccttctccaacccccacacgcttcagtctctctgtttccgcggcggaaaccaccgcttttgccgcccctcccactccccaacctgagaagcttggagttgtagttaagccaacggagaagccgagacttgtgttgaagttcatatggatggagaagaacattggaattgcgcttgaccagatggtaccgggccatggcaccattcctctgagcccatattacttttggccccgaaaagatgcctgggaagagctcaaggagttgcttgagaacaagccttggcatatgccttctcccatcagtggaggccaaactgtagccagtattttggtcaggcttcttatagccttggtaaggaaagttggggttggagctggaccgagcgttgggttgcggcacgtccttgggaagttcgggttcgaggtcagaccaccaaaacaacaaaactcaacggccatgggcaggtgcaaaaaaccaaattagacaagatgaaccaaaatgaaagcaaagtagccttggctaaacctacactatcaaacgggaaggaaaggaaaacggtacttcagggctgtcaaagaacaatgtatccaaatagcccattctaatttgatggtttatggtttcttcttgcacttctttgggggtttattttccatattttgcttggtgagaatctaccttttggtgtgtacgttccactaggagagacttcacttattgtctgcttttgcatggtgcatatgattatgaatatgaattccctagttttggttg

SEQ ID NO: 14694 - protein, 194 aa, Glycine max
SLSMALLHPNLLPTFNSNTLTFPSIKLKPSLSHVPSPTPTRFSLSVSAAETTAFAAPPTPQPEKLGVVVKPTEKPRLVLKFIWMEKNIGIALDQMVPGHGTIPLSPYYFWPRKDAWEELKELLENKPWHMPSPISGGQTVASILVRLLIALVRKVGVGAGPSVGLRHVLGKFGFEVRPPKQQNSTAMGRCKKPN

SEQ ID NO: 14695 - protein, 191 aa, Glycine max
MALLHPNLLPTFNSNTLTFPSIKLKPSLSHVPSPTPTRFSLSVSAAETTAFAAPPTPQPEKLGVVVKPTEKPRLVLKFIWMEKNIGIALDQMVPGHGTIPLSPYYFWPRKDAWEELKELLENKPWHMPSPISGGQTVASILVRLLIALVRKVGVGAGPSVGLRHVLGKFGFEVRPPKQQNSTAMGRCKKPN

SEQ ID NO: 14696 - protein, 111 aa, Glycine max
MEKNIGIALDQMVPGHGTIPLSPYYFWPRKDAWEELKELLENKPWHMPSPISGGQTVASILVRLLIALVRKVGVGAGPSVGLRHVLGKFGFEVRPPKQQNSTAMGRCKKPN

SEQ ID NO: 14697 - DNA, 1211 bp, Glycine max
aaaaaaccctataaaacttaaatttcaggcataaactgagagagagataacatcgttgcagtggcgcgcccaatggctctgggaatctctaacatactgcactgccccaaattgagtttctcccacaataattttctccccaaagttccaacctctatcagcctcaggtttccccagacagcagcatggagtgatagaaagattatctgtgctgctgcatctgcggcaggaagctctaatcccgatggtgaatttaatccttatgaggtgctaggtgtaagccctattgagaaatttgacatggtcaaggcagcatatgctaaaaaaaagaaggaggctgagatgaatggcgatgaagcaactgcttcaagactggaaaaggcatatgacaaactcatgatggctcaattgtctaatcggaaaaagggtgtgacttttggatcatttaaggtttcaaaggagatcaagtatgctgacaagcttccagttataccttgggggccaaggcttactaaatcaagtcaaaatgacatgcgcatcaacttggcaatatctgctgtttttacagcttggatccttgtcaagcgcagtgctgaatataaacctttgcagtttttagcctttgcctttgtttataggctttttgagaagttaaaagcctctgaatctcctgtaacccccaaatataatgaagagggtgaagacacaggagaaggactccgcatgggaaaacgactgctccgatcactagccttggtttttggatgtgtagctatttcatctttggcatacactttcattttgaacataattgagtttgcaggtggttttattcctactcttttgtacaacagtcaggagttgataatcaccacttcatcggcactcatgctttatatcatggcatcttattatggatagtggagtgtgtcttgaagacgaagaaaccatgcatctattcaccatccctttttttttttaagtctttttcctcccttctctttcttttgttcttattgtgaactaaagtgcttttcttacaaattttgtcaaaagagatgctttttccttgttttaatatactaaattagggatagtgtcaactttcttatggtacttttttcttttcttttttgggaagggaggggggtcatttatattgattttgactattcacatcatagtggtatataagtcttgtattcttgctc

SEQ ID NO: 14698 - protein, 282 aa, Glycine max
MALGISNILHCPKLSFSHNNFLPKVPTSISLRFPQTAAWSDRKIICAAASAAGSSNPDGEFNPYEVLGVSPIEKFDMVKAAYAKKKKEAEMNGDEATASRLEKAYDKLMMAQLSNRKKGVTFGSFKVSKEIKYADKLPVIPWGPRLTKSSQNDMRINLAISAVFTAWILVKRSAEYKPLQFLAFAFVYRLFEKLKASESPVTPKYNEEGEDTGEGLRMGKRLLRSLALVFGCVAISSLAYTFILNIIEFAGGFIPTLLYNSQELIITTSSALMLYIMASYYG

SEQ ID NO: 14699 - protein, 206 aa, Glycine max
MVKAAYAKKKKEAEMNGDEATASRLEKAYDKLMMAQLSNRKKGVTFGSFKVSKEIKYADKLPVIPWGPRLTKSSQNDMRINLAISAVFTAWILVKRSAEYKPLQFLAFAFVYRLFEKLKASESPVTPKYNEEGEDTGEGLRMGKRLLRSLALVFGCVAISSLAYTFILNIIEFAGGFIPTLLYNSQELIITTSSALMLYIMASYYG

SEQ ID NO: 14700 - protein, 192 aa, Glycine max
MNGDEATASRLEKAYDKLMMAQLSNRKKGVTFGSFKVSKEIKYADKLPVIPWGPRLTKSSQNDMRINLAISAVFTAWILVKRSAEYKPLQFLAFAFVYRLFEKLKASESPVTPKYNEEGEDTGEGLRMGKRLLRSLALVFGCVAISSLAYTFILNIIEFAGGFIPTLLYNSQELIITTSSALMLYIMASYYG

SEQ ID NO: 14701 - DNA, 904 bp, Glycine max
aatgactcacacgctggcaagaaacaacacgatgtgcacattagagaagagaggacccctcttcgtcctaaccctaaccagcgaattcgacgaccagcaccgcctcaaccccaccctcctatcttccctcctcgctgcgctctccgaagtcaagtcccaagccaccgccggctccgccctcctcaccgccgcgcacggcagattcttctgcaacggcttcgacttccgctgggcccaggccgccggcgaccagccctccgcccgcctccgcctccgccgcatgtccgacgccctccgccccgtcctcgccgcgctcctctccctccccatccccaccgttgccgccgtctccggccacgccgccgctgccggagcaatcttcgccctcgcgcacgactacgtcctcatgcgcgccgaccgcggtgtgatctactttccggaggtggacctgggaatcactcttccagaatacttcgccgccgtcgccggggcgaagatcccggcggcggcgctgcgtgacgttgtgttggccggaaggaaggttagggcggagggggcggtggagatggggatcgtgcactcggcgcacgatagcgcggagggcaccgtggaggctgcgatgcgcctgggggaggagttagcacggagaaagtgggttggggacgcttatgcggaaatcagaaagagtttgtaccctgaagtgtgtgctgctttgggattaacacccaaaaccatcgtttctaagatctgattacttgtaatttgaattgcacaaacaacaatttaacagtatgagaaaacaaaaaataaaaaatctatgttcgaagaatgaatttgaaatgtgatcaataatacagtgtgtatggttctacaatcatatgatacaagcatttatatttcttgt

SEQ ID NO: 14702 - protein, 249 aa, Glycine max
MTHTLARNNTMCTLEKRGPLFVLTLTSEFDDQHRLNPTLLSSLLAALSEVKSQATAGSALLTAAHGRFFCNGFDFRWAQAAGDQPSARLRLRRMSDALRPVLAALLSLPIPTVAAVSGHAAAAGAIFALAHDYVLMRADRGVIYFPEVDLGITLPEYFAAVAGAKIPAAALRDVVLAGRKVRAEGAVEMGIVHSAHDSAEGTVEAAMRLGEELARRKWVGDAYAEIRKSLYPEVCAALGLTPKTIVSKI

SEQ ID NO: 14703 - protein, 239 aa, Glycine max
MCTLEKRGPLFVLTLTSEFDDQHRLNPTLLSSLLAALSEVKSQATAGSALLTAAHGRFFCNGFDFRWAQAAGDQPSARLRLRRMSDALRPVLAALLSLPIPTVAAVSGHAAAAGAIFALAHDYVLMRADRGVIYFPEVDLGITLPEYFAAVAGAKIPAAALRDVVLAGRKVRAEGAVEMGIVHSAHDSAEGTVEAAMRLGEELARRKWVGDAYAEIRKSLYPEVCAALGLTPKTIVSKI

SEQ ID NO: 14704 - protein, 172 aa, Glycine max
NDSHAGKKQHDVHIREERTPLRPNPNQRIRRPAPPQPHPPIFPPRCALRSQVPSHRRLRPPHRRARQILLQRLRLPLGPGRRRPALRPPPPPPHVRRPPPRPRRAPLPPHPHRCRRLRPRRRCRSNLRPRARLRPHARRPRCDLLSGGGPGNHSSRILRRRRRGEDPGGGAA

SEQ ID NO: 14705 - DNA, 1026 bp, Glycine max
atcctgatgccaattaactagccacctgcttccttccttctccgaattttgctgttgattaaaatcgtgcagggcaagaatatttgttagccttattaaccaaagtagtattcatgaaccaaaagggtcatgagaagaaaattgaaaaaccagatgatgagtcagagagctatggtcggagttggaggctaacggttgaagcaaacaatgcgcgttcatggaggattgttccagacaactgctacaaccaccttcagaactacatgtctggtggacaataccagcttgaccttaacctcgtcgtccaacatatcttgtcctatgcccatgagattcctcttgctgccgacggcatggatgcctggattttggatgttgatgacacttgcatctccaacattgattattacaaaggaaggcgattcgggtgcgacccatttgactcagcgatattcaaggcatggattatgaagggaaagtgtcccgcaaatcctgccgtgctagaactgtttaacgccttgataaagaaaggattcaaagtgttcttgcttactggtagagaccaagcaactctcgctcaaatcaccactaacaacttgcgtaaccagggattcatcggctaccaacgtcttattctcaggagtgctcagtacaaaggacaaagtgcagtgagatacaagtcagcaattcggaaggagatagaaggagaagggtacaggatacggggaaatgtgggagaccagtggagtgatcttcaaggagagtgtttgggcaatcgtacattcaagctccctaatcccatgtatttcatttcttgatcaacaaaatctcgctatattatttactagtattttccttcaacttaatttctatctatctgcattctcccttcttctaagccttagggaacttattttcgacttagcttgtactcaagaaaccaataaatgcattggctacgtactcaattcaaaaaaaaaaaaaaaaaagcttatcgataccgtcgacctcgagggggggcccggt

SEQ ID NO: 14706 - protein, 234 aa, Glycine max
MNQKGHEKKIEKPDDESESYGRSWRLTVEANNARSWRIVPDNCYNHLQNYMSGGQYQLDLNLVVQHILSYAHEIPLAADGMDAWILDVDDTCISNIDYYKGRRFGCDPFDSAIFKAWIMKGKCPANPAVLELFNALIKKGFKVFLLTGRDQATLAQITTNNLRNQGFIGYQRLILRSAQYKGQSAVRYKSAIRKEIEGEGYRIRGNVGDQWSDLQGECLGNRTFKLPNPMYFIS

SEQ ID NO: 14707 - protein, 184 aa, Glycine max
MSGGQYQLDLNLVVQHILSYAHEIPLAADGMDAWILDVDDTCISNIDYYKGRRFGCDPFDSAIFKAWIMKGKCPANPAVLELFNALIKKGFKVFLLTGRDQATLAQITTNNLRNQGFIGYQRLILRSAQYKGQSAVRYKSAIRKEIEGEGYRIRGNVGDQWSDLQGECLGNRTFKLPNPMYFIS

SEQ ID NO: 14708 - protein, 154 aa, Glycine max
MDAWILDVDDTCISNIDYYKGRRFGCDPFDSAIFKAWIMKGKCPANPAVLELFNALIKKGFKVFLLTGRDQATLAQITTNNLRNQGFIGYQRLILRSAQYKGQSAVRYKSAIRKEIEGEGYRIRGNVGDQWSDLQGECLGNRTFKLPNPMYFIS

SEQ ID NO: 14709 - DNA, 1114 bp, Glycine max
atcatcacttggaagaaaaaagagaggcaaaagtaaaagatggcaccttacatttctagagatagagcctctatttttgttttacttgcctcactagtccttccctttattctcctggactattcttcttctgtgttgtttgcaagtgcaaaatccccaaaatccaaggatgctgatttgttagaatttgctctcaatttggaatacttagaggctgagtttttcttgtttggggctttggggcatggattagatgtagttgctccaaacctaactgggggaggaccccttcccattggtgccaaaaaggttgaacttgacgatcttaccaatgatgtcatcttgcagtttgcttttcaggaagttggacacttaagggctataaagagcaaagtgacagggttccctaggccattgttggatctaagctcaaaatcttttgccaaactaatggacaatgcatttgggaaacctctggttcctccctttgatccctatgctaattccctcaactttataattgcatcttatgtgattccctatgttggcctcactggttatgttggtgccaatcgactactggaaagtgctacttctagggagcttgttgcggggcttctaggagtagagtctggacaagatgcaattttaagagaattgttgtatgaacgtaaagaacagttggtgccaccgtacggagtggccgtggaagagttcacaaaccgcatttctatacttaggagcaagttaggaaacagaggtttgaaagatgaaggtattgttgtgccttttggactcggtgccgagggtaaagttagaggtaacattcttgctggtgacgtaaactcactggcatattcaaggactccagaagaaatattaaggatagtatatggaagtggtgatgaacatgtttgtggtggtttctatcctataggagcaagtggtcaaatagctcaatcttacttaaattaagctaaagcatttgttttaaacttttatagattatacaacttgtctttaatccattgctaattttcttgttgctaaatattgttgatgggtgaagaccttgaaaaaacttttgataatatgcaaataataaaggagaaat

SEQ ID NO: 14710 - protein, 311 aa, Glycine max
MAPYISRDRASIFVLLASLVLPFILLDYSSSVLFASAKSPKSKDADLLEFALNLEYLEAEFFLFGALGHGLDVVAPNLTGGGPLPIGAKKVELDDLTNDVILQFAFQEVGHLRAIKSKVTGFPRPLLDLSSKSFAKLMDNAFGKPLVPPFDPYANSLNFIIASYVIPYVGLTGYVGANRLLESATSRELVAGLLGVESGQDAILRELLYERKEQLVPPYGVAVEEFTNRISILRSKLGNRGLKDEGIVVPFGLGAEGKVRGNILAGDVNSLAYSRTPEEILRIVYGSGDEHVCGGFYPIGASGQIAQSYLN

SEQ ID NO: 14711 - protein, 174 aa, Glycine max
MDNAFGKPLVPPFDPYANSLNFIIASYVIPYVGLTGYVGANRLLESATSRELVAGLLGVESGQDAILRELLYERKEQLVPPYGVAVEEFTNRISILRSKLGNRGLKDEGIVVPFGLGAEGKVRGNILAGDVNSLAYSRTPEEILRIVYGSGDEHVCGGFYPIGASGQIAQSYLN

SEQ ID NO: 14712 - DNA, 663 bp, Glycine max
tatttgataggcatcaggattatgtaaagcggcaaactcgttttgtctcccgtaaaccagcaaaagttataatttcttcaattgaagctgttgcagagtcaatgggtcttaaggtccattctcgcaattacaaggtgaggcttgaaggcgtttctgcaaacagggttggacaatttgcagtggtcttggaggtgtttgaagttgcgccatcccttttcatggttgatgttcggaaggccactggggatacttttgactaccacaagttttacaagaatttttgtggcaaactaggaaacattatttggagaccggcagggactatgccaaattctaatctgcgcaagcaaatgactttataatccaattcttgcgggtatgatgcaaatctaattagaagagcactgaaaggctgaaagcttcagctggtccccgaacatactaaaaagttagcatgcttcttctagctatcacaatgcacagcatacgctgtcaacttacaacatggcttaataatcttggaagaaggaagtaaaaaacctattgcaatgcatcttgtagcaaatctacccccacaatggtatacgaaaacaatccattatttggttggggcagaaatatatactaaggaataacagaaaagaaacgatgatattgtttttc

SEQ ID NO: 14713 - protein, 119 aa, Glycine max
FDRHQDYVKRQTRFVSRKPAKVIISSIEAVAESMGLKVHSRNYKVRLEGVSANRVGQFAVVLEVFEVAPSLFMVDVRKATGDTFDYHKFYKNFCGKLGNIIWRPAGTMPNSNLRKQMTL

SEQ ID NO: 14714 - protein, 86 aa, Glycine max
MGLKVHSRNYKVRLEGVSANRVGQFAVVLEVFEVAPSLFMVDVRKATGDTFDYHKFYKNFCGKLGNIIWRPAGTMPNSNLRKQMTL

SEQ ID NO: 14715 - DNA, 871 bp, Glycine max
gaacatcctaatcgaaaagaggaaacatttgcaatggctaacaacgtcgttgttgttcttaaggtagctcctgtttctctgcctccatttcccataacaaacaatgctctcactttcaagagccaaagacacacacttcatctgaattgcttccaaaccaaaaacagaacaacctcattcccttcttcctcgtcaatcctcagaaacaaagctagttgctctgtgttggcgtgtctccctcctgaatcctcaacctcatcttccactgctaaaccctcttttccttctcctcaaactaagctttatgtcagtgggctatcatttcgtaccactgaagagagtttgcgaaatgcatttaagaattttggtcaacttgtggaagtcaagctggtgatggatagaattgctaatagaccaagagggtttgcttttcttcgttatgcaactgaagaagagtcgcagaaggctattgagggaatgcatggaaagttcttggatggaagggtcatatttgtggaagttgccaaaccgagatcagagttagcgccaaggaaacaggaagacactagattgtaatgaagatccaatcaaaggatacagtagccatatgttcatcttggattcttggtgtgcaataggaagaatcattgcagcattgtacttgacattttataaaagacccctacttgattaaagttttttgcctcccttattttccaccccactgacactcttaggattcagcaatgaaaactcttttaagcaccacggccatttctgcaatatattgccaaatttatgccatttgtgcataatgtactcgttgacaatgttacaaatgtcaatggcgtttcttgaagtagttgttatc

SEQ ID NO: 14716 - protein, 191 aa, Glycine max
EHPNRKEETFAMANNVVVVLKVAPVSLPPFPITNNALTFKSQRHTLHLNCFQTKNRTTSFPSSSSILRNKASCSVLACLPPESSTSSSTAKPSFPSPQTKLYVSGLSFRTTEESLRNAFKNFGQLVEVKLVMDRIANRPRGFAFLRYATEEESQKAIEGMHGKFLDGRVIFVEVAKPRSELAPRKQEDTRL

SEQ ID NO: 14717 - protein, 180 aa, Glycine max
MANNVVVVLKVAPVSLPPFPITNNALTFKSQRHTLHLNCFQTKNRTTSFPSSSSILRNKASCSVLACLPPESSTSSSTAKPSFPSPQTKLYVSGLSFRTTEESLRNAFKNFGQLVEVKLVMDRIANRPRGFAFLRYATEEESQKAIEGMHGKFLDGRVIFVEVAKPRSELAPRKQEDTRL

SEQ ID NO: 14718 - DNA, 520 bp, Glycine max
attacctagaacatcctaatcgaaaaataacaaaaccccactttgtagtgaggttgaggggaaaaacaatggggtctctaatggcctctgcaacattgactcttgtattggctatagtgtctctaagcttgccaacacaaatcttagctgataactacttgtactcatcacctccaccacccaagaagtacccaccggtgtctcctccataccactatccttcaccacctccaccaccaaaatattactaccactctccaccaccaccttctccttcaccaccaaagaagccatattattatcattctcctccaccaccttcaccttctccaccaaagaagccatactactaccattccccacccccaccatcacctcctccaccttacaagaaaccatactactaccactctccaccacctcctcctccaaagaagaaaccatactactatcactccccaccacctcctcacccttaccctcaccctcaccctcacccttacctatcgataccgtcgac

SEQ ID NO: 14719 - protein, 172 aa, Glycine max
YLEHPNRKITKPHFVVRLRGKTMGSLMASATLTLVLAIVSLSLPTQILADNYLYSSPPPPKKYPPVSPPYHYPSPPPPPKYYYHSPPPPSPSPPKKPYYYHSPPPPSPSPPKKPYYYHSPPPPSPPPPYKKPYYYHSPPPPPPKKKPYYYHSPPPPHPYPHPHPHPYLSIPS

SEQ ID NO: 14720 - protein, 150 aa, Glycine max
MGSLMASATLTLVLAIVSLSLPTQILADNYLYSSPPPPKKYPPVSPPYHYPSPPPPPKYYYHSPPPPSPSPPKKPYYYHSPPPPSPSPPKKPYYYHSPPPPSPPPPYKKPYYYHSPPPPPPKKKPYYYHSPPPPHPYPHPHPHPYLSIPS

SEQ ID NO: 14721 - protein, 146 aa, Glycine max
MASATLTLVLAIVSLSLPTQILADNYLYSSPPPPKKYPPVSPPYHYPSPPPPPKYYYHSPPPPSPSPPKKPYYYHSPPPPSPSPPKKPYYYHSPPPPSPPPPYKKPYYYHSPPPPPPKKKPYYYHSPPPPHPYPHPHPHPYLSIPS

SEQ ID NO: 14722 - DNA, 430 bp, Glycine max
atcagcagaagccgccgacgccgccgccgcccgagcgccctccgttctcctcgccgaagcgcccgccgctccaccgccgcagccgccatgggtaaggtgcacggatcgctggctcgcgccggaaaggtgcggggccagacgcccaaggtggcgaagcaggacaagaagaagcagccgcgcggccgcgcccacaagcgcatccagtacaaccgccgcttcgtcaccgccgtcgtcggcttcggcaagaagcgcggccccaactcctccgagaagtagatctaggtcgtctcgcgccagccctcctttttttttcgtgtttcccagtagctgtgatccgtttattcagtatgcatgctaagaagaagacctgatctagtatctgtaattgactgtgatgttggtaatggaaatctcactgcattgtccagtt

SEQ ID NO: 14723 - protein, 118 aa, Glycine max
SAEAADAAAARAPSVLLAEAPAAPPPQPPWVRCTDRWLAPERCGARRPRWRSRTRRSSRAAAPTSASSTTAASSPPSSASARSAAPTPPRSRSRSSRASPPFFFVFPSSCDPFIQYAC

SEQ ID NO: 14724 - protein, 91 aa, Glycine max
ISRSRRRRRRPSALRSPRRSARRSTAAAAMGKVHGSLARAGKVRGQTPKVAKQDKKKQPRGRAHKRIQYNRRFVTAVVGFGKKRGPNSSEK

SEQ ID NO: 14725 - protein, 62 aa, Glycine max
MGKVHGSLARAGKVRGQTPKVAKQDKKKQPRGRAHKRIQYNRRFVTAVVGFGKKRGPNSSEK

SEQ ID NO: 14726 - DNA, 1324 bp, Glycine max
ctaatcgaaaaaaccaaaatctggtaattaagatcttctcttcagaagatgtgtaacaccctcaagttcaacccctttaagaaccgtttgctaataatgttcatgctggttctttctctccccttcaatgttcaatcccaagccaaagatagtgaagaacagaacctggcagaactccctcaaacggttcatccaagcaagggaatagtaatagcagttctctccacaatgtttgccataacattactcttacttctctatgttaaattctgccgaactatccctcatgaactccttagtcaaaactcaaatctccaaaactttcagggcctaactcgatcaaggtctagagtttctgggattgacaaacaagtagttgaaacacttcctttcttcaagttctcttccctcaagggttccaaagaaggcctagaatgcaccgtttgtctctccaaattcgaggacacagagactctaagacttcttccaaagtgcaagcacgctttccacatgaattgcattgacaagtggtttgaaagccactctacgtgccctctttgtagacgcagggttgaagcaggggacattaaaaacctcaacttttcattaagctcgcggttcctccgagttccttcaaatctcacggaggatccaaaccttgaaatctttgttcacagagagccatctcatggagggtcagcatcgatccaaaggtcatatttacccttagaccagcggtgtcgaggatcatcgagaagaggcttttgggacgtgggcaagtgcaagaaacaagaactactgcttattgatgatagcagttctattggtgggacaagaaagtggaacaaaccggtgcacgtgatgaatcataagatagttatctctaatgtttttacgaggagcaggtggagtgatcttaatgcttcggacctgttgtcattgaacagtgagatgcttaatgatgtttgcagtgggagattctgtttgtgtcctttggaatccagcgacgacagcggaaattttcatgggatttcgagttctaatgaggaagaaaactcgtttacggcactgaatagtcctgcggagaagaggtgcatgtctgagaggtttacacaaaaggggaaggagaataggatcagagaatgtgtgacatctaatggggccagtgagaggctgtggaaggtttggttgccaattgcgcgaagaacggtccaatggtttgcgatacaagaaaggaattcggttgaattagaacacaaaaccttagcttcaaatgtctgatcaatgcgactaaattgttggtaacgtgtatgtttgtgcattc

SEQ ID NO: 14727 - protein, 410 aa, Glycine max
MCNTLKFNPFKNRLLIMFMLVLSLPFNVQSQAKDSEEQNLAELPQTVHPSKGIVIAVLSTMFAITLLLLLYVKFCRTIPHELLSQNSNLQNFQGLTRSRSRVSGIDKQVVETLPFFKFSSLKGSKEGLECTVCLSKFEDTETLRLLPKCKHAFHMNCIDKWFESHSTCPLCRRRVEAGDIKNLNFSLSSRFLRVPSNLTEDPNLEIFVHREPSHGGSASIQRSYLPLDQRCRGSSRRGFWDVGKCKKQELLLIDDSSSIGGTRKWNKPVHVMNHKIVISNVFTRSRWSDLNASDLLSLNSEMLNDVCSGRFCLCPLESSDDSGNFHGISSSNEEENSFTALNSPAEKRCMSERFTQKGKENRIRECVTSNGASERLWKVWLPIARRTVQWFAIQERNSVELEHKTLASNV

SEQ ID NO: 14728 - protein, 394 aa, Glycine max
MFMLVLSLPFNVQSQAKDSEEQNLAELPQTVHPSKGIVIAVLSTMFAITLLLLLYVKFCRTIPHELLSQNSNLQNFQGLTRSRSRVSGIDKQVVETLPFFKFSSLKGSKEGLECTVCLSKFEDTETLRLLPKCKHAFHMNCIDKWFESHSTCPLCRRRVEAGDIKNLNFSLSSRFLRVPSNLTEDPNLEIFVHREPSHGGSASIQRSYLPLDQRCRGSSRRGFWDVGKCKKQELLLIDDSSSIGGTRKWNKPVHVMNHKIVISNVFTRSRWSDLNASDLLSLNSEMLNDVCSGRFCLCPLESSDDSGNFHGISSSNEEENSFTALNSPAEKRCMSERFTQKGKENRIRECVTSNGASERLWKVWLPIARRTVQWFAIQERNSVELEHKTLASNV

SEQ ID NO: 14729 - protein, 392 aa, Glycine max
MLVLSLPFNVQSQAKDSEEQNLAELPQTVHPSKGIVIAVLSTMFAITLLLLLYVKFCRTIPHELLSQNSNLQNFQGLTRSRSRVSGIDKQVVETLPFFKFSSLKGSKEGLECTVCLSKFEDTETLRLLPKCKHAFHMNCIDKWFESHSTCPLCRRRVEAGDIKNLNFSLSSRFLRVPSNLTEDPNLEIFVHREPSHGGSASIQRSYLPLDQRCRGSSRRGFWDVGKCKKQELLLIDDSSSIGGTRKWNKPVHVMNHKIVISNVFTRSRWSDLNASDLLSLNSEMLNDVCSGRFCLCPLESSDDSGNFHGISSSNEEENSFTALNSPAEKRCMSERFTQKGKENRIRECVTSNGASERLWKVWLPIARRTVQWFAIQERNSVELEHKTLASNV

SEQ ID NO: 14730 - DNA, 669 bp, Glycine max
aattagaaactggagaatactttttaagtaacaaaaggaaatcagcaaagatatggcaagagaagcaagagaagcaggctgagaaaactgctgaaaacaaaaggaaaagagaagaggcctttatcccacccaaggagcctgcaaatctggtggataaatctgaggatgctaacaataatgtagctgacatggcaatttccttaaagaaaaaaacaaagaagtttgggaagcgtaaatctgaagaaaatatagatgccgagacatatattgtaggatcatcagaacaagcatcgggaaagaaacccaagaagcaaaggtcttaaacataatcttcattttggagacgaaagatgagcatgtgatgtggatgtgaatttaatcaagatcttctgtatccaatgctttggcagtaacagttttgacataaatgtatgaggcgtagttgttcgttccatttgtcatggaggatgagtgcgtggcattctgtatcttatttgtagttgccaatagacattaagtcagtaacgtgtacaacacttctagtcctctaagttttacatcttttcccttttaaaaacgttgtccgacacatgttgatactatagctatagttttgacattgagatttatttgttaaaaaaaaaaaaaagaaaaatacatgaaccccac

SEQ ID NO: 14731 - protein, 106 aa, Glycine max
LETGEYFLSNKRKSAKIWQEKQEKQAEKTAENKRKREEAFIPPKEPANLVDKSEDANNNVADMAISLKKKTKKFGKRKSEENIDAETYIVGSSEQASGKKPKKQRS

SEQ ID NO: 14732 - protein, 44 aa, Glycine max
MAISLKKKTKKFGKRKSEENIDAETYIVGSSEQASGKKPKKQRS

SEQ ID NO: 14733 - DNA, 1228 bp, Glycine max
attttaactcaaaacatagaattgttgaaggaacaaaacgtgtgtgtctgtcttacaaggtttagtagtgactatggagcagagcattggtggacaatctagcatacaatgcatatttctacgcaaggactgcttctcctcaaagctcgcgtctcttccaacttctccttccgagatgccctttggtcacaaccgttggtttcgcaggttgtcggtttttccacgtttgcaactatgtcaagggctgagaaagggtttctccaaaaacatggcttgcagtgtcagtgtggataattgtgatacggttcatccagcaacagatgcttatgctggagaggcagttgaagctttgaaagctgggaaagtcattgcagtaccaactgatacactctatggatttgcttgtgatgcttgctcaatggaagcagttaacagaatttatgagattaaaggccgtagacatacaagcccagtggctatttgtgtcggtgacgtatcagatatagcccgttttgctgtcactgaccatttacctcatggtctgcttgattccctcctacctgggcctgttacagttgttctaaaacgaggggattcaagtattcttgaacgatctttgaacccaggatttgatagtataggagttagagtgcctgattgcaatttcatcaggatcattgcccgtggttcaggaactgccctagcccttaccagtgcaaacctaagtggccagccaagtagtctttccatcaaagattttgagaacctctgggaacactgtgcttttgtttatgatggtggtttgattccatcaagtcgtgcaggttcaacaattgtggacctcaccacaccacacaaatacagaatacttagacctggaagtgcaaaggaagagacagttgccatcttggagaagcattctttcgttgaggcagagaccacgtaacataagttgtgattcatttgcagtgtcacgttctagctaggcctaatgtttcacttgcaaaaaaaaaaacgcgttataaatgtatggtcattatgcttcaactaagttattctattctatttccattaatagcatagcaatacattcatataaaacttctatctagagcacgtgctatggaattgttgagaaactagtaaaatccaattctatgaatcatttgatgtatggatagcattattgttataatgaaaaaccaatcattactgcagggaatatttg

SEQ ID NO: 14734 - protein, 290 aa, Glycine max
MEQSIGGQSSIQCIFLRKDCFSSKLASLPTSPSEMPFGHNRWFRRLSVFPRLQLCQGLRKGFSKNMACSVSVDNCDTVHPATDAYAGEAVEALKAGKVIAVPTDTLYGFACDACSMEAVNRIYEIKGRRHTSPVAICVGDVSDIARFAVTDHLPHGLLDSLLPGPVTVVLKRGDSSILERSLNPGFDSIGVRVPDCNFIRIIARGSGTALALTSANLSGQPSSLSIKDFENLWEHCAFVYDGGLIPSSRAGSTIVDLTTPHKYRILRPGSAKEETVAILEKHSFVEAETT

SEQ ID NO: 14735 - protein, 256 aa, Glycine max
MPFGHNRWFRRLSVFPRLQLCQGLRKGFSKNMACSVSVDNCDTVHPATDAYAGEAVEALKAGKVIAVPTDTLYGFACDACSMEAVNRIYEIKGRRHTSPVAICVGDVSDIARFAVTDHLPHGLLDSLLPGPVTVVLKRGDSSILERSLNPGFDSIGVRVPDCNFIRIIARGSGTALALTSANLSGQPSSLSIKDFENLWEHCAFVYDGGLIPSSRAGSTIVDLTTPHKYRILRPGSAKEETVAILEKHSFVEAETT

SEQ ID NO: 14736 - protein, 225 aa, Glycine max
MACSVSVDNCDTVHPATDAYAGEAVEALKAGKVIAVPTDTLYGFACDACSMEAVNRIYEIKGRRHTSPVAICVGDVSDIARFAVTDHLPHGLLDSLLPGPVTVVLKRGDSSILERSLNPGFDSIGVRVPDCNFIRIIARGSGTALALTSANLSGQPSSLSIKDFENLWEHCAFVYDGGLIPSSRAGSTIVDLTTPHKYRILRPGSAKEETVAILEKHSFVEAETT

SEQ ID NO: 14737 - DNA, 805 bp, Glycine max
agaaaatgtaaagatttcttaatggagaagtgagcggtgagaggaaacagaagagagaagagcaatcggtgagtgaatggaatggattcaggtcctccggcgaacgatttgtgttcagtgtgccatggcaactttcatattccatgccaagccaattgttctcactggttttgcggaaattgcataatgcttgtgtggcagcacggatcagtgggttgttcatgcaagtgcccactgtgtcgtcgagccatcagtctcttagtccccacagaagagtctctgaggcaacagcaggaccccgaagtttcccagattctgtcaaagattcatgcctataaccgtttcttcggtggccaacccaccactctctatcagagactgcgagatcttccctttctcttgcacaggctgctcagggaattcctccaccctcacagatcccttcctcttctcattcgcgctcgcgtctttgttgttatgatagcgagtgttatatacctcttcagccctattgacatcattcctgaagggatattaggagtagttggtttcttagatgatctcctaattgtgctcatctgcttcctacatgttgctgccctttatagatcagtactctacctccgtcatgggggttcctgaacatgttctacaattttacaggtaaaatgagatgatgatgcctagataggtgccggatatggatagtgggcattattctttcattttcaaaattgaactactttgttttctatgtacatagacaagttcaatttcaaatagtggaattagtaatggaaattac

SEQ ID NO: 14738 - protein, 186 aa, Glycine max
MDSGPPANDLCSVCHGNFHIPCQANCSHWFCGNCIMLVWQHGSVGCSCKCPLCRRAISLLVPTEESLRQQQDPEVSQILSKIHAYNRFFGGQPTTLYQRLRDLPFLLHRLLREFLHPHRSLPLLIRARVFVVMIASVIYLFSPIDIIPEGILGVVGFLDDLLIVLICFLHVAALYRSVLYLRHGGS

SEQ ID NO: 14739 - protein, 151 aa, Glycine max
MLVWQHGSVGCSCKCPLCRRAISLLVPTEESLRQQQDPEVSQILSKIHAYNRFFGGQPTTLYQRLRDLPFLLHRLLREFLHPHRSLPLLIRARVFVVMIASVIYLFSPIDIIPEGILGVVGFLDDLLIVLICFLHVAALYRSVLYLRHGGS

SEQ ID NO: 14740 - DNA, 943 bp, Glycine max
gaaaacttaaaccccaacattcaaatttttaacgttcacatgcaagcttttcagaactgcaaaccctaagcctacccatctttttcagactgaacgctgcaacccctactgcaagcctacccatctttttcagactgaacactgcaaccccacatgctagaacgtgttcgcgccaatggcggggctgcccagatgcctagtcagcatgtcccgccacgccagtttgaatggcggtatggaccctgtcccgctgctgtcaatggcggcatccatggttttgcaccctccgctgtttcacagcttttatggattttgtggtagtggattcagacaacggaaatgaagcagaacatagctgtctagaagagagtacaagtatatttgaaggagttgaagttcaagaaccatatgtgggcatggaatttgattctgaagaagatgctagggagttttatgttgattatgccagacggataggatttgttgtacgataatgcaacggcgacgttttggaattgatgggaggactcttgctcgccgacttggatgtaacaaacaaggattctcaccaaataacatgggaatattaggaccagaaaaaaagctaagacctagcgcccgagaaggttgcaaggcaacaattttggtgaagttggaaaaatcaggaaaatgggttgtcacaagatttgtaaaggatcacaaccatcctctaattgctacagctaatgggttcagcacagcggtgagttttctgcttgtttaaataattctgcacagttcactgtgcagtatgtataaacttatttcatacaagttgtaagtgataatagccatttcttttttactttttgggatctgctttgccggtgagtctgtgaattgtgcatataagacctgtggttttatctgctgataacattaatatattttgttaatatctgtc

SEQ ID NO: 14741 - protein, 89 aa, Glycine max
MQRRRFGIDGRTLARRLGCNKQGFSPNNMGILGPEKKLRPSAREGCKATILVKLEKSGKWVVTRFVKDHNHPLIATANGFSTAVSFLLV

SEQ ID NO: 14742 - protein, 88 aa, Glycine max
MAVWTLSRCCQWRHPWFCTLRCFTAFMDFVVVDSDNGNEAEHSCLEESTSIFEGVEVQEPYVGMEFDSEEDAREFYVDYARRIGFVVR

SEQ ID NO: 14743 - protein, 62 aa, Glycine max
MDFVVVDSDNGNEAEHSCLEESTSIFEGVEVQEPYVGMEFDSEEDAREFYVDYARRIGFVVR

SEQ ID NO: 14744 - DNA, 732 bp, Glycine max
acacaattaagctcaaatcaaaagtccctttgcatactatctatcacttatcagttatcacaaagcaaattcattaagtcttttgccatggcctccaacagctgcttcatcttggcttttttcattgctatttccttctcatgcatggattttggcctagcagctcgccatcttatgcaaacaagtactgcaccaaatttgcctttgccaaaaccaacattgccacctttgccttcacttccaacactgcctcagggcaatgttccacctttgcctacaatcccatctcttccaaccattccaactgttccacaggtcactcttccaccacttgctgccactttacttccaaacttccccacagtcccaaccactattccttccttccccttcttctccccaccaccttcagccaccactccctaaatgaagctactctgcttattggatacataggcactcgtatccttggagtttggttctggctttcagtgatcgttggctgcatttcgtgttgtttttatgttatacatgtgatggtgatatatattgtacgttgtccatttattgccggggaatatttatagtaatctttcattttcctttgttcttccatcttgtattgtatggataggattattgttttttcttcctcctccttacttcatgtacttggggatcatctattgttataggatatacgctatatataataaataatccatgttccct

SEQ ID NO: 14745 - protein, 148 aa, Glycine max
MHGFWPSSSPSYANKYCTKFAFAKTNIATFAFTSNTASGQCSTFAYNPISSNHSNCSTGHSSTTCCHFTSKLPHSPNHYSFLPLLLPTTFSHHSLNEATLLIGYIGTRILGVWFWLSVIVGCISCCFYVIHVMVIYIVRCPFIAGEYL

SEQ ID NO: 14746 - protein, 141 aa, Glycine max
TQLSSNQKSLCILSITYQLSQSKFIKSFAMASNSCFILAFFIAISFSCMDFGLAARHLMQTSTAPNLPLPKPTLPPLPSLPTLPQGNVPPLPTIPSLPTIPTVPQVTLPPLAATLLPNFPTVPTTIPSFPFFSPPPSATTP

SEQ ID NO: 14747 - protein, 112 aa, Glycine max
MASNSCFILAFFIAISFSCMDFGLAARHLMQTSTAPNLPLPKPTLPPLPSLPTLPQGNVPPLPTIPSLPTIPTVPQVTLPPLAATLLPNFPTVPTTIPSFPFFSPPPSATTP

SEQ ID NO: 14748 - DNA, 562 bp, Glycine max
atattttagtcacccgtctctccttccacacttcgcaattcaatctctttctcttcctcttcctctctctctctgtctgtctttgtcgtacctttccttcatcctcagggcgttttgtctcattttgttattcaagaatcaattaaaaaaaatgactcgcggtaaccagagggaacgagatcgtgaaagggctcaggcaagagctggtggaaagacaaagcagcctaagaatgatgggttgacccctgaacagcgaagggaaagggatgcaaaagcattgcaggagaaaacggcaaagaaagcagctcaggctgcaggagggaataatgcaggtggtggaggcaaaaaataggcaaaaatcattgacttgaggaatgtaaatggagtgtagacatgggaaaaattatattgcttattatttgtgatatgggtttttggtttagagtcatctgcttatgtcatttcagaataactagtgttctgtgaggagggcattgttgttggcttatgaacctttgatttctatataatttggaatgcaatttgtctctagcttgttgtg

SEQ ID NO: 14749 - protein, 116 aa, Glycine max
YFSHPSLLPHFAIQSLSLPLPLSLCLSLSYLSFILRAFCLILLFKNQLKKMTRGNQRERDRERAQARAGGKTKQPKNDGLTPEQRRERDAKALQEKTAKKAAQAAGGNNAGGGGKK

SEQ ID NO: 14750 - protein, 66 aa, Glycine max
MTRGNQRERDRERAQARAGGKTKQPKNDGLTPEQRRERDAKALQEKTAKKAAQAAGGNNAGGGGKK

SEQ ID NO: 14751 - DNA, 499 bp, Glycine max
cactggaatctccattcaacattgcaacatttcaccctttggaaacttgagttctgtccagacataccttggaagaccctggaagaactactcaaccacagtgtacatgagatcaaggatggatggctttgtgagccccaaaggctggttgccgtggaccgggaactcagcaccagacaccattttctatgctgaatttcagaatgttggaccaggtgcttcaacaaagaatagggtgaagtggaagggtttgagaaccattactagtaaacaagccagcaagtttactattaaggcttttctacaaggagataaatggatttctgcatcaggtgctccatttaagtctgatctatgacaacagccataatatgctaatgcaatttgcaaagctccctcagtgaaaattgtttgtactttttttattttttctttctttcccatgatcttcttgatttgtattattaatttgacattgtataatgattcttttgatttg

SEQ ID NO: 14752 - protein, 118 aa, Glycine max
TGISIQHCNISPFGNLSSVQTYLGRPWKNYSTTVYMRSRMDGFVSPKGWLPWTGNSAPDTIFYAEFQNVGPGASTKNRVKWKGLRTITSKQASKFTIKAFLQGDKWISASGAPFKSDL

SEQ ID NO: 14753 - protein, 83 aa, Glycine max
MRSRMDGFVSPKGWLPWTGNSAPDTIFYAEFQNVGPGASTKNRVKWKGLRTITSKQASKFTIKAFLQGDKWISASGAPFKSDL

SEQ ID NO: 14754 - protein, 79 aa, Glycine max
MDGFVSPKGWLPWTGNSAPDTIFYAEFQNVGPGASTKNRVKWKGLRTITSKQASKFTIKAFLQGDKWISASGAPFKSDL

SEQ ID NO: 14755 - DNA, 512 bp, Glycine max
aatttcctcattcattcacaaatcttagttactttatcaggtatcattcatcacaacaacaagatgagttcaggaattagagcatggagtgtggcaactagtgttggagttgtggaggccttgaaagaccaaggcatatgcaggtggaatcatgcattaagatcagctcaacaccatctcaaaaaccatgttggctcattctctcaggctaacaagctttcttcttctgctatgatctccacaacactaaaacatgagaaggcaaagcaatcagaggagtctttcagaactgtcatgtacttaagctgctggggccccaactagatatcataagtccaataagaaaatattctttctcttttaatttctagaaattatcaagcttagtcccaaaggaagatgagggttgagatttctggggtcacattgtatagtatttgaagtttgttttgctcatgtgacaatcagtttgtaaattttgataaatgatagtgtttagcattgccaaattt

SEQ ID NO: 14756 - protein, 107 aa, Glycine max
NFLIHSQILVTLSGIIHHNNKMSSGIRAWSVATSVGVVEALKDQGICRWNHALRSAQHHLKNHVGSFSQANKLSSSAMISTTLKHEKAKQSEESFRTVMYLSCWGPN

SEQ ID NO: 14757 - protein, 86 aa, Glycine max
MSSGIRAWSVATSVGVVEALKDQGICRWNHALRSAQHHLKNHVGSFSQANKLSSSAMISTTLKHEKAKQSEESFRTVMYLSCWGPN

SEQ ID NO: 14758 - DNA, 643 bp, Glycine max
ctagaacatcctaatcgaaaaatttattataatacaatggatgagattcacatgcctcctcctgtggtaacagttgtcctaaaagttcgaatgcattgtgaagcatgtgctcaagttatacagaagcgaatccgcaagattaaaggagtagaatcagtggaaacagacttggcaaatgatcaagttatagtaaaaggtgtggtcgaccctgccaagcttgttgatcatgtatataagaggaccaaaaagcaagcctctattgtgaaggacggagaaaagaaggaagaagaaaagaaagaagaggagaaaaaggaagagaaagaagaagagaaaagaggtgaagaagaaaacaagggaggagaagataacaaaactgaaatcaaacgaagtgaatactggccatccaaaaactacatcgactatgcttatgaccccgagattttcagcgacgagaacccaaatgcctgctctgttatgtaaaccagcaagtaattccgtatttcagttggaacagtaattagctgaagtagttttcttttcaatgtttttctaagaatatgtaccagtgtgagtatgttaagggtatattggttcctttacatagcgtccctcaaagttagatgtcttatttcttgtgcttttg

SEQ ID NO: 14759 - protein, 159 aa, Glycine max
LEHPNRKIYYNTMDEIHMPPPVVTVVLKVRMHCEACAQVIQKRIRKIKGVESVETDLANDQVIVKGVVDPAKLVDHVYKRTKKQASIVKDGEKKEEEKKEEEKKEEKEEEKRGEEENKGGEDNKTEIKRSEYWPSKNYIDYAYDPEIFSDENPNACSVM

SEQ ID NO: 14760 - protein, 147 aa, Glycine max
MDEIHMPPPVVTVVLKVRMHCEACAQVIQKRIRKIKGVESVETDLANDQVIVKGVVDPAKLVDHVYKRTKKQASIVKDGEKKEEEKKEEEKKEEKEEEKRGEEENKGGEDNKTEIKRSEYWPSKNYIDYAYDPEIFSDENPNACSVM

SEQ ID NO: 14761 - protein, 142 aa, Glycine max
MPPPVVTVVLKVRMHCEACAQVIQKRIRKIKGVESVETDLANDQVIVKGVVDPAKLVDHVYKRTKKQASIVKDGEKKEEEKKEEEKKEEKEEEKRGEEENKGGEDNKTEIKRSEYWPSKNYIDYAYDPEIFSDENPNACSVM

SEQ ID NO: 14762 - DNA, 813 bp, Glycine max
ctctctctcccgaacccaaagacggcgaaaccctagctcctagtctcccccatggcctcgcacctcgactttcgctacctcgacgagggcctcggcggcgagcgcggcaagcgcaagcgccgggaggaggaggcagatgccgccgattccatggacctcgacgccgacgcgccccggccgtcgaagctccgcgcagtggcctcccagtccgacccgtccaagccggcggccttcgggtcgcccacctacgacggcgtcatcgccgggcgcgtctcggggcggacatggaaggagccacgcacgcgccgctcctccgcgctgatggtgtcccggaagcccgtccctctggagcagcgcgcgagggacaagtccctgaagaaggcgtaccaggcgcgcgtggcggagctcaaggacgagatccggcagaacaaggtcgccaagcgcaagcagaaggaggagcgggagaagcgcaagaaggagaacgtgctgcgcacgggctcgaagctgcagaaggtcaccaaccccaagacgatccagaagatcgccaagtccaagaaccgaggtcagctcagggtcgtctccgacgacatcttcggcggcaagaagtccgaggccgcccgccgcatgcaggtgcccggcctggagaactgagtcgcagcttatctttgcaatatgtaacgccaattttgtagtaatgcttttcaattgctgtgagctctgtcatggccgatcaaaaatcaaacgcatactgttactttggtatggtgtatgaaactatgtgctactgtttggttactctgtcagcggattttt

SEQ ID NO: 14763 - protein, 229 aa, Glycine max
LSPEPKDGETLAPSLPHGLAPRLSLPRRGPRRRARQAQAPGGGGRCRRFHGPRRRRAPAVEAPRSGLPVRPVQAGGLRVAHLRRRHRRARLGADMEGATHAPLLRADGVPEARPSGAAREGQVPEEGVPGARGGAQGRDPAEQGRQAQAEGGAGEAQEGERAAHGLEAAEGHQPQDDPEDRQVQEPRSAQGRLRRHLRRQEVRGRPPHAGARPGELSRSLSLQYVTPIL

SEQ ID NO: 14764 - protein, 199 aa, Glycine max
MASHLDFRYLDEGLGGERGKRKRREEEADAADSMDLDADAPRPSKLRAVASQSDPSKPAAFGSPTYDGVIAGRVSGRTWKEPRTRRSSALMVSRKPVPLEQRARDKSLKKAYQARVAELKDEIRQNKVAKRKQKEEREKRKKENVLRTGSKLQKVTNPKTIQKIAKSKNRGQLRVVSDDIFGGKKSEAARRMQVPGLEN

SEQ ID NO: 14765 - protein, 166 aa, Glycine max
MDLDADAPRPSKLRAVASQSDPSKPAAFGSPTYDGVIAGRVSGRTWKEPRTRRSSALMVSRKPVPLEQRARDKSLKKAYQARVAELKDEIRQNKVAKRKQKEEREKRKKENVLRTGSKLQKVTNPKTIQKIAKSKNRGQLRVVSDDIFGGKKSEAARRMQVPGLEN

SEQ ID NO: 14766 - DNA, 650 bp, Glycine max
accctcctctctttgcctttctccgcctcccccgtctcactcctacctctctctccctctctccttaggattcatggcttccatggctgctgcctctacttccctgcaggctcgtcctcgccaaatggtaactgcggttaaatgttttagccagggaagcagaagcaatctttcttttacgcttcgccctcttcctacccgcctgagcgtctcttgcgcggcaaaacctgagacagtggacaaagtgtgtgaagtggtcaaaaagcaactctcacttaaagagggcgaccaagttacggctgccaccaaatttgctgaacttggtgctgattctcttgatacggtggagattgtgatgggcctcgaggaagcgttcgatatagaaatggaggaggacaaagcacaggcgattgagacagtcgaggaagcagctgagctcattgaggagattttgaaagcaaaggcttaattaagtccacatcatttattacaaaaccaaacgatggaaaccccactaaacccaaacccactgtcttgttattgtttggttagctagagaccactttatgtttgttgagatttatgttcgtttgggcaaaaatattacaaggcttgtatttgactttttcattttaaaacttttttagctc

SEQ ID NO: 14767 - protein, 155 aa, Glycine max
PSSLCLSPPPPSHSYLSLPLSLGFMASMAAASTSLQARPRQMVTAVKCFSQGSRSNLSFTLRPLPTRLSVSCAAKPETVDKVCEVVKKQLSLKEGDQVTAATKFAELGADSLDTVEIVMGLEEAFDIEMEEDKAQAIETVEEAAELIEEILKAKA

SEQ ID NO: 14768 - protein, 131 aa, Glycine max
MASMAAASTSLQARPRQMVTAVKCFSQGSRSNLSFTLRPLPTRLSVSCAAKPETVDKVCEVVKKQLSLKEGDQVTAATKFAELGADSLDTVEIVMGLEEAFDIEMEEDKAQAIETVEEAAELIEEILKAKA

SEQ ID NO: 14769 - protein, 128 aa, Glycine max
MAAASTSLQARPRQMVTAVKCFSQGSRSNLSFTLRPLPTRLSVSCAAKPETVDKVCEVVKKQLSLKEGDQVTAATKFAELGADSLDTVEIVMGLEEAFDIEMEEDKAQAIETVEEAAELIEEILKAKA

SEQ ID NO: 14770 - DNA, 926 bp, Glycine max
aacatcctaatcgaaaacttttctttcttgaggccaaagccgcagacagcacgcacgcacagcccaccgtcgccgctccaaatctcgcccgctcgcccgccgctctccgccgccatggacgccgcctcctcgctcatgggcgggccctcctccgccgacgcccccaccgacggcgagcaccggatgggcaccaccatcgtcggggtatgctacgccggcggggtcgtcctcgccgccgactccaggaccagcaccggaatgtatgtggcaaaccgtgcttcggacaagattagtcagctcactgataatgtctatgtctgccgttctggatctgccgctgatacacaagttatttcagattatgtgcgctattttctccaccagcacacaattcagcttgggcaaccagctaccgtgaaagtcgcatccaacttggttaggttgctggcctatcagaacaagagcatgttgcaagctggtatgatagttggtggatgggataagtacgaaggaggccaaatttactcggtccctcttggtggaacgattctgaggcaaccattcgcaattggaggatctggttccagctatctgtatggattgatggatcatgaatggaaagaggggatgacccaggaagaagctgagaaatttgtggtgaaggtggtttcccttgccattgcacgtgatggtgctagtggaggggttgttcgcaccgttactataaatgaggagggcgtgaagaggagcttccatcctggcgacaagctgccactgtggcatgaggagatggagccccagaactcgctcctcgacattctcgcggccgtgagctctgatgccatggtccagtgagccgtgcttcctactggttcttcctactgtgtctgatgatgacttgttctgaatttgagcttaatgttgtt

SEQ ID NO: 14771 - protein, 284 aa, Glycine max
NILIENFSFLRPKPQTARTHSPPSPLQISPARPPLSAAMDAASSLMGGPSSADAPTDGEHRMGTTIVGVCYAGGVVLAADSRTSTGMYVANRASDKISQLTDNVYVCRSGSAADTQVISDYVRYFLHQHTIQLGQPATVKVASNLVRLLAYQNKSMLQAGMIVGGWDKYEGGQIYSVPLGGTILRQPFAIGGSGSSYLYGLMDHEWKEGMTQEEAEKFVVKVVSLAIARDGASGGVVRTVTINEEGVKRSFHPGDKLPLWHEEMEPQNSLLDILAAVSSDAMVQ

SEQ ID NO: 14772 - protein, 246 aa, Glycine max
MDAASSLMGGPSSADAPTDGEHRMGTTIVGVCYAGGVVLAADSRTSTGMYVANRASDKISQLTDNVYVCRSGSAADTQVISDYVRYFLHQHTIQLGQPATVKVASNLVRLLAYQNKSMLQAGMIVGGWDKYEGGQIYSVPLGGTILRQPFAIGGSGSSYLYGLMDHEWKEGMTQEEAEKFVVKVVSLAIARDGASGGVVRTVTINEEGVKRSFHPGDKLPLWHEEMEPQNSLLDILAAVSSDAMVQ

SEQ ID NO: 14773 - protein, 239 aa, Glycine max
MGGPSSADAPTDGEHRMGTTIVGVCYAGGVVLAADSRTSTGMYVANRASDKISQLTDNVYVCRSGSAADTQVISDYVRYFLHQHTIQLGQPATVKVASNLVRLLAYQNKSMLQAGMIVGGWDKYEGGQIYSVPLGGTILRQPFAIGGSGSSYLYGLMDHEWKEGMTQEEAEKFVVKVVSLAIARDGASGGVVRTVTINEEGVKRSFHPGDKLPLWHEEMEPQNSLLDILAAVSSDAMVQ

SEQ ID NO: 14774 - DNA, 476 bp, Glycine max
gtaacaaatcgaagagtgggtctctctctcgcggcggcgcaggcgtctctctccttctcctccggcggcggcaaggcattttggcatctgagcccaacagctagcagatggcaggcggcagagttgcacatgcgaccctcaaggggccgagcgtggtgaaggagatcttcattggactcacccttgggctggttgctggtggtatgtggaagatgcatcactggaacgagcagaggaagacgcgatccttctacgacatgcttgagaaggggcagatcagcgtcgttgtcgaggagtagttctgaagtgctgaaccagaagttctacatctcgaagtcttttgtcattttggttttgccagtaatttctgaaactctctggagagcatgacagagtgattgctgtggagattgtcatgaaaataagcacaccaccatttgagaacatcgaaccattttgaatttgctttttgtcgt

SEQ ID NO: 14775 - protein, 63 aa, Glycine max
MAGGRVAHATLKGPSVVKEIFIGLTLGLVAGGMWKMHHWNEQRKTRSFYDMLEKGQISVVVEE

SEQ ID NO: 14776 - protein, 52 aa, Glycine max
VTNRRVGLSLAAAQASLSFSSGGGKAFWHLSPTASRWQAAELHMRPSRGRAW

SEQ ID NO: 14777 - protein, 33 aa, Glycine max
NKSKSGSLSRGGAGVSLLLLRRRQGILASEPNS

SEQ ID NO: 14778 - DNA, 1119 bp, Glycine max
aaaaatgccactgctcctccgccgacccctctccccctccctcgtctcctccttcttcctccgccgccgctcaatgtcttccaaatccgatccaatcagcccctccaacacccgaatcggctggatcggaaccggcgtcatgggccggtcaatgtgcggacacctaatcaaagccggatactccgtcaccgtcttcaaccgcacaatctccaaagcccagcctctcctcgccatgggcgctaacctcgccgcctcgccgaactccctcgcttcccaatccgacgtcgtcttctccatcgtcggctacccctccgacgtccgccgcgtcctcctcgatccaaactccggcgccttatccggcctctctcccggcggcgtcctcgtcgacatgaccacctccgagccttctctagccgaggagatctccaaatcagcttcctccgcgggctgcttctcagtcgacgctcccgtctccggcggagacctcggcgctaaaaacgggaagctctcgatcttcgccgggggagacgaagcaacggtgaagcgtctggatccattgtttcgtttaatggggaaagtcaacttcatgggagcgagcgggaaggggcagttcgctaagctggcgaatcaggtcacgatcgcttcgacgatggtggggctcgtcgaagggatcgtgtacgcgcacaaggccgggctcgatgtgaggaagtttctagaagcgatttcgaccggagccgcgggttcgaagtcgatagatttgtatggggagaggattctcaagagggatttcgatccggggttctatgtggatcatttcgttaaggatttggggatttgtttgaacgagtgtcagaggatggggttggctttgcctgggttggctcttgcgcagcagctttacttgtctctcaaggcacatggtgaaggtggtcttggaactcaagctctcatcttggctcttgagcgacttaataatgtctctgttcaaccaagtgtctgattatgtttttatgttgatttggagaaaaaagatttgaacttttgttgtgtatcgttgcttaaacatgaacttttgctggaatgtgtattgtttagatatatagaagtgtattgttggtt

SEQ ID NO: 14779 - protein, 332 aa, Glycine max
KMPLLLRRPLSPSLVSSFFLRRRSMSSKSDPISPSNTRIGWIGTGVMGRSMCGHLIKAGYSVTVFNRTISKAQPLLAMGANLAASPNSLASQSDVVFSIVGYPSDVRRVLLDPNSGALSGLSPGGVLVDMTTSEPSLAEEISKSASSAGCFSVDAPVSGGDLGAKNGKLSIFAGGDEATVKRLDPLFRLMGKVNFMGASGKGQFAKLANQVTIASTMVGLVEGIVYAHKAGLDVRKFLEAISTGAAGSKSIDLYGERILKRDFDPGFYVDHFVKDLGICLNECQRMGLALPGLALAQQLYLSLKAHGEGGLGTQALILALERLNNVSVQPSV

SEQ ID NO: 14780 - protein, 331 aa, Glycine max
MPLLLRRPLSPSLVSSFFLRRRSMSSKSDPISPSNTRIGWIGTGVMGRSMCGHLIKAGYSVTVFNRTISKAQPLLAMGANLAASPNSLASQSDVVFSIVGYPSDVRRVLLDPNSGALSGLSPGGVLVDMTTSEPSLAEEISKSASSAGCFSVDAPVSGGDLGAKNGKLSIFAGGDEATVKRLDPLFRLMGKVNFMGASGKGQFAKLANQVTIASTMVGLVEGIVYAHKAGLDVRKFLEAISTGAAGSKSIDLYGERILKRDFDPGFYVDHFVKDLGICLNECQRMGLALPGLALAQQLYLSLKAHGEGGLGTQALILALERLNNVSVQPSV

SEQ ID NO: 14781 - protein, 308 aa, Glycine max
MSSKSDPISPSNTRIGWIGTGVMGRSMCGHLIKAGYSVTVFNRTISKAQPLLAMGANLAASPNSLASQSDVVFSIVGYPSDVRRVLLDPNSGALSGLSPGGVLVDMTTSEPSLAEEISKSASSAGCFSVDAPVSGGDLGAKNGKLSIFAGGDEATVKRLDPLFRLMGKVNFMGASGKGQFAKLANQVTIASTMVGLVEGIVYAHKAGLDVRKFLEAISTGAAGSKSIDLYGERILKRDFDPGFYVDHFVKDLGICLNECQRMGLALPGLALAQQLYLSLKAHGEGGLGTQALILALERLNNVSVQPSV

SEQ ID NO: 14782 - DNA, 552 bp, Glycine max
acaatcatcccaccagccgccaccaccaccgctcctcatccgtttccatctcagtcagctccaagcagtcaaccatgtccggccgcggcaagggcgggaagggcctcggcaagggcggcgcgaagcgtcatcggaaggtgctgcgggacaacatccagggcatcaccaagccggcgatccgtcgtctggctcgccgtggcggcgtgaagcgcatctcggggctcatctacgaggagacccgaggcgtgctcaagatcttcctcgagaacgtcatccgcgacgccgtcacctacaccgagcacgcccgccgcaagaccgtcaccgccatggacgtcgtctacgcgctcaagcgacagggacgcaccctctacggcttcggcggctgacctgcgcctgctgctgctccatcgagtcgactctgctggatgctgctcctgttctcgtgctacggtttcgtttctgagtgcgtgagttggtgttctgtcggtctgtgtagtctgtgcctttgtggaaggcgatgggtctgaatgtaatggaattgttggttcttgc

SEQ ID NO: 14783 - protein, 153 aa, Glycine max
QSSHQPPPPPLLIRFHLSQLQAVNHVRPRQGREGPRQGRREASSEGAAGQHPGHHQAGDPSSGSPWRREAHLGAHLRGDPRRAQDLPRERHPRRRHLHRARPPQDRHRHGRRLRAQATGTHPLRLRRLTCACCCSIESTLLDAAPVLVLRFRF

SEQ ID NO: 14784 - protein, 127 aa, Glycine max
NHPTSRHHHRSSSVSISVSSKQSTMSGRGKGGKGLGKGGAKRHRKVLRDNIQGITKPAIRRLARRGGVKRISGLIYEETRGVLKIFLENVIRDAVTYTEHARRKTVTAMDVVYALKRQGRTLYGFGG

SEQ ID NO: 14785 - protein, 103 aa, Glycine max; identical to SEQ ID NO: 71

SEQ ID NO: 14786 - DNA, 1087 bp, Glycine max
accccccatccccatctcgctctcgcggccgagagatcgaatcggagaagaagaaggagcggagaggcctctgctgccctagctccgccgccccccaccagccatggcgctcgccgctcgcctcgtatcccgctcccgccagttatattctgtccaagctgctttggccaatggaggtctcactcaagtccgctcatttgccaaggaggcagctcctgtcagcggagatgacctattgaagggcatctttttttgaggtgaagaaaaagtttgagaccgcacttggggtccttaagaaggagaagatcacgattgacccagatgaccaaacagcagttgctaactatgcccaagtcatgaggactgtaagagaaaaggcagatcttctttctgattctcagagaattaaatatactattgagactttcacgaagggcatccctgatgcaaggacgtacttggatacccttcagcagctcaggaaaaagagtggtctcatagatgatatgggtattgaggatatgatgatggaagctctcgagaaagttgagaaggacattaagaaacctcttctgaggagtgacaagaagaacatgggtctcctcttggcagagtttgacaagattaacaaaaagcttggcattcggaaggaggatcttcccaagattgaggaaaatcttgaaatggaacttgccaaagctgagctgacggaacttaagaaggaagttgttgaagcaatggagggccaactaaagagggaggagtttaaagatgaggcgatgcctgacgtcaggaagttggacattagaaacttcctctaggtccctgattgatgataaccctcggggtgaccgatctgtgatttttcttttcaagtgacggccggtgctgtaagccacaccgaatggatgttattgttgctttttgtaataaaactgcaccgaaaatatgacagtcaaccgttgagttgggttgcttggttaccttccggcgttgagagttttgtttcttaggctggcaacgtgaacatcaagcgttgctgaatatgtgcctgcggctgctgttgtatgtagtagccacacattat

SEQ ID NO: 14787 - protein, 154 aa, Glycine max
MRTVREKADLLSDSQRIKYTIETFTKGIPDARTYLDTLQQLRKKSGLIDDMGIEDMMMEALEKVEKDIKKPLLRSDKKNMGLLLAEFDKINKKLGIRKEDLPKIEENLEMELAKAELTELKKEVVEAMEGQLKREEFKDEAMPDVRKLDIRNFL

SEQ ID NO: 14788 - protein, 104 aa, Glycine max
MGIEDMMMEALEKVEKDIKKPLLRSDKKNMGLLLAEFDKINKKLGIRKEDLPKIEENLEMELAKAELTELKKEVVEAMEGQLKREEFKDEAMPDVRKLDIRNFL

SEQ ID NO: 14789 - protein, 99 aa, Glycine max
MMMEALEKVEKDIKKPLLRSDKKNMGLLLAEFDKINKKLGIRKEDLPKIEENLEMELAKAELTELKKEVVEAMEGQLKREEFKDEAMPDVRKLDIRNFL

SEQ ID NO: 14790 - DNA, 968 bp, Glycine max
aatatacacggagaagagatcgtcatcatccgccaaaccagatcggctcggctgcttcctcttcttcaacttcgcagaatcgctggtcttctcgtcctctagttaagtccctcgacagcaatgggaggaggcaacgacggtcatgggtacccacccggtggccaggggggataccctccgcaagggtacccgccgcagcagggaggttaccctccacagcaaggatacccgcctgcacctggagcttacccacctgcacctggggcataccctcctgcacctggggcataccctcctgcgcccggagcgggtggcagtgacggggagaaggggctcctctccaacatcatgcacggtgttgccggtgctcatggtggtggccatggctacccatctggtggccacgggtaccccccgcagcagcatggataccctcagcaaggctaccctcctcagcatggctacccaccgcaacagcatggctaccctccacagcagcatggctatccccctgctggctaccctggctcatctggtcacagtggtagccatggaggaggaggcatgggcatgggcggcatgctagctggaggcgcagcagctgctgccgccgcttacggagcacacaagatttctcacggcggccacggtggaggtggacacatgatgggaggcatgatgggcggccatggaggctatggcggcgggtacggccaccacggcggcaagttcaagcacgggaagcacggccacggcaagttcaagcacggcaagcatgggaagcacggcatgttcggcggcggcggaaagttcaagaagtggaagtaatgcgctagctagtagcttcaccatggctgatgaatcaaaaaaaatacctaaactcttcgtgtaggcttccagaacttggtttggtcagggaaagcctttgagatgtatctaagcagggtgtggtgtggttgctgcccggc

SEQ ID NO: 14791 - protein, 235 aa, Glycine max
MGGGNDGHGYPPGGQGGYPPQGYPPQQGGYPPQQGYPPAPGAYPPAPGAYPPAPGAYPPAPGAGGSDGEKGLLSNIMHGVAGAHGGGHGYPSGGHGYPPQQHGYPQQGYPPQHGYPPQQHGYPPQQHGYPPAGYPGSSGHSGSHGGGGMGMGGMLAGGAAAAAAAYGAHKISHGGHGGGGHMMGGMMGGHGGYGGGYGHHGGKFKHGKHGHGKFKHGKHGKHGMFGGGGKFKKWK

SEQ ID NO: 14792 - protein, 159 aa, Glycine max
MHGVAGAHGGGHGYPSGGHGYPPQQHGYPQQGYPPQHGYPPQQHGYPPQQHGYPPAGYPGSSGHSGSHGGGGMGMGGMLAGGAAAAAAAYGAHKISHGGHGGGGHMMGGMMGGHGGYGGGYGHHGGKFKHGKHGHGKFKHGKHGKHGMFGGGGKFKKWK

SEQ ID NO: 14793 - protein, 147 aa, Glycine max
MGTHPVARGDTLRKGTRRSREVTLHSKDTRLHLELTHLHLGHTLLHLGHTLLRPERVAVTGRRGSSPTSCTVLPVLMVVAMATHLVATGTPRSSMDTLSKATLLSMATHRNSMATLHSSMAIPLLATLAHLVTVVAMEEEAWAWAAC

SEQ ID NO: 14794 - DNA, 788 bp, Glycine max
accgattgcgactcgagaacctttcgttcatctccaaaatatcttcctcctctgttctgcgcctccagccctccactatcccttgcgtggttttagtctgtgaactcgagagaccgagcgaggaaagttgccgtgtgagacctgaaagttagggagatatggctgggattggtcctatcaggcaggactgggagccgatagtggcgcggaagaaggcgcagaacgccgccgacaagaaggacgaaaaggccgtcaacgctgcccgccgctccggcgccgagatcgacaccaccaagaagtacaacgctggaacgaacaaggctgcatctagcggaacttccctcaacaccaagcggctcgacgacgacacggagaacctttcccatgagcgtgtttcaagtgacctgaagaaaaaccttatgcaagcaagactggataagaagatgacccaggcacaacttgctcagatgatcaatgagaagccacaggtgatccaggagtacgagtcgggcaaggcgattccgaacaatcagataattggaaagctcgagagggcacttggagctaagctgcgtagcaagaagtaatgccttgaaggccaagccctgtctatttgccttacactgcatttgctaggtcctaaaagctcttacaggctgtttctgttggttgatactgaataactatgccacagaacgactttatgtatcattatattcccgtgttctaaaatgtgtcgtcatatgacccagtgtaagagctgcattgagcatgcagattgacatggc

SEQ ID NO: 14795 - protein, 142 aa, Glycine max
MAGIGPIRQDWEPIVARKKAQNAADKKDEKAVNAARRSGAEIDTTKKYNAGTNKAASSGTSLNTKRLDDDTENLSHERVSSDLKKNLMQARLDKKMTQAQLAQMINEKPQVIQEYESGKAIPNNQIIGKLERALGAKLRSKK

SEQ ID NO: 14796 - DNA, 1091 bp, Glycine max
gtaaagtatagtcccgcggtgctgctctgttcattactcgggcgatcggcgatcggtagtgcacttgccgtagctgtatattgatagcgggctgattgaggtagctgcctgccatgtctggaaaatcgcttgcagtggcgccgcggtctgacccggacaacggggcggagcggcagccgtcgtcggcgatgctcgggggcgtcatgggctcgctccgcgtcatcgagctccagctcgtcgccttcatcatggtcttctcgatgtcaggcctcgtcccgctcatcgacctcgccttcccggtcgtcaccactctctacctcctcgccctctcccgcctcgccttcccttcgctccacagcaaggtcgacgacgaggccgccgccgtccactccgccgcgtcccaggagatcttccgcggaagcaagctgtttcaggtgtacgtggtgatgggcaccacggtggggctgttcctgccgctggcgcacgtcctgggtgggttcgcgcgcggcgacgatgccgccgtgcgctccgcgacgccgcacctgttcctgctctcctgccagatcctcacggagaacatcgtcggctcgctcggcgtcttctcgccgccgctgagggcgctggtgccgcttctctacaccgtgcgccgcgtcttcgtcatcgtcgactgggtctatgacgtgtggaccaacaagctcatcacccgcaccgcccccgttcaggataaggcctgggtgtggttcggcaggtacctcgcggtggcgaacctggtctacttctccatcaacctgttcgtcttcctgatccccaagttcctcccccgcgcgttcgagaagtacttccacacgcgcaacgaggtgtacgccaagacggcggaggacaagcgggcaagggatctatcctcgctcgatgatgacagtgcgccaaaatcggaggtctgcaagaaggccgactgagatcgatgatcgtgttcgttgcgcggcgtttgagctgcgctcgtagtgtgctctctagcttcaactttgcttacctgtatgtggaccggtgtttgtacatttgggtcttcgcttctcaattctgaaattccgtgc

SEQ ID NO: 14797 - protein, 280 aa, Glycine max
MSGKSLAVAPRSDPDNGAERQPSSAMLGGVMGSLRVIELQLVAFIMVFSMSGLVPLIDLAFPVVTTLYLLALSRLAFPSLHSKVDDEAAAVHSAASQEIFRGSKLFQVYVVMGTTVGLFLPLAHVLGGFARGDDAAVRSATPHLFLLSCQILTENIVGSLGVFSPPLRALVPLLYTVRRVFVIVDWVYDVWTNKLITRTAPVQDKAWVWFGRYLAVANLVYFSINLFVFLIPKFLPRAFEKYFHTRNEVYAKTAEDKRARDLSSLDDDSAPKSEVCKKAD

SEQ ID NO: 14798 - protein, 255 aa, Glycine max
MLGGVMGSLRVIELQLVAFIMVFSMSGLVPLIDLAFPVVTTLYLLALSRLAFPSLHSKVDDEAAAVHSAASQEIFRGSKLFQVYVVMGTTVGLFLPLAHVLGGFARGDDAAVRSATPHLFLLSCQILTENIVGSLGVFSPPLRALVPLLYTVRRVFVIVDWVYDVWTNKLITRTAPVQDKAWVWFGRYLAVANLVYFSINLFVFLIPKFLPRAFEKYFHTRNEVYAKTAEDKRARDLSSLDDDSAPKSEVCKKAD

SEQ ID NO: 14799 - protein, 250 aa, Glycine max
MGSLRVIELQLVAFIMVFSMSGLVPLIDLAFPVVTTLYLLALSRLAFPSLHSKVDDEAAAVHSAASQEIFRGSKLFQVYVVMGTTVGLFLPLAHVLGGFARGDDAAVRSATPHLFLLSCQILTENIVGSLGVFSPPLRALVPLLYTVRRVFVIVDWVYDVWTNKLITRTAPVQDKAWVWFGRYLAVANLVYFSINLFVFLIPKFLPRAFEKYFHTRNEVYAKTAEDKRARDLSSLDDDSAPKSEVCKKAD

SEQ ID NO: 14800 - DNA, 981 bp, Glycine max
gaaaaatagtagcagcacctcattttctccgagaactccaaaacccttgcggccgctccccttcttcggctgctaaccggattcgcctcacaggctcgggatccgggcgttccgccgcccaccggagccggagatgaagaagatcttcggcgccaagaagagcagggacccgccgcccaccatccaggacgccaccaaccaaataaacaagcggggcgagagcgtggacgagaagatcaagaagctggacgaggagctggcgcggtacaaggagcagatccgcaaggcccgccccggcccctcgcaggaggccatcaaggcccgcgccatcaggctcctcaagcacaagcgcatgtacgaggagcagcgcaacatgctctacaaccagacctacaacctcgaccaggtcggcttcgccgccgacggcctcaaggacgcgcagcagaccatgggcgcgatgaaggccgccaacaaggagctcaaggggatgatgaagaccgtcaagatcgaggacatcgataatatgcaagatgaaatgacggatctgatggacgtgagcaacgagatacaagaatctcttggtagaagctacaacattcccgatgatgttgacgaggaagatctaatgggagagctggatgctctggaagctgatatggagtttgagtcagctgcagtcccatcgtaccttcagccagatgaggaatctgatcttaacttgcccgctgcaccgacttatcctgcagcagttcccgtaagcaggcaccaggaggacgagcttggactgccaccggtacctcgagcgtcgctccgtagttagaacctggaagtatttcccgaccgtgttccaagtgttactacctcattgtcaatgatgcgagagaagtctttgtgtttgcacttgaacaatccttgtaagctatttcttgatggtactgcctgttatggttaagctgtgcaatgtagctagtttccggctct

SEQ ID NO: 14801 - protein, 228 aa, Glycine max
MKKIFGAKKSRDPPPTIQDATNQINKRGESVDEKIKKLDEELARYKEQIRKARPGPSQEAIKARAIRLLKHKRMYEEQRNMLYNQTYNLDQVGFAADGLKDAQQTMGAMKAANKELKGMMKTVKIEDIDNMQDEMTDLMDVSNEIQESLGRSYNIPDDVDEEDLMGELDALEADMEFESAAVPSYLQPDEESDLNLPAAPTYPAAVPVSRHQEDELGLPPVPRASLRS

SEQ ID NO: 14802 - protein, 155 aa, Glycine max
MYEEQRNMLYNQTYNLDQVGFAADGLKDAQQTMGAMKAANKELKGMMKTVKIEDIDNMQDEMTDLMDVSNEIQESLGRSYNIPDDVDEEDLMGELDALEADMEFESAAVPSYLQPDEESDLNLPAAPTYPAAVPVSRHQEDELGLPPVPRASLRS

SEQ ID NO: 14803 - protein, 148 aa, Glycine max
MLYNQTYNLDQVGFAADGLKDAQQTMGAMKAANKELKGMMKTVKIEDIDNMQDEMTDLMDVSNEIQESLGRSYNIPDDVDEEDLMGELDALEADMEFESAAVPSYLQPDEESDLNLPAAPTYPAAVPVSRHQEDELGLPPVPRASLRS

SEQ ID NO: 14804 - DNA, 555 bp, Glycine max
tgatcagaaatcgtacagatacacacttggctgaggaaggtcggaaaagaaaatggagttgttcttctacacggtgttcggtggtttggccgcggttgtggcagttatggagctgagcaagaacaacaaggatcgaatcaacacctcttccgcattcaattccttcaagaacaactacctcctcgtctattccctcatgatggctggagattggctacaaggtccatatgtctactacctttacagtacatatggatacgggaaaggggacataggacaactcttcattgctggttttggatcttccatgctctttggaacaattgtcggatctctagctgacaaacaaggccggaagagggcttgtgtgacttactgcataacctacattttgagttgcatcaccaagcattctcctcaatacaaagtcctgatgttgggccgcattttgggaggtattgccacttcacttctgttttcagcatttgaatcatggcttgttgccgagcacttcaagaggggctttgatcaacaatggctgtcattaacattctc

SEQ ID NO: 14805 - protein, 167 aa, Glycine max
MELFFYTVFGGLAAVVAVMELSKNNKDRINTSSAFNSFKNNYLLVYSLMMAGDWLQGPYVYYLYSTYGYGKGDIGQLFIAGFGSSMLFGTIVGSLADKQGRKRACVTYCITYILSCITKHSPQYKVLMLGRILGGIATSLLFSAFESWLVAEHFKRGFDQQWLSLTF

SEQ ID NO: 14806 - protein, 149 aa, Glycine max
MELSKNNKDRINTSSAFNSFKNNYLLVYSLMMAGDWLQGPYVYYLYSTYGYGKGDIGQLFIAGFGSSMLFGTIVGSLADKQGRKRACVTYCITYILSCITKHSPQYKVLMLGRILGGIATSLLFSAFESWLVAEHFKRGFDQQWLSLTF

SEQ ID NO: 14807 - protein, 119 aa, Glycine max
MMAGDWLQGPYVYYLYSTYGYGKGDIGQLFIAGFGSSMLFGTIVGSLADKQGRKRACVTYCITYILSCITKHSPQYKVLMLGRILGGIATSLLFSAFESWLVAEHFKRGFDQQWLSLTF

SEQ ID NO: 14808 - DNA, 686 bp, Glycine max
ttttttttttgttacaaataactgatttcatcattcatgcaagagcaaattggacagtactacgagggaaactgatacaggagcatagggttctagattcagaagcaacatttaactgaaactaagactcgaaccaaactttgaattcccagttaatccagctatagaatgccactttgttatgtttccaacgctttagtgggggcgcagcttctccttgggcctgatgtcattgctgtggccgcacttcttcttgcggcagttggcagccctgaggggcaggcgtgcatagcacttgcggcacacaagcctgtgctgcatgtacttgagcgcaagcacgcgcaggttaggctccatcctgctggggtagaccccgcccttgccaccgccgacgaggcgcagcgcgaggtgaagcgtggactccttgtggatgctgtagtcggccagggtgcggccatcgtcgagctgcttccccgcgaagatgaggcgctgctggtccggctggataccttccttgtcgtggatcttggccttgacgctgtcgacggccgcgcaactctcgacctcgagcgtcatggtctccccggtcggcgtcttcacgaagatctgcatcatctcgccgccggttgctcgctccccctctgctctcctctcgccgggcggtggtggtagtggtggtggaagtg

SEQ ID NO: 14809 - protein, 167 aa, Glycine max
MPLCYVSNALVGAQLLLGPDVIAVAALLLAAVGSPEGQACIALAAHKPVLHVLERKHAQVRLHPAGVDPALATADEAQREVKRGLLVDAVVGQGAAIVELLPREDEALLVRLDTFLVVDLGLDAVDGRATLDLERHGLPGRRLHEDLHHLAAGCSLPLCSPLAGRWW

SEQ ID NO: 14810 - DNA, 424 bp, Glycine max
atatacaaacaaacttttcttataggtaacaatggcagaagctaggcacaggaagtggcatgtgtttcagaccaaggatgaattgtcggtagcaatggctaagtacactgcccatctctcggccaagttctgtaaggagaagggccttttcacagttgttctctccggcggtggcctcatcgactggctctgcaagttattggaacctccttacaaagattcaatcgaatggtcaaagtggcacgtcttttgggtcgatgagagggtttgtgcatatgaagatccagacagcaactataaactcgccatggatggttttctctccaaggttgggattccgaataagaacatctatgcaatcgacaaacactatgccgctgatggtaacgcggagcactgcgcggcgctctacgaggagtgtttk

SEQ ID NO: 14811 - protein, 130 aa, Glycine max
MAEARHRKWHVFQTKDELSVAMAKYTAHLSAKFCKEKGLFTVVLSGGGLIDWLCKLLEPPYKDSIEWSKWHVFWVDERVCAYEDPDSNYKLAMDGFLSKVGIPNKNIYAIDKHYAADGNAEHCAALYEEC

SEQ ID NO: 14812 - protein, 109 aa, Glycine max
MAKYTAHLSAKFCKEKGLFTVVLSGGGLIDWLCKLLEPPYKDSIEWSKWHVFWVDERVCAYEDPDSNYKLAMDGFLSKVGIPNKNIYAIDKHYAADGNAEHCAALYEEC

SEQ ID NO: 14813 - DNA, 918 bp, Glycine max
acaataatcgatcatggcagctgctccttctgcctctgccgtttccgtcaggcagaggaatgccgcggcagcatcgctactgctccaggatcagcagcaagaaaagcatgaagccgtggatccggtgccgccgccgccgccgccgccacgatcgacgctgtaccaggcgctgacgtcgacggcgagcctggccaacctgctccccacgggcacggtgctggctttccagctgctcgcgccgaccttcaccaaccacggcgcctgcgacgccaccacggcgctgctcacgcggatcctcctcgccgtcctcgcgctctcctgcctcctcgcctccttcaccgactccctcaagggccccgacggccgcgtctactacggcgtcgccaccctcaggggcctctggctgctcgactacccgcccggcgcgcccacgccgccggacacgtccaggtacaggctggcgccaatcgacgccgtgcacgcggcgctgtcggtggccgtattcggggtggtggcggccagagacaagaacgttgtgcggtgcttctacggcccgtcgccggcgagagagacggagcaggtgctggacatcgtgccgctcggcgtcggcgtgctctgcagcttgctcttcgtcgcgttccccaccaggcggcacggcatcggttaccctgtcaccaacggcgccgctggcagcagcacctgaataaattaaacttacccgcgtattacaaagctcaagaattactctggttacagtagtactcctgctaacttaagagcattgtatcattctatcatttcgatttcttgcttatttgcctgtgggatgtaaacgatccgactatagattctacacacaaaagatgagtaaaatgcatctgggtactattagtgtcgatgcggccctaatttttttcg

SEQ ID NO: 14814 - protein, 229 aa, Glycine max
MAAAPSASAVSVRQRNAAAASLLLQDQQQEKHEAVDPVPPPPPPPRSTLYQALTSTASLANLLPTGTVLAFQLLAPTFTNHGACDATTALLTRILLAVLALSCLLASFTDSLKGPDGRVYYGVATLRGLWLLDYPPGAPTPPDTSRYRLAPIDAVHAALSVAVFGVVAARDKNVVRCFYGPSPARETEQVLDIVPLGVGVLCSLLFVAFPTRRHGIGYPVTNGAAGSST

SEQ ID NO: 14815 - DNA, 1111 bp, Glycine max
acccccccccagctccgcctcccttctgctctacccgcttctaacaaacgcgcgcacactccctctcgctctcgcggcgcaggtcggaggctaaaaccctagacacaggcgactatgacggcgccggcggacaaggggaagaaggccaagaccgacaccgacgtcggcgaggagaacgagcagatcgacggtgccctcgtcctctccatcgagaggctccaggagatccaggacgagctcgagaaggttaatgaagaagcaagtgataaggttttggaggttgagcagaagtacagtgagattcgcagacctgtctatcttcggaggtgtgacatcatcaaaacaattccagacttttggctgacagcgtttctaagtcatcctcttctcagtgagcttttgactgaagaggatcaaaagatgttcaagtacttggaatctgttgatgttgatgattctaaagatgtcaagtcaggctactccatcactcttaacttctctgagaatccgtactttgaagacagaaagcttaccaagtcatatgcctttgctgatgatggaacaaccacaataaatgccacttccattaagtggaaggagggaatggaaattaatgggaatgccattaagaagaaaggaagcaagcgcccattggttgaagaaagtttcttcacctggttcactgatacagagcacaagagccttgctgatggggtgcaagatgaggtggcagagatcatcaaagaagatttgtggccgaacccattgaaatatttcaacaatgaggttgaagagtttgaaggagatgacgaggatgaagagggatctgatggggaggatgctgaggaggacgacgacgaggagaactgaggccttggttggctttggtgggtcctgatgaatcgttgtctgcagatgctatgggtgtctgaagggtgaagtcatgtgaccgtttcgagactgtttcgttttgtgtttgacttagctggaacttagccttaggagctgttgaatgcgttatcgagtacgtactgtcgtattttcgacttaaaggagacctcgatatatcataatctggcgatatctatgacaacaatttaacttgctggcg

SEQ ID NO: 14816 - protein, 251 aa, Glycine max
MTAPADKGKKAKTDTDVGEENEQIDGALVLSIERLQEIQDELEKVNEEASDKVLEVEQKYSEIRRPVYLRRCDIIKTIPDFWLTAFLSHPLLSELLTEEDQKMFKYLESVDVDDSKDVKSGYSITLNFSENPYFEDRKLTKSYAFADDGTTTINATSIKWKEGMEINGNAIKKKGSKRPLVEESFFTWFTDTEHKSLADGVQDEVAEIIKEDLWPNPLKYFNNEVEEFEGDDEDEEGSDGEDAEEDDDEEN

SEQ ID NO: 14817 - protein, 149 aa, Glycine max
MFKYLESVDVDDSKDVKSGYSITLNFSENPYFEDRKLTKSYAFADDGTTTINATSIKWKEGMEINGNAIKKKGSKRPLVEESFFTWFTDTEHKSLADGVQDEVAEIIKEDLWPNPLKYFNNEVEEFEGDDEDEEGSDGEDAEEDDDEEN

SEQ ID NO: 14818 - DNA, 1178 bp, Glycine max
atcgaaaactcttatctctattcatctttgtttttttgttagcaaagcaaaactattgtttctcgggaaatttaagataattcaattggataacctgaacgaaaatctcaattttgtgctgttgtcggagtgactcagaaaaaaatgcaatgcacgattctaatagcattaattatgatacattttctgttgttgaaggtagcgtaggttaattttcattttcagttttttgtgcagctccaatggcaacctctcaaatcacttcatcattgaggaacttgcctgcatttgaaaggtttcaaccttcaacgcttcgatttccttctgctgggcacgtcagaattgggacactgacacaaacctcgtttccctctttcgttgtcaaagccgccactgttgtcgcccccaagcacaccactgttaagcctctgggtgatagagtactggtgaaaattaaggatgcagaggagaagactgcaggtgggattttactgccagcaactgctcaaggcaagcctcaaggaggtgaagtggttgctgttggggatgggaagtcggttgggaagagcaaagtggatgttagtgtgaagacaggtttgcaggttgtgtattcaaagtatgcagggactgaggtggagttcaatggttcaaaacatcttattctgaaggacgatgacatcgttggtatccttgaaacagatgaggtcaaggatcttaaacccttaaatgatagagtcttgataaaggttgcagaagcggatgaaaaaactgctggagggttgttgctcacagaggcaaccaaggaaaaaccatctattggaacagtgatagcagttggtccggggcctctggatgaggaaggtaatagaaagccattgtctgtcgtgcccgggaatacagttctgtactccaagtatgcagggaatgacttcaagggcaaagatggttctgactacattgccttgagggcctcagatgtcatggctatcctgtcctagtcagtatttagtagcaaatattttttttgttccctaacccaaaattttgagttaatgccgagggaaatggatatttatgttgtgaagacagcttgaaatatagttgattgcaactctgttccttagacaattttgcgttaaattgaaacgtttgaaatatattattttctacggcctttc

SEQ ID NO: 14819 - protein, 251 aa, Glycine max
MATSQITSSLRNLPAFERFQPSTLRFPSAGHVRIGTLTQTSFPSFVVKAATVVAPKHTTVKPLGDRVLVKIKDAEEKTAGGILLPATAQGKPQGGEVVAVGDGKSVGKSKVDVSVKTGLQVVYSKYAGTEVEFNGSKHLILKDDDIVGILETDEVKDLKPLNDRVLIKVAEADEKTAGGLLLTEATKEKPSIGTVIAVGPGPLDEEGNRKPLSVVPGNTVLYSKYAGNDFKGKDGSDYIALRASDVMAILS

SEQ ID NO: 14820 - DNA, 501 bp, Glycine max
ccctagccgccagatacccgtgcagccctcctccccgccgctttcttctcccgctcgccgcctccgcctccgccaacctcctgggctgatccccgcgccttgaaccaagatgtatctccagtactacatcaacgagaagggcgtcaaggtgtacaccacaaagaaggaatcccctctcggtgtgccgacgcagtctgcccacccagctcgtttctccccggatgacaagtatgcccgtcagcgttacctgttgaagaagaggtttggattgctgccaacccaacagccagcacaaaagtactgaagcactggatgggtcctcctaagagatctgttttctttgctgaatgccgtttggagtgtagattagctatgtgaagagagaatcatcactgctacttatcttgcttgttatcgcagtatctctaaatgtaatgttatgctaccgatgggtcgtactcttttgtaccatgtgctctctgtgtgactaaatcatttggg

SEQ ID NO: 14821 - protein, 64 aa, Glycine max
MYLQYYINEKGVKVYTTKKESPLGVPTQSAHPARFSPDDKYARQRYLLKKRFGLLPTQQPAQKY

SEQ ID NO: 14822 - protein, 33 aa, Glycine max
PSRQIPVQPSSPPLSSPARRLRLRQPPGLIPAP

SEQ ID NO: 14823 - DNA, 568 bp, Glycine max
cctaatcgaaaaattccatttcattctcctcctcaataaaaagcgaatctagggttttcataatttcgaaggaagatggcgatgcagaaggctaaagagatcgtttccggcaacgccgtcgttgttttcagcaagtcgttttgcccatactgtgtgagagtgaaggagcttttgcaacaattgggagctaaattcatcgccgttgagctcgacaaagagagtgatggtagccaagttcaatcagctctggcagaatggacaggacaacgcaccgttcccaatgtgttcataggtgaaaaacacatcggtggctgcgattctgtaacaaacctgcacagagacggcaagttggttcctatgttgactgaagctggagctattgctgcaacagctggaactacttctgcttaaagcgcacaatcaatttgtgatttgcttctttcaggaataaaatatgtttgagcaataaatctgaactttatctgaaatgttttaaagttaattgttgttatgtcgaagtcggtattgaacttctgatacatttatgttataattatcagcatttgct

SEQ ID NO: 14824 - protein, 111 aa, Glycine max
MAMQKAKEIVSGNAVVVFSKSFCPYCVRVKELLQQLGAKFIAVELDKESDGSQVQSALAEWTGQRTVPNVFIGEKHIGGCDSVTNLHRDGKLVPMLTEAGAIAATAGTTSA

SEQ ID NO: 14825 - protein, 109 aa, Glycine max
MQKAKEIVSGNAVVVFSKSFCPYCVRVKELLQQLGAKFIAVELDKESDGSQVQSALAEWTGQRTVPNVFIGEKHIGGCDSVTNLHRDGKLVPMLTEAGAIAATAGTTSA

SEQ ID NO: 14826 - DNA, 772 bp, Glycine max
attccatcgatcttctctacgcttttatatacataactcattatccatccacccttattccctcatctctcaacgttctattttcttctcgaatatcacagaacccgattagatctatagatcttgtttctccagattaggacatcatgtcggaagaacacaggcttcaggagccacggttatgcgctaacgattgcggtttcttcggaaacaccgccacgcagaatctctgctctaaatgttttagagatctaaagcacgaacaggagaactcctccaccgccaaaaacgcccttaagcagactctcgccgcctgtgttgcgtcctcctccgtatcctcaccgcctcctcctcctcctccagccgatctgacttcagatctgaaagaagtcaacacagagaatccggggaaacgggcagcgagcgagcccgaggaggaggaggagcagaagccgccgcaagatcctaaacgctgtttgacttgccggcggcgcgtggggatcacaggcttcaggtgcaggtgtgggttcgtgttttgtggaacccataggtacgccgagcagcacgagtgcactttcgatttcaagcgggtcgggaaggagaagatcgctaaggcgaatccgattgtgaaagcggagaagctcgagaagatctgaaagaattgtgtttggtgtaaatttatcatcatcaattttaagctttaatttgatttcttctcggtttggttataaaatgatgtgttctcttattagttttcgataattgtttttac

SEQ ID NO: 14827 - protein, 169 aa, Glycine max
MSEEHRLQEPRLCANDCGFFGNTATQNLCSKCFRDLKHEQENSSTAKNALKQTLAACVASSSVSSPPPPPPPADLTSDLKEVNTENPGKRAASEPEEEEEQKPPQDPKRCLTCRRRVGITGFRCRCGFVFCGTHRYAEQHECTFDFKRVGKEKIAKANPIVKAEKLEKI

SEQ ID NO: 14828 - DNA, 1194 bp, Glycine max
acgattccatccacacatcaacacatggctccgccgaacagatcgttttcgccagagctatattgcctacagcgatcctcaccctcgcatcacttgaataactgcacgtggtgggcaggcgaggccgactcgtgatctgatcgggcgacaagagaatatcgctgtgcttgttctctttcgcggcgcatgtggccttgcccgcgagcgagcgcgacggacggacggacggacggacgccggcgatcacagtcacatggtcacatggaggatgacggaatggatgtgaccacatgctgttatcctattattaatggggtgttgccacgggattgccacaactctcgcggggagcaggggatgtgcgtcgtcggggccatcaacaactacacggagcagctctacacctacggggactcccccaagagttcgtcgtacaacctgacggagagcctcatgttcctggcgcacttcgtgggggacgtgcaccagccgctgcacgtcggctacgaggacgacgagggcggcaacaccatcacggtgcactggtaccacaggaaggccaacctccaccacgtgtgggacgtgagcatcatcgacacggtgatgaaggacttctacaacaagagcctcgacaccatggtggccgccctgcagacgaacctcaccgagggatggtctgacgatgtcggtcactgggagaattgcgccaacaagaaggcgacctgcgcaaacgactacgcgatcgagagcataagtctgtcgtgcaactacgcctacaaagatgtggtgcagaacatcaccctaggagatgattattacttcacccgctacccggttgtggagaagagattggcgcaggccggcgtcagactggcgctgatactcaaccgtatatttgacaagaaagaagctgatactatgccgttatacgtgcagtagaatagctatacttgtacaaaaggtgtatatatacgggctggacaaaattcggtattgtagctgccactgccacgccgtttgatcaatttccacttcaataggtttaccattatgtaatataaagagtcacgcaaccttggcacggctttcagaaattcattagttgtaaagttgcaatacaaaccctcttattagtctatttgcttgaacaataaacaaatccacaagtgcagtttaaagcgatgttttagtttc

SEQ ID NO: 14829 - protein, 250 aa, Glycine max
MWPCPRASATDGRTDGRRRSQSHGHMEDDGMDVTTCCYPIINGVLPRDCHNSRGEQGMCVVGAINNYTEQLYTYGDSPKSSSYNLTESLMFLAHFVGDVHQPLHVGYEDDEGGNTITVHWYHRKANLHHVWDVSIIDTVMKDFYNKSLDTMVAALQTNLTEGWSDDVGHWENCANKKATCANDYAIESISLSCNYAYKDVVQNITLGDDYYFTRYPVVEKRLAQAGVRLALILNRIFDKKEADTMPLYVQ

SEQ ID NO: 14830 - protein, 225 aa, Glycine max
MEDDGMDVTTCCYPIINGVLPRDCHNSRGEQGMCVVGAINNYTEQLYTYGDSPKSSSYNLTESLMFLAHFVGDVHQPLHVGYEDDEGGNTITVHWYHRKANLHHVWDVSIIDTVMKDFYNKSLDTMVAALQTNLTEGWSDDVGHWENCANKKATCANDYAIESISLSCNYAYKDVVQNITLGDDYYFTRYPVVEKRLAQAGVRLALILNRIFDKKEADTMPLYVQ

SEQ ID NO: 14831 - protein, 220 aa, Glycine max
MDVTTCCYPIINGVLPRDCHNSRGEQGMCVVGAINNYTEQLYTYGDSPKSSSYNLTESLMFLAHFVGDVHQPLHVGYEDDEGGNTITVHWYHRKANLHHVWDVSIIDTVMKDFYNKSLDTMVAALQTNLTEGWSDDVGHWENCANKKATCANDYAIESISLSCNYAYKDVVQNITLGDDYYFTRYPVVEKRLAQAGVRLALILNRIFDKKEADTMPLYVQ

SEQ ID NO: 14832 - DNA, 544 bp, Glycine max
ataaccacacagaacaaattccaaattcaattaaatatataaatacaaaataattgatctcctagtcggggtttctcttataaaatatttatttatttaatttatttggaaaattaaaataacaaataattaataataatatggggatgtctaaaagtatcaaagttattttctctcttgctcttatagtgttcttggctcttgcagcaaccaagatagatgcaagatacatagattatcattcccttagaggtggagatcacggtttcggttgtagtaaattacaccctatcttctgcaagaaggaagaagccaatccttacaccagaggttgcgagcctggccaacattgccgtgacgatctaggcgaaaaaatcgtaaaccctaaaccctaaactactcttggttaatttttacaaatcacatccccatattaatatcagatgattaatttcattttgttatttatttatactctgttattggttaggtaactgtttgttaccctattatttatgatcaataaaataattatatttatgtt

SEQ ID NO: 14833 - protein, 84 aa, Glycine max
MGMSKSIKVIFSLALIVFLALAATKIDARYIDYHSLRGGDHGFGCSKLHPIFCKKEEANPYTRGCEPGQHCRDDLGEKIVNPKP

SEQ ID NO: 14834 - protein, 82 aa, Glycine max
MSKSIKVIFSLALIVFLALAATKIDARYIDYHSLRGGDHGFGCSKLHPIFCKKEEANPYTRGCEPGQHCRDDLGEKIVNPKP

SEQ ID NO: 14835 - DNA, 886 bp, Glycine max
aataagcttatctacgttgttcgtctcttaattaatccaattttttaatcccgaaaactctttcaagaactggatactctggcggattctgagaccaagaaccgagacgtggttctgaagctgtatgacgccctgagatctcgcgacgtcgactccgttcaccggaccctaaccccggacctcgactactggttccacggccctccgccgcaccagtttttgatgcgcacgctcaccggcgtctctccgccgtttgaattctcgcctctctccgtcgtctccttcggatccaccgtcattgccgagggctgcgacgccgccagctccgtctcctggatccacgcctggaccgtgtcgcatggggtaatcactcaggtgagggagtactcgaacacctcgctcacggttacgcggatcggtagcgtcgtctccgggcgctctgcggagatcagggcgtcgcattgcccctccgtgtgggaaagcaaattctcgggtcgggctggaaaatccgtcccgggtctggttcttgcgatttgaggatttggtaaaggttattgctgcagccacgtcagattaataactaaataaaggctgttgcttacgtgtcggtgtgtggttggtttgttgttttatgggttgaaaggatttgtgcggttgagacgcggtgtgggctaacgcttaaaggtcgcgttttggtcgtcgcttttcttctcttgttttttttttttttttttattattagctttaagttcgtgcctttgtttggggttttagtgcgtacaagcatggggaaacccatattgacttgcgccgttgtgtctgatgtaacgtttggctatgttataataaagtgcttttgggatcttattatattaaaacgttgttt

SEQ ID NO: 14836 - protein, 104 aa, Glycine max
MRTLTGVSPPFEFSPLSVVSFGSTVIAEGCDAASSVSWIHAWTVSHGVITQVREYSNTSLTVTRIGSVVSGRSAEIRASHCPSVWESKFSGRAGKSVPGLVLAI

SEQ ID NO: 14837 - DNA, 734 bp, Glycine max
gtgattagatccaggtagccggctttgccatttccgcctctataaatgccgccctacgctctcgtgcacagcaaaacccaacggaactataactacagtcactctgctccctcactcaacctgtcccccacacaccacacagagagacgcagagaagcagcaggagggtgatggctatggctcagggaagaggcagtgcggcgcagggcttcgccctcggcttgctagtgctgtgcctcctcctcggcgccgacaccgccggcgccgccacctacaacgtcgactggtcgttcgcctccggcagctggcccatcggcaagagcttccgcgcaggggacgtcctcgttttcagctacaacccggccgtgcacaacgtggtggcggtggacgccggcggctacaacagctgccggggctccggcgcgacgcacacctacacctcggggagcgaccacgtcccgctcgtccccgggacgaactacttcatctgcagcctcagcagccactgcgggctcgggatgaagatggccgtcactgcaaactgaagctagctgcagcttctggtttcaagaaaagcgagctgcgactgcgatgccatctgtgcgcatgtgaaaacatcaataaagtgctgtggaactcagtgactcctagtatgcgatagtgtacgccccgtgtgttgtactgtatccctgagttgttaacatgacacagaagccagcagtgtgcaccaattg

SEQ ID NO: 14838 - protein, 124 aa, Glycine max
MAMAQGRGSAAQGFALGLLVLCLLLGADTAGAATYNVDWSFASGSWPIGKSFRAGDVLVFSYNPAVHNVVAVDAGGYNSCRGSGATHTYTSGSDHVPLVPGTNYFICSLSSHCGLGMKMAVTAN

SEQ ID NO: 14839 - protein, 122 aa, Glycine max
MAQGRGSAAQGFALGLLVLCLLLGADTAGAATYNVDWSFASGSWPIGKSFRAGDVLVFSYNPAVHNVVAVDAGGYNSCRGSGATHTYTSGSDHVPLVPGTNYFICSLSSHCGLGMKMAVTAN

SEQ ID NO: 14840 - DNA, 684 bp, Glycine max
tcatccaactctctgaaaccaaccagccatgagcaagtgggtggtgcatcgcctccctcctgctgtgcctcgcggtggcggtggcgggcaggggcatgcctgctcgcgacgactgcgatactgttgctcttgctgccggtcgcaacggccaagacggttctggtttcggtgaaaccaagaccgcctttgctgggagcaatggtggtgacggcgggctcttcggcggtgccgtcaacggtggccctctcggcgggggcatcgccggctttggcccgcacggcggctttggtgccggtgccgggccgttcggtggtttcggcggtggcttcggtgctggtggtggaggtggaggagggggaggcggcggcggcggcgtgataccttgaggtggccgggacacgagcgcgtatgtaaacgtggtagtagctgtacgtgtgtccctgatttcatttacacgcatctgttagtgtaataagaagtcctttgattagctgcgtgagcatgcatgtatgagtcatacgtgtcatcatgtcattagcctcatcgtgttcgtatctgattagttaatgtataaatgaaagcattggtgtgtgagatggtttcttggtctgagcatggatgcatgaagttagccgtgttgcggtgtttgtatcatattgatgcttatttattaagctccacttt

SEQ ID NO: 14841 - protein, 125 aa, Glycine max
SSNSLKPTSHEQVGGASPPSCCASRWRWRAGACLLATTAILLLLLPVATAKTVLVSVKPRPPLLGAMVVTAGSSAVPSTVALSAGASPALARTAALVPVPGRSVVSAVASVLVVEVEEGEAAAAA

SEQ ID NO: 14842 - protein, 96 aa, Glycine max
MPARDDCDTVALAAGRNGQDGSGFGETKTAFAGSNGGDGGLFGGAVNGGPLGGGIAGFGPHGGFGAGAGPFGGFGGGFGAGGGGGGGGGGGGGVIP

SEQ ID NO: 14843 - DNA, 884 bp, Glycine max
aataaaaagaattattactagagcttgagagaaaccttaaaatggctgaggtacaacaaaactcaggtaacagcaatggtgaaaacatcatccctcccgaagatgttgctaagttcctgcccaaaactgttgatgaaggtggatgggaaaaatgttgggaagacggagtaacaccatgggaccaaggaagagccacacctctcgttgtccatcttgttgaatcttcttctcttcctcttggtcgtggtcttgtccccggctgtggcggaggtcacgatgtggttgcgatggcaagccccgaacgttacgttgttggtttggatatttctgaaagtgccctcgagaaagctgctgagacttacggctcctcaccgaaggccaagtactttacgttcgtgaaggaagacttcttcacatggcgtcctaacgaattattcgatctcattttcgattatgtggtcttctgtgccattgagccggagacgagacctgcatgggccaaagccatgtatgaactcttaaaacccgatggcgaactcattactctcatgtatccgattaccgatcatgatggtggaccgccatacaaagtagctgtctctacctacgaagatgttttggttccggtaggattcaaggcagtgtccattgaagagaatccatactccattgccactcgtaagggtaaagagaagcttgctaggtggaagaagatcaactgatccaagaaagatctctcttactctttactaagagtcttatatgcatattctaccaatgtattaagtatgaaatgaatattctacaaatttgccgattattaataataaacttgatgtttgtgataatataattcaattaagagagactaattttatttaagt

SEQ ID NO: 14844 - protein, 226 aa, Glycine max
MAEVQQNSGNSNGENIIPPEDVAKFLPKTVDEGGWEKCWEDGVTPWDQGRATPLVVHLVESSSLPLGRGLVPGCGGGHDVVAMASPERYVVGLDISESALEKAAETYGSSPKAKYFTFVKEDFFTWRPNELFDLIFDYVVFCAIEPETRPAWAKAMYELLKPDGELITLMYPITDHDGGPPYKVAVSTYEDVLVPVGFKAVSIEENPYSIATRKGKEKLARWKKIN

SEQ ID NO: 14845 - protein, 144 aa, Glycine max
MASPERYVVGLDISESALEKAAETYGSSPKAKYFTFVKEDFFTWRPNELFDLIFDYVVFCAIEPETRPAWAKAMYELLKPDGELITLMYPITDHDGGPPYKVAVSTYEDVLVPVGFKAVSIEENPYSIATRKGKEKLARWKKIN

SEQ ID NO: 14846 - DNA, 467 bp, Glycine max
aaatcagacaaaacacgatggcatcagcagcgccattctccggcaccggcagtctccttcgcctgacaaaaccaggaacgccacagccccagttcttctcccctccgccgtctcgctcccacttccaccttcgaacccgccccgccaaggcaaagagcccaatcgccggagccatcgcctcctcttccatggcggcagcccagccccagacgtgcgacggccaacaacaacgggcggaggaggccatgaagctgctgttcgtcgagatgggcgtcgggtacgaccagcacggacaggacatcacctccgccgcggtgcgcgcctgcaaggatgccatctcctccaactccatccccgccttccgccgcgggtcgataccaggggtgaacagtgaacagatgaaactgcagatcaagctgggtgtcccgaggccggtgcagcatctgttggactttgagagaatcaag

SEQ ID NO: 14847 - protein, 155 aa, Glycine max
IRQNTMASAAPFSGTGSLLRLTKPGTPQPQFFSPPPSRSHFHLRTRPAKAKSPIAGAIASSSMAAAQPQTCDGQQQRAEEAMKLLFVEMGVGYDQHGQDITSAAVRACKDAISSNSIPAFRRGSIPGVNSEQMKLQIKLGVPRPVQHLLDFERIK

SEQ ID NO: 14848 - protein, 150 aa, Glycine max
MASAAPFSGTGSLLRLTKPGTPQPQFFSPPPSRSHFHLRTRPAKAKSPIAGAIASSSMAAAQPQTCDGQQQRAEEAMKLLFVEMGVGYDQHGQDITSAAVRACKDAISSNSIPAFRRGSIPGVNSEQMKLQIKLGVPRPVQHLLDFERIK

SEQ ID NO: 14849 - protein, 130 aa, Glycine max
NQTKHDGISSAILRHRQSPSPDKTRNATAPVLLPSAVSLPLPPSNPPRQGKEPNRRSHRLLFHGGSPAPDVRRPTTTGGGGHEAAVRRDGRRVRPARTGHHLRRGARLQGCHLLQLHPRLPPRVDTRGEQ

SEQ ID NO: 14850 - DNA, 916 bp, Glycine max
ctcgaaaggaaatgccagtggcattccagtgaacccacccccgactaggtccggacaccgccgctgcaatggctacggccatctccgcctccgcgctcctctcctccacattcgccggcgataggcgccatcgccgcgcggcgaggcccgcgccccgccgcgccgtcccggctggcctcacggtgcggtgcgagcagagcgacaaacagaagcggcagcctctttccgcactcgttccccgcgagcagcgcttcatgttcgagggcgacgagctctgcggacccgacatatggaacacaacatggtaccctaaggctgctgatcacgtaactaccgagaagacgtggtatgttgttgatgcagaggacaagattcttggcaggctagcatctgctatcgcagtgcatatgagagggaaaaatgagcccacatacactccaagtgtggacatgggggcttttgttattgtggttaatgcagagaaggttgctgtttctggtaaaaagaggtcacagaagctctataaaaggcactctggacggcccggtggaatgaaagaagaaacttttgatcagcttcagaaaaggattccggagagaattatcgaacatgctgtgcgtggcatgcttcctaagggcaggctgggcagaagactatttacccacctcaaggtgtacaaaggatcagagcacccgcatgtggctcaaaaacctgttccgctgcccatcagagacaaaagaataatgaagtctggctagagaacccctggatattgagaaaagatacagcaaccgtgcttccccgcccagtgttaggagcgtgacccgaacattcatgtcatctgtccacaagagtggtgtgtaacttttttgtaatttaattatgtttctgcaaaagctttcgattcctttcggtc

SEQ ID NO: 14851 - protein, 229 aa, Glycine max
MATAISASALLSSTFAGDRRHRRAARPAPRRAVPAGLTVRCEQSDKQKRQPLSALVPREQRFMFEGDELCGPDIWNTTWYPKAADHVTTEKTWYVVDAEDKILGRLASAIAVHMRGKNEPTYTPSVDMGAFVIVVNAEKVAVSGKKRSQKLYKRHSGRPGGMKEETFDQLQKRIPERIIEHAVRGMLPKGRLGRRLFTHLKVYKGSEHPHVAQKPVPLPIRDKRIMKSG

SEQ ID NO: 14852 - protein, 167 aa, Glycine max
MFEGDELCGPDIWNTTWYPKAADHVTTEKTWYVVDAEDKILGRLASAIAVHMRGKNEPTYTPSVDMGAFVIVVNAEKVAVSGKKRSQKLYKRHSGRPGGMKEETFDQLQKRIPERIIEHAVRGMLPKGRLGRRLFTHLKVYKGSEHPHVAQKPVPLPIRDKRIMKSG

SEQ ID NO: 14853 - protein, 116 aa, Glycine max
MRGKNEPTYTPSVDMGAFVIVVNAEKVAVSGKKRSQKLYKRHSGRPGGMKEETFDQLQKRIPERIIEHAVRGMLPKGRLGRRLFTHLKVYKGSEHPHVAQKPVPLPIRDKRIMKSG

SEQ ID NO: 14854 - DNA, 593 bp, Glycine max
tcaccagtacaatcacttggcaaatctagccatcttatcatctccagctgagctcagcatcactagtactgcaaactcgatcgggatggctcgcgctgcagctactcagctcgtgctggtcgccttggtggccgctatgctcctcgtagccacggacgcggccatctcctgcggtcaggtgagctctgccttgagcccctgcatctcctatgcccgcggcaatggcgccaacccgactgcggcctgctgcagcggtgtcaggagtctggccggcgcagcccggagcaccgctgacaagcaagcggcgtgcaagtgcatcaagagcgctgccggtgggctcaacgctggcaaggccgccggcatcccctccaagtgcggcgttagcgtcccatatgccatcagcgcttcggtcgactgctctaagattcgctgatcaaccactgcccaccatggctgccgctcatagcgccatccatcaccgcttagtatgctgaggtctctaatacatatgaataaatgctctatctgatctccatgtgagggagaaaggagtgcgtacgccgagctagctctgcatggccggccactattgc

SEQ ID NO: 14855 - protein, 143 aa, Glycine max
HQYNHLANLAILSSPAELSITSTANSIGMARAAATQLVLVALVAAMLLVATDAAISCGQVSSALSPCISYARGNGANPTAACCSGVRSLAGAARSTADKQAACKCIKSAAGGLNAGKAAGIPSKCGVSVPYAISASVDCSKIR

SEQ ID NO: 14856 - protein, 115 aa, Glycine max
MARAAATQLVLVALVAAMLLVATDAAISCGQVSSALSPCISYARGNGANPTAACCSGVRSLAGAARSTADKQAACKCIKSAAGGLNAGKAAGIPSKCGVSVPYAISASVDCSKIR

SEQ ID NO: 14857 - protein, 98 aa, Glycine max
MLLVATDAAISCGQVSSALSPCISYARGNGANPTAACCSGVRSLAGAARSTADKQAACKCIKSAAGGLNAGKAAGIPSKCGVSVPYAISASVDCSKIR

SEQ ID NO: 14858 - DNA, 636 bp, Glycine max
acggtatcgataagcttttttttttttttttttaaatcaatgctcgtaattacagcagaagatgagggtacaccaatgtgcggacggaagggggcaaagagggggagaaatggaacaaaagctgcaaagaaacaatgaaatgatacatcgtcgggtcatctagaagacgtagatggcggcggcggcggcagccagcacgaaggcggggcggagaccagcggcgccgctgcccggggtggcgggctcggcggtgggcgagggcgacatgtccggggtgggcgccggaggggaggacatcggggagtcggcgggcgccggcgcggtggcggagggcgtgggggcgacggtgggcgcgggcgccggggccgcggtagggggcggggacaccggcgccggggtagggggcgccattgccgggggcggggtcgccggcggtggaggcggggcctggggcgctgccgcgggggccgctccgggcgcctgagcggtggcggccacggccaggagcgcgaggacggagaggatggtgagctgagaagcggccattgtgcaaacctttgggtggtttcttggtggctcgcttctcgcttcctctgcctgcgctgtgagctgaaatgtgtgtgtgtgtgtgggtgg

SEQ ID NO: 14859 - protein, 103 aa, Glycine max
MAAAAAASTKAGRRPAAPLPGVAGSAVGEGDMSGVGAGGEDIGESAGAGAVAEGVGATVGAGAGAAVGGGDTGAGVGGAIAGGGVAGGGGGAWGAAAGAAPGA

SEQ ID NO: 14860 - protein, 72 aa, Glycine max
MSGVGAGGEDIGESAGAGAVAEGVGATVGAGAGAAVGGGDTGAGVGGAIAGGGVAGGGGGAWGAAAGAAPGA

SEQ ID NO: 14861 - DNA, 1109 bp, Glycine max
agttaggtcaactattaggcatgggctcgtccttgtcgaatctcaacgacggggagacgaatgattcctccatggggcctagcctcggcgatataccggaaagctgcatcgccgccgtgttcatgtacctgactcccccggagatttgcaacctcgccggtcttaaccgttcgtttcgcggcgcggcttcgtcggatttcgtctgggagaagaagctcccgccgaattaccaggatctgctcgatttgttgccgccggagagggttcttggtctctcgaagaaggatatcttcgctgtgctctctcgtcctatccccttcgacggtgataacaaggagctgtggattgatagagttacgggacgggtttgtatggcgatttctgcgaggggaatggctattactgggattgaagaccggagatattggaattggattccgaccaatgagtccaggttccatgttgtagcctacttacagcagatttggtggtttgaagtcgatgggacagtgacattccatctcccaccgggtatctactctctatcattcagaatccatctaggcggattcgcaaagaagtcggggagacgtgtgtgcaactacgaacacactcacggctgggatttgaagcctgttaggttttcgctttcgacttctgatggtcaagaggcatcatgtgagtattacttggatgatgtaaagagagaagaatcaaccgggcaccacaagcgcggtttctggatcgattataaggttggggagttcgtagtgactggatcagaaccatctactgagatcaaatggtccatgaaacagattgactgcacccactcgaaaggcgggctatgtgttgattcagtcttcattaacccaattggtgatttgaaagattacagaacgaaatctttttgtgaaatagattgaagaaagaagattcttttgaaggtaattttcattttattgttgtgcatttcatggagttgagttttgtttttttttacttcatactcgtttttgctacatagtttaggcgagaggactctctttgtgcattttcacatgtttataagtttggatgactatgatgtatccaaccaaagttaatct

SEQ ID NO: 14862 - protein, 307 aa, Glycine max
LGQLLGMGSSLSNLNDGETNDSSMGPSLGDIPESCIAAVFMYLTPPEICNLAGLNRSFRGAASSDFVWEKKLPPNYQDLLDLLPPERVLGLSKKDIFAVLSRPIPFDGDNKELWIDRVTGRVCMAISARGMAITGIEDRRYWNWIPTNESRFHVVAYLQQIWWFEVDGTVTFHLPPGIYSLSFRIHLGGFAKKSGRRVCNYEHTHGWDLKPVRFSLSTSDGQEASCEYYLDDVKREESTGHHKRGFWIDYKVGEFVVTGSEPSTEIKWSMKQIDCTHSKGGLCVDSVFINPIGDLKDYRTKSFCEID

SEQ ID NO: 14863 - protein, 301 aa, Glycine max
MGSSLSNLNDGETNDSSMGPSLGDIPESCIAAVFMYLTPPEICNLAGLNRSFRGAASSDFVWEKKLPPNYQDLLDLLPPERVLGLSKKDIFAVLSRPIPFDGDNKELWIDRVTGRVCMAISARGMAITGIEDRRYWNWIPTNESRFHVVAYLQQIWWFEVDGTVTFHLPPGIYSLSFRIHLGGFAKKSGRRVCNYEHTHGWDLKPVRFSLSTSDGQEASCEYYLDDVKREESTGHHKRGFWIDYKVGEFVVTGSEPSTEIKWSMKQIDCTHSKGGLCVDSVFINPIGDLKDYRTKSFCEID

SEQ ID NO: 14864 - protein, 284 aa, Glycine max
MGPSLGDIPESCIAAVFMYLTPPEICNLAGLNRSFRGAASSDFVWEKKLPPNYQDLLDLLPPERVLGLSKKDIFAVLSRPIPFDGDNKELWIDRVTGRVCMAISARGMAITGIEDRRYWNWIPTNESRFHVVAYLQQIWWFEVDGTVTFHLPPGIYSLSFRIHLGGFAKKSGRRVCNYEHTHGWDLKPVRFSLSTSDGQEASCEYYLDDVKREESTGHHKRGFWIDYKVGEFVVTGSEPSTEIKWSMKQIDCTHSKGGLCVDSVFINPIGDLKDYRTKSFCEID

SEQ ID NO: 14865 - DNA, 976 bp, Glycine max
aatcgataaactatcctcatcattcacaacaaacccaaaaaccaaacctcctccttcctatcttgaacaaccgccgagagacctccccgtcgccgtcgccgcaaatggagctgctcaacgtggttccggcggacgccatggccttccccctctactccctccccgcggcggccaacaccgtcgcctcgctcttcgcctggctcgtcgcggccctcgccgccgccgtcggcctctggcgcatccgcgcggccggctcctccaacaaactacccggcgccggcgcccgcagcagcaccctcttggacgacaatcagcagccgcaggccgtttcgtcgtctgccgccgacgagccacggcccgcactcgccgtgccggtggagccgtcctccccgattagcgagccaagctcgccgtccaaggtccggttcacggcatactacggcggggccggagctgacgatggggtagtggacggcgtcaggaaatgcgcggacagggacgaggacgaggacggcgtgcccgtcgtcgacgaccagagcgagacacagccgagacggacggcgtcgatgaggatcaggtcggcagcctcgacggcggtgccctgctgggagaagagggagatggccgtgaggaggcggggagatttgggctggtaccgccaccttgacacggcggtgcttgacggcaccgttgtaaggctgtgggacggcgaggtcaccgcggcggtggcgtcgccgagggcgcggcggcggagggcaggattgaaaccgcgcctgtcactatagagatgtgtgtataatgtggttaggattattggattgttattaggtgggtatgacgattttgtccttcaatttgggcatgtcatatgtatgtgtatcgtctaagagggccgaggctgaaaaaatgaacagccttcgtctcagctctcaggagaaacgaaaatttggcaaataatggcagagtattcttgctc

SEQ ID NO: 14866 - protein, 260 aa, Glycine max
SINYPHHSQQTQKPNLLLPILNNRRETSPSPSPQMELLNVVPADAMAFPLYSLPAAANTVASLFAWLVAALAAAVGLWRIRAAGSSNKLPGAGARSSTLLDDNQQPQAVSSSAADEPRPALAVPVEPSSPISEPSSPSKVRFTAYYGGAGADDGVVDGVRKCADRDEDEDGVPVVDDQSETQPRRTASMRIRSAASTAVPCWEKREMAVRRRGDLGWYRHLDTAVLDGTVVRLWDGEVTAAVASPRARRRRAGLKPRLSL

SEQ ID NO: 14867 - protein, 226 aa, Glycine max
MELLNVVPADAMAFPLYSLPAAANTVASLFAWLVAALAAAVGLWRIRAAGSSNKLPGAGARSSTLLDDNQQPQAVSSSAADEPRPALAVPVEPSSPISEPSSPSKVRFTAYYGGAGADDGVVDGVRKCADRDEDEDGVPVVDDQSETQPRRTASMRIRSAASTAVPCWEKREMAVRRRGDLGWYRHLDTAVLDGTVVRLWDGEVTAAVASPRARRRRAGLKPRLSL

SEQ ID NO: 14868 - protein, 215 aa, Glycine max
MAFPLYSLPAAANTVASLFAWLVAALAAAVGLWRIRAAGSSNKLPGAGARSSTLLDDNQQPQAVSSSAADEPRPALAVPVEPSSPISEPSSPSKVRFTAYYGGAGADDGVVDGVRKCADRDEDEDGVPVVDDQSETQPRRTASMRIRSAASTAVPCWEKREMAVRRRGDLGWYRHLDTAVLDGTVVRLWDGEVTAAVASPRARRRRAGLKPRLSL

SEQ ID NO: 14869 - DNA, 475 bp, Glycine max
tttttttcgtccccgtgagctctcsacacaagtctcgcccgcagccgccgtcagagcgcaacgcacgcccgcgagcccaccgaagcccaggcgcgcggagaccctagccaagcgagtcctcgccgcagatggcagtccccggcggccgcaacggcctcgtcgaggacgacgacgtcgccgaccacgccggcgccttcgtcgccccctccgacgacgaggaggcgccgctgcctccccacctccaggccctctccgacgccgcccagagcggcgacgtcgacgccctccgcaccgcgctcgataactatggtggcagcattgatgatccagttgaagatggtgatactgtgcttcacctggcatgcttatatggccatctactttgcgtgcagctactgctggaacgtggagcaagcttagagtccaaagatgaagaaggggcaattcctctccatgatgcttgtgctggaggctt

SEQ ID NO: 14870 - protein, 115 aa, Glycine max
MAVPGGRNGLVEDDDVADHAGAFVAPSDDEEAPLPPHLQALSDAAQSGDVDALRTALDNYGGSIDDPVEDGDTVLHLACLYGHLLCVQLLLERGASLESKDEEGAIPLHDACAGG

SEQ ID NO: 14871 - protein, 100 aa, Glycine max
  misc_feature (8)..(8): Xaa can be any naturally occurring amino acid
FFRPRELXTQVSPAAAVRAQRTPASPPKPRRAETLAKRVLAADGSPRRPQRPRRGRRRRRPRRRLRRPLRRRGGAAASPPPGPLRRRPERRRRRPPHRAR

SEQ ID NO: 14872 - DNA, 1120 bp, Glycine max
aaccaagcagagtatccatcgcccacgccacgccacgcaagaacacaacaccacacacccgagtcgccaagaagaaagccccaaccttttttcctcccgatccgtcgtcgccacaagagtttctctccggattcgccgccctctccttctctccagccagccagccggccagcgagcgagcgagcgagcgatcgatcggatcccgcccgtcggaggttccaagtctcgcctgatctatcagagatggcggccaacgccggcgccggcgccggtggcagcaagatccgcaacgccaagctggttcttctgggggatgtcggcaccggcaagtccagcctggtgctccggttcgtcaagggccagttcgtcgagttccaggaatcgaccatcggcgcggccttcttctcgcagaccctggcggtcaacgatgagacggtcaagttcgaaatctgggacacggccggccaggagaggtaccacagcctggcgcccatgtactaccgcggcgccgcggccgcgatcgtcgtctacgacatcaccaacgcggcctcttttacacgtgcaaagaaatgggttcaagaacttcaagcacaagggaatccaaacacagtaatggctcttgctgggaacaaggctgatatgttggaggcaaggcaggtgccagtggaagaagcgacgacttcgcacaagagaatgggctcttcttcattgaaacgtctgccaaaacagccatcaatgtgaatgacgtattctatgagctcgcaaagagactgctcgcggggcagcaggcgcagaacccgcaggcggggatggtgctctcacagagaccggccgagaggatggtgagcagcacgtcgtgctgctcatcataggatgcttggccgtggagagacggccgccatggatggcctcagaagccacaggaggaaagaaaaatgtatgcgctgtggacgattgctgccatcccagcttgctacactacagtctagcccttgtttcttgtcatatgttggttctgtaaatgtgaatagtagtggggtgttgctgctgcagatgttcagatatgttgttgcagtgcattctggtgcttaaatatatttctggatgacctttgtgcttc

SEQ ID NO: 14873 - protein, 246 aa, Glycine max
NQAEYPSPTPRHARTQHHTPESPRRKPQPFFLPIRRRHKSFSPDSPPSPSLQPASRPASERASDRSDPARRRFQVSPDLSEMAANAGAGAGGSKIRNAKLVLLGDVGTGKSSLVLRFVKGQFVEFQESTIGAAFFSQTLAVNDETVKFEIWDTAGQERYHSLAPMYYRGAAAAIVVYDITNAASFTRAKKWVQELQAQGNPNTVMALAGNKADMLEARQVPVEEATTSHKRMGSSSLKRLPKQPSM

SEQ ID NO: 14874 - protein, 203 aa, Glycine max
TKQSIHRPRHATQEHNTTHPSRQEESPNLFSSRSVVATRVSLRIRRPLLLSSQPAGQRASERAIDRIPPVGGSKSRLIYQRWRPTPAPAPVAARSATPSWFFWGMSAPASPAWCSGSSRASSSSSRNRPSARPSSRRPWRSTMRRSSSKSGTRPARRGTTAWRPCTTAAPRPRSSSTTSPTRPLLHVQRNGFKNFKHKGIQTQ

SEQ ID NO: 14875 - protein, 165 aa, Glycine max
MAANAGAGAGGSKIRNAKLVLLGDVGTGKSSLVLRFVKGQFVEFQESTIGAAFFSQTLAVNDETVKFEIWDTAGQERYHSLAPMYYRGAAAAIVVYDITNAASFTRAKKWVQELQAQGNPNTVMALAGNKADMLEARQVPVEEATTSHKRMGSSSLKRLPKQPSM

SEQ ID NO: 14876 - DNA, 906 bp, Glycine max
acacattcaaactaataactctcaaaaactgagagcagaagagagtagaggagaaacaaatgtccatatccatggcgctattctctccgccgatctcttcttcagttcaaaaccccaagatctcgttccctctcctctccaccaagcgcttctctctcctctccgtcactcgcgcttcctccgattctgctgcagtctctgcaaccaccgtagagattccgaagcccgcgtcggtttctgtagaggaggtgccatctaaacctcctgcggaaagctcctccgacgagactgatctgccaaccacggcgacgggaatcaagtttcaggatgcgaagtgggttaatggaacctgggatctgaaacagttcgagaaagacgggaaaaccgattgggattctattatcgtcgctgaggcaaagaggagaaagtggcttgaagataacccagaaacaactactaacgctgagcctgttcttttcgacacctcgatcattccatggtgggcgtggatgaagagataccatctaccagaagctgaactcctcaatggtcgtgctgcgatgatagggttcttcatggcttactttgttgacagccttaccggagtaggacttgttgatcaaatgggaaacttcttctgcaaaacactcttgtttgtggctgtagctggagttcttttcatccgcaagaacgaagatttagataagctcaaggttctgatcgaagagacgacgctatatgacaagcaatggcaagcggcttggaaagagccggaatcatcatcatcgacgctttcttcaaagaagtgaacaaaatctttctcgctttttgtttcctcttttctcatgtgatgtttgtgatcagtgaaaaaagtctcaagataaacgcaaaatctatttggctttg

SEQ ID NO: 14877 - protein, 249 aa, Glycine max
MSISMALFSPPISSSVQNPKISFPLLSTKRFSLLSVTRASSDSAAVSATTVEIPKPASVSVEEVPSKPPAESSSDETDLPTTATGIKFQDAKWVNGTWDLKQFEKDGKTDWDSIIVAEAKRRKWLEDNPETTTNAEPVLFDTSIIPWWAWMKRYHLPEAELLNGRAAMIGFFMAYFVDSLTGVGLVDQMGNFFCKTLLFVAVAGVLFIRKNEDLDKLKVLIEETTLYDKQWQAAWKEPESSSSTLSSKK

SEQ ID NO: 14878 - protein, 245 aa, Glycine max
MALFSPPISSSVQNPKISFPLLSTKRFSLLSVTRASSDSAAVSATTVEIPKPASVSVEEVPSKPPAESSSDETDLPTTATGIKFQDAKWVNGTWDLKQFEKDGKTDWDSIIVAEAKRRKWLEDNPETTTNAEPVLFDTSIIPWWAWMKRYHLPEAELLNGRAAMIGFFMAYFVDSLTGVGLVDQMGNFFCKTLLFVAVAGVLFIRKNEDLDKLKVLIEETTLYDKQWQAAWKEPESSSSTLSSKK

SEQ ID NO: 14879 - DNA, 556 bp, Glycine max
aactttcgaccccatcaggctggcatctgtcccgacgagcagccgcccccaggtctagggttccccctttcctcttctccacgcgaatcagctagatactagcaccagcatcgatggcggcggcagcgccggcggacgcgaaggcggaggccgccaagatggacctcctcgaggacgacgacgagttcgaggagttcgagatcgaccaagaatgggatgacaaggaagatggcaacgaagctgtccagcaatgggaggatgactgggatgatgacgacgtgaacgatgatttctcactgcagctgaggaaagagctggagggaggcaacactcagaagagctgaactacttcgatcaggcactgtgtggccattgctctctgaacctgtgatacttccctagcaatatcaagctctgatacttatcttcgtttcagcactgtgtatcagactttgtaccttactgcatgtagttatcggctgcgagcagcataacttgccgaacaatgatagttcccagagagtatcgcaattacccaaaaagtttgtggacatgc

SEQ ID NO: 14880 - protein, 76 aa, Glycine max
MAAAAPADAKAEAAKMDLLEDDDEFEEFEIDQEWDDKEDGNEAVQQWEDDWDDDDVNDDFSLQLRKELEGGNTQKS

SEQ ID NO: 14881 - protein, 61 aa, Glycine max
MDLLEDDDEFEEFEIDQEWDDKEDGNEAVQQWEDDWDDDDVNDDFSLQLRKELEGGNTQKS

SEQ ID NO: 14882 - DNA, 492 bp, Glycine max
atttttcgtaattcagttgagatagctcgatctcgtgagcatggctttgcggctttgggtatcgcaggttgcaagacgacagattaaaagtgtgtttgctacaagctatttttctgtcaataagcttggagatcgtgcaggcatgtccaattcagtgacagaggaaaaaactgtaggtggtctttctgctttaagaagtttgggaaaatcaaccaaagacaatactattggaactgctagtaatccaatccatatggtggctagagaaggtgggaatataaaagatcagctatggcgtacatttaggttcattgtggtgtcctttttcatgatttctggtgtaggagcactcattgaagataaaggaattagtaaaggacttggtataaatgaagaagttcaacctagcatggaatcaagtacaaaatttagtgatgtaaaacagtgtcctcttgaaggaaagaaaaaaaatagttgttctctattgtttcg

SEQ ID NO: 14883 - protein, 150 aa, Glycine max
MALRLWVSQVARRQIKSVFATSYFSVNKLGDRAGMSNSVTEEKTVGGLSALRSLGKSTKDNTIGTASNPIHMVAREGGNIKDQLWRTFRFIVVSFFMISGVGALIEDKGISKGLGINEEVQPSMESSTKFSDVKQCPLEGKKKNSCSLLF

SEQ ID NO: 14884 - protein, 116 aa, Glycine max
MSNSVTEEKTVGGLSALRSLGKSTKDNTIGTASNPIHMVAREGGNIKDQLWRTFRFIVVSFFMISGVGALIEDKGISKGLGINEEVQPSMESSTKFSDVKQCPLEGKKKNSCSLLF

SEQ ID NO: 14885 - protein, 79 aa, Glycine max
MVAREGGNIKDQLWRTFRFIVVSFFMISGVGALIEDKGISKGLGINEEVQPSMESSTKFSDVKQCPLEGKKKNSCSLLF

SEQ ID NO: 14886 - DNA, 602 bp, Glycine max
acaaccaacatcccaaccagcagcgatccatccatcctccacaatcagagcaagcgagcgaccaagaaaccatcacagcgaccatcatcttctctgcctccatggcggcgcaccagcagcagcaaccgcagcaggcggtggggttcgaggactacctgccggtgatggcggagcggctgggggaggagggcctgatggaggagctggcggcggggttccgcctgctcatggacccggcgtcgggcctcatcaccttccacagcctccgccgcaacgcgccgctgctgggcctgggcgccatgtccgacgacgacctccgcgggatgctcgccgagggcgacttcgacggcgacggcgcgctgtcccagatggagttctgcgtcctcatggtcaggctcagccccgacctcatggaccagccccgccggtggctcgacgacgccgtcgcccaggcctcccacttcctcttcaccagctaggcggagcatctggtgtcgatcggataggaaattaatcttcttcttcgttgttgttttttcttctctcccccgctgttcatagagtcaggattcaagaaaagaaagggcactgtcgattggttg

SEQ ID NO: 14887 - protein, 170 aa, Glycine max
QPTSQPAAIHPSSTIRASERPRNHHSDHHLLCLHGGAPAAATAAGGGVRGLPAGDGGAAGGGGPDGGAGGGVPPAHGPGVGPHHLPQPPPQRAAAGPGRHVRRRPPRDARRGRLRRRRRAVPDGVLRPHGQAQPRPHGPAPPVARRRRRPGLPLPLHQLGGASGVDRIGN

SEQ ID NO: 14888 - protein, 158 aa, Glycine max
NQHPNQQRSIHPPQSEQASDQETITATIIFSASMAAHQQQQPQQAVGFEDYLPVMAERLGEEGLMEELAAGFRLLMDPASGLITFHSLRRNAPLLGLGAMSDDDLRGMLAEGDFDGDGALSQMEFCVLMVRLSPDLMDQPRRWLDDAVAQASHFLFTS

SEQ ID NO: 14889 - protein, 125 aa, Glycine max
MAAHQQQQPQQAVGFEDYLPVMAERLGEEGLMEELAAGFRLLMDPASGLITFHSLRRNAPLLGLGAMSDDDLRGMLAEGDFDGDGALSQMEFCVLMVRLSPDLMDQPRRWLDDAVAQASHFLFTS

SEQ ID NO: 14890 - DNA, 800 bp, Glycine max
atcaagctactgagttctgactatccaacttaaaattatattatcttttcgacttcagattctcctctatttcactcaaacactaaagcttcagaaaatggcaatggcgtcgtttaacatgcagtcagtcttcgccggtggactgaccactcgcaagatcaacacgaacaagctttgctttgccggaaacttccataatctcaagaggaattgtcccgtgggagtgagatgtatggctgagggagaaccaatgaaagatgagtctgcaccttcgacctcggcgtctcagcctttgcccaagtcatcgtcgccaccaccacctcctcctactaaacctaaggtgagcacaaagtttagcgacttgctagcgttcagcggtccagcaccggaaagaataaacggtcgtttagctatggttggattcgtggctgcgttggcggttgaactttccaagggtgaaaacgttttagctcagatctccgacggtggtgtctcgtggttcctcggtacggcggcgatcttgacgcttgcgtcgcttgtgccccttttcaagggcataacagccgagtccaagtccaaaggttttatgacgtcagacgctgagctttggaatgggcgttttgcgatgcttggtttggtcgcgctggcgttcactgagtttgtcaagggtgggactctcgtttgagaaagaagagattgtgtattgcaaaatttgcccctgaatcctgtatagtattctggcttgttttaggcctactctgtgtcttttacatatggattagtgacatttgaaactttgg

SEQ ID NO: 14891 - protein, 195 aa, Glycine max
MAMASFNMQSVFAGGLTTRKINTNKLCFAGNFHNLKRNCPVGVRCMAEGEPMKDESAPSTSASQPLPKSSSPPPPPPTKPKVSTKFSDLLAFSGPAPERINGRLAMVGFVAALAVELSKGENVLAQISDGGVSWFLGTAAILTLASLVPLFKGITAESKSKGFMTSDAELWNGRFAMLGLVALAFTEFVKGGTLV

SEQ ID NO: 14892 - protein, 193 aa, Glycine max
MASFNMQSVFAGGLTTRKINTNKLCFAGNFHNLKRNCPVGVRCMAEGEPMKDESAPSTSASQPLPKSSSPPPPPPTKPKVSTKFSDLLAFSGPAPERINGRLAMVGFVAALAVELSKGENVLAQISDGGVSWFLGTAAILTLASLVPLFKGITAESKSKGFMTSDAELWNGRFAMLGLVALAFTEFVKGGTLV

SEQ ID NO: 14893 - protein, 188 aa, Glycine max
MQSVFAGGLTTRKINTNKLCFAGNFHNLKRNCPVGVRCMAEGEPMKDESAPSTSASQPLPKSSSPPPPPPTKPKVSTKFSDLLAFSGPAPERINGRLAMVGFVAALAVELSKGENVLAQISDGGVSWFLGTAAILTLASLVPLFKGITAESKSKGFMTSDAELWNGRFAMLGLVALAFTEFVKGGTLV

SEQ ID NO: 14894 - DNA, 1057 bp, Glycine max
acttttgaactaatcgatcctacacgaccatcagccggagacgaccgccggcgttttttccgctttaatggaagcgttacttacttcaagggttgttccagttcaagttccttgtagaaagctctcatctttatctgctgatttgtcttgccttgagttaaggagatatcctgttagaagaggaagtgtctcgatcatgagctattccagattggtccgtccagtgactgcttctgtgcagccgcagagggtgtcggctttggggaatgaaggcaacactgttccttctaaagagattctcgatctttggagaggtgttgaagctgtatgcttcgatgtggatagcacggtatgtgtggatgaaggcattgatgaacttgcagagttctgtggagctggaaaggctgttgctgaatggactgccagagcaatgggtggatctgttccatttgaagaagctctagccgcaagactttctttgttcaagccttctctttccaaagttgatgaatatctccaaaagacacccccgaggctatcccctggcattgaagagttggtcaagaagctcagagccaataaaatcgatgtctatttgatatctggaggttttcgacagatgatcaatcctgtagcatcggttcttggcatccctcgagagaatatattcgccaacaatcttctatttggaaattctggtgagtttgtggggtttgatgagaaggaacctacttcaagaagtggaggcaaagccaaggcagtgcaacatatacgaaagggtcgtagctacaagacgatggccatgattggagacggagctactgatctagaagcacgtagacctggtggcgcggacttgttcatatgttatgctggagttcagcttcgtgaagctgttgcagcacaagcagactggcttatcttcaattttgaacctctcattaactccttggactaaaagcctcttctctatactgattagttccattgagagctcaactcattattcaactctcaaattttgtactctcctttttgaatgtgtgaaattccactg

SEQ ID NO: 14895 - protein, 296 aa, Glycine max
MEALLTSRVVPVQVPCRKLSSLSADLSCLELRRYPVRRGSVSIMSYSRLVRPVTASVQPQRVSALGNEGNTVPSKEILDLWRGVEAVCFDVDSTVCVDEGIDELAEFCGAGKAVAEWTARAMGGSVPFEEALAARLSLFKPSLSKVDEYLQKTPPRLSPGIEELVKKLRANKIDVYLISGGFRQMINPVASVLGIPRENIFANNLLFGNSGEFVGFDEKEPTSRSGGKAKAVQHIRKGRSYKTMAMIGDGATDLEARRPGGADLFICYAGVQLREAVAAQADWLIFNFEPLINSLD

SEQ ID NO: 14896 - protein, 253 aa, Glycine max
MSYSRLVRPVTASVQPQRVSALGNEGNTVPSKEILDLWRGVEAVCFDVDSTVCVDEGIDELAEFCGAGKAVAEWTARAMGGSVPFEEALAARLSLFKPSLSKVDEYLQKTPPRLSPGIEELVKKLRANKIDVYLISGGFRQMINPVASVLGIPRENIFANNLLFGNSGEFVGFDEKEPTSRSGGKAKAVQHIRKGRSYKTMAMIGDGATDLEARRPGGADLFICYAGVQLREAVAAQADWLIFNFEPLINSLD

SEQ ID NO: 14897 - protein, 175 aa, Glycine max
MGGSVPFEEALAARLSLFKPSLSKVDEYLQKTPPRLSPGIEELVKKLRANKIDVYLISGGFRQMINPVASVLGIPRENIFANNLLFGNSGEFVGFDEKEPTSRSGGKAKAVQHIRKGRSYKTMAMIGDGATDLEARRPGGADLFICYAGVQLREAVAAQADWLIFNFEPLINSLD

SEQ ID NO: 14898 - DNA, 1040 bp, Glycine max
atcagaaactcattcagacgactcgagcaaccactgcctcttacacttgtcacgtccctaccacgtactcgcaatggccgcagctgcagcactagccagttccacgaaagaagtgctcccgcctgcactgggcgccgtctccgagccccctaccctcttcgatggcaccaccagactgtacatttgctacacctgcccgtttgctcagcgcgcctgggttacccggaactgcaagggtctgcaggaggagatcaagcttgtcgccatcaatctggaggacaaaccagcatggtacaaggagaatgtttacccacagggcacggtgccttccctggagcacgacggcaaggtcaccggagagagcttggatttgatcaagtacatcgacaccaatttccaaggcccggcactgcttcctcaagatccggctaagaggcagttcgccgatgagctgattgcttacgctgatgcctttaccaaagcactctactcgcccttgatctcccagtggccatttcagatgaagctgttgctgctctagacaagatcgaagctgtcctgtccaagttcagtgacggcccgttcttccttggccaatttagcttggtggatattgcgtacgtgaccatcttggagagggttcagatatactactctcacgtgaggaactacgagatcgccaaagacaggcccaaccttgagagatacgccgaggagatgaacaagatcgaagcctataagcaaaccaaaaatgtcccgctgaccttgcttgatgctgccaagaggcatctcaagattgcctgaagaagtggtgattcgccaagaattacggcggctgccagggaacggcggcatttgagtaggccaagactgaactctcgtcaccgggggttggggcttcttttactaccattattatcacaatgagttgtagtagtatatgttctcttcccaataaatgacaccatgttgtaacctgtaagggctatgctttttatgaaacaataatgtactccatctgttctatgtgcattacagtt

SEQ ID NO: 14899 - protein, 179 aa, Glycine max
SETHSDDSSNHCLLHLSRPYHVLAMAAAAALASSTKEVLPPALGAVSEPPTLFDGTTRLYICYTCPFAQRAWVTRNCKGLQEEIKLVAINLEDKPAWYKENVYPQGTVPSLEHDGKVTGESLDLIKYIDTNFQGPALLPQDPAKRQFADELIAYADAFTKALYSPLISQWPFQMKLLLL

SEQ ID NO: 14900 - protein, 155 aa, Glycine max
MAAAAALASSTKEVLPPALGAVSEPPTLFDGTTRLYICYTCPFAQRAWVTRNCKGLQEEIKLVAINLEDKPAWYKENVYPQGTVPSLEHDGKVTGESLDLIKYIDTNFQGPALLPQDPAKRQFADELIAYADAFTKALYSPLISQWPFQMKLLLL

SEQ ID NO: 14901 - protein, 143 aa, Glycine max
IRNSFRRLEQPLPLTLVTSLPRTRNGRSCSTSQFHERSAPACTGRRLRAPYPLRWHHQTVHLLHLPVCSARLGYPELQGSAGGDQACRHQSGGQTSMVQGECLPTGHGAFPGARRQGHRRELGFDQVHRHQFPRPGTASSRSG

SEQ ID NO: 14902 - DNA, 744 bp, Glycine max
aagagctctctttaccatcttcccacttccctttgagaaagaaaacagaacaaagaaaaagaaagaaagcaaacagaaacaaatggcactgagaatgtgggcttcctctacagcaaacgctctcaagctctcttcttctgcatccagatctcatctccttccagctttctccatctccagatgcttctcctcagtgttggaaggacttaagtatgcaaattcacatgagtgggtgaaacatgaaggctcagtggctactattggcatcagtgaccatgcccaggatcatttaggagaagttgtgtttgtggagctgcctgaagaaaaaagttcagtgaccaaagaaaaaaactttggagcagtggagagtgtgaaggcaacaagtgagattatatctccaatctctggtgaagtcatcgaggttaacacaaagctcgctgattcacctggcttgattaactcaagcccttacgaagatggttggatgataaaggtgaaaccaagcaaccccgcagagctggaatccttgatgggtccaaaggaatacaccaagttctgcgaagaggaagatgctgctcactagggtttcttcgtctttcccagtatgtcctaaacaaaaagcaaaacaagagagaacccatgctaaatgtttcaatcttttcactacttctcaatgtttcctacctctgtatcaaatttgtatctctgtaatactgttttggttaaaaatcattcgatgagtcc

SEQ ID NO: 14903 - protein, 193 aa, Glycine max
RALFTIFPLPFEKENRTKKKKESKQKQMALRMWASSTANALKLSSSASRSHLLPAFSISRCFSSVLEGLKYANSHEWVKHEGSVATIGISDHAQDHLGEVVFVELPEEKSSVTKEKNFGAVESVKATSEIISPISGEVIEVNTKLADSPGLINSSPYEDGWMIKVKPSNPAELESLMGPKEYTKFCEEEDAAH

SEQ ID NO: 14904 - protein, 166 aa, Glycine max
MALRMWASSTANALKLSSSASRSHLLPAFSISRCFSSVLEGLKYANSHEWVKHEGSVATIGISDHAQDHLGEVVFVELPEEKSSVTKEKNFGAVESVKATSEIISPISGEVIEVNTKLADSPGLINSSPYEDGWMIKVKPSNPAELESLMGPKEYTKFCEEEDAAH

SEQ ID NO: 14905 - protein, 162 aa, Glycine max
MWASSTANALKLSSSASRSHLLPAFSISRCFSSVLEGLKYANSHEWVKHEGSVATIGISDHAQDHLGEVVFVELPEEKSSVTKEKNFGAVESVKATSEIISPISGEVIEVNTKLADSPGLINSSPYEDGWMIKVKPSNPAELESLMGPKEYTKFCEEEDAAH

SEQ ID NO: 14906 - DNA, 1326 bp, Glycine max
tttttcccgcgcatttgcccccgaatctcccgcgctcgccccctcttatccccgtctcctccgatcccgaccccgaccccgccagacgccaccacccgccgccgccgccgccagaagagatccgtccatccggccaagccgagagcagagcatagcaggggaaggagacgggagagaggacccgcagccatgatgttctccagccaggtcgacgccttctcgccgtcgcagttcaccccgtcgcagaacgcctccgccgactccacccccaacaagttccggggcgcgtcgggtacgatgccgctgacggtgaagcagatcgcggacgcgcagctggccggcaccggcgagaagggcgcgcccttcgtcgtcgacggcgtcgagacggccaacgtcaggctcgtggggatggtgagcggcaaggcggagcggaacacggacgtctccttcacgctcgacgacggcaccggccgcatcgacttcatcagatgggtgaatgatgctgcagattctgctgaaactgctgccattcagaatggtatgtacgtcgctgtcatcggtagcctcaagggagttcaggacaagaagcgtgctactgcttttgcagtcagacctataactgattacaacgaggtcacgctgcatttcattcagtgtgtacggatgcatatagagaacacaaaatcaaaggttggcagtcctgcacacaccaattcttctgtgggaaccccattctccaacagattgagcgaagcagccactccaccctctgtgaagtccaacccggcaccagtgaccagcggaacaaatggatccgagactgatttttacacgcaggtgctgaatgtcttccgcgaaccagcaaacattgagagtgaccatggtgtgcatgtggatgacattgccaagcggttcagactaccagcactcaagatcaaggaggctatcgactaccacgttgacgtcgggcacatctactcgaccattgatgatttccactacaagtcagcgttcgtcgactgagtctgtaaccgagtgccgtcgtcactcgctagcatctgtccttagatgtgctgtttaggtagcctcccaaaggaagcatcttctcgctggagtttgagagacatgactcactgttggcctgagaggatgctccaggggcatgtattactttaaattcctgttgatcagaggcgtatgagccttgatgcgatgagagtctcgtcttgtgaaattatggttagcgtctctcatgttctgctctgagtgtgatatggtgggatggatttacattttacagtcaaagtttgacagttacatcgctct

SEQ ID NO: 14907 - protein, 340 aa, Glycine max
FFPRICPRISRARPLLSPSPPIPTPTPPDATTRRRRRQKRSVHPAKPRAEHSRGRRRERGPAAMMFSSQVDAFSPSQFTPSQNASADSTPNKFRGASGTMPLTVKQIADAQLAGTGEKGAPFVVDGVETANVRLVGMVSGKAERNTDVSFTLDDGTGRIDFIRWVNDAADSAETAAIQNGMYVAVIGSLKGVQDKKRATAFAVRPITDYNEVTLHFIQCVRMHIENTKSKVGSPAHTNSSVGTPFSNRLSEAATPPSVKSNPAPVTSGTNGSETDFYTQVLNVFREPANIESDHGVHVDDIAKRFRLPALKIKEAIDYHVDVGHIYSTIDDFHYKSAFVD

SEQ ID NO: 14908 - protein, 277 aa, Glycine max
MMFSSQVDAFSPSQFTPSQNASADSTPNKFRGASGTMPLTVKQIADAQLAGTGEKGAPFVVDGVETANVRLVGMVSGKAERNTDVSFTLDDGTGRIDFIRWVNDAADSAETAAIQNGMYVAVIGSLKGVQDKKRATAFAVRPITDYNEVTLHFIQCVRMHIENTKSKVGSPAHTNSSVGTPFSNRLSEAATPPSVKSNPAPVTSGTNGSETDFYTQVLNVFREPANIESDHGVHVDDIAKRFRLPALKIKEAIDYHVDVGHIYSTIDDFHYKSAFVD

SEQ ID NO: 14909 - protein, 276 aa, Glycine max
MFSSQVDAFSPSQFTPSQNASADSTPNKFRGASGTMPLTVKQIADAQLAGTGEKGAPFVVDGVETANVRLVGMVSGKAERNTDVSFTLDDGTGRIDFIRWVNDAADSAETAAIQNGMYVAVIGSLKGVQDKKRATAFAVRPITDYNEVTLHFIQCVRMHIENTKSKVGSPAHTNSSVGTPFSNRLSEAATPPSVKSNPAPVTSGTNGSETDFYTQVLNVFREPANIESDHGVHVDDIAKRFRLPALKIKEAIDYHVDVGHIYSTIDDFHYKSAFVD

SEQ ID NO: 14910 - DNA, 286 bp, Glycine max
aaatcgccattgttgctgcaccactctgattcatttcgattgagctttctttttttttcctgctaatggctcgtcggtctggagactgcatgagatgcctggtgatcttcgcggtggtatctgctttagtagtgtgcggacctgctctttactggagattcaacaaaggtttcgttggatccactcgtaaaagctctgtttgtcctccttgcgtctgtgattgcccacctcctgtatccctcctcgagatcgctcctgggcttgcaaatctcaccgttacagattg

SEQ ID NO: 14911 - protein, 73 aa, Glycine max
MARRSGDCMRCLVIFAVVSALVVCGPALYWRFNKGFVGSTRKSSVCPPCVCDCPPPVSLLEIAPGLANLTVTD

SEQ ID NO: 14912 - protein, 65 aa, Glycine max
MRCLVIFAVVSALVVCGPALYWRFNKGFVGSTRKSSVCPPCVCDCPPPVSLLEIAPGLANLTVTD

SEQ ID NO: 14913 - DNA, 833 bp, Glycine max
tttttggatcgaatttctttcaacataaaaaagttggagcatatatatttttcatttttgcctcctcatttcaattccactaagagccctctattttttgttttgttttggcagagtgttaaagtctgcaagaagaaatcttgaagatagacataaaccctggttggagaaagggcacaaaaatcacttttcctgggaaatgcaacaaagaacaatggtatgctccagctgatctaattttttatgtgggatgagaggcctcatgctattttcaagagggaaagaaatgatcttgtagtgatccagaagatattacttgtagatgctctcaaaggaaagactctcaacttgactaccttggatggaagagatctcacaatccaagtcacagatattgtaaaatcaggctatgagctggtggtcccaaatgagggtgcatgcccatcccaaagaaacctggcaagaaaggaaatctcagaatcaagtttgatgttatgtttccatcaaggatgcccacacagcagaagtgggatctaagaaggattctcagtggtgctgattactaaacaaataggactagtgtcatacccaacaatgcatgggcattttacttgtggggctgaataataggaaatggatcaaattgcatgatagtgtatttacatatcatatttgaatcggtggatgcacaattcaaccacaactatgccttttacaaagatgaaagctcagacttttcactccaacattcaaaactgaaaaatgtttaataatccttacattacatccatatcccaagattaatatttggacaggtagtccaaatacatccc

SEQ ID NO: 14914 - protein, 97 aa, Glycine max
MWDERPHAIFKRERNDLVVIQKILLVDALKGKTLNLTTLDGRDLTIQVTDIVKSGYELVVPNEGACPSQRNLARKEISESSLMLCFHQGCPHSRSGI

SEQ ID NO: 14915 - DNA, 877 bp, Glycine max
attcattcattctctcacagccatcgatccatctaaactaggtggagcagtacatacacaacaaagcaaggcataatggcctcaggagtgtttggtacccccatttcggagaagacggtgctagccactggagagtataaggaaccaattactcaaaaggatgttgcagactataccatgaagatgatcaacgccggtggtaaagatattaacgcacaaaccttcgtcgacaacctcaaggagaggtacggtaacggaatatctgtaaaatgcctcatctacaatgccaccggtgccactttgaacttggctaactacaaagattggcacggccatatctacgatacaccctacccatcagatattcagaatgggcaatggggggcatttctccacgtccacccaagtggtgctgcggttggttcagctggtgccgttgtgtatcgtaccaaggtcccctccagcaggagctcctgcgattggttgttctcctggaccgtcccctacattggtgccaatgggatctacaccgaaatccgtgaggaagggcactatccaagtgtgggaagctgggattatatctatgatgtgaagctggaaaatgcagatctcaactctactgataaaaactatggatatgtttccaagactaacatcggtgaaggctctaccatgaacgcccgtggagttttccagtttccctactagatctctttgcgagcatcgaggggttattgtggtcttcaaagtcttttgtggcgaggacgtttggagatattattttcctttactgtctttgtggtgcatttcctaatattcggtgttcatgaataatcaaggaagaagacaataaaagagatgtaatgtgcaattttat

SEQ ID NO: 14916 - protein, 210 aa, Glycine max
MASGVFGTPISEKTVLATGEYKEPITQKDVADYTMKMINAGGKDINAQTFVDNLKERYGNGISVKCLIYNATGATLNLANYKDWHGHIYDTPYPSDIQNGQWGAFLHVHPSGAAVGSAGAVVYRTKVPSSRSSCDWLFSWTVPYIGANGIYTEIREEGHYPSVGSWDYIYDVKLENADLNSTDKNYGYVSKTNIGEGSTMNARGVFQFPY

SEQ ID NO: 14917 - protein, 176 aa, Glycine max
MKMINAGGKDINAQTFVDNLKERYGNGISVKCLIYNATGATLNLANYKDWHGHIYDTPYPSDIQNGQWGAFLHVHPSGAAVGSAGAVVYRTKVPSSRSSCDWLFSWTVPYIGANGIYTEIREEGHYPSVGSWDYIYDVKLENADLNSTDKNYGYVSKTNIGEGSTMNARGVFQFPY

SEQ ID NO: 14918 - protein, 174 aa, Glycine max
MINAGGKDINAQTFVDNLKERYGNGISVKCLIYNATGATLNLANYKDWHGHIYDTPYPSDIQNGQWGAFLHVHPSGAAVGSAGAVVYRTKVPSSRSSCDWLFSWTVPYIGANGIYTEIREEGHYPSVGSWDYIYDVKLENADLNSTDKNYGYVSKTNIGEGSTMNARGVFQFPY

SEQ ID NO: 14919 - DNA, 695 bp, Glycine max
accattacctagaacatcctaatcgaaaaaatctttttgttcttttatggttttggaatcgatctgtaatctcattctgactttgatccaatcgcttcttatctagaaacccgacccgaaaagccatgagagtccatccaattcttaacaacaacacattgatccaccaccaccaccatcatcaccataacccgacccgagaacccggaaagaatctccgtcgcttacctcacatcttcaaccgcgttctcgagcttccgctaaggtccgaagcagacgtctccgtggaagagaaacccgattgcttcagattcgtggcggagacggacggtcttcgcggcggcggaggggagatgacggcgtatatggtggagatccatccgggtattaccaagatcgtcgttaggacaaatgggttgtctttgggtttgtcgttggatgagttggagcttgatgtctggcgttttaggcttccggagacgacgaggcctgagcttgttaccgtggcttgtgttgatggggctttggttgttacggttcctaagatggtttcagaggaagatgatgatggttttggacaaggtgtgggaactgggaggctagttcttgttttgtaaaatcgagccatgtctctgctttggattaagacagcttatgtaattatatctatgaacgttttcatttgaatctttgtg

SEQ ID NO: 14920 - protein, 163 aa, Glycine max
MRVHPILNNNTLIHHHHHHHHNPTREPGKNLRRLPHIFNRVLELPLRSEADVSVEEKPDCFRFVAETDGLRGGGGEMTAYMVEIHPGITKIVVRTNGLSLGLSLDELELDVWRFRLPETTRPELVTVACVDGALVVTVPKMVSEEDDDGFGQGVGTGRLVLVL

SEQ ID NO: 14921 - protein, 87 aa, Glycine max
MTAYMVEIHPGITKIVVRTNGLSLGLSLDELELDVWRFRLPETTRPELVTVACVDGALVVTVPKMVSEEDDDGFGQGVGTGRLVLVL

SEQ ID NO: 14922 - protein, 83 aa, Glycine max
MVEIHPGITKIVVRTNGLSLGLSLDELELDVWRFRLPETTRPELVTVACVDGALVVTVPKMVSEEDDDGFGQGVGTGRLVLVL

SEQ ID NO: 14923 - DNA, 899 bp, Glycine max
aaaagatcagagcaaaacaggcagcgaaaagtacagcagacagggaaaaaagaagagatagctttgcacgggattcgccggcgccgccgcggagcagcacaagcacaggcagcagccagcagcagcagcgagccccggcgagcgagcgaggatgcactccttcgggcaccgcgcgaacgcggtggcgacgttcgcgctgacgatactcgccgccatgtgcttcgccgcctccttctccgacagcttcaactcccccacccccgccgcctccgtcaagatcctcaacatcaactggttccagaaggaggccaacgccaacgacgaggttagcatgacgctgaacatctccgccgacctttcgtcgctcttcacgtggaacacgaaacaggtgtttgttttcgtggcagctgagtatgagactccacaaaatgccctgaatcaagtgtccctttgggatggaatcataccggcgaaggagcacgccaagttcttgatccataccacaaacaagtacagatttatcgaccaggggagcaacctgaagggcagggacttcaacctgacgatgcactggcacatcatgcccaagacgggcaagatgttcgcggacaagatcgtcatgacggggtaccagctccccgagcagtacagataggccgccgccatctctgaacaagagctgctagccctatctatatatggtccgctgtgctgtgcaaacgcaggaagggtttagtggcagtggcagtggttgcgttgctggcgccgggccttttttgctctaaatcttggcgggacaggacatgtaaacttgctcatgagcttgtatgttggccgaatatgcgcgagacgaaaccgtaatgcaaaaaaaaaaaaaaaaaagcttatcgataccgtcg

SEQ ID NO: 14924 - protein, 167 aa, Glycine max
MHSFGHRANAVATFALTILAAMCFAASFSDSFNSPTPAASVKILNINWFQKEANANDEVSMTLNISADLSSLFTWNTKQVFVFVAAEYETPQNALNQVSLWDGIIPAKEHAKFLIHTTNKYRFIDQGSNLKGRDFNLTMHWHIMPKTGKMFADKIVMTGYQLPEQYR

SEQ ID NO: 14925 - protein, 146 aa, Glycine max
MCFAASFSDSFNSPTPAASVKILNINWFQKEANANDEVSMTLNISADLSSLFTWNTKQVFVFVAAEYETPQNALNQVSLWDGIIPAKEHAKFLIHTTNKYRFIDQGSNLKGRDFNLTMHWHIMPKTGKMFADKIVMTGYQLPEQYR

SEQ ID NO: 14926 - protein, 109 aa, Glycine max
KRSEQNRQRKVQQTGKKEEIALHGIRRRRRGAAQAQAAASSSSEPRRASEDALLRAPRERGGDVRADDTRRHVLRRLLLRQLQLPHPRRLRQDPQHQLVPEGGQRQRRG

SEQ ID NO: 14927 - DNA, 633 bp, Glycine max
actgcacactactaacactctccactctcccacgccacgccgactagcttcctccgttctcctcctttgcttgcccggacctcggcgaggcgtcggcgagagagctcgacctcaagctcccttccgctgctgcaatggcggcccctctggtgctcatcctcttggttgccatgttcaccggctcagatgcgatgtactgcgtgtgcaagtcggacgcgaacccggtggcgatgcagaaggccatcgactacgcgtgcggcaagggcgccgactgcacccagatcacctccagcgggccctgcttccagccctcctccgtcgtcgcccactgctcctacgcctgcaacagctactaccagaagaacgccggcatgggcgccacctgcgacttcatgggcgtcgccaccctcaccggcgccgaccccagcgccggatcctgcaagtaccccgccagcgcaagcggcgtaggcaccggagcaggcaccggcggcatgggaaccggcggcacagggacaggtaccggcggcatgggaaccggtacaggaaccagcaccggagcgggcacgggcgtcggcaccggcaccagcaccggcggcatggggagcatgaccccgccgggcgcgaccagcaccg

SEQ ID NO: 14928 - protein, 210 aa, Glycine max
LHTTNTLHSPTPRRLASSVLLLCLPGPRRGVGERARPQAPFRCCNGGPSGAHPLGCHVHRLRCDVLRVQVGREPGGDAEGHRLRVRQGRRLHPDHLQRALLPALLRRRPLLLRLQQLLPEERRHGRHLRLHGRRHPHRRRPQRRILQVPRQRKRRRHRSRHRRHGNRRHRDRYRRHGNRYRNQHRSGHGRRHRHQHRRHGEHDPAGRDQH

SEQ ID NO: 14929 - protein, 166 aa, Glycine max
MAAPLVLILLVAMFTGSDAMYCVCKSDANPVAMQKAIDYACGKGADCTQITSSGPCFQPSSVVAHCSYACNSYYQKNAGMGATCDFMGVATLTGADPSAGSCKYPASASGVGTGAGTGGMGTGGTGTGTGGMGTGTGTSTGAGTGVGTGTSTGGMGSMTPPGATST

SEQ ID NO: 14930 - protein, 154 aa, Glycine max
MFTGSDAMYCVCKSDANPVAMQKAIDYACGKGADCTQITSSGPCFQPSSVVAHCSYACNSYYQKNAGMGATCDFMGVATLTGADPSAGSCKYPASASGVGTGAGTGGMGTGGTGTGTGGMGTGTGTSTGAGTGVGTGTSTGGMGSMTPPGATST

SEQ ID NO: 14931 - DNA, 1123 bp, Glycine max
atcgaacggcctgggcttctctgcgcctacacagccctccctcctacgccgtcttctgcttcgtccagcataacccccaaaaccacctcacccgagagaacaggcggcggcggcggcggcggcatcgggcaagatgatcaagaggcgctacttcaggcaagaccacggcgacaatagcgcctcctcgtcctcctcctcgtcgggttcagattcggaccgcgaccccgcggaagaagaggtctcggaggaggaagtagaagaggatcaagaacaagtaaaagaagaagaagatgatgatgaagaagcggaggtggagtcgggggaagaacaggaaacggaagtagatgagcaggcggaagatgagggttcaggataccaaagtgaggatagctctggacatcatgttgatagtccttgtgcagatgagaacagcagtctggtgtatgaacaataccaagcaatcagtttgcctgttaagaaagcatcaagtggtgatgctgattctgccaaaggtgctgttaacaaggatgacgctgttgaggtcgatttcagtaactacattctgaagtgcaaatctgtgtataagtgcaagctttgtcccagaatcatgtgcttaagtgaggagatggtcagggtacatcttgaatcaaagatggtgctcaacagtgatggtgagctggaggaggaggcagagacacatgctgaacgacatgcccgaactatagctcttgctcagcaagtacaaaagcccaagaaggattcaggcaggcagcgacaaaatcggagaagacagaagaggtcgcagaatcgtctcaaggacaaagaccagagacacaactctggaaaggaaggtgcaaggccgaacaatggaactgctgataagaaaataccgaatattgaaactgctgctaagaaaatgccgaatcttgaaactgctgctaagaaaaggcgcaagactgaaaaataagtgggtgctgcagaaatatttcttgcgtgttatttcttcctatattgttgtaatttttaggagctttctgcggttttactgcttctgttttgccttcctttttgatccaagtgtagctgatgaaagctgagagattaaattgaaaggaaatacgac

SEQ ID NO: 14932 - protein, 277 aa, Glycine max
MIKRRYFRQDHGDNSASSSSSSSGSDSDRDPAEEEVSEEEVEEDQEQVKEEEDDDEEAEVESGEEQETEVDEQAEDEGSGYQSEDSSGHHVDSPCADENSSLVYEQYQAISLPVKKASSGDADSAKGAVNKDDAVEVDFSNYILKCKSVYKCKLCPRIMCLSEEMVRVHLESKMVLNSDGELEEEAETHAERHARTIALAQQVQKPKKDSGRQRQNRRRQKRSQNRLKDKDQRHNSGKEGARPNNGTADKKIPNIETAAKKMPNLETAAKKRRKTEK

SEQ ID NO: 14933 - DNA, 713 bp, Glycine max
acatcagttttcaattaaagatactgttacactcataaaaaaagatggcaaacttgagtacactcgttggttgcattgccatcatcttcttcactgtcgttgcacctgcctcctcagccactcattctgtcgaatggtcgcttgggaaggactatagctccttggctactggaaaaccttatgccattggcgatacaatcgtgttcaactacggtgcgggtcacacggtggacgaagtgagtgaaagtgactacaaaagttgcacattggggaactcaatttcttcggacagtagcggaacaacaagcatagctctaaagacagctggttctcactacttcatttgcgctatccccggccactgtgccggcggcatgaagctctctgtctacgtaggtgcagaagcctcttcagacggtggcggtgacagtggtgacggtaccacccccaaaactacaccttctccaactgtagagggcaggaaggctgctccttccgcttctgccactgctatgttgaagccgttcaaagctttggttttgacttgtgtagctgcattattatatgctttggctctttcttagttgtttttaatttctcgttgatttggtttggctcgtttgaaaatccaggctagaggcagtgctatgagccctattattattatatgcttcttgttgtgattaattattctatgatattttcctttgttt

SEQ ID NO: 14934 - protein, 179 aa, Glycine max
MANLSTLVGCIAIIFFTVVAPASSATHSVEWSLGKDYSSLATGKPYAIGDTIVFNYGAGHTVDEVSESDYKSCTLGNSISSDSSGTTSIALKTAGSHYFICAIPGHCAGGMKLSVYVGAEASSDGGGDSGDGTTPKTTPSPTVEGRKAAPSASATAMLKPFKALVLTCVAALLYALALS

SEQ ID NO: 14935 - DNA, 647 bp, Glycine max
aactactaggtttatagaatctcaacgccgagctcccccctttgtcgacgacgtgaggggactaattacacttctgcgttttcatcttaggctttgtaccaataaaaggggttagtttttatcactgcgatggtagataaagctcaagtcatcagcctctgtcgctccctgcttcgagcggggcgtcagtaccctgactacaacatcagggagtacgctaagcgaaggaccttggatgggttccgcatgaacaagagtctcgccgacccgtccaaggtggaggaggcttatgctgaaggtaagaagcagctggaggttgtggagagggtggtcaaggtttacttggcgtatcctcccaagaccaagaacatcatggaactcaagcttcagtagtggatatttatgtttgggcttttttcaatacccttaaaaagctatttgttattgttattggtcatttttcttagttcttttccaactttgacacattgtgtgattctcatgtaatatttgtgtcttgatggcttcagacctttattgagtgaagagaggatcagagaataatcttgtattagagctgagataaagagtctttgtgttgattattattcttaataataaatctcacatgattctgcagttgttgc

SEQ ID NO: 14936 - protein, 87 aa, Glycine max
MVDKAQVISLCRSLLRAGRQYPDYNIREYAKRRTLDGFRMNKSLADPSKVEEAYAEGKKQLEVVERVVKVYLAYPPKTKNIMELKLQ

SEQ ID NO: 14937 - protein, 48 aa, Glycine max
MNKSLADPSKVEEAYAEGKKQLEVVERVVKVYLAYPPKTKNIMELKLQ

SEQ ID NO: 14938 - protein, 46 aa, Glycine max
MLKVRSSWRLWRGWSRFTWRILPRPRTSWNSSFSSGYLCLGFFQYP

SEQ ID NO: 14939 - DNA, 1229 bp, Glycine max
attaggcagagaagagaaaaatgggtaaggatttatccaaacgtgtcctcacttttctgatattgatctcgttactggcggtggcaatgaaccttctgtccacggtagaggcacagaacaagaagaagccgaggagagatgttcctctagtgaaaggtctctcatggagcttttaccagaaagcatgtccaaaagtggaaagcatcatcaggaaagagctcaagaaagtcttcaagagagacattggtttagccgcagccatccttcgaatacatttccatgactgcttcgttcagggatgtgaagcatcagtgctgctagatggatcagcgagtggaccaggagagcaatcatcgatcccgaatctgacactccgtcaagccgcctttgtcgtcatcaataaccttcgtgcactcgtccacaagcagtgtggtcaagtcgtctcttgctccgacatcctcgctctcgccgcccgtgactccgtcgtcctttcaggagggccagactatgctgtaccacttggccgacgcgactcactagcattcgcgagccagaacacaacgttaaacaacttgccgccaccattcgccaacgcgagccaactcatcgccgacttcgccaatagaaacctcaacatcaccgacttagttgcactctccggtggtcacaccatcggaatcgcgcattgcccgtctttcacagaccggctctacccgaaccaagacccaacaatgaacaagtccttcgcgaacaacctcaaacgcacttgccccaccgctaactcgagcaacacgcaagtgaatgacataaggagccctgacgtgttcgacaataagtactacgttgatctcatgaaccgacaagggctgttcacatcagaccaggacctgttcacggacaagaggacacgtggtatcgtggagagctttgcgatcgaccagaagctattttttgatcattttgtggtggggatgatcaagatgggccagatgagtgtcttgacggggtcacaaggagagattcgtgcaaactgttccgccagaaacactgaaagtttcatgtctgttttggaagaaggcatactcgaggaggctctttccatgatgtagatgaaaccatataaaatatcgcctcttattttcctttgactttgttttttttagttgacgcacttgtggtttgtggaatgctttaagactatctgataaataagagtgttgttttatctt

SEQ ID NO: 14940 - protein, 362 aa, Glycine max
MGKDLSKRVLTFLILISLLAVAMNLLSTVEAQNKKKPRRDVPLVKGLSWSFYQKACPKVESIIRKELKKVFKRDIGLAAAILRIHFHDCFVQGCEASVLLDGSASGPGEQSSIPNLTLRQAAFVVINNLRALVHKQCGQVVSCSDILALAARDSVVLSGGPDYAVPLGRRDSLAFASQNTTLNNLPPPFANASQLIADFANRNLNITDLVALSGGHTIGIAHCPSFTDRLYPNQDPTMNKSFANNLKRTCPTANSSNTQVNDIRSPDVFDNKYYVDLMNRQGLFTSDQDLFTDKRTRGIVESFAIDQKLFFDHFVVGMIKMGQMSVLTGSQGEIRANCSARNTESFMSVLEEGILEEALSMM

SEQ ID NO: 14941 - protein, 340 aa, Glycine max
MNLLSTVEAQNKKKPRRDVPLVKGLSWSFYQKACPKVESIIRKELKKVFKRDIGLAAAILRIHFHDCFVQGCEASVLLDGSASGPGEQSSIPNLTLRQAAFVVINNLRALVHKQCGQVVSCSDILALAARDSVVLSGGPDYAVPLGRRDSLAFASQNTTLNNLPPPFANASQLIADFANRNLNITDLVALSGGHTIGIAHCPSFTDRLYPNQDPTMNKSFANNLKRTCPTANSSNTQVNDIRSPDVFDNKYYVDLMNRQGLFTSDQDLFTDKRTRGIVESFAIDQKLFFDHFVVGMIKMGQMSVLTGSQGEIRANCSARNTESFMSVLEEGILEEALSMM

SEQ ID NO: 14942 - DNA, 991 bp, Glycine max
atcctctcgattgagtaaaccctaattttcccccaaaccgcagccatgaacctcccgtcctccacggcgacctcaacttcggagtcgcctgatacggcggcgggggcgatttccccggagacgtgcggcggttgcaaaagccaagactcctgggtcatacactcggctcgtctccgcggcatcctccgcttctactgcacgcactgcctcctccgcaaccacccggcgtcgttttgccccacctgcttcgccttctacgactcctccccgccgcaccagtcccgccgcgtctcctgcaacgattgcaactccgtcactcacatccactgcgcgggagacgccaagtcccctccttaccgctgtcctccgtgccgcgaccccgacggcttctccttcttccgccccatcgtcgacgaaaacggcgcccggtgcatggataaggccctctcggaggccttcctgtgcgccgcgaagatcgcggcctcgtcgatgagcaaggccgttactttcttcagaagcgaagctgagcggaaagggaaagatgccgccgtggcgaagaagagagcgcgggaggctctcgaggacgtgctcaagctcgacgagaaggctaagttggccgtttcgaagccctccgagaatagagatcagaaaccgaaacagagtcctgcttcgaatggtggtttgaaacagattgagagctctgcggccaccgcccaagtcaagaaacagagttcgtctgtagtgcaagttaagcaagagaagtgattgcttttgaatggttatcagtgaataacttgatgtatcttttgtcttgtttgtgaaaaaaaaggttcaagcttggcatattatgtttcgggttttagtgtagatttgtgtaagtggtctccttgttttttcagtttctttttgggtttgtttgctatgtgtaggagtatgtggaacagtgtgaaagtgttagatttctaattttaattgcttcatcttgtgtctc

SEQ ID NO: 14943 - protein, 239 aa, Glycine max
MNLPSSTATSTSESPDTAAGAISPETCGGCKSQDSWVIHSARLRGILRFYCTHCLLRNHPASFCPTCFAFYDSSPPHQSRRVSCNDCNSVTHIHCAGDAKSPPYRCPPCRDPDGFSFFRPIVDENGARCMDKALSEAFLCAAKIAASSMSKAVTFFRSEAERKGKDAAVAKKRAREALEDVLKLDEKAKLAVSKPSENRDQKPKQSPASNGGLKQIESSAATAQVKKQSSSVVQVKQEK

SEQ ID NO: 14944 - DNA, 1397 bp, Glycine max
atctctctatccctccctccctctctctttctctttctctctttccctgggttggagaacttgcaggtccttaaaattaaaccatggcttcatctttaaaccaacgcatgttattccctcttatgttcgtaattggtatgttctgcttaatggtaactccttctattgcggaacttcccatattcaaacaccctccaaaaaaacaacaatctcttaatatattggtccttggagattggggaagaaaaggaacctacaatcaatctttggtcgccaatcagatgggaattgtgggagagaaactagacatagattttgtgatctccactggtgacaatttttacgaagatggactaaaaggggttgatgatccagcattctaccaatcattcgtcgacatgtacactgccccaagcttgcaaaagacatggtacactgttctgggtaaccatgactacagaggtgatgttggggcacaactaagtccaattctaaaacaaaaagatagcagatggctttgcatgagatcttttattctcgatggagaaattgtggaatttttctttgtggacaccactccatttgtagaagagtacttcacggacccaggagagcatacctatgactgggaaggcgttcttcctcgcctagcttacctttcagaactcttgaaggatgttgatttagctttggctcaatcaaaagcaaaatggaagatggtggtgggtcatcataccatcaacagtgctgggcatcatggtaacaccgaagagcttaaacagctacttgttcccatcttagaggcgaacgatgttgatgcatacataaatggacatgaccactgcttgcagcatataattgacaataatagtggaattcactttataacaagtggaggtggatcaaaggcatggtcgggcgatgtcaagccatggaaactggaagaactgaagttgtattatgatgggcaaggattcatgtctatgcagatcaccaaaagcaaagcagatatcatattttatgatgcctttggcaaagttttgcatacatggagcatatccaaagaccgtaacgtagcagcctggatataataagctaaagtacacacattaccggctctatgttatgaaaatggaggtccctctggctgacaattagggcaacttaaaaatgtactatttgtaacaaagaaaagaagaaaaaagaacgtttagagaaattctaatgtccttgcagtagctgtagtatgcaccctaactcgtgctatagaagtttcagaaacaaaggcatacactactttgtagtatttgtaagtacttctgtaagtgatcattgagccttgaggcttgccctgaccctggtgagcccttgggacccaatcacataaacttttcctt

SEQ ID NO: 14945 - protein, 335 aa, Glycine max
MASSLNQRMLFPLMFVIGMFCLMVTPSIAELPIFKHPPKKQQSLNILVLGDWGRKGTYNQSLVANQMGIVGEKLDIDFVISTGDNFYEDGLKGVDDPAFYQSFVDMYTAPSLQKTWYTVLGNHDYRGDVGAQLSPILKQKDSRWLCMRSFILDGEIVEFFFVDTTPFVEEYFTDPGEHTYDWEGVLPRLAYLSELLKDVDLALAQSKAKWKMVVGHHTINSAGHHGNTEELKQLLVPILEANDVDAYINGHDHCLQHIIDNNSGIHFITSGGGSKAWSGDVKPWKLEELKLYYDGQGFMSMQITKSKADIIFYDAFGKVLHTWSISKDRNVAAWI

SEQ ID NO: 14946 - protein, 327 aa, Glycine max
MLFPLMFVIGMFCLMVTPSIAELPIFKHPPKKQQSLNILVLGDWGRKGTYNQSLVANQMGIVGEKLDIDFVISTGDNFYEDGLKGVDDPAFYQSFVDMYTAPSLQKTWYTVLGNHDYRGDVGAQLSPILKQKDSRWLCMRSFILDGEIVEFFFVDTTPFVEEYFTDPGEHTYDWEGVLPRLAYLSELLKDVDLALAQSKAKWKMVVGHHTINSAGHHGNTEELKQLLVPILEANDVDAYINGHDHCLQHIIDNNSGIHFITSGGGSKAWSGDVKPWKLEELKLYYDGQGFMSMQITKSKADIIFYDAFGKVLHTWSISKDRNVAAWI

SEQ ID NO: 14947 - protein, 322 aa, Glycine max
MFVIGMFCLMVTPSIAELPIFKHPPKKQQSLNILVLGDWGRKGTYNQSLVANQMGIVGEKLDIDFVISTGDNFYEDGLKGVDDPAFYQSFVDMYTAPSLQKTWYTVLGNHDYRGDVGAQLSPILKQKDSRWLCMRSFILDGEIVEFFFVDTTPFVEEYFTDPGEHTYDWEGVLPRLAYLSELLKDVDLALAQSKAKWKMVVGHHTINSAGHHGNTEELKQLLVPILEANDVDAYINGHDHCLQHIIDNNSGIHFITSGGGSKAWSGDVKPWKLEELKLYYDGQGFMSMQITKSKADIIFYDAFGKVLHTWSISKDRNVAAWI

SEQ ID NO: 14948 - DNA, 751 bp, Glycine max
atcaaaaaccagttcatcgtcagtatccaccaaccataaataatcaggtagcagcaccagcacggatccgcggcagcaccagcgatggcagagttctcgtggctcacggcgctagggttcgtcttcctgaccttcaactccggcatggccgtctaccgctccaacggcgacgcggggtccgtcatcttcgtcgccatctcctacctcgacctcgtggccctcttcgcctgcctgcgcctctacgagcgcctcgaccgccactcccctcgccgggagcggatcaaggccgccgtctgggcgctcaccacgctgctcaccgtcatgttcacctacaaagtcgccgaggtcatgccgctcgccgtcaagctcctcgtctgggcgatggccgccgccaccaccttcggcggcttctacgtcttcttcgtccacgacgacaagcagtaccagcagctgcaggacgcgtcggcggccgccgagcgcggggacgtcgccaactagtagctgtactagacggcggcggggcgcttgccgccgcgaggtacgtgcttcggtgctaacagcggcgtggggcgttagatctgggggcaaactactaggtcgttcctgtatcttggctgttcctcttcgctttttttgccggcttgctgtcacatgctctgctttggcttgccggtgtgctcggattagcagatctggaatttggccaccggcagaggagatctgtccagtttgattatatgcttgttgatct

SEQ ID NO: 14949 - protein, 184 aa, Glycine max
QKPVHRQYPPTINNQVAAPARIRGSTSDGRVLVAHGARVRLPDLQLRHGRLPLQRRRGVRHLRRHLLPRPRGPLRLPAPLRAPRPPLPSPGADQGRRLGAHHAAHRHVHLQSRRGHAARRQAPRLGDGRRHHLRRLLRLLRPRRQAVPAAAGRVGGRRARGRRQLVAVLDGGGALAAARYVLRC

SEQ ID NO: 14950 - protein, 137 aa, Glycine max
MAEFSWLTALGFVFLTFNSGMAVYRSNGDAGSVIFVAISYLDLVALFACLRLYERLDRHSPRRERIKAAVWALTTLLTVMFTYKVAEVMPLAVKLLVWAMAAATTFGGFYVFFVHDDKQYQQLQDASAAAERGDVAN

SEQ ID NO: 14951 - protein, 117 aa, Glycine max
MAVYRSNGDAGSVIFVAISYLDLVALFACLRLYERLDRHSPRRERIKAAVWALTTLLTVMFTYKVAEVMPLAVKLLVWAMAAATTFGGFYVFFVHDDKQYQQLQDASAAAERGDVAN

SEQ ID NO: 14952 - DNA, 941 bp, Glycine max
catcccgtcatccaccacagcttagcagcagcaacaaccagtgtctaagacactctccatcaacaaactctagctgatcactcctagctaagctttgcatagcaagcaatggggtactccaaaaccctagcggctggcctgtttgccacgctgctcctagctccagtcgtcctggctaccgaccctgaccctctccaggacttctgtgtcgccgacctcgacggcaaggcggtctcggtgaacgggcatccgtgcaagcccatgtcgaaggccggcgatgacttcctcttctcgtccaagctggccaaggctggcaacacgtcgaccccgaacggctcggccgtgacggagcttgacgtggctgagtggcctggaacgaacacgttgggcgtgtcgatgaaccgcgtggacttcgctccaggaggcaccaacccgccgcacatccacccccgtgccaccgagatcggcatcgtgatgaaaggtgagctcctcgtgggaatcctcggcagcctcgactccgggaacaagctttactcgagggtggtgcgcgctggagagacgttcctcatcccacggggcctcatgcacttgcagttcaacgtcggtaagaccgaggcatccatggtagtctccttcaacagccagaaccccggtatcgtcttcgtgccattgacactcttcagctccaacccacccatcccgacgccggtcctcaccaaggcgcttcgggtggaggccggggtcgtggaacttctcaagtccaagttcgccgatgggttttaattatgggagccttccctgaaatgagcaatatgtaattcaatatatgcatgctagaaaattttaataattctcagcagaagacttgtattcaagtttcaggttaatctcgcatgcagttgtaataagattggagaagttagcctcctggtttagcctcc

SEQ ID NO: 14953 - protein, 224 aa, Glycine max
MGYSKTLAAGLFATLLLAPVVLATDPDPLQDFCVADLDGKAVSVNGHPCKPMSKAGDDFLFSSKLAKAGNTSTPNGSAVTELDVAEWPGTNTLGVSMNRVDFAPGGTNPPHIHPRATEIGIVMKGELLVGILGSLDSGNKLYSRVVRAGETFLIPRGLMHLQFNVGKTEASMVVSFNSQNPGIVFVPLTLFSSNPPIPTPVLTKALRVEAGVVELLKSKFADGF

SEQ ID NO: 14954 - protein, 173 aa, Glycine max
MSKAGDDFLFSSKLAKAGNTSTPNGSAVTELDVAEWPGTNTLGVSMNRVDFAPGGTNPPHIHPRATEIGIVMKGELLVGILGSLDSGNKLYSRVVRAGETFLIPRGLMHLQFNVGKTEASMVVSFNSQNPGIVFVPLTLFSSNPPIPTPVLTKALRVEAGVVELLKSKFADGF

SEQ ID NO: 14955 - protein, 128 aa, Glycine max
MNRVDFAPGGTNPPHIHPRATEIGIVMKGELLVGILGSLDSGNKLYSRVVRAGETFLIPRGLMHLQFNVGKTEASMVVSFNSQNPGIVFVPLTLFSSNPPIPTPVLTKALRVEAGVVELLKSKFADGF

SEQ ID NO: 14956 - DNA, 1015 bp, Glycine max
ctcacgcacagtcctgcctaagctaagctaaacagcagcgagcaatggcgtccacctcctgcttcctccaccagtccaccgcgcgcctggccgcctcggcgcgccctgcgcccgccgtcgggcgcacccagcttttcgtctgcaaggcgcagaagaatgacgaggctgcatctgacgctgccgtcgtcaccagccggcgcgccgcgctgtccctcctcgccggtgccgccgccatcgccgtcaaggtctcccccgccgccgccgcctacggagaagcagccaacgtgttcggcaaggcgaagaagaacacggacttcgtggcgtacagcggcgaggggttcaaactgatgatcccggccaagtggaaccccagcaaggagcgtgagttccctgggcaggtgctccgctacgaggacaacttcgacgccaccagcaacctctccgttataatcaaccccactaccaagaagaccatcaccgactacggttcccctgaggagttcctctcccaggtcggcttcctcctcggccagcagtcctacggtggcaagaccgactccgagggtgggttcgagtcagacgctgtggcgacggcgaacgtgctggagagctcggcgccggtggtggacggtaagcagtactacagcataacggtgctcacgaggaccgcggacggagacgagggagggaagcaccagctcatcaccgccaccgtcgccgacggcaagctctacgtctgcaaggcgcaagccggagacaagaggtggttcaagggcgccaagaagttcgtcgagaacgccgcaggatccttcagcgtcgcataaatatacacgaccgaccggcgagtttaatggaaatttcctcagggatgcaccatgtagagaccgatcgagggcatgcatgtgtgtttctttgatttgtacatgaggatggatgaactaagaggtcgatttccctcaaggattcatgtgtgcacaatgattaagaaatcttagtaataatgtttcatttttgc

SEQ ID NO: 14957 - protein, 259 aa, Glycine max
MASTSCFLHQSTARLAASARPAPAVGRTQLFVCKAQKNDEAASDAAVVTSRRAALSLLAGAAAIAVKVSPAAAAYGEAANVFGKAKKNTDFVAYSGEGFKLMIPAKWNPSKEREFPGQVLRYEDNFDATSNLSVIINPTTKKTITDYGSPEEFLSQVGFLLGQQSYGGKTDSEGGFESDAVATANVLESSAPVVDGKQYYSITVLTRTADGDEGGKHQLITATVADGKLYVCKAQAGDKRWFKGAKKFVENAAGSFSVA

SEQ ID NO: 14958 - protein, 158 aa, Glycine max
MIPAKWNPSKEREFPGQVLRYEDNFDATSNLSVIINPTTKKTITDYGSPEEFLSQVGFLLGQQSYGGKTDSEGGFESDAVATANVLESSAPVVDGKQYYSITVLTRTADGDEGGKHQLITATVADGKLYVCKAQAGDKRWFKGAKKFVENAAGSFSVA

SEQ ID NO: 14959 - DNA, 1213 bp, Glycine max
acccaatacccacgagaacctctagctaccgtagcttagctgagcttcctagctgtagccatggccaagtatttccagagtgctcctgttagcaatgaagcattgaagcacaaggagattctgttggacggcctgtacatgcaccaggaccttgacggatcaccaaatcagaaccagaaaactatagtgaatcctaacctccctctgcagtttggctgcacagtggctaatgactggaccatatatgatggccttggccccgataagaagcttgttgcgcgtgcacaagggccacatatgggggcaggagtagccaaaggaagctggttcatatgtttcaacatggtgttcgtcgatgacaggtttgcgggttccagccttaaggtgctcggacattttgaagagccggtagaaggtgagtgggcaatccttggcgggacaggagagtttgcctatgcacaaggtgtggtcaccttcaagaaactccaggacggaagcactagggtcagacagcttcagatacgtgccatctgcctcagctttccatcgtcactttcaatgcctacgaagatggggccatggggtgaaaatggaggctccattcaagacatcaccacaggaaccccgatgcgcctgcaaagtgtgacactcagcagcgagagcagctggattgtctctcttgcatttacttatattgacaaacttggaaagaggcgcaacgaaggcccctggggtcctgacaaagggaacagtcaaaccatcgagttcggacctaaagaatatgtgacggaaatatcagggacaattgacaatgtcatatcgtcacttgttatcacgacaaacatcaaaaagtatggaccgtttgggcatgagaagggcaaccgtttcagcgccgccgtgccagaaaacacatgtgttgtgggattctttgccaggaccgggaatgctcttgatgccattggcgtttaccacggacccatagtggtttgaactggatttaatgctgctttgctttagtttatggcaatctcatgcgagttcattttaagggaaagtgtgtttgttccacatttgttttccagcaataacatggcaagggtcatgcttacgtctgtgatccatgtctctctagtgcaagagtactttctttagtttgtcagctgctatattctagctatgatttaataaagtgatgcaaggttgttttctagtg

SEQ ID NO: 14960 - protein, 309 aa, Glycine max
MAKYFQSAPVSNEALKHKEILLDGLYMHQDLDGSPNQNQKTIVNPNLPLQFGCTVANDWTIYDGLGPDKKLVARAQGPHMGAGVAKGSWFICFNMVFVDDRFAGSSLKVLGHFEEPVEGEWAILGGTGEFAYAQGVVTFKKLQDGSTRVRQLQIRAICLSFPSSLSMPTKMGPWGENGGSIQDITTGTPMRLQSVTLSSESSWIVSLAFTYIDKLGKRRNEGPWGPDKGNSQTIEFGPKEYVTEISGTIDNVISSLVITTNIKKYGPFGHEKGNRFSAAVPENTCVVGFFARTGNALDAIGVYHGPIVV

SEQ ID NO: 14961 - protein, 283 aa, Glycine max
MHQDLDGSPNQNQKTIVNPNLPLQFGCTVANDWTIYDGLGPDKKLVARAQGPHMGAGVAKGSWFICFNMVFVDDRFAGSSLKVLGHFEEPVEGEWAILGGTGEFAYAQGVVTFKKLQDGSTRVRQLQIRAICLSFPSSLSMPTKMGPWGENGGSIQDITTGTPMRLQSVTLSSESSWIVSLAFTYIDKLGKRRNEGPWGPDKGNSQTIEFGPKEYVTEISGTIDNVISSLVITTNIKKYGPFGHEKGNRFSAAVPENTCVVGFFARTGNALDAIGVYHGPIVV

SEQ ID NO: 14962 - protein, 230 aa, Glycine max
MGAGVAKGSWFICFNMVFVDDRFAGSSLKVLGHFEEPVEGEWAILGGTGEFAYAQGVVTFKKLQDGSTRVRQLQIRAICLSFPSSLSMPTKMGPWGENGGSIQDITTGTPMRLQSVTLSSESSWIVSLAFTYIDKLGKRRNEGPWGPDKGNSQTIEFGPKEYVTEISGTIDNVISSLVITTNIKKYGPFGHEKGNRFSAAVPENTCVVGFFARTGNALDAIGVYHGPIVV

SEQ ID NO: 14963 - DNA, 805 bp, Glycine max
gctagcttctcaagagggataagagagaaacacagagcaagaagataagagagaagcaaagcttgagatggcgcaaaccatggcgtccatgaccggcctgtcgcagggcgtgcgtctcccaggcccggccggcaggcgcgccagcaggttcaccgtgagggcgtcgtcggcggaggccgaggccgccggccgccgcgcggtccttggcctcatggccagcggagtcgtcgggagcgcgttcgctcaggtggtgcacgccggcaccgtcgcggccatcaaggttggccccccgccgccgctctccggtggactccccggaacggacaactcggacgaggcaagggacttcgacctgcccctgaagaaccggttctacctgcagccgctgccaccggcggaggcggcggtgcgggccaaggagtcggcccaggacatcctcaacctcaagccgctcatcgacaagaagcaatggccgtacgtcatgaacgacctccgcctcagggcctcctacctgcgctacgacctcaagaccgtcatctcctccaagaccaccaaggaggagaagaaggacctcaaggacctcaccggcaagctcttcgccaccctcgacgggcttgaccatgcagccaagatcaagagccccaccgaggccgagaagtactacggcgagaccaagactgttctcggcgatgtcctcgccaagctaggctagatggatcggcataatggccgtgttgctttcaggccttttatgtttgttcatatttggaagccggcaatgtaacttccctgttgataatatgtc

SEQ ID NO: 14964 - protein, 214 aa, Glycine max
MAQTMASMTGLSQGVRLPGPAGRRASRFTVRASSAEAEAAGRRAVLGLMASGVVGSAFAQVVHAGTVAAIKVGPPPPLSGGLPGTDNSDEARDFDLPLKNRFYLQPLPPAEAAVRAKESAQDILNLKPLIDKKQWPYVMNDLRLRASYLRYDLKTVISSKTTKEEKKDLKDLTGKLFATLDGLDHAAKIKSPTEAEKYYGETKTVLGDVLAKLG

SEQ ID NO: 14965 - protein, 210 aa, Glycine max
MASMTGLSQGVRLPGPAGRRASRFTVRASSAEAEAAGRRAVLGLMASGVVGSAFAQVVHAGTVAAIKVGPPPPLSGGLPGTDNSDEARDFDLPLKNRFYLQPLPPAEAAVRAKESAQDILNLKPLIDKKQWPYVMNDLRLRASYLRYDLKTVISSKTTKEEKKDLKDLTGKLFATLDGLDHAAKIKSPTEAEKYYGETKTVLGDVLAKLG

SEQ ID NO: 14966 - protein, 207 aa, Glycine max
MTGLSQGVRLPGPAGRRASRFTVRASSAEAEAAGRRAVLGLMASGVVGSAFAQVVHAGTVAAIKVGPPPPLSGGLPGTDNSDEARDFDLPLKNRFYLQPLPPAEAAVRAKESAQDILNLKPLIDKKQWPYVMNDLRLRASYLRYDLKTVISSKTTKEEKKDLKDLTGKLFATLDGLDHAAKIKSPTEAEKYYGETKTVLGDVLAKLG

SEQ ID NO: 14967 - DNA, 796 bp, Glycine max
atcaagctagcagcacggcattaaactaatttgacagcgatcccgatccgtcatcacatctcacacgagacagtcgttcgatccgtccgtggagcagccatggcgcagctgatggacaaggccaaggggttcgtggccgagaagatatcgggggtgcagaagccggaggcggacctgtcggacatgtcggtgcagcacgttggccgcgacggcgccaccctgtccggccgcctcgacgtgcgcaacccctactcgcacaccatccccatctgcgagatcagctactccctcaagagcgccggccgcgacgtggcctccgggaccatgccggacccggggtcgctggtggccagcgacaccaccagcctcgacataccggtgaaggtgccgtacgacttcctgatgagcctggtgaaggacgccggcaaggactgggacctcgactacgagatgcgcgtcggcctcaccgtcgacctccccatcgtcggcaacttcacgctgccgctcaccaaggccggcgagctcaagctccccacgctctccgacctgttctaaacttaccgccgcacccagctaagtaggttcgaccgtgccgtactagctgctgcgctctccatcgcctgtacgggtgatgggtagtactgggctgggcgagcgggacgatcgatcgctgcctagctctgtttttacttcggatcgcggtgtgggtgtgcacgacgtaataatgatgtattgcgtgttgtatttctagacttttatacgtgaataaaataaacagacgggtttactgtactcc

SEQ ID NO: 14968 - protein, 151 aa, Glycine max
MAQLMDKAKGFVAEKISGVQKPEADLSDMSVQHVGRDGATLSGRLDVRNPYSHTIPICEISYSLKSAGRDVASGTMPDPGSLVASDTTSLDIPVKVPYDFLMSLVKDAGKDWDLDYEMRVGLTVDLPIVGNFTLPLTKAGELKLPTLSDLF

SEQ ID NO: 14969 - protein, 147 aa, Glycine max
MDKAKGFVAEKISGVQKPEADLSDMSVQHVGRDGATLSGRLDVRNPYSHTIPICEISYSLKSAGRDVASGTMPDPGSLVASDTTSLDIPVKVPYDFLMSLVKDAGKDWDLDYEMRVGLTVDLPIVGNFTLPLTKAGELKLPTLSDLF

SEQ ID NO: 14970 - protein, 123 aa, Glycine max
MSVQHVGRDGATLSGRLDVRNPYSHTIPICEISYSLKSAGRDVASGTMPDPGSLVASDTTSLDIPVKVPYDFLMSLVKDAGKDWDLDYEMRVGLTVDLPIVGNFTLPLTKAGELKLPTLSDLF

SEQ ID NO: 14971 - DNA, 694 bp, Glycine max
aaatcgacccccgtggccgtgggaagcagggcgtcgcctcggtcaaatccggcggcggcggagggggagtcgtgggccgcaaggctgggctggcctgaccggaccgccgcgcgcgtgacccgcccggtgggatccttcgggccggcgccccaggaggatattcttcgcgctgggggtgcttgatttggatgaaaggagcgcgccgtcggcatgggtaccccctcgcagggctcggctgccgtggcggcggcccgggtcgacctctgcgcgctcgacctcatgcccgtcttcgccaaggagatgattgccggtggggtcgccggtgctttctccaagactgccatcgcgccgctcgagcgcctcaagatattgctacagactagaacaaatgagttcaggtctctcggagttctgaaatccttgaataaactgagaaaacatgatggcgtcttgggattttacaagggaaatggtgccagtgtgttaagaattgttccttatgctgcattacattatatttctttacagagggagtacgtagtaattgtgttgcatacttaccccacctgacatattcttttcgttatattttttcgagttcatttttattttttcaccaacatgtatactttacccactaggtggaatgttgtcactggatagtactatttgatgaagaaattgcagatacgtg

SEQ ID NO: 14972 - protein, 119 aa, Glycine max
MGTPSQGSAAVAAARVDLCALDLMPVFAKEMIAGGVAGAFSKTAIAPLERLKILLQTRTNEFRSLGVLKSLNKLRKHDGVLGFYKGNGASVLRIVPYAALHYISLQREYVVIVLHTYPT

SEQ ID NO: 14973 - protein, 96 aa, Glycine max
MPVFAKEMIAGGVAGAFSKTAIAPLERLKILLQTRTNEFRSLGVLKSLNKLRKHDGVLGFYKGNGASVLRIVPYAALHYISLQREYVVIVLHTYPT

SEQ ID NO: 14974 - protein, 89 aa, Glycine max
MIAGGVAGAFSKTAIAPLERLKILLQTRTNEFRSLGVLKSLNKLRKHDGVLGFYKGNGASVLRIVPYAALHYISLQREYVVIVLHTYPT

SEQ ID NO: 14975 - DNA, 702 bp, Glycine max
accattcacgctcattactctctgctttcaaatctcagatcttccgtaagaaaagaaactcatccttgtgaaagttttccagacactgcgatgtcgaaagcaattcttctggttgctctctgctttttaccggctctagccatgtctgctcgtccgaacaagaaccctttcgtcgtcagaggccgtgtctattgcgatacttgcctcgctggttttgaaacttcagcatctactttcatccctggtgcggtggttagattggagtgcaaagacaggagaacaatggagttaacctacaggcacgaggcgagaaccgactcaacaggatcgtacaagatcttggttagcgaagaccatgaggatcagttctgtgataccatgttggttagtagctctcagttacgctgctccaatgtctcacctggtcatgaccgtgcccgtgtgaccctcactcgtttcaacggcattgcttcagacgaacgtttcgctaacaacttgggcttcctaagggatgcagcatcaccaggctgtgcagagatcatgaagcaatatcaagaaactgaagactaaaatgctcaatcagtatgtttttatcagtgttcccccgacatgtgggattaaaattataattgcagcttgtgtttcgtgcattgtatggttttattacttccgaaaaaatcaaaaatatatataatgaatccc

SEQ ID NO: 14976 - protein, 189 aa, Glycine max
TIHAHYSLLSNLRSSVRKETHPCESFPDTAMSKAILLVALCFLPALAMSARPNKNPFVVRGRVYCDTCLAGFETSASTFIPGAVVRLECKDRRTMELTYRHEARTDSTGSYKILVSEDHEDQFCDTMLVSSSQLRCSNVSPGHDRARVTLTRFNGIASDERFANNLGFLRDAASPGCAEIMKQYQETED

SEQ ID NO: 14977 - protein, 159 aa, Glycine max
MSKAILLVALCFLPALAMSARPNKNPFVVRGRVYCDTCLAGFETSASTFIPGAVVRLECKDRRTMELTYRHEARTDSTGSYKILVSEDHEDQFCDTMLVSSSQLRCSNVSPGHDRARVTLTRFNGIASDERFANNLGFLRDAASPGCAEIMKQYQETED

SEQ ID NO: 14978 - protein, 142 aa, Glycine max
MSARPNKNPFVVRGRVYCDTCLAGFETSASTFIPGAVVRLECKDRRTMELTYRHEARTDSTGSYKILVSEDHEDQFCDTMLVSSSQLRCSNVSPGHDRARVTLTRFNGIASDERFANNLGFLRDAASPGCAEIMKQYQETED

SEQ ID NO: 14979 - DNA, 639 bp, Glycine max
acacttaacacaacaataaaactaataataataacgagtttttaacagcagccattaaagggaatttatcaaccttaatccctttggggtccaagagtgtgccacacacacacatttctgcagagaaaaaataacaaaatgtgtcctctgcgattaattctgatattcttgtccgcaaccctcgccggtttcttcgttctcagaaacctcagatctcagcctcagatcgaagaagacgacgctgttgttcctcccaaccccaaaatctctgactcctccgacgcttcctcaaatggaacttccaaggttcgcgctgtggtagagtctggattctggaccttcgtggatatggctagtgggcgttacctttggaggcatttggtctctaattcttccaagagatcgtgatgatgtgattgtatgttgttgtaattgttcggttccatgatctctgtgggcccaaattgggtgattaaacgttgcctctgggattgtaatttttggggtcagtttagatgttatgtatcatatagatgttgttcatagtgttgttgttgttggttttgaatggtgaaaagtgctataactgcaaaaataatgataaaaaaaaaaaaaaaaaagcttatcgataccgtcgac

SEQ ID NO: 14980 - protein, 89 aa, Glycine max
MCPLRLILIFLSATLAGFFVLRNLRSQPQIEEDDAVVPPNPKISDSSDASSNGTSKVRAVVESGFWTFVDMASGRYLWRHLVSNSSKRS

SEQ ID NO: 14981 - DNA, 653 bp, Glycine max
atttaacctggggaacacgtcgccggttactgttcccactcttgtcagtatattggagcgccatttgaaggtgaaggccaagaggaatattgtggacatgcctggaaacggcgacgttccgtttactcacgcgaatattagttcggcccggagagaactcgggtacaagcccaccaccgatttgcaaaccgggttgaagaagttcgtcaagtggtacctttcctattacggctacaatcacggcaaacctgtaaattaattttattttattttgtttccccccccccttttttttttctttttcggaaagggttttttctttttttagtgtggtaggttttaagtcacagattaaaacagacagggaaaaaaaagaagaaagaacctggtcaagaagattagaagaagaagggaaattggggctaaaaggaaggaagaaaagaaaagagaaaagaaaagaagagaaggagaagaatacaattctttacttaggaggccagctaaaacagctgttgttccttcgttgatttcttttcttttttggtattaattggtgtttttttgtattttttttaacattttctttttctgtaaagaaagaaagttccgagttcaatctcgatttatttaattattattgtttactttgtcct

SEQ ID NO: 14982 - protein, 85 aa, Glycine max
FNLGNTSPVTVPTLVSILERHLKVKAKRNIVDMPGNGDVPFTHANISSARRELGYKPTTDLQTGLKKFVKWYLSYYGYNHGKPVN

SEQ ID NO: 14983 - protein, 53 aa, Glycine max
MPGNGDVPFTHANISSARRELGYKPTTDLQTGLKKFVKWYLSYYGYNHGKPVN

SEQ ID NO: 14984 - DNA, 660 bp, Glycine max
actgaaactctccacagaagaagaagataacatggcgacaagcgcatctgctttgctcacacccacaactttctcctctacaatctcccagaaacacccgaactccatctcattccacggcctccgtcctctccgcctcggtggctcctcatctgccttacccaagctatccaccacctccggaagaagatcttcctcctccgccgtcgtgagagccgagctcagcccatccgtcgttattagcctcagcacaggtctctccctcttcctaggccggttcgtcttcttcaacttccagagagagaatgtggctaaacaggtgccggagcagaacgggaagacccacttcgaagcgggagatgatcgtgccaaggagtacgtaagcctcttgaaatcgaacgaccctgttggattcaacatcgtggatgttcttgcttggggttctattggtcacatcgttgcttactatgttttggccacttctagcaatggctacgatccaagcttctttggctgattcattcaaactatatctctctcgtttatgtatatgtttgacttgtatggcaagttacccaatctagtcaccaatctttgtttcttctgcttgtttctgcctctgtgggtcttcctttcgtttgaaacatattatatttcgtg

SEQ ID NO: 14985 - protein, 171 aa, Glycine max
LKLSTEEEDNMATSASALLTPTTFSSTISQKHPNSISFHGLRPLRLGGSSSALPKLSTTSGRRSSSSAVVRAELSPSVVISLSTGLSLFLGRFVFFNFQRENVAKQVPEQNGKTHFEAGDDRAKEYVSLLKSNDPVGFNIVDVLAWGSIGHIVAYYVLATSSNGYDPSFFG

SEQ ID NO: 14986 - protein, 161 aa, Glycine max
MATSASALLTPTTFSSTISQKHPNSISFHGLRPLRLGGSSSALPKLSTTSGRRSSSSAVVRAELSPSVVISLSTGLSLFLGRFVFFNFQRENVAKQVPEQNGKTHFEAGDDRAKEYVSLLKSNDPVGFNIVDVLAWGSIGHIVAYYVLATSSNGYDPSFFG

SEQ ID NO: 14987 - DNA, 787 bp, Glycine max
agacacacgtctatagcacgattcataagtagaaagatatggtttcagagactgaatcaccaccgttgattggacctcgtatctctttctctgacggtggagatttcatctgcacagagctggagaaagaaatcgtcaaagggtcagtgaaagtctccgactttgagttcttgtcggagaatgcgagtccagagaggatgcacaccgccgacgaactcttctctgaaggaaagttgcttcctttatggcaagaaaagcactcagagaagcttaaaaacgttaacttgaagaccaacgaagaagaagagagtcgtaaagtggaagcagcgatgacgagtgacgatagtagtaagaacagagtgtgttggtttatagacgaagacccatctccacgtcctccgaaatgcacagttctttggaaagagcttttgcgtttgaagaaacagaggagctcttcgtcggtgaagtcctctctgtctccgtcatcgtccacgtcatcatctagctcgcttgaggataagagagaagggaagagaggtaagaaaggattagagaggacgagatcgtcgacgagtgtgaggataaggccgatgattcacgtccctgtttgcactcctccttctaaatcctctgtttcattgcctcctctgtttccgtcgcttaggcttaagaagaacagagcagagaaaagcaagctttaatctttttatttgacacagcttatttggttgattagttcggtttctcatgtgatatgtaactctaatgcatgtgattaagcattttt

SEQ ID NO: 14988 - protein, 220 aa, Glycine max
MVSETESPPLIGPRISFSDGGDFICTELEKEIVKGSVKVSDFEFLSENASPERMHTADELFSEGKLLPLWQEKHSEKLKNVNLKTNEEEESRKVEAAMTSDDSSKNRVCWFIDEDPSPRPPKCTVLWKELLRLKKQRSSSSVKSSLSPSSSTSSSSSLEDKREGKRGKKGLERTRSSTSVRIRPMIHVPVCTPPSKSSVSLPPLFPSLRLKKNRAEKSKL

SEQ ID NO: 14989 - protein, 167 aa, Glycine max
MHTADELFSEGKLLPLWQEKHSEKLKNVNLKTNEEEESRKVEAAMTSDDSSKNRVCWFIDEDPSPRPPKCTVLWKELLRLKKQRSSSSVKSSLSPSSSTSSSSSLEDKREGKRGKKGLERTRSSTSVRIRPMIHVPVCTPPSKSSVSLPPLFPSLRLKKNRAEKSKL

SEQ ID NO: 14990 - protein, 123 aa, Glycine max
MTSDDSSKNRVCWFIDEDPSPRPPKCTVLWKELLRLKKQRSSSSVKSSLSPSSSTSSSSSLEDKREGKRGKKGLERTRSSTSVRIRPMIHVPVCTPPSKSSVSLPPLFPSLRLKKNRAEKSKL

SEQ ID NO: 14991 - DNA, 445 bp, Glycine max
gaatcgaaagcgtagaaggatttcactcctcccttacttcatcaattctttcagtttgaatggcgagtgaggatgatgcagtgaagaaggcaatgatagtagatgctcgtgcaagaaacattagtcataatgtgaggtgcacggagtgtgggagtcaatccattgaggattctcaagcagacattgccattttgctcaggaagttaattcgtgatgaaattcaatctggaaagactgacaaggacatctacaaaaagcttgaggacgaatttggagagactgtactctatacgcccaagtttgatatgcagacagcagctttgtggttattaccgctcttaattgcaggttcagctgcaggagtatgggcttacaacaggcataaacaaaagactaatgtccacatcatggctttgaaccttgttagaggtgttccattgacccc

SEQ ID NO: 14992 - protein, 128 aa, Glycine max
MASEDDAVKKAMIVDARARNISHNVRCTECGSQSIEDSQADIAILLRKLIRDEIQSGKTDKDIYKKLEDEFGETVLYTPKFDMQTAALWLLPLLIAGSAAGVWAYNRHKQKTNVHIMALNLVRGVPLT

SEQ ID NO: 14993 - protein, 117 aa, Glycine max
MIVDARARNISHNVRCTECGSQSIEDSQADIAILLRKLIRDEIQSGKTDKDIYKKLEDEFGETVLYTPKFDMQTAALWLLPLLIAGSAAGVWAYNRHKQKTNVHIMALNLVRGVPLT

SEQ ID NO: 14994 - DNA, 700 bp, Glycine max
ctctgcctctgcctctcagtttaccaaaaccctagtttcaaagctttactctccagaaatggctttctgcaaaaatctcggtggtctattgaggcaaggtgcggtttctcagacagggaatgtacccgttcagtctatgctcgggtctctccggtacatgtctaccaagctctttgtcggtggtctctcatggggaactgatgaccagtcattgagggaggctttctccaacttcggtgaagtgatcgattctaaggtcattgttgatagggaaaccggaaggtcaagggggtttggatttgtcaatttctctgatgagagtgctgctaatgctgcaatttcagagatggacggaaaggaactgaatggacgcaacatccgagtgaatgttgctaacgatagaccaagtgctccccgggcttatggaggtggtggcggctacggtggaggtggtggtggctatggaggaggtggtgatggaggcggttactaaacagaggagcttcttgtgataagaagaattgatctttctgtttgtttttttttattatttaaatcgagcttgtgctagtacaaaacctgaatgggatttgttgagactctagtagtcagtactcttatctaagacacggcttttcactcagtttgtgttagcttcaaatattgtccgttaataattctggaggaaagccgaattgag

SEQ ID NO: 14995 - protein, 163 aa, Glycine max
SASASQFTKTLVSKLYSPEMAFCKNLGGLLRQGAVSQTGNVPVQSMLGSLRYMSTKLFVGGLSWGTDDQSLREAFSNFGEVIDSKVIVDRETGRSRGFGFVNFSDESAANAAISEMDGKELNGRNIRVNVANDRPSAPRAYGGGGGYGGGGGGYGGGGDGGGY

SEQ ID NO: 14996 - protein, 144 aa, Glycine max
MAFCKNLGGLLRQGAVSQTGNVPVQSMLGSLRYMSTKLFVGGLSWGTDDQSLREAFSNFGEVIDSKVIVDRETGRSRGFGFVNFSDESAANAAISEMDGKELNGRNIRVNVANDRPSAPRAYGGGGGYGGGGGGYGGGGDGGGY

SEQ ID NO: 14997 - protein, 118 aa, Glycine max
MLGSLRYMSTKLFVGGLSWGTDDQSLREAFSNFGEVIDSKVIVDRETGRSRGFGFVNFSDESAANAAISEMDGKELNGRNIRVNVANDRPSAPRAYGGGGGYGGGGGGYGGGGDGGGY

SEQ ID NO: 14998 - DNA, 761 bp, Glycine max
aaaaacgactgtatccgcgtcctttactttccaaaaaataaatatttttcttcttgaagagattacaccttatccaattattggttgcattaggagaagccaaattttctttgtgtctctgagctgcgtatcgagctacaactccttcaatggcttccctatcaaccagttctctaagcttcaaagctccctccatacaatctaccagaacttctcaggtgttaagaaaacccttgagtttccagcctatctcctttggacgttttcagtcttcaaagaaccttcgtcttcagatcagttgtgcagcaaaaccagagacggtgcagaaagtgagtgacattgtcagggaacaattagctttgtctgccgacactgctctcactgccgagtccaagttctctgctcttggcgcagattctctcgacaccgtggagatagtgatggctttggaggaaaagtttaacataagtgtggaggaagctgatgctcaaaacattacgacgattcaggaggcagctgatttgattgaggatcttgctcagaagaaacctgcggcttaagcttcctaaactatcccggtttaacacaaaccggctgtccttttttttttctcctcctttctgagctttcttgttttcagatcattttattgtggtttattagaccatgtgttattattttttgttttcttcttttggaagttaagattggatgttgatgatgagaaaactttggtacgttgagattgattctttgtggtg

SEQ ID NO: 14999 - protein, 136 aa, Glycine max
MASLSTSSLSFKAPSIQSTRTSQVLRKPLSFQPISFGRFQSSKNLRLQISCAAKPETVQKVSDIVREQLALSADTALTAESKFSALGADSLDTVEIVMALEEKFNISVEEADAQNITTIQEAADLIEDLAQKKPAA

SEQ ID NO: 15000 - protein, 111 aa, Glycine max
KTTVSASFTFQKINIFLLEEITPYPIIGCIRRSQIFFVSLSCVSSYNSFNGFPINQFSKLQSSLHTIYQNFSGVKKTLEFPAYLLWTFSVFKEPSSSDQLCSKTRDGAESE

SEQ ID NO: 15001 - DNA, 605 bp, Glycine max
taattaaagttcgtgagattttgacagacaaagaatggcgtaggaggaaaatgcagatgaggatatcagaggaagaaggaagactgaagaaggacgaggaggaaacaaaagaaatgtggaagaggaagagagagcatgaagagaagtgggaggagacgagagaccagcgagtctctagctggagggatttcatgaagacaggaaagaaggcacggaaaggagagctcaaacctccaaggctcaagactgaagacccgaacaaatcttatgttcagaggccagtaaagcgtggttaaaaggtgtcgtattcatctgcactcgaagaccattcttgccgcgacctgatccaagccacagcctgtcaagtttatctttcaggctataagcttgggttatggcttgtatgttcccagaccccagtgtagtcagtggaaaatagcagataattgcgagcaaaatggacacatatcatctacctagagtgacattggactaatgtacctgtgtagaatgccttgaaaaagaaattttctgttgggaaagaaacgctgaagtggatgttggactatgatccttgtttcaatattcagtgtaagtgtcatgcc

SEQ ID NO: 15002 - protein, 97 aa, Glycine max
IKVREILTDKEWRRRKMQMRISEEEGRLKKDEEETKEMWKRKREHEEKWEETRDQRVSSWRDFMKTGKKARKGELKPPRLKTEDPNKSYVQRPVKRG

SEQ ID NO: 15003 - protein, 81 aa, Glycine max
MQMRISEEEGRLKKDEEETKEMWKRKREHEEKWEETRDQRVSSWRDFMKTGKKARKGELKPPRLKTEDPNKSYVQRPVKRG

SEQ ID NO: 15004 - protein, 79 aa, Glycine max
MRISEEEGRLKKDEEETKEMWKRKREHEEKWEETRDQRVSSWRDFMKTGKKARKGELKPPRLKTEDPNKSYVQRPVKRG

SEQ ID NO: 15005 - DNA, 962 bp, Glycine max
tactagcttacttaggacctggcagcctctcaattttctctataaataccagtgcctccgtgtcttctcaattttcaccagccatagtcatacagcgacaataaggagagcaaattagaagcacagatcaaggggaagagaactccgcggctgatcagcaatggcgaccaagatctacatagtgtactactcgacctggggacacgtcgcgacgctggcggaggagatgaagaagggcgccgactccgtccccggcgtcgaggtcaccgtctggcgggtgccagagacgctgccagaggaggtgctcgggaagatgcacgcggcgccggggcgcgaggaccacccggtcatcacggcgagccagctggccgaggccgacggcatcctgttcggcttcccgacgcggttcggcatgatggcggcgcagatgaaggccttcttcgactccaccggcggcctctggcaggcacagagcctctcgggcaagcccgcgggcgtcttcttcgcgacgggcacccagggcggcgggcaggagaccacggctctcacggccgtgacgcagctgacgcaccacggcatgctgttcgtgccggtcgggtacacgcacggcgccggcatgttcgccatggacgaggtcaagggtggcagcccgtacggtgccggcaccttcgctggagccgatggcagcagggtgcccagcgatgccgagctcgccctcgcggcgcaccagggcaagtactttgccggcatcgccaagaagctcaaagccgtctgaactccgatcaccagccgtgtcccatgactcatatcaactactcaatcattacaagatgatttgacacatcattttcagtggagcagatttacataattctagacaattaaactgtactgcatttaatttcttgtttggacaaataatacaatttcttgttttgagtggagcattcggtcttggtttt

SEQ ID NO: 15006 - protein, 204 aa, Glycine max
MATKIYIVYYSTWGHVATLAEEMKKGADSVPGVEVTVWRVPETLPEEVLGKMHAAPGREDHPVITASQLAEADGILFGFPTRFGMMAAQMKAFFDSTGGLWQAQSLSGKPAGVFFATGTQGGGQETTALTAVTQLTHHGMLFVPVGYTHGAGMFAMDEVKGGSPYGAGTFAGADGSRVPSDAELALAAHQGKYFAGIAKKLKAV

SEQ ID NO: 15007 - protein, 182 aa, Glycine max
MKKGADSVPGVEVTVWRVPETLPEEVLGKMHAAPGREDHPVITASQLAEADGILFGFPTRFGMMAAQMKAFFDSTGGLWQAQSLSGKPAGVFFATGTQGGGQETTALTAVTQLTHHGMLFVPVGYTHGAGMFAMDEVKGGSPYGAGTFAGADGSRVPSDAELALAAHQGKYFAGIAKKLKAV

SEQ ID NO: 15008 - protein, 153 aa, Glycine max
MHAAPGREDHPVITASQLAEADGILFGFPTRFGMMAAQMKAFFDSTGGLWQAQSLSGKPAGVFFATGTQGGGQETTALTAVTQLTHHGMLFVPVGYTHGAGMFAMDEVKGGSPYGAGTFAGADGSRVPSDAELALAAHQGKYFAGIAKKLKAV

SEQ ID NO: 15009 - DNA, 499 bp, Glycine max
  misc_feature (103)..(103): n is a, c, g, or t
tcagttcattggtcaagagaaggtatctttgccaagtggagccgcagataatgctatacggctttttgtggatgacaatgaaagtcaggttggtggtcctctntacaagttgctgctgaagaaggagaaggcccatgacatggatataaattctgtgcagtggagccctggagaagccggtactagcctctgcaagcgatgatgggacaatcaaggtgtgggagttgacatcatactagttttccacatttgctgtatgagtagcagatattttatactggaggagcctaatagaagtgctagatgtgcaggcatcctcatagctatttttcttttcttagttatatttactaaaattttacaacagacattgaatattatatttttttaggggagtcagtagtgtgactgtaaattgtaattactgtcacaactaaactttacatttttgctcaagaatggctcataaattacttatcctaaggtgaactagtatcgt

SEQ ID NO: 15010 - protein, 66 aa, Glycine max
  misc_feature (34)..(34): Xaa can be any naturally occurring amino acid
QFIGQEKVSLPSGAADNAIRLFVDDNESQVGGPXYKLLLKKEKAHDMDINSVQWSPGEAGTSLCKR

SEQ ID NO: 15011 - protein, 44 aa, Glycine max
MSSRYFILEEPNRSARCAGILIAIFLFLVIFTKILQQTLNIIFF

SEQ ID NO: 15012 - protein, 38 aa, Glycine max
  misc_feature (34)..(34): Xaa can be any naturally occurring amino acid
SSLVKRRYLCQVEPQIMLYGFLWMTMKVRLVVLXTSCC

SEQ ID NO: 15013 - DNA, 776 bp, Glycine max
attgaacaaaaaaacacgaagaatcataagctatatttttgtaacatctttgaatattactaagcaggaaaaatgcagtcgatgaaggaaacagcttcaaacatcgcagcttctgccaagtctggcatggacaagaccaaagccaccttggaggagaaggctgagaagatgacaacaagagaccctcttcagaaagagatggctacacagaagaaagaagggaggatcaatgaggctgagatgcagaagagagaagcgcgcgagcacaacgctgtcatgaaagaagccagtggagctggaactggaaccggtttgggaatgggaaccgccactcactcgaccactggacacgttggacacggaactgggacccatcagatgtcggctttgcctggtcacggcacgggacaaccagcgggccacgttgtggatggtacagccgtgacagaaccgataggaacgaacactggaactggtaggaccaccgctcataacacccgcgttggtggtggcaccactgggtatggaaccggtggaggatatactggataagacgttttgtcatttgttttatgttcttgtcaacttgtgctttgtgtgttcatgttttttttcgatcctacctttgtttttctcgtaactgtaggactttgctttcgtgtggtgtttttggtctgatgacagacttgacagttgtggttttctgaataaaagtgttgtgtaatcttcatatgtcaaaacttgccaatcattaatgacgaagtagatttttttct

SEQ ID NO: 15014 - protein, 159 aa, Glycine max
MQSMKETASNIAASAKSGMDKTKATLEEKAEKMTTRDPLQKEMATQKKEGRINEAEMQKREAREHNAVMKEASGAGTGTGLGMGTATHSTTGHVGHGTGTHQMSALPGHGTGQPAGHVVDGTAVTEPIGTNTGTGRTTAHNTRVGGGTTGYGTGGGYTG

SEQ ID NO: 15015 - protein, 156 aa, Glycine max
MKETASNIAASAKSGMDKTKATLEEKAEKMTTRDPLQKEMATQKKEGRINEAEMQKREAREHNAVMKEASGAGTGTGLGMGTATHSTTGHVGHGTGTHQMSALPGHGTGQPAGHVVDGTAVTEPIGTNTGTGRTTAHNTRVGGGTTGYGTGGGYTG

SEQ ID NO: 15016 - protein, 141 aa, Glycine max
MDKTKATLEEKAEKMTTRDPLQKEMATQKKEGRINEAEMQKREAREHNAVMKEASGAGTGTGLGMGTATHSTTGHVGHGTGTHQMSALPGHGTGQPAGHVVDGTAVTEPIGTNTGTGRTTAHNTRVGGGTTGYGTGGGYTG

SEQ ID NO: 15017 - DNA, 714 bp, Glycine max
aactctccattacatacttccccacccatccaccaaaggcgcagagaggggagaagaagaagaagaagaagcggagggggaggaagatgccttgcctgaacgtgtcgacgaacgtgaacctggagggggtggacacctccgccgtcctcgccgacgcctccagcaccgtcgcaaccatcatcggcaagccggaggcctatgtgatggttgttctcaagggttcagtgcccatggcatttggaggtacccaggagcctgcagcctacggcgagctggtttccatcggagggctgaacgctgatgtgaacaagaagctgagcgccggcattgcttccatcctggagtcaaagctgtccatccccaagtcccgcttctacctcaagttccacgattcaaagcgctcagactttggatggaatggatccaccttttagacgcatcatatggcatggagccttgcatgaactccagagttcctaatattctgtccattgcctatttaaggagaaactgctgcagtaagacatcgtgtcagtttaatggccagtgtttatgagtgccggagtacttgtgtgatctagttggtttggtttcggacttgccatggcaagggaatgttgcaactgcttggttcgattcgtaatcatgaaccctttgtggtgtcctgtgtttgttcaaaaaaaaaaaaaaaaaagcttatcgataccgtcgacc

SEQ ID NO: 15018 - protein, 143 aa, Glycine max
LSITYFPTHPPKAQRGEKKKKKKRRGRKMPCLNVSTNVNLEGVDTSAVLADASSTVATIIGKPEAYVMVVLKGSVPMAFGGTQEPAAYGELVSIGGLNADVNKKLSAGIASILESKLSIPKSRFYLKFHDSKRSDFGWNGSTF

SEQ ID NO: 15019 - protein, 115 aa, Glycine max
MPCLNVSTNVNLEGVDTSAVLADASSTVATIIGKPEAYVMVVLKGSVPMAFGGTQEPAAYGELVSIGGLNADVNKKLSAGIASILESKLSIPKSRFYLKFHDSKRSDFGWNGSTF

SEQ ID NO: 15020 - protein, 99 aa, Glycine max
TLHYILPHPSTKGAERGEEEEEEAEGEEDALPERVDEREPGGGGHLRRPRRRLQHRRNHHRQAGGLCDGCSQGFSAHGIWRYPGACSLRRAGFHRRAER

SEQ ID NO: 15021 - DNA, 1075 bp, Glycine max
aaaaaacgcattttctcggatctgagatcttagatcccaaacaccattgttcgtcctccaacatattgatccaagagattgaatagcttgagcttgctagctagtaatggcgagaaggcaagtaggttcaacacggcgtgtaggggatggtggaagcttcccttttgccggagctttgcactccaagtctagatcttctccgctactatctatttgccttgttcttgtgggggcttgcctactcataggttatgcttacagtggtccaggaatctttaaaagtatcaaagaagtcagcaaggttacaggtgactattcttgcacagcagaagtccaaagagccgtttctgttctgaagaaggcttatggagatgggatgcgcaaggtcttgcacgtaggccctgagacgtgctctgtggtttccactctcttgaaagaagatgagactgaagcatggggtgtcgaaccctatgacatcgaggatgctgattctcactgcaagagtcttgtcagcaaaggccttgtacgtgtcgctgatatcaagttccctctgccttaccgcccaaaatccttctctcttgttatcgtctcagatgctctggattatctctctcccaagtaccttaacaagaccgttcctgaactcgcaagggttgcttcagatggtgtagttctatttgcaggtctccccggtcagcagagagctaaagttgccgaactatctaaattcggtcgtcccgctaaaatgcgtagcgcatcgtggtggaaccgtttcttcgtccagacatccttagaagaaaacgaagcaccaagcaagaagtttgaacaggctgtatccaaaggatcatacaaaccagcctgccaagtcttccaccttaagccactacattaacaagccaccaccaatccccctactgttccacactaaagcatattcacacgtagagcccctcgcgaaacaagaacaacaaaaaatagcgtaagcgatattctccttgtattttgtaacaagtcagtttttttttttgtcatgttgtatccatcaacacagttttttttatattttattgagttt

SEQ ID NO: 15022 - protein, 261 aa, Glycine max
MARRQVGSTRRVGDGGSFPFAGALHSKSRSSPLLSICLVLVGACLLIGYAYSGPGIFKSIKEVSKVTGDYSCTAEVQRAVSVLKKAYGDGMRKVLHVGPETCSVVSTLLKEDETEAWGVEPYDIEDADSHCKSLVSKGLVRVADIKFPLPYRPKSFSLVIVSDALDYLSPKYLNKTVPELARVASDGVVLFAGLPGQQRAKVAELSKFGRPAKMRSASWWNRFFVQTSLEENEAPSKKFEQAVSKGSYKPACQVFHLKPLH

SEQ ID NO: 15023 - protein, 171 aa, Glycine max
MRKVLHVGPETCSVVSTLLKEDETEAWGVEPYDIEDADSHCKSLVSKGLVRVADIKFPLPYRPKSFSLVIVSDALDYLSPKYLNKTVPELARVASDGVVLFAGLPGQQRAKVAELSKFGRPAKMRSASWWNRFFVQTSLEENEAPSKKFEQAVSKGSYKPACQVFHLKPLH

SEQ ID NO: 15024 - DNA, 730 bp, Glycine max
tccaccccaccccacccacccagtccatcccccgtcgccctcacgctcttcgtgctcgccgcctcccttcgcgtgctgcctcatggcttccatcgccggatctgccgtgtccttcgccaagcccgtcaaggcaatcaacacgaactcgctctctttctctggtccaaggaggggcaatgcatttcttcgcctgcagccagtgccgatgagatttgctgtttgctgctcagcaaagcaggatacagtggagaaggtttgtgaaattgttaagaagcagcttgctgttcctgaaggcactgaagtttgcggtaccaccaagttctctgaccttggagctgattcactggacacggtcgagattgtgatgggcctcgaggaggagttccagatcagtgtggaggagacgagtgcgcaggcaattgcgacagttgaagatgctgccacgctcatcgacaagcttgtctctgcgaagtcatcttgaagggaggtcgtaaatcgtaatgattggagctcgtaagctagtagtcctaccttgggttgatccttgttgttctaccatagtcgttattatatggtgggttggtgattttctcaggactatcgtctcctgctgtgtgtaataagataattggttaagtatgtaagctgttgaacatcgaagtgcctagttttcgtgcggctgtggtgcatgtatgcatcttttgtgcccaaaaggaagaatatgcgggtg

SEQ ID NO: 15025 - protein, 159 aa, Glycine max
PPHPTHPVHPPSPSRSSCSPPPFACCLMASIAGSAVSFAKPVKAINTNSLSFSGPRRGNAFLRLQPVPMRFAVCCSAKQDTVEKVCEIVKKQLAVPEGTEVCGTTKFSDLGADSLDTVEIVMGLEEEFQISVEETSAQAIATVEDAATLIDKLVSAKSS

SEQ ID NO: 15026 - protein, 132 aa, Glycine max
MASIAGSAVSFAKPVKAINTNSLSFSGPRRGNAFLRLQPVPMRFAVCCSAKQDTVEKVCEIVKKQLAVPEGTEVCGTTKFSDLGADSLDTVEIVMGLEEEFQISVEETSAQAIATVEDAATLIDKLVSAKSS

SEQ ID NO: 15027 - protein, 91 aa, Glycine max
MRFAVCCSAKQDTVEKVCEIVKKQLAVPEGTEVCGTTKFSDLGADSLDTVEIVMGLEEEFQISVEETSAQAIATVEDAATLIDKLVSAKSS

SEQ ID NO: 15028 - DNA, 822 bp, Glycine max
atatctatcacttcccggagttcatcgtttggccacgctgatcaattgagatcaagaccatggcaaactgtaagaagtggcttctgctcgttgtgggcctcgcggccatggtttcctcgtcggaggcgtacgtcttctacgccggcggccgcgacggctgggtcgtcgaccccgccgagagctacaaccactgggccgagcgcaaccggtttcagatcaacgacaccatcgtgtttgcgcgcggcgaaggcgagggcgcggactcggtgctgctggtgaccgagccggacttcgacgcgtgcaacacgcgcagccctgtccgccggctagaggacgccggtggccgcccggagttccggttcgaccggtcgggtgccttcttcttcatcagcggcgacgaggaccggtgccagaagggcaagaagttgtacgtcgtcgtgatggcgcctcggtcccaggagtgggagctcgcaccggcgcccggatcgccgccgctctgggcctcagcgccagagcacgcggaggccccggacatgagccctggtgacgaggggatgtcgcgcagctcgctgaaggcgccaccgccgatggcgagcgcggcacggttggacttggaggtgatagtcgtcggcgttgtagtcggggttttaggtgctctggtgctctgagatgccgtacggatcagaccggacgttgtgttcgcgcggtcatggtgtggtctgcggatggtttgttcgttgtgtgatacgctgttggtgttagttgttatatgtagttcaaggagttgagattcgtatacagaataaaatgatgtttatatgt

SEQ ID NO: 15029 - protein, 202 aa, Glycine max
MANCKKWLLLVVGLAAMVSSSEAYVFYAGGRDGWVVDPAESYNHWAERNRFQINDTIVFARGEGEGADSVLLVTEPDFDACNTRSPVRRLEDAGGRPEFRFDRSGAFFFISGDEDRCQKGKKLYVVVMAPRSQEWELAPAPGSPPLWASAPEHAEAPDMSPGDEGMSRSSLKAPPPMASAARLDLEVIVVGVVVGVLGALVL

SEQ ID NO: 15030 - protein, 186 aa, Glycine max
MVSSSEAYVFYAGGRDGWVVDPAESYNHWAERNRFQINDTIVFARGEGEGADSVLLVTEPDFDACNTRSPVRRLEDAGGRPEFRFDRSGAFFFISGDEDRCQKGKKLYVVVMAPRSQEWELAPAPGSPPLWASAPEHAEAPDMSPGDEGMSRSSLKAPPPMASAARLDLEVIVVGVVVGVLGALVL

SEQ ID NO: 15031 - DNA, 1124 bp, Glycine max
acaagaagaaaagaaacgccaccaaatccaatctcgacctccccctctcccgtccgcccgtcgttcccaacccgatccgatctcccccctcctccgtcgccatgggccgcaagttcttcgtcggcggcaactggaaatgcaatggaactgtggaacaggtagagagtatcgtcaacactctgaacgctggacagatcgcctctacggatgttgtcgaggttgtcgtcagcccgccctatgtcttccttcccaccgtcaagggtaagctgcgcccagagatccaagtcgctgctcagaactgctgggtgaagaagggcggtgctttcaccggtgaagtcagtgctgagatgcttgtcaacctcggcgttccctgggtcatccttggacactctgaaaggaggagcttgatgggagaatcaagcgagtttgttggagagaaggttgcatatgcacttgctcagggcttgaaggtcattgcatgtgttggtgagactctcgagcagcgagaagctggatcaaccatggcagttgtcgctgaacagacaaaagcaattgctggcaagatcaaggactggaccaatgtggttgtcgcttacgaaccagtgtgggccattggcaccggtaaagttgcgacaccggctcaggcgcaggaagtccatgccaatctgagggactggctcaagaccaatgtgagccccgaggttgctgaatccacgaggatcatctatggaggatctgtaactggcgcaagctgcaaggagttggcagggcagcccgacgttgatggtttcctcgttggtggagcttctttgaagcctgagttcattgacatcatcaacgccgccaccgtgaagtccgcctaagaaaaatcttgatgtggctcctctcggtgcggaggaagacagcgaagatgaagagactccttttttctcctgtgtttattatgtgtgtactatgctagtaattttgtggtggagcagctgctactgttttcctccccccctgacttgagcttgcaagccaataatgataatgtttgctactgaacatatatcagcaataatctttagctcctattaatgacaaaaaaaaaaaaaaaaaagcttatcgataccgtcgacctc

SEQ ID NO: 15032 - protein, 286 aa, Glycine max
KKKRNATKSNLDLPLSRPPVVPNPIRSPPSSVAMGRKFFVGGNWKCNGTVEQVESIVNTLNAGQIASTDVVEVVVSPPYVFLPTVKGKLRPEIQVAAQNCWVKKGGAFTGEVSAEMLVNLGVPWVILGHSERRSLMGESSEFVGEKVAYALAQGLKVIACVGETLEQREAGSTMAVVAEQTKAIAGKIKDWTNVVVAYEPVWAIGTGKVATPAQAQEVHANLRDWLKTNVSPEVAESTRIIYGGSVTGASCKELAGQPDVDGFLVGGASLKPEFIDIINAATVKSA

SEQ ID NO: 15033 - protein, 253 aa, Glycine max
MGRKFFVGGNWKCNGTVEQVESIVNTLNAGQIASTDVVEVVVSPPYVFLPTVKGKLRPEIQVAAQNCWVKKGGAFTGEVSAEMLVNLGVPWVILGHSERRSLMGESSEFVGEKVAYALAQGLKVIACVGETLEQREAGSTMAVVAEQTKAIAGKIKDWTNVVVAYEPVWAIGTGKVATPAQAQEVHANLRDWLKTNVSPEVAESTRIIYGGSVTGASCKELAGQPDVDGFLVGGASLKPEFIDIINAATVKSA

SEQ ID NO: 15034 - protein, 171 aa, Glycine max
MLVNLGVPWVILGHSERRSLMGESSEFVGEKVAYALAQGLKVIACVGETLEQREAGSTMAVVAEQTKAIAGKIKDWTNVVVAYEPVWAIGTGKVATPAQAQEVHANLRDWLKTNVSPEVAESTRIIYGGSVTGASCKELAGQPDVDGFLVGGASLKPEFIDIINAATVKSA

SEQ ID NO: 15035 - DNA, 906 bp, Glycine max
acacacgccaacttggactgaggggctgccagggcaacccgccgccgccgccgccgtacgcagggaaaccgcagcagcatcaagtgcagccggcggcaccgcgaccccaacctcccctttcctcccagctgacctagctttctcgcgtgctcagcgatgggcgtcgaatcggcgcagccaacccccgccgccaccgccgagcaggcccaggatctcatcgacgccgcgaggtacgacgagctggaagacgtcgtcgccctcttctccgccggtgtccccctcgactccgcagattcgcaaggccggacggctcttcatatggcttctgccaatgggcatcttgctgtggtggagtacttgattcaaaatggagcgaatgttaactctacaaacttggagaagaacacgcctctccactgggcatgcctcaatggacatacagaggtaatcaaggctttgatatgtgctggggctatcgtaagtgtactgaacagccatgagaaaacccctatggatgaggcactgactctcggaaagatggaagtggtcgatgcaatcggtgcagcagtagctcaagcagagctcaatggtgttactgtctcctaagcagaacttgacattctccttgtgtgatggatgacgatgatctgccaccctgttcttatcttcttcgtcaccgtttcttccggtctgtgtcacttaagatgctgatatgctagtatgtggggcattaggatgtgttgagctaagagttaactgtcatctctgtctgcaatcacctgttagtgtcaaatgtcctgaaagtctggctgctgactatgtgtgcagcagtcagatgtagtatcttgttttataagattgcaaaggccatcggacttgtgctgctgaactaattcctttctcccg

SEQ ID NO: 15036 - protein, 149 aa, Glycine max
MGVESAQPTPAATAEQAQDLIDAARYDELEDVVALFSAGVPLDSADSQGRTALHMASANGHLAVVEYLIQNGANVNSTNLEKNTPLHWACLNGHTEVIKALICAGAIVSVLNSHEKTPMDEALTLGKMEVVDAIGAAVAQAELNGVTVS

SEQ ID NO: 15037 - protein, 119 aa, Glycine max
HTPTWTEGLPGQPAAAAAVRRETAAASSAAGGTATPTSPFLPADLAFSRAQRWASNRRSQPPPPPPSRPRISSTPRGTTSWKTSSPSSPPVSPSTPQIRKAGRLFIWLLPMGILLWWST

SEQ ID NO: 15038 - protein, 95 aa, Glycine max
MASANGHLAVVEYLIQNGANVNSTNLEKNTPLHWACLNGHTEVIKALICAGAIVSVLNSHEKTPMDEALTLGKMEVVDAIGAAVAQAELNGVTVS

SEQ ID NO: 15039 - DNA, 851 bp, Glycine max
atgttattatctcgattccctctcgattttgtgcatatcgatctctgtttggtgtttaattgctagatttcgattgcgtttcctctttgttcgctgatctagtgatttttcacctgcagaatcggccatgaaaggaggtaattcgaagactgactccagaaactccaagctctctgtgaacaagaagcctacgaaggcgagcaaagctgctgctaaagatcctaacaaacctaagaggccggccagtgctttcttcgtcttcatggaggacttccgtcagacttacaagaaggaacaccccagcaacaaatctgtcgctgctgttggaaaagctggtggagagaagtggaaatcactgtctgactctgagaaagctccctacgtagccaaggctgataagcgcaaggttgagtatgagaagaccatgaaggcctacaacaaaaagctggaggaaggtccaaaggaggacgaggaatctgacgacaagtcagtgtctgaggttagtgaagaggaggatgcggatgataggagtgatgaggaggaagacgattgactaagaagttgaagttggcagcattatataaggacctctgcaaggatctctctgatgccttttttttttttttttttttaatcttcttttcccttgcaatgttaacgaggctggttaaaattaaaatggggggttttctgcttttatatttactgctgtttctatttagtaagctaccactatctcccactgactctgattttacgggtaatggaaaaaaatgttttagatggtgatcttgatatttgcagctctatattttatggctgctctatgtttgttatgatcgtagattctt

SEQ ID NO: 15040 - protein, 141 aa, Glycine max
MKGGNSKTDSRNSKLSVNKKPTKASKAAAKDPNKPKRPASAFFVFMEDFRQTYKKEHPSNKSVAAVGKAGGEKWKSLSDSEKAPYVAKADKRKVEYEKTMKAYNKKLEEGPKEDEESDDKSVSEVSEEEDADDRSDEEEDD

SEQ ID NO: 15041 - protein, 96 aa, Glycine max
MEDFRQTYKKEHPSNKSVAAVGKAGGEKWKSLSDSEKAPYVAKADKRKVEYEKTMKAYNKKLEEGPKEDEESDDKSVSEVSEEEDADDRSDEEEDD

SEQ ID NO: 15042 - DNA, 719 bp, Glycine max
actctcctcctgacctcgccgaaaccccccttccaaacacctactccccgaaccccgaaggcgatccatggcggcggcgggttggctccggcgagcggcatcggcggtggcgctgcctcgcatgccgtctggactcaccatcatgccagcccctccccccgctcctctccccgaggctcagtccctcgtgctccccggcctcggcgctgccatcgcccccgcgatggaactcatggccgtccccaagaagaagatctcaaaatataagaggggtttgagaaatggacccagagccctgaagcctgttccagtaattgtccgttgcaggtgctgcgggcgagtgaagctgccccacttctactgctgcagcggagaaaaagggaacgccggcgactccagctcataaacaccggctttgcgcacgaagccgtggcaggacatcttagtgcaatggaaatcaccagatatcgctttgtattccgctgccttctctttgcgagcagtaatctacatagactttagtttgatttgcataatcccatggcgaactttagtgatggtctttgccaggagcgtgggtgctctctgagatgagtgatggttgattatgtgttgctacctttcagtatgtaggacgccccgttcctatatcaaaataaaaggggaaaacggtagcgtgtcaaaaaaaaaaaaaaaaaagcttatcgataccgtcgacc

SEQ ID NO: 15043 - protein, 112 aa, Glycine max
MAAAGWLRRAASAVALPRMPSGLTIMPAPPPAPLPEAQSLVLPGLGAAIAPAMELMAVPKKKISKYKRGLRNGPRALKPVPVIVRCRCCGRVKLPHFYCCSGEKGNAGDSSS

SEQ ID NO: 15044 - protein, 94 aa, Glycine max
MPSGLTIMPAPPPAPLPEAQSLVLPGLGAAIAPAMELMAVPKKKISKYKRGLRNGPRALKPVPVIVRCRCCGRVKLPHFYCCSGEKGNAGDSSS

SEQ ID NO: 15045 - protein, 91 aa, Glycine max
SPPDLAETPLPNTYSPNPEGDPWRRRVGSGERHRRWRCLACRLDSPSCQPLPPLLSPRLSPSCSPASALPSPPRWNSWPSPRRRSQNIRGV

SEQ ID NO: 15046 - DNA, 643 bp, Glycine max
gactgagtctcgccgctgcctcatttctgttctgttctcgtcacagattgtggtgattctattatgcgttggctgggttcaattgatgagagacaattgtggggatgcttgtttctgtcaattggctctgttttctttgttgggtatttctctattgctgttctttgcaagcttttcccaccttcacacattcccctcatttctgcactgcaaaatgactggtactactgcttcttggtgccattgactctccctataattgtggttgctgtgtactttcattggctcagcatgaagctgttcaagcatgcttaattagcttaactttgccagattttgaaggcagaaagaaatacatgtatgctgttggggcaagcaacaactacctatgacaattgctgcactcctctctcctaatcacctcaaaaagagttcaaggattggtgtttgtgcaaatcatttagtagtatcctgccttaagatgttaaatgtgattgcatacctgtcaaagaccattcatgtttattgtactatggaaagttatgtaacatcattcagtccttctagcagcataacttgttttggaggctcatttttgtcttattaatctttcttcatatcaatgatatctatgtgattaggc

SEQ ID NO: 15047 - protein, 83 aa, Glycine max
MRWLGSIDERQLWGCLFLSIGSVFFVGYFSIAVLCKLFPPSHIPLISALQNDWYYCFLVPLTLPIIVVAVYFHWLSMKLFKHA

SEQ ID NO: 15048 - protein, 81 aa, Glycine max
TESRRCLISVLFSSQIVVILLCVGWVQLMRDNCGDACFCQLALFSLLGISLLLFFASFSHLHTFPSFLHCKMTGTTASWCH

SEQ ID NO: 15049 - protein, 72 aa, Glycine max
MTIAALLSPNHLKKSSRIGVCANHLVVSCLKMLNVIAYLSKTIHVYCTMESYVTSFSPSSSITCFGGSFLSY

SEQ ID NO: 15050 - DNA, 906 bp, Glycine max
aattcgaggcatttgacagacggcagttgattacagcggcagcgcacaagaatggcggggctgtatgagaaaccgtcggagacgtacgccaagaagcggccgcggtaccccaaggagtggttctccatgctcgcctccctcaccgccggccaccaccgcgcctgggacgctggctgcggcagcggccaggcctccctcagcatcgcggagcactacgacagcgtggtcgcgacggacgtgagcgagggccagctccgccacgccatcgcgcaccccaaggtgcggtacctgcacacgccggaggacctcgcggaggacgacctcgtcgccctggtcggcggcgagggctccctggacctggtcatcgtggcgaccgcgatccactggttcgacgtcccgctcttctacgccgtggtgaaccgcgtcctcaggaagcccggcggcgtcctcgccgtgtgggggtacaactacgacatccacccgttcggggacaagctgcacggggcgctgtacccggccatgcggccgtacatggacccgaggacgaggctggccatggagcggtaccgcgacctgccgttcccgttcgagcccgtcggggtgggccgcgagggcgagccggccgacgtcgacatggaggcggagatgacgctggaggacctggccgggttcgtgatgaccggctccgtcgcgaccacggctggggagaaaggggtggacctggaggcgctggtcaagggtgtgatgaaggaggtggaagaggggtggggggatcggccgacggtgcccaggaagcttgtgttcaaggccttcatgctggccgggaggcccaggtgatagatgaactgctgggtggtgaattgggatcggtaccgtagagtaaaataataaaatgtgaagtttgcg

SEQ ID NO: 15051 - protein, 261 aa, Glycine max
MAGLYEKPSETYAKKRPRYPKEWFSMLASLTAGHHRAWDAGCGSGQASLSIAEHYDSVVATDVSEGQLRHAIAHPKVRYLHTPEDLAEDDLVALVGGEGSLDLVIVATAIHWFDVPLFYAVVNRVLRKPGGVLAVWGYNYDIHPFGDKLHGALYPAMRPYMDPRTRLAMERYRDLPFPFEPVGVGREGEPADVDMEAEMTLEDLAGFVMTGSVATTAGEKGVDLEALVKGVMKEVEEGWGDRPTVPRKLVFKAFMLAGRPR

SEQ ID NO: 15052 - protein, 236 aa, Glycine max
MLASLTAGHHRAWDAGCGSGQASLSIAEHYDSVVATDVSEGQLRHAIAHPKVRYLHTPEDLAEDDLVALVGGEGSLDLVIVATAIHWFDVPLFYAVVNRVLRKPGGVLAVWGYNYDIHPFGDKLHGALYPAMRPYMDPRTRLAMERYRDLPFPFEPVGVGREGEPADVDMEAEMTLEDLAGFVMTGSVATTAGEKGVDLEALVKGVMKEVEEGWGDRPTVPRKLVFKAFMLAGRPR

SEQ ID NO: 15053 - DNA, 874 bp, Glycine max
tcatcaccatcaccacacgatccaagtttaagctgcacgtacgtacaccatggaaggtaagagtggtctccgggctgtgatcctcctcctgggcgcggtcctcgtcatagggagcttggtgccgctggcccaggcagatccgacggccgccgccacaggagctgcggacgccaagttctgctgcaaggacaagatagggagccactgctacgccgcctgcatcacgcagtacggccccatcccgttctgcgcagaaatgtgctgctgtgtgcagcttaccagcggtagatgcccgaggcaatgccctaccccggccgaccccagactttttcttgcgaacagctccacctccgaccttctcaccagcaacgccgttgaggttgagagctgcacgctgaggtgctcgtccatcgtctgtgacagcatgcgcaatgttatcgatggcggcagcgaggggacgaaagccgtcgtggagcgctgcggcgatgcatgcggccgcttctgtgccggcgccggcggcgctgcatcccttgatgcttaatggagtacgccctcatgcgtgcgtccggatgcgctagcagctgcgactacactgagcggcccagagcagatgcatctctgtgtttgctctttgttgttttttttcagtacagataattggattccaccgtatgatggcatggcacgtacccaagccagtgtgacgacgtcgccttggatgtggcgcacgttcttctttctttgttccagtataagttcatcatgtggcgtgatgtgttgatgcgtatgtacgtgtcgaacgagctagcatgatgtactatcatcctagcttgccaatggaataaaagtttgccgatatatcaactttcttccg

SEQ ID NO: 15054 - protein, 163 aa, Glycine max
MEGKSGLRAVILLLGAVLVIGSLVPLAQADPTAAATGAADAKFCCKDKIGSHCYAACITQYGPIPFCAEMCCCVQLTSGRCPRQCPTPADPRLFLANSSTSDLLTSNAVEVESCTLRCSSIVCDSMRNVIDGGSEGTKAVVERCGDACGRFCAGAGGAASLDA

SEQ ID NO: 15055 - protein, 94 aa, Glycine max
MCCCVQLTSGRCPRQCPTPADPRLFLANSSTSDLLTSNAVEVESCTLRCSSIVCDSMRNVIDGGSEGTKAVVERCGDACGRFCAGAGGAASLDA

SEQ ID NO: 15056 - DNA, 582 bp, Glycine max
acttctccctcgtaaggcagcagccatctgcaactagggttcataacttcatatatagccagtgaccaacatgagtgatcgaaggtacgggtactcgtacccacacaaccaagggtattacaacggaccaccggtgatggcgccgccgcagtacgccccgccgccgagacggcagacgggcttcctcgaaggatgcctggctgctctgtgctgctgctgcctcgtcgacgagtgctgctgcgacccgtccatcatattcgtgagctgatcgaaacacgtacgctatccagacgacggccgaccgaccgaccgaccgacgaaccatccgagccgagctacgtacctaacgtactggtagtagtacatgtgcgatttatatatgcgtgtcgtgtgtatgtgtgcttcccttgagctgttgctttcagctatagctatacatatgctcctagaggcctagaccaaagtagaactgcagaaagaatagccagcccgtcctgccgttcggttcagctctccagcggcacgacgggtgggtggtgtatgtatgcatgtatctgatgtgagtctacgaataatatgatg

SEQ ID NO: 15057 - protein, 72 aa, Glycine max
MPGCSVLLLPRRRVLLRPVHHIRELIETRTLSRRRPTDRPTDEPSEPSYVPNVLVVVHVRFIYACRVYVCFP

SEQ ID NO: 15058 - protein, 65 aa, Glycine max
MSDRRYGYSYPHNQGYYNGPPVMAPPQYAPPPRRQTGFLEGCLAALCCCCLVDECCCDPSIIFVS

SEQ ID NO: 15059 - protein, 43 aa, Glycine max
MAPPQYAPPPRRQTGFLEGCLAALCCCCLVDECCCDPSIIFVS

SEQ ID NO: 15060 - DNA, 1089 bp, Glycine max
aatccgacctctttccagcgcgcacgttccagccccacgctgcttttataacccctcgattttctctctcctctccaccccggcggccgcaactactctggtagagcaagcgagcgccgccccaagccctactccagcaatggccgatccagcggagcaccgcgaggaggaggaggaggccgcggcggccggcgaggaagaggacaccggcgcccaaatcgctcccatcgtgaagctcgaggaggtggccatcaccaccggcgaagaggacgaggatgtcctcctcgacatgaaagcgaagctctaccgatttgacaaggacgggggccagtggaaggagcggggcacgggtgccgtgaagctgctcaagcacaaggagactgccaaggtccgcctcgtcatgcgacaggccaagactctcaagatctgcgccaatcacctcgttgtggcgacgacgaagatgcaggagcacgctgggagcgacaagtcgtgcgtgtggcacgctctggattttgccgactgtgagctcaaggaggagatgttcgccatccgctttggatccgtggagagctgcaaaaaattcaaggatcttgtggacgacattgctgagcagcaaggaaagaatgaggagaaagaaagtgaggaagtctcctctgctgccgagttggtagagaagttaactgtgacggagggcaaaaaggaggaacaaacagagaaagtggagactcctgcagtagatgataagaaggatgctgaagagtgaaaacaaggtccggctatttcatcctatgctctaggagcattgctatactcgagctagtgaattgtcaaatgagtgtcattcgattcattttatggtcaaagttcatcttcctttcacaaattttcattgtgttattctgtgggatggatgtttgtgttgggcaaagtttggtttgtgtcagtcatgggtttcttggttgatagtctgtcatttgtttttctggatggtgtgcctggggtcagcatgtttgtacaattatttgggaattgcttttggaatggatacggtttgagttgtccaaaatccctggatgatgctgtcttgcc

SEQ ID NO: 15061 - protein, 253 aa, Glycine max
IRPLSSAHVPAPRCFYNPSIFSLLSTPAAATTLVEQASAAPSPTPAMADPAEHREEEEEAAAAGEEEDTGAQIAPIVKLEEVAITTGEEDEDVLLDMKAKLYRFDKDGGQWKERGTGAVKLLKHKETAKVRLVMRQAKTLKICANHLVVATTKMQEHAGSDKSCVWHALDFADCELKEEMFAIRFGSVESCKKFKDLVDDIAEQQGKNEEKESEEVSSAAELVEKLTVTEGKKEEQTEKVETPAVDDKKDAEE

SEQ ID NO: 15062 - protein, 207 aa, Glycine max
MADPAEHREEEEEAAAAGEEEDTGAQIAPIVKLEEVAITTGEEDEDVLLDMKAKLYRFDKDGGQWKERGTGAVKLLKHKETAKVRLVMRQAKTLKICANHLVVATTKMQEHAGSDKSCVWHALDFADCELKEEMFAIRFGSVESCKKFKDLVDDIAEQQGKNEEKESEEVSSAAELVEKLTVTEGKKEEQTEKVETPAVDDKKDAEE

SEQ ID NO: 15063 - protein, 157 aa, Glycine max
MKAKLYRFDKDGGQWKERGTGAVKLLKHKETAKVRLVMRQAKTLKICANHLVVATTKMQEHAGSDKSCVWHALDFADCELKEEMFAIRFGSVESCKKFKDLVDDIAEQQGKNEEKESEEVSSAAELVEKLTVTEGKKEEQTEKVETPAVDDKKDAEE

SEQ ID NO: 15064 - DNA, 679 bp, Glycine max
agattttgatcggtttctggaataagaagaagaggaaagaaaggatggggagattgttcttggtgaatttggaaggcaagtcttacagttgtaggcactgtaagactagtatcgctctctgcgatgatgtcgtctccaagtcttttcaatcacgccatgggaaagcttacctcttcagtaaggtagcgaatgtgtatgctgggaagaaggaagataggatgatgatgacgggtatgcacaccgttgtcgatatttactgcgtcaaatgcggctcttatgttggatggagatatgagtttgcttttgagaagaaccaaaagtacaaggaaggcaaatctgttctcgaaaggtacaaggtctgcggtccggatgggaacaattactgggtggcggctcaagaagttgaagccggagaaagtgatactgatgaatgaatgaatgaatgaatgaatgaatgaatgaatgaatgaatgaatgaatgatatgcttcttcatctcaataattcaccatatctgatttgtacattctcctctcctcttatcattcttttttcaatgtcttcttctcttttctcattttgtgaaccatccagcttccattaggactccttcggagatcaactgtttgtgttgcaactacttgtggaacacatgcaattataatttatctcattatctt

SEQ ID NO: 15065 - protein, 143 aa, Glycine max
ILIGFWNKKKRKERMGRLFLVNLEGKSYSCRHCKTSIALCDDVVSKSFQSRHGKAYLFSKVANVYAGKKEDRMMMTGMHTVVDIYCVKCGSYVGWRYEFAFEKNQKYKEGKSVLERYKVCGPDGNNYWVAAQEVEAGESDTDE

SEQ ID NO: 15066 - protein, 129 aa, Glycine max
MGRLFLVNLEGKSYSCRHCKTSIALCDDVVSKSFQSRHGKAYLFSKVANVYAGKKEDRMMMTGMHTVVDIYCVKCGSYVGWRYEFAFEKNQKYKEGKSVLERYKVCGPDGNNYWVAAQEVEAGESDTDE

SEQ ID NO: 15067 - protein, 71 aa, Glycine max
MMMTGMHTVVDIYCVKCGSYVGWRYEFAFEKNQKYKEGKSVLERYKVCGPDGNNYWVAAQEVEAGESDTDE

SEQ ID NO: 15068 - DNA, 635 bp, Glycine max
aaaaccaattcggctccatccctcccacggaaaaatccccaattccttcgtcttcctcttcgcggacgcacacagcagagcacacagcgagaagatgtccgggcgcggcaagggcggcaaggggctgggcaagggcggggcgaagcggcacaggaaggtgctgcgggacaacatccaggggatcaccaagccggcgatccggcggctggcgcggaggggcggcgtgaagcgcatctccgggctcatctatgaggagacccgcggcgtgctcaagatcttcctcgagaacgtcatccgcgacgccgtcacctacaccgagcacgcgcgccgcaagaccgtcaccgccatggacgtcgtgtacgcgctcaagcgccagggccgcaccctgtacggtttcggcggttaggggatagctagctaggcttcagtgtgtctaccaggtcgctgctccgcgaatgcttgtgcctgtggtttaatttaatgcttgttgtgaggaagtgctacctggatttgtttctctgttcaatatcgtcagtccagtcattgcttctgatttgacaccgtttgagtttgtgaaattcttttcattcggtcctgcaaaaaaaaaaaaaaaaaagcttatcgataccgtcgac

SEQ ID NO: 15069 - protein, 134 aa, Glycine max
KPIRLHPSHGKIPNSFVFLFADAHSRAHSEKMSGRGKGGKGLGKGGAKRHRKVLRDNIQGITKPAIRRLARRGGVKRISGLIYEETRGVLKIFLENVIRDAVTYTEHARRKTVTAMDVVYALKRQGRTLYGFGG

SEQ ID NO: 15070 - protein, 103 aa, Glycine max; identical to SEQ ID NO: 71

SEQ ID NO: 15071 - protein, 83 aa, Glycine max
KTNSAPSLPRKNPQFLRLPLRGRTQQSTQREDVRARQGRQGAGQGRGEAAQEGAAGQHPGDHQAGDPAAGAEGRREAHLRAHL

SEQ ID NO: 15072 - DNA, 1219 bp, Glycine max
gtcgttgttcttatcttatcccatcacccatttcttcctctctctctctctctctctctctctcttacacaagttgctgctgagttggtgttgtccttgttcctggacggacacatccgacatgtcgacggcggtggcgcggcccttcggcgggttccccggatcggggaggaccaagggggatgagctgctcggcaagaagatgagcgacgggttcttcatcgaggaggaggaggaagaggaggcggaggaggtgctgacggagagctcctccatcggcgccccgtcgccgtcgagctcctccatcggggaggactcctcgtcggaggttggcggggaaggggaggacgaggaggtggagagcaagctcaaggaggagcccgggctcggctgcctggacgccttggaggactccttgcccatcaagaacgggctgtcgagcttctacgccggaaagtcaaagtccttcaccagcctcgcggaggcggcggcgcgggacgccgtgaaggagctcgccaagccggagaaccccttcaacaagcgccgccgcatcctggccacctggtcccggcgcgcctcctgcagctcgctggcgacggccacctacctgcccccgttcctcgccccggaccacgccctccccgagggcgacgaaggcgaggaggacgacgactccgactccggctccgacgagcagcaccgcggcaagaacgggtgggaggcgccggcattgccgcccccgaggctcagcgtgaacacccagatgggcgcatcggcggcgaggaggggcggcagcttcaggtcgccgagatcgtattcactgtcagaccttcgaaacggcggtgatgctagttataatcagtagctgcgaattcgcagccattgatctgtcttgtgtcccgtagatctgttactactacttactccttaattatatataagtaagtaatcgcaagagcatgtgtaagtgtcttgagctaaattcgttgtgttcttgtatccatcagttggatcccgttgacctcgttcacctgatgtacgcagacatgtatgaactgctccggtgaactgaaccgaactgatccaacaccctggccatcattaactaatgatgaacgatcctcgagataagattagttagttaattaatggcatcgctcctgatcctttcgccctgtacaaacatatatatacaatttgttgatgcaatttgatttgc

SEQ ID NO: 15073 - protein, 287 aa, Glycine max
SLFLSYPITHFFLSLSLSLSLLHKLLLSWCCPCSWTDTSDMSTAVARPFGGFPGSGRTKGDELLGKKMSDGFFIEEEEEEEAEEVLTESSSIGAPSPSSSSIGEDSSSEVGGEGEDEEVESKLKEEPGLGCLDALEDSLPIKNGLSSFYAGKSKSFTSLAEAAARDAVKELAKPENPFNKRRRILATWSRRASCSSLATATYLPPFLAPDHALPEGDEGEEDDDSDSGSDEQHRGKNGWEAPALPPPRLSVNTQMGASAARRGGSFRSPRSYSLSDLRNGGDASYNQ

SEQ ID NO: 15074 - protein, 247 aa, Glycine max
MSTAVARPFGGFPGSGRTKGDELLGKKMSDGFFIEEEEEEEAEEVLTESSSIGAPSPSSSSIGEDSSSEVGGEGEDEEVESKLKEEPGLGCLDALEDSLPIKNGLSSFYAGKSKSFTSLAEAAARDAVKELAKPENPFNKRRRILATWSRRASCSSLATATYLPPFLAPDHALPEGDEGEEDDDSDSGSDEQHRGKNGWEAPALPPPRLSVNTQMGASAARRGGSFRSPRSYSLSDLRNGGDASYNQ

SEQ ID NO: 15075 - protein, 220 aa, Glycine max
MSDGFFIEEEEEEEAEEVLTESSSIGAPSPSSSSIGEDSSSEVGGEGEDEEVESKLKEEPGLGCLDALEDSLPIKNGLSSFYAGKSKSFTSLAEAAARDAVKELAKPENPFNKRRRILATWSRRASCSSLATATYLPPFLAPDHALPEGDEGEEDDDSDSGSDEQHRGKNGWEAPALPPPRLSVNTQMGASAARRGGSFRSPRSYSLSDLRNGGDASYNQ

SEQ ID NO: 15076 - DNA, 430 bp, Glycine max
gtttattcaacattcaaagaaataaactcacgcactaatcactactacacaaatcacacaaacacacagtcgcacacagtttactcactaactcactgtgagagcaaagaagaagaagaagaagaaaactgcttcagttttgtgcttgacaactgtcaagaatgaagacaagatggagttcagtagaatcctagaagctattaaggccaacttcaatgacaagtatgatgaatacagaaagaagtggggtggtggaatcatgggttccaaatctcaagccaagaccagggccaaggagaagctccttgccaaggaagcagcccaaagaatgaactagattcacttgtttttacattattgaggttgccatttttctatattttatatgggagcatttacaagttaaaatgtgaggttttacttcattttg

SEQ ID NO: 15077 - protein, 54 aa, Glycine max
VYSTFKEINSRTNHYYTNHTNTQSHTVYSLTHCESKEEEEEENCFSFVLDNCQE

SEQ ID NO: 15078 - protein, 54 aa, Glycine max
MEFSRILEAIKANFNDKYDEYRKKWGGGIMGSKSQAKTRAKEKLLAKEAAQRMN

SEQ ID NO: 15079 - protein, 38 aa, Glycine max
MTSMMNTERSGVVESWVPNLKPRPGPRRSSLPRKQPKE

SEQ ID NO: 15080 - DNA, 959 bp, Glycine max
catcctaatcgaaaaagagtactaaacggaatttgaaaaccaaggctgaagaagttttaagagacatggagctctccgtggttgcaagagacatggaagaagttgtattgctggttgatgatttgagatcactttctgggatttctcgctgtagaatatgtcatgaagaagaatttgagagctccaaaaccttggaagctccttgtgcttgttctgggacagttaagtttgctcacagagattgcattcagacatggtgcgatgagaaaggaaatacaacttgtgaaatatgtctccagcaatatgaacctggatatacagcagccccaaagaaatcgcaaataactgatgcagcaatgaccattagggatagcctgcaaatttcaaggaatgaacaagaaccgttaaacacaagaatagtgggtatcgttgaaggaaacaattactctgaatgcacgtatgctgcagataggaccgcggcttgttgtcgatctctggctctagcttttacactcatcttgcttgtaagacatctttttgcactccttacagatggaatggaagattatccatttacaattcttacggtctttttactaagggccagtggaattattatacccatgtacataattattaaggcgatcggagctattcatgacaatattaagcgtcaccatcatgaggattctgacgatgactcatcgatatctgatggagatgatgaagaaaatgagacaccaaatgatgaaattttaagacattcacaatcataggtcattatttgatttaatttgtatcagagcattatgctgatgctctgtcaagttttaccattttggaggcataattttttattgtaaaaaaaaagaagaacgaaattcacattgaaatacatatagctttgcagtatttatactgtttcctaccaacccaagtatataaaacaaccaaatttc

SEQ ID NO: 15081 - protein, 236 aa, Glycine max
MELSVVARDMEEVVLLVDDLRSLSGISRCRICHEEEFESSKTLEAPCACSGTVKFAHRDCIQTWCDEKGNTTCEICLQQYEPGYTAAPKKSQITDAAMTIRDSLQISRNEQEPLNTRIVGIVEGNNYSECTYAADRTAACCRSLALAFTLILLVRHLFALLTDGMEDYPFTILTVFLLRASGIIIPMYIIIKAIGAIHDNIKRHHHEDSDDDSSISDGDDEENETPNDEILRHSQS

SEQ ID NO: 15082 - protein, 227 aa, Glycine max
MEEVVLLVDDLRSLSGISRCRICHEEEFESSKTLEAPCACSGTVKFAHRDCIQTWCDEKGNTTCEICLQQYEPGYTAAPKKSQITDAAMTIRDSLQISRNEQEPLNTRIVGIVEGNNYSECTYAADRTAACCRSLALAFTLILLVRHLFALLTDGMEDYPFTILTVFLLRASGIIIPMYIIIKAIGAIHDNIKRHHHEDSDDDSSISDGDDEENETPNDEILRHSQS

SEQ ID NO: 15083 - protein, 139 aa, Glycine max
MTIRDSLQISRNEQEPLNTRIVGIVEGNNYSECTYAADRTAACCRSLALAFTLILLVRHLFALLTDGMEDYPFTILTVFLLRASGIIIPMYIIIKAIGAIHDNIKRHHHEDSDDDSSISDGDDEENETPNDEILRHSQS

SEQ ID NO: 15084 - DNA, 861 bp, Glycine max
gacacaagtaacttctctgcatccaaaatgccaggtcttaccatcggagacactattcctgatcttcaagttgaaactaaccaaggcaaaatcaagcttcatcagttctgtgctgatggctggaccatccttttctctcacccaggtgatttcaccccggtttgtaccactgagcttggtaagatggctcagtatgctaaggagttttatcaacgaggagtgaagctcttaggtttatcttgtgatgatgtgcaatcccacaatgagtggatcaaagacattgaagcctacactccaggtgcgaaagtgaattatccaataattgctgatccgaagagagaaatcatcaagcaactcaacatggttgaccctgatgagaaagactccactggcaacctaccctcaagggctcttcatattgttggcccagatttgaagatcaagctgagttttctgtaccctgccactactgggaggaacatggatgaagtgctgagggtgatagagtcattgcagaaggcctcaaagttcaaggttgctaccccagcaaactggaagccaggggaccctgttgtcattacccctgatgtcaccaatgagcaagccaaggaaatgttccctcaagggttcgagagtgtgaaactccatcaaagaaggaatatttgcgcttaactaaagtttgatgatgttctgcttcaagtagtagaaccttcttcagctgtgccaaatctcaatgcaatctagtcatctatctaccctaatcaaactatatatatgttttgtttaagtacactattttgtggcactgcttttgttattataagaaagaatgtacagtttaattgatcttttgttgactgc

SEQ ID NO: 15085 - protein, 223 aa, Glycine max
DTSNFSASKMPGLTIGDTIPDLQVETNQGKIKLHQFCADGWTILFSHPGDFTPVCTTELGKMAQYAKEFYQRGVKLLGLSCDDVQSHNEWIKDIEAYTPGAKVNYPIIADPKREIIKQLNMVDPDEKDSTGNLPSRALHIVGPDLKIKLSFLYPATTGRNMDEVLRVIESLQKASKFKVATPANWKPGDPVVITPDVTNEQAKEMFPQGFESVKLHQRRNICA

SEQ ID NO: 15086 - protein, 214 aa, Glycine max
MPGLTIGDTIPDLQVETNQGKIKLHQFCADGWTILFSHPGDFTPVCTTELGKMAQYAKEFYQRGVKLLGLSCDDVQSHNEWIKDIEAYTPGAKVNYPIIADPKREIIKQLNMVDPDEKDSTGNLPSRALHIVGPDLKIKLSFLYPATTGRNMDEVLRVIESLQKASKFKVATPANWKPGDPVVITPDVTNEQAKEMFPQGFESVKLHQRRNICA

SEQ ID NO: 15087 - protein, 162 aa, Glycine max
MAQYAKEFYQRGVKLLGLSCDDVQSHNEWIKDIEAYTPGAKVNYPIIADPKREIIKQLNMVDPDEKDSTGNLPSRALHIVGPDLKIKLSFLYPATTGRNMDEVLRVIESLQKASKFKVATPANWKPGDPVVITPDVTNEQAKEMFPQGFESVKLHQRRNICA

SEQ ID NO: 15088 - DNA, 1156 bp, Glycine max
ccatcgtacggtacactcgtaccaatcagcgttagcgcgaagggataacgtacgtccgttccatcctcgcgcgcgcggccgctccggctccggctccggccatggcgtccacctccgcctccctcggcgccatcctccagcgcttcccgctgctcgcgccccgccccgcctcccgccgcgcgcccaccgcccgccgcgccgtcgccaacaagatctcctgcatcggatgggacccggagggcatcctggcgccgccgcagccgggccacatcgcgcgcctcgagttccggcgccgcctcgacagcgacgccgacgcgcgcgccgccttcgacctccaggtcaaggaggagcaggagcgccgccgcaaggagcgcgaggcgcgggtgatacctgagacggacgccgggctggtggagttcttcctggacacggacgcgcgggagatcgagatcgagatcggcaggctccggcccaggctcaacaagggcttcttcgaccacatccagcgcgagatcgcgcagatcaagttcgcagtcaccagaacagcggcaaatgaagacagactgatcgagctggaggcgatgcagaaggtcatcggggagggagtcgaggcctacgacaagctgcaaaacgacctggtcacggccaaggagcggctcaccaacatcctgcaatccaaagataggaagaaaactctgctcgacatggttgaacggaacgagctcaacatgtccatattaacgcttctcgacgagaacatagcgagcgccaagaccagtaaccaggaggaggccgtggctttcatggaggatgtgcgctcatctatgctgaaatacataacagtataaattttgcctacatacaccggtgaccagttatctctgctatggcactggagtcgtcttcggcgcatagttgttcgaattaattcaatggagctgtaattcacaagtccatcttgtgtgttgtaattttgtttcggttgtatctagttgttctgtctgatatatgttgcaattgtcagtagctttactggcaaaaagagattgtacaatcatatatacatgcacggctgtaccagaaacaaatacaacaagactatgatctaaaaaaaaaaaaaaaaaagcttatcgataccgtcgacctcgaggggggg

SEQ ID NO: 15089 - protein, 248 aa, Glycine max
MASTSASLGAILQRFPLLAPRPASRRAPTARRAVANKISCIGWDPEGILAPPQPGHIARLEFRRRLDSDADARAAFDLQVKEEQERRRKEREARVIPETDAGLVEFFLDTDAREIEIEIGRLRPRLNKGFFDHIQREIAQIKFAVTRTAANEDRLIELEAMQKVIGEGVEAYDKLQNDLVTAKERLTNILQSKDRKKTLLDMVERNELNMSILTLLDENIASAKTSNQEEAVAFMEDVRSSMLKYITV

SEQ ID NO: 15090 - protein, 130 aa, Glycine max
HRTVHSYQSALARRDNVRPFHPRARGRSGSGSGHGVHLRLPRRHPPALPAARAPPRLPPRAHRPPRRRQQDLLHRMGPGGHPGAAAAGPHRAPRVPAPPRQRRRRARRLRPPGQGGAGAPPQGARGAGDT

SEQ ID NO: 15091 - DNA, 793 bp, Glycine max
aggacaggccaagcggagaatcgagggtttcggcttccttgtcatctcgccgtctccgacgccggcgacccgggagcgagacctccaaccgccgccctctcgccggcggcgtatttccccgttccgtagaccaggtatgaagagggccgcgccgtcggaggagccggtggagctctcttcgggcgacgacctgagctcggattccgacgatgaggccgggaacgggaaaggcgagaactccttccggctgcccatgtcctccaaatctacagctccagcaaaaggtgcattgatcaggagggctgaaatgtatcaagagtacatgaagcacatcccaattcctgatcactgcagctccttgatcccatccacatcatggctgggactcggaagatcggtgaagcagttgtacgagcagcccttgcattacctcaccaacatcctcttgagacagtgggatcaacagagggttgggagcgataatgagcaccagcctctggatgctatcattcaccctatgaaagctcaggccctcatttgggccactgaagaagtccataggctgaccacctctagtgaccacttagagaagctctgggccaaagaccccatgtatcatgctaacatagatccagtgttcccttccctaaagttgcattagcaaacatcgcaagttggaccgtcttatcctgtctattttgtttctgcctgctgtaatctggcacattttggttgttagcgaagtaatatgaaccatatgtcactgatgttaaaagtatgatatgtgatggcc

SEQ ID NO: 15092 - protein, 219 aa, Glycine max
GQAKRRIEGFGFLVISPSPTPATRERDLQPPPSRRRRISPFRRPGMKRAAPSEEPVELSSGDDLSSDSDDEAGNGKGENSFRLPMSSKSTAPAKGALIRRAEMYQEYMKHIPIPDHCSSLIPSTSWLGLGRSVKQLYEQPLHYLTNILLRQWDQQRVGSDNEHQPLDAIIHPMKAQALIWATEEVHRLTTSSDHLEKLWAKDPMYHANIDPVFPSLKLH

SEQ ID NO: 15093 - protein, 174 aa, Glycine max
MKRAAPSEEPVELSSGDDLSSDSDDEAGNGKGENSFRLPMSSKSTAPAKGALIRRAEMYQEYMKHIPIPDHCSSLIPSTSWLGLGRSVKQLYEQPLHYLTNILLRQWDQQRVGSDNEHQPLDAIIHPMKAQALIWATEEVHRLTTSSDHLEKLWAKDPMYHANIDPVFPSLKLH

SEQ ID NO: 15094 - protein, 135 aa, Glycine max
MSSKSTAPAKGALIRRAEMYQEYMKHIPIPDHCSSLIPSTSWLGLGRSVKQLYEQPLHYLTNILLRQWDQQRVGSDNEHQPLDAIIHPMKAQALIWATEEVHRLTTSSDHLEKLWAKDPMYHANIDPVFPSLKLH

SEQ ID NO: 15095 - DNA, 809 bp, Glycine max
taatttttcccttccccataaccgcatcttcctcgcctccgttccccgatggctcgcctgctcgcgcaaagcctagcccgcccctctccggccaccgcctccgtcctcccgccgctccgcgggctctccaccaaggtcgagctcatcgagatcgacctcgccgaggaggacccgtcgtcggtcgaggtcgtggggatacggcgcatggaggaggccatccacggcgtgatggtgcggcgggccacgcccgagtggctccctttcgtgccgggcgggtccttctgggtgcccccggtgcggcgcccccgcggggtcgccgaactcgttggccggatcgcggcgtccggggtcggcgaggtgtcgtacgaggcggagccctacgtccccatgacggaggaggaggtgctctccctctccacggcccgggggtggccgtcggcggcctacttcgtcgaaggtgagcgggacgagtgaaccgagatccgatctcgcggttgcgtggattattcgatgagttcgatcgaacggtagaaaacatactcctccatccgtttccagatttccttgtggaattagacgatgggctgtcagatttatgctgtatctgctcaacttggtattcacattcaggctgatagcatcggtgaagcacaccggaaagcggttgagccattgcgcatctctcatggtgttgctgttgaatgtgttcagtttattgtctatatgtttgttatgagatgattattcaccttcagccgtctctggttgaagattattatagtggaatgaaatatggtaattaacggttg

SEQ ID NO: 15096 - protein, 152 aa, Glycine max
IFPFPITASSSPPFPDGSPARAKPSPPLSGHRLRPPAAPRALHQGRAHRDRPRRGGPVVGRGRGDTAHGGGHPRRDGAAGHARVAPFRAGRVLLGAPGAAPPRGRRTRWPDRGVRGRRGVVRGGALRPHDGGGGALPLHGPGVAVGGLLRRR

SEQ ID NO: 15097 - protein, 141 aa, Glycine max
MARLLAQSLARPSPATASVLPPLRGLSTKVELIEIDLAEEDPSSVEVVGIRRMEEAIHGVMVRRATPEWLPFVPGGSFWVPPVRRPRGVAELVGRIAASGVGEVSYEAEPYVPMTEEEVLSLSTARGWPSAAYFVEGERDE

SEQ ID NO: 15098 - protein, 89 aa, Glycine max
MEEAIHGVMVRRATPEWLPFVPGGSFWVPPVRRPRGVAELVGRIAASGVGEVSYEAEPYVPMTEEEVLSLSTARGWPSAAYFVEGERDE

SEQ ID NO: 15099 - DNA, 1037 bp, Glycine max
aatttctccttcctctctgcccatacatatctctctctccatcgatctaacctacacacacagagaaagagagagaagcagcagtagcacatgtaacctagctagcctgcggttctccacggcaacgcttcttcttcttggctgccgcctggtgaacctcgccgtagtctgaacggctaggggggcagcgaggcggcggcgccaggggataatcaggaggaatgtcgtcgtcgggccagatcgcgccggcagaacaagtctgctacgtccactgcaacttctgcaacaccgtactcgcggtgagtgtccctgggaacagcatgctcaacattgtgacagtccggtgtgggcactgtacaaacctactttcggtgagcctgagagggcagatgcactcaccagtccctcctgcagcacaggtccaggagagcagcctgagcaagcccaatggcagcaacggcttcattcgcgatcacagcgtctacaatagcccggagtttggttcgtcttcttcttcgtcgtcgtccaaattccggatgccgacgatgatgttctcgtcgcaaaatgatctgctgcaggaacagacgctgcacgcacgtcctccggagaagaggcagcgtgttccttcagcgtacaacagattcatcaaggaagagatacgaaggataaaggcaaacaaccccgacattagccacagggaagccttcagcactgccgcaaagaactgggcacattacccaaacatccatttcggtctaaaccccgagcgcgacggtggcaagaggctcgccgtcgacgatgccgcgccggctgccaagaagatccaaggtttctgttcatagacacgacggttgggagtccaaacaagaacaattgtatctatatatagtattagtatatcgcatatgtgtatacgtaccgcatgtgagtaagtaaagatgcaaaggaaaagagaagaagtcactacgtaccttaccttatacaattgtacgtacatatacggtgatcgagtgaataaataattagtctgtcttttt

SEQ ID NO: 15100 - protein, 206 aa, Glycine max
MSSSGQIAPAEQVCYVHCNFCNTVLAVSVPGNSMLNIVTVRCGHCTNLLSVSLRGQMHSPVPPAAQVQESSLSKPNGSNGFIRDHSVYNSPEFGSSSSSSSSKFRMPTMMFSSQNDLLQEQTLHARPPEKRQRVPSAYNRFIKEEIRRIKANNPDISHREAFSTAAKNWAHYPNIHFGLNPERDGGKRLAVDDAAPAAKKIQGFCS

SEQ ID NO: 15101 - protein, 173 aa, Glycine max
MLNIVTVRCGHCTNLLSVSLRGQMHSPVPPAAQVQESSLSKPNGSNGFIRDHSVYNSPEFGSSSSSSSSKFRMPTMMFSSQNDLLQEQTLHARPPEKRQRVPSAYNRFIKEEIRRIKANNPDISHREAFSTAAKNWAHYPNIHFGLNPERDGGKRLAVDDAAPAAKKIQGFCS

SEQ ID NO: 15102 - protein, 150 aa, Glycine max
MHSPVPPAAQVQESSLSKPNGSNGFIRDHSVYNSPEFGSSSSSSSSKFRMPTMMFSSQNDLLQEQTLHARPPEKRQRVPSAYNRFIKEEIRRIKANNPDISHREAFSTAAKNWAHYPNIHFGLNPERDGGKRLAVDDAAPAAKKIQGFCS

SEQ ID NO: 15103 - DNA, 786 bp, Glycine max
acaagaagcaagtgaaaagaaagaagaaacaacaccacaagccaccacgtacgtaagctttatcaccttcaaaaatgtcgggttggttcgggggtaagacggacgccaaggccgacgaggccgccaagacggggccgtccgtccaggaccgcgccatcgaggcgaaggaccagaccatcagcttcatcggcgagaaaagcgaggccgtcaccaaggcggcgtcagacaccgccgacgcggccatgaagatggggagcgacgccatggggaaggcgtcagagacggggcaggccatcacggaccgcgccatcgagagcaaggaccagacgttcggcttcttcggtgagaagaccgaggccgccaagaagatggccgccgacaccggcgacgccgccaagcagaagtccgccgaggccgcaaagtgcgtcgaggagaacgcggcgaagttcaccggggaacccgccgcccccaaggagcccaccggcaacatgttccagcaggccggcgggcaggtgatgggtgccgctacgggcgccagggacgccgttatgaacacgctcgggatgggaggagacaaagccgacgtcggcagcgccaaatgaagaccgcaaagcgcaaaggagggctagcccacttttcgtttcgttattccctccgtattcctttatttccgttccaagaaactgatctctacgcatgcgtcggtgtaacttcgtccggtgtatgcaaagatgctttgaatctacagacttgctaattctcatctgatgaatatattcttcacat

SEQ ID NO: 15104 - protein, 175 aa, Glycine max
MSGWFGGKTDAKADEAAKTGPSVQDRAIEAKDQTISFIGEKSEAVTKAASDTADAAMKMGSDAMGKASETGQAITDRAIESKDQTFGFFGEKTEAAKKMAADTGDAAKQKSAEAAKCVEENAAKFTGEPAAPKEPTGNMFQQAGGQVMGAATGARDAVMNTLGMGGDKADVGSAK

SEQ ID NO: 15105 - protein, 119 aa, Glycine max
MKMGSDAMGKASETGQAITDRAIESKDQTFGFFGEKTEAAKKMAADTGDAAKQKSAEAAKCVEENAAKFTGEPAAPKEPTGNMFQQAGGQVMGAATGARDAVMNTLGMGGDKADVGSAK

SEQ ID NO: 15106 - protein, 117 aa, Glycine max
MGSDAMGKASETGQAITDRAIESKDQTFGFFGEKTEAAKKMAADTGDAAKQKSAEAAKCVEENAAKFTGEPAAPKEPTGNMFQQAGGQVMGAATGARDAVMNTLGMGGDKADVGSAK

SEQ ID NO: 15107 - DNA, 917 bp, Glycine max
aatttaatcaaccccctttcaacagtatcatttttagtaatttttttatcagtaaaagggaaaacaaatccttttgttttcattctcacttttgcagctaagttgggaaacattttttgcaggtaagatcactgacacttgatgttaaagtgtgggatccctctgttttaagtatgcttaagtcactgggcaatctttttgcaaactcagtttgggaggagctgctgtatccaccgagtaatttgcaaactgttgacacccctgcgagttcatccaaggaaaatggagaggagttctttcatgcaagaaaaccaaaacatgacgattctatttcattaaaggaaaggttcattcatgcaaagtattctgagaaaatatttattccccggacaaagaaatatcaccctctcttttcacccgcacaactggtgctggaaagcatctatgccaatgataagaaagcagtctaccagcatattatcaagtcagattttgacatcaatgccatcggttggcaagcatcgtctgatgactctttcaacatggtttcttcaaataatttaaacattgcctctcaaagtgaaattcagcccattgaggccatacaagatggttctagcgtgcttcaccttgcatgcctaactagtgacattggcatggtggagctgctcctacaacatggggcaaatataaatgcttgtgattctagaggtcagacaccactacattattgtattattaaagggaagaccgcagctgcaaaagtgcttatcatgaggggagccaatacatatgtcgcagataaagaaggcaaaactcctgttaagcttgcatcagaatctggctgtggtgatgatgaaattctcgctctcttgacaagcagatgacatgtttaaaatcttacaatgagcggtcat

SEQ ID NO: 15108 - protein, 237 aa, Glycine max
MLKSLGNLFANSVWEELLYPPSNLQTVDTPASSSKENGEEFFHARKPKHDDSISLKERFIHAKYSEKIFIPRTKKYHPLFSPAQLVLESIYANDKKAVYQHIIKSDFDINAIGWQASSDDSFNMVSSNNLNIASQSEIQPIEAIQDGSSVLHLACLTSDIGMVELLLQHGANINACDSRGQTPLHYCIIKGKTAAAKVLIMRGANTYVADKEGKTPVKLASESGCGDDEILALLTSR

SEQ ID NO: 15109 - DNA, 1004 bp, Glycine max
ccccctcacaactcgccaacgccaaatccgtctccgccaccggccagccagcgagcgattcgccgccgccgccgtcaccgccgccgccggcgtcaagcccctctctccacccagcaggctcaccctcgcggcccccgccccctcacgggccccgcgtctcccgcgagaaccgcgcccgcccgcctagggtttccgccgccgccggagaggaggggagaagcggaaccagggcgagatggccggacggctcctcgggcagctcctcgtcatgggcggcgccgtcgtcggcagggccgtggtccaggcctaccgccaggccatcgtcaatgcacaaagaaccggagctgctcaggaagctgtgaatggtattcgaagggctagcaaggctatgaccgagcaagaagcccggcaaatattaggtatcagtgaaaagacgagttgggaagagatcgtaaagaagtacgacacgatgtttgagaagaacgccaagagcggaagcttctatctccagtcgaaagtccaccgggccaaagaatgtctggagtccatataccatgataagcccgacataatgaactgagatggccagcgtttcatctaatcgatcgattttgtcgtcgatgtcctgtctgagctatgctgggctgctgcatcaggtcaaatttggttgtaacaggaagtttgttccacttgactcgaataatatattcaacaaaaggaacaccgtcaccgtttgatttgtttttctggaggcgatgcctcgtttccatgcaaattcagatgttgacactttgtgttgttgccatcatctgcaatgtttgattgttgtagcagcttgtgttttgaacctgatatcccatgttgctagcattgacccgtaattttgaagcgcgattatggggttagacacctactttctcccttgaaagtacgctggttggaaaatgtaatctttgatgttggtatggttccaaagatgtaatctctatcacagcatccttccc

SEQ ID NO: 15110 - protein, 126 aa, Glycine max
PPHNSPTPNPSPPPASQRAIRRRRRHRRRRRQAPLSTQQAHPRGPRPLTGPASPARTAPARLGFPPPPERRGEAEPGRDGRTAPRAAPRHGRRRRRQGRGPGLPPGHRQCTKNRSCSGSCEWYSKG

SEQ ID NO: 15111 - protein, 119 aa, Glycine max
PSQLANAKSVSATGQPASDSPPPPSPPPPASSPSLHPAGSPSRPPPPHGPRVSRENRARPPRVSAAAGEEGRSGTRARWPDGSSGSSSSWAAPSSAGPWSRPTARPSSMHKEPELLRKL

SEQ ID NO: 15112 - protein, 114 aa, Glycine max
MAGRLLGQLLVMGGAVVGRAVVQAYRQAIVNAQRTGAAQEAVNGIRRASKAMTEQEARQILGISEKTSWEEIVKKYDTMFEKNAKSGSFYLQSKVHRAKECLESIYHDKPDIMN

SEQ ID NO: 15113 - DNA, 1022 bp, Glycine max
aaaaccaacagctgctactccagcatccacccatccatctctcatcttcttcttcttgcgaccaaacgagcgtctagctagctaaagattcgaacgatggccgttcttgtggcgaggcaggggcgcgagctgcagcggtacagcacgagcaccggcgggcgcatcgtggtggggtgcatcccgtaccggatgcgcgacggcggcgacagcgacggcgagggcgagctggaggtgctggtcatcagctcgcagaaggggcacggcatgatgtttcccaagggcgggtgggagctggacgagtccatggacgacgcggcacggcgcgaggccctcgaggaggccggcgtccgcggggagatgggcaaggtgctcggctgctggcactaccagagccgccgctaccagaccacctacgagggcatcatgtacccgctccgcgtcaccgacgagctccagcagtggcccgagatggcgtcccgcaagcgcacctgggcaactgtgcagcaggtcatggagggatgccagcactgctggatgcgggaggcgctcgaggagctcgtcgcccggcacgccaagccgcagtccgccctgtgagcagccaagcgggctggcggggtgactggagctcgagcgcgcgcgactctcgcgagaagaggccgggagcgagcaccaacgtccgtccgtcgtcctcgtcgtctctctctcttctttcctcggtgcagcggcaggcctgccggcgtgtccggtgtcgtacgacgaccggaccggagcatatatttggccgcccttgccggagagacggactgggatccacgatggcacgcgcgcgtcgacgctttcctgaggcgcagagtcgtcgtcgccgtcgtcgcggcaaataatggggacgaacttagaaatgtgtgaggtagagatcgaaagcgaacggggcaggaaaacttgtcaaaacactgccgaacgaacatgctcacgattctttccttaggctctgggagtaaaagatcaaattgtaaattaattct

SEQ ID NO: 15114 - protein, 165 aa, Glycine max
MAVLVARQGRELQRYSTSTGGRIVVGCIPYRMRDGGDSDGEGELEVLVISSQKGHGMMFPKGGWELDESMDDAARREALEEAGVRGEMGKVLGCWHYQSRRYQTTYEGIMYPLRVTDELQQWPEMASRKRTWATVQQVMEGCQHCWMREALEELVARHAKPQSAL

SEQ ID NO: 15115 - protein, 134 aa, Glycine max
MRDGGDSDGEGELEVLVISSQKGHGMMFPKGGWELDESMDDAARREALEEAGVRGEMGKVLGCWHYQSRRYQTTYEGIMYPLRVTDELQQWPEMASRKRTWATVQQVMEGCQHCWMREALEELVARHAKPQSAL

SEQ ID NO: 15116 - protein, 120 aa, Glycine max
MPALLDAGGARGARRPARQAAVRPVSSQAGWRGDWSSSARDSREKRPGASTNVRPSSSSSLSLLSSVQRQACRRVRCRTTTGPEHIFGRPCRRDGLGSTMARARRRFPEAQSRRRRRRGK

SEQ ID NO: 15117 - DNA, 724 bp, Glycine max
gcttttgttgttcggttagcaccagcgaaacgcagagcgagaggccgaggaagcgatagctctagcgataaggcactgacggatcaatggctgccacggcgtactccgtggccctcctcggtggggcgcgcctccccgccgccaccggcaacctcgccccccgctcctccgcactcctcccgcggcgcaacctccacccgctccgcctccaagatgcgcccaggccgtccctgctccgcgtgaaggccgcctccgacgacacgtcggctagcggcgacgagatcatcgaggacctgaaagggaagtgggaggcgattgaggacaagcccaccttcctcctctacagcggcggcgccgtcgtggctctctggctcaccaccgtcgtcgtcggcgccatcaactccgtgccgttgctccccaagctcctggagctggttgggctcggctacaccgggtggttcgtgtaccgctacctcctcttcaaggaaagcaggaaagagttggccaccgacatcgagagcttgaagaagaagatcgccggaacagaataaactcaagttctctggaacgttttttatggctcttttgtctgtccatgtaatggaagaacacctacttgcttagagtaccatccactgcatttgtgtgttacatacatatctgtatgaacaaagaaatatgctttggttggtgtgcggtgacaatagtgaaattgtatcagttc

SEQ ID NO: 15118 - protein, 154 aa, Glycine max
MAATAYSVALLGGARLPAATGNLAPRSSALLPRRNLHPLRLQDAPRPSLLRVKAASDDTSASGDEIIEDLKGKWEAIEDKPTFLLYSGGAVVALWLTTVVVGAINSVPLLPKLLELVGLGYTGWFVYRYLLFKESRKELATDIESLKKKIAGTE

SEQ ID NO: 15119 - protein, 80 aa, Glycine max
AFVVRLAPAKRRARGRGSDSSSDKALTDQWLPRRTPWPSSVGRASPPPPATSPPAPPHSSRGATSTRSASKMRPGRPCSA

SEQ ID NO: 15120 - DNA, 660 bp, Glycine max
accaagcaattcaaacaacacggtaacacgcaaactccgagaaaatccccaaatcacataaaattagggttacgaatcggggaaagttgtctctcctttcaccctaattcgatgcctataggtttcaggaaccaagtgatgcggtcgttctcgtggatcatcatccctttactcttattgctattctgcttgatcggctcctcacaagcagcggacgagaaatcaagcggcgacgtgtgcaatacggtttcggatccgggcgggtgcccaataaactgtttccgggcggatccggtttgcggagccgacggagtcacgtactggtgcggttgtcccgacgcggcgtgccacggagctcgcgtggtgaaaacgggagcctgcgacgcgggtaacgcgggaagcgcttctgtgccgggtcaagctttgttactgatccatatcgtttggctcttcttgctcggactctctcttctcgtcggtgctttctgaatggattagataataaggaaattgatcccaattcgtttctgtagcttcttcttttgtcgtgatttatagatcagcacttgtgtttgagatgattcatgcttctgtagatcacacgttatgtgtttgtatgtgtaacgttgagttggtttctcttaatggatttgcttcgtc

SEQ ID NO: 15121 - protein, 162 aa, Glycine max
TKQFKQHGNTQTPRKSPNHIKLGLRIGESCLSFHPNSMPIGFRNQVMRSFSWIIIPLLLLLFCLIGSSQAADEKSSGDVCNTVSDPGGCPINCFRADPVCGADGVTYWCGCPDAACHGARVVKTGACDAGNAGSASVPGQALLLIHIVWLFLLGLSLLVGAF

SEQ ID NO: 15122 - protein, 125 aa, Glycine max
MPIGFRNQVMRSFSWIIIPLLLLLFCLIGSSQAADEKSSGDVCNTVSDPGGCPINCFRADPVCGADGVTYWCGCPDAACHGARVVKTGACDAGNAGSASVPGQALLLIHIVWLFLLGLSLLVGAF

SEQ ID NO: 15123 - protein, 116 aa, Glycine max
MRSFSWIIIPLLLLLFCLIGSSQAADEKSSGDVCNTVSDPGGCPINCFRADPVCGADGVTYWCGCPDAACHGARVVKTGACDAGNAGSASVPGQALLLIHIVWLFLLGLSLLVGAF

SEQ ID NO: 15124 - DNA, 530 bp, Glycine max
ctcaaccgccgtcgcgtctccactttcctctccatctcactcactctccccctccgccgccggcgcagcgtcctccccgcgactccgatggccagcaagtgggtcaggcccgaggtgtacccgctgttcgcggcgacgggcgtggccatcggcatctgcgcctttagcctccttcgcaacatcaccggcaacccagaagtcagggtcaacaagatggggagggcagcaggagtgcttgagaaccatgaggagggcaggcgctacgccgagcacggcctcagagcctatgtgcaggacaagacccccgagatcatgccaggaatcaacaagttcttcaccagcccaaaatgaagcactttagtctgtctgtgactcgctattagtaactgttgtggtcaagtgcaaacctatttcaagcattcagtaatgttgttgcgtccataattcagaggacatcgtcaattacctcttattgaaagaaccatgtgatgtttgatggcttgctatatatgtgatggttgatggcttcg

SEQ ID NO: 15125 - protein, 119 aa, Glycine max
STAVASPLSSPSHSLSPSAAGAASSPRLRWPASGSGPRCTRCSRRRAWPSASAPLASFATSPATQKSGSTRWGGQQECLRTMRRAGATPSTASEPMCRTRPPRSCQESTSSSPAQNEAL

SEQ ID NO: 15126 - protein, 116 aa, Glycine max
LNRRRVSTFLSISLTLPLRRRRSVLPATPMASKWVRPEVYPLFAATGVAIGICAFSLLRNITGNPEVRVNKMGRAAGVLENHEEGRRYAEHGLRAYVQDKTPEIMPGINKFFTSPK

SEQ ID NO: 15127 - protein, 87 aa, Glycine max
MASKWVRPEVYPLFAATGVAIGICAFSLLRNITGNPEVRVNKMGRAAGVLENHEEGRRYAEHGLRAYVQDKTPEIMPGINKFFTSPK

SEQ ID NO: 15128 - DNA, 605 bp, Glycine max
atctttggccgcccatctcgactctccaaactctcagctccctccctcgcacacgccgttctcgaatggcggccacctccggcctcacggccaccgttacctcccctccggccgcccttagaacctcgcctcctcccgttctcttcctccgccccatctctcgctgctccaggctccattccctcaaggccaaggcagcagcaaaggaccaggacgaaaagaagcccgaagctaccaaaaagaaggcatacagtcttgtttgcactgcctgcgaagggaacggcgcaatcgcatgcacccaatgcaagggaggtggggagaatttggaagaccatttcggtggccgattcaaagctggaggattatgctggctttgcagaggaaagcgtgaaattctatgtgggagctgcaatggcgctggcttcttgggtggatttatgagcactgccgatgacacttccgaatgaaatgcttatgttgttatttttttttgcttatgttgtgtttgacaaattttgggagatctgtaacatttttacttatatcccctccaaggaatgtgtcccttagaacatttattgcatttaataattgcatatttttct

SEQ ID NO: 15129 - protein, 154 aa, Glycine max
LWPPISTLQTLSSLPRTRRSRMAATSGLTATVTSPPAALRTSPPPVLFLRPISRCSRLHSLKAKAAAKDQDEKKPEATKKKAYSLVCTACEGNGAIACTQCKGGGENLEDHFGGRFKAGGLCWLCRGKREILCGSCNGAGFLGGFMSTADDTSE

SEQ ID NO: 15130 - protein, 146 aa, Glycine max
IFGRPSRLSKLSAPSLAHAVLEWRPPPASRPPLPPLRPPLEPRLLPFSSSAPSLAAPGSIPSRPRQQQRTRTKRSPKLPKRRHTVLFALPAKGTAQSHAPNAREVGRIWKTISVADSKLEDYAGFAEESVKFYVGAAMALASWVDL

SEQ ID NO: 15131 - protein, 133 aa, Glycine max
MAATSGLTATVTSPPAALRTSPPPVLFLRPISRCSRLHSLKAKAAAKDQDEKKPEATKKKAYSLVCTACEGNGAIACTQCKGGGENLEDHFGGRFKAGGLCWLCRGKREILCGSCNGAGFLGGFMSTADDTSE

SEQ ID NO: 15132 - DNA, 892 bp, Glycine max
cccgcccccgtccggcacctctctcgcttcttcctccggcccatgcgacggcgctgacatctttgcccgcctgacctttcgatggccgccgccgccaccgccgccgccgcgaccggcacacttcttccccacgcactattgaatcatcgctcgcctccgccgccgcagctccttgcgctgtcctcctccttccgccgcctctccttatccacctcccatcgcaggaccacccatttagtcgcccactcagacgccggcgccgttgagccggagcccgtgtctgagcctgctcctgagggcgagcctgtcgctgcctctgctgactccgaggagggggaggcggagggggctgtggcattggcggaggaagaggaggagccggcgccgaggcccaagccgattaagttcggcgagatcatcgggattctgaacaagcagttcatcgaggaggctgagaaggtgaaagtgcttccggatttgaagcctggtgacatcatcgagcttagaatgcaacgtcccaacaagaggagattgtctctctttaagggtataatcattgcaaagcacaaatctggtgttcacaccacgatccgcgtcaggaggattattgccggtgttggagttgaaattacattccccatatactcaccaaggatcaaggagatcaaagtaatcagacacaagaaggtgaggagggcaaagttgtactacctgaagtacaagcttccccgtttctcaactttcaagtgagattagatacgcggcttctcacactagcatgtcgatttctccttggcaaacgagttttcacgatcatgttcagatctgtgcatccactgtaatgatctctgaacctcgagtcgcataattttacatctttttttaattggcg

SEQ ID NO: 15133 - protein, 222 aa, Glycine max
MAAAATAAAATGTLLPHALLNHRSPPPPQLLALSSSFRRLSLSTSHRRTTHLVAHSDAGAVEPEPVSEPAPEGEPVAASADSEEGEAEGAVALAEEEEEPAPRPKPIKFGEIIGILNKQFIEEAEKVKVLPDLKPGDIIELRMQRPNKRRLSLFKGIIIAKHKSGVHTTIRVRRIIAGVGVEITFPIYSPRIKEIKVIRHKKVRRAKLYYLKYKLPRFSTFK

SEQ ID NO: 15134 - DNA, 546 bp, Glycine max
atcctaatcgaaaacaaaagaataccccaattctgtcatcagcagcatagatgccaccattgaacaccttgcagcatcaaatgtgttctttattgccaagcggaaaaatgcaaacatggatgtgctgtatctgtctgcgaagatcccccgtgggattccatttctgatagagcttactgctgctgttggtgttcctggtgccaagtgtgcagtcaagactccaaacagggagtttgtgcctctattctttgaagctatggagtctcttatcaattaagtgacggtaaacttgaagatcggtattccgtcaaaattattcggtcatgagcatacacaggtgtgctgttccatggaagttagtgtgaattgtattgtgttgttattgtattactattagatcaccgtatttaaactgttagttttttggtttcagaattttcctctagggatactcaacctggacattttgtgccgcataaattgtatatcggcctgaacattttttcttgccatgtcatagcacatgaaaatacgtcttgtttcttt

SEQ ID NO: 15135 - protein, 53 aa, Glycine max
MDVLYLSAKIPRGIPFLIELTAAVGVPGAKCAVKTPNREFVPLFFEAMESLIN

SEQ ID NO: 15136 - protein, 38 aa, Glycine max
MPPLNTLQHQMCSLLPSGKMQTWMCCICLRRSPVGFHF

SEQ ID NO: 15137 - DNA, 1013 bp, Glycine max
cgttctccgctcgccgccgcgccgcaatatcgtcgggaacatgagcggcgcgacgggcaccgccgacttcttctaccgggaggcgctgcgcctcggctacgtcgcccgctctgccttcaagctgatccagatacagaagcagcacaagctcatcgccccgggcgccgccgtgctcgacctcgggtgcgcccccggcgcgtggctccaggtggcctgccagaaccttggcccgctcgagaagggcggcctggtcgtcggcgtcgatgtcaagaaggtgaaggtcccctcagcgcactgcgactggcgggtcaggacggtctgcaccgatgtgatggctttgatgaagcagcaagccagggcgatgtcgccgcaggaacggggattttctgtgatattatccgacatgtgtccggtagtttcagggatcacaaccagagacgaagctatatcttgtgagctgggcatgcgtgcgctctcgttggcagttggtaagataaaggtcaaagaatcggccgactatcgtgagactatggagaggtttcagagctccacaggcccagatcctgatgaggacggtgttcttagacgtggaggcagcctagtaatcaagtttcttgagaacgaggatataccagggtttaacaaattttgcaaagagaagtttaagaaagtatctctcctgaggcctaaggcgacgaggtctagttcgagggagatctacatgatctgcgaagggttgcggtagaagattggccaccactcacctcccatgagatcttgcaagcttgtgctgagcagagtggctggaccaagaactctacaaatttgccggtgagctgtaggcgtgtaggcctgagatgatgctaacttcatcggcaattcatgattactgagttgaggaaactccgatggtatctctcctggaggtgatttggtttggtgcctttgttaaagaacagccgtattggctttgcgttcgtgcttttagaagaaaaaaggttgtacctgtctcg

SEQ ID NO: 15138 - protein, 247 aa, Glycine max
VLRSPPRRNIVGNMSGATGTADFFYREALRLGYVARSAFKLIQIQKQHKLIAPGAAVLDLGCAPGAWLQVACQNLGPLEKGGLVVGVDVKKVKVPSAHCDWRVRTVCTDVMALMKQQARAMSPQERGFSVILSDMCPVVSGITTRDEAISCELGMRALSLAVGKIKVKESADYRETMERFQSSTGPDPDEDGVLRRGGSLVIKFLENEDIPGFNKFCKEKFKKVSLLRPKATRSSSREIYMICEGLR

SEQ ID NO: 15139 - protein, 234 aa, Glycine max
MSGATGTADFFYREALRLGYVARSAFKLIQIQKQHKLIAPGAAVLDLGCAPGAWLQVACQNLGPLEKGGLVVGVDVKKVKVPSAHCDWRVRTVCTDVMALMKQQARAMSPQERGFSVILSDMCPVVSGITTRDEAISCELGMRALSLAVGKIKVKESADYRETMERFQSSTGPDPDEDGVLRRGGSLVIKFLENEDIPGFNKFCKEKFKKVSLLRPKATRSSSREIYMICEGLR

SEQ ID NO: 15140 - protein, 151 aa, Glycine max
RSPLAAAPQYRREHERRDGHRRLLLPGGAAPRLRRPLCLQADPDTEAAQAHRPGRRRARPRVRPRRVAPGGLPEPWPAREGRPGRRRRCQEGEGPLSALRLAGQDGLHRCDGFDEAASQGDVAAGTGIFCDIIRHVSGSFRDHNQRRSYIL

SEQ ID NO: 15141 - DNA, 916 bp, Glycine max
actctttcgagattcccttctagctaaaaccctaatattcttctttccgttgagagaagttctccgtggggaacgatgcctaccccgactagcttgatcatgggtaagatgattatcaccatgactttgagccaaagaatgccttccgtaaccaccgcatcatacgctgaggctaagacagtagtcttctgggacgtggacgagtgcccaatcccggaagatctcgaccctcaatctgtttatcagaacatcagaacagcactagcgaacaaaggttaccacggcgaggtctcaatcatggcgtttggtgacaggaaccagatccctggttactacgaatcagccggaatccaaatctttcccaaaggagataagtatgataggattggtcagatgcagttagagtttttcgggtggatgagggataatagttgtcagtacaccaacatgatggtggtgacacgatccgcaatggagttggtttcttatctcgagtataaaaacacgcaccacaacattctcttcgcgaatcctctgtacccgcaaacaaaggcttgcggctgcaaattcggagctaggcaagaagatcctagcgctgagacttgggtctgggaaaccctagcccttggaggagaccccagcatcaaaacagtagaagagccttgcaggtacagagagtagggtggtggtgatgttaaggattctgtttctccatgagaatggggaatgctcttctacatatttgctaattacttaaatgtttccaagtagctagctacatatttgcttagctgtttaatgtttataaacttgctacataattgcttgcttagtatttaatgtttctaatttgctatgtatttcttggtcgttaatgtttgtaacttgcttggttagttaatgtttataagttgct

SEQ ID NO: 15142 - protein, 201 aa, Glycine max
MPTPTSLIMGKMIITMTLSQRMPSVTTASYAEAKTVVFWDVDECPIPEDLDPQSVYQNIRTALANKGYHGEVSIMAFGDRNQIPGYYESAGIQIFPKGDKYDRIGQMQLEFFGWMRDNSCQYTNMMVVTRSAMELVSYLEYKNTHHNILFANPLYPQTKACGCKFGARQEDPSAETWVWETLALGGDPSIKTVEEPCRYRE

SEQ ID NO: 15143 - protein, 193 aa, Glycine max
MGKMIITMTLSQRMPSVTTASYAEAKTVVFWDVDECPIPEDLDPQSVYQNIRTALANKGYHGEVSIMAFGDRNQIPGYYESAGIQIFPKGDKYDRIGQMQLEFFGWMRDNSCQYTNMMVVTRSAMELVSYLEYKNTHHNILFANPLYPQTKACGCKFGARQEDPSAETWVWETLALGGDPSIKTVEEPCRYRE

SEQ ID NO: 15144 - protein, 190 aa, Glycine max
MIITMTLSQRMPSVTTASYAEAKTVVFWDVDECPIPEDLDPQSVYQNIRTALANKGYHGEVSIMAFGDRNQIPGYYESAGIQIFPKGDKYDRIGQMQLEFFGWMRDNSCQYTNMMVVTRSAMELVSYLEYKNTHHNILFANPLYPQTKACGCKFGARQEDPSAETWVWETLALGGDPSIKTVEEPCRYRE

SEQ ID NO: 15145 - DNA, 721 bp, Glycine max
cgcacgaggatcaacagcagcagagagaagcaaaccggccggccggcgagatggcgcaggagagcctgaggctggtgtgcccgccggtgtcggcgcacgaggggcggctgccgcggcagtacacgctggaggggcagggcgcgaagaaggacatctcgccgccgctggagtggtacggggtgcccgacggcacgcggtcgctggcggtggtggtgcaggacgtcgacgcggacgagcgggtgccgtggacgcactgggtggtcgtcaacatctcgcccgaggagaaggggctgcccgagggcttctccggcgccgggggcaacgccaacgccggcggcggcgacggcggcgtccaggagggggtcaacgactggaagcagcccgggtggcgcggccccgtcccggactcccacggccaccgcatccagttccggctctacgcgctcgacgacgtgctcagcctcggcaacaaggtgactgtggacaaggtcatggaggccatcgaggggcacgtgctgggggaggccgagatcacggccgtgttctaaggagttcttgtggattttgacactcggctctgtgtgtgtgtgtgacctgcttgttacttcttgcgaattgtgtgtggtctgttctgtagcgtgcctgtatacgcatggccacgagcagcctttgtaattttgatccaataaatgaagtgacttcttatcagccgggtacggtt

SEQ ID NO: 15146 - protein, 188 aa, Glycine max
ARGSTAAERSKPAGRRDGAGEPEAGVPAGVGARGAAAAAVHAGGAGREEGHLAAAGVVRGARRHAVAGGGGAGRRRGRAGAVDALGGRQHLARGEGAARGLLRRRGQRQRRRRRRRRPGGGQRLEAARVARPRPGLPRPPHPVPALRARRRAQPRQQGDCGQGHGGHRGARAGGGRDHGRVLRSSCGF

SEQ ID NO: 15147 - protein, 181 aa, Glycine max
HEDQQQQREANRPAGEMAQESLRLVCPPVSAHEGRLPRQYTLEGQGAKKDISPPLEWYGVPDGTRSLAVVVQDVDADERVPWTHWVVVNISPEEKGLPEGFSGAGGNANAGGGDGGVQEGVNDWKQPGWRGPVPDSHGHRIQFRLYALDDVLSLGNKVTVDKVMEAIEGHVLGEAEITAVF

SEQ ID NO: 15148 - protein, 165 aa, Glycine max
MAQESLRLVCPPVSAHEGRLPRQYTLEGQGAKKDISPPLEWYGVPDGTRSLAVVVQDVDADERVPWTHWVVVNISPEEKGLPEGFSGAGGNANAGGGDGGVQEGVNDWKQPGWRGPVPDSHGHRIQFRLYALDDVLSLGNKVTVDKVMEAIEGHVLGEAEITAVF

SEQ ID NO: 15149 - DNA, 806 bp, Glycine max
acagcgcctacaaacccttgctagttgcttcctatagtaagccttgcttcctctcgaccaaggctagctttcgcaatggagccatcgaccaagctcttcctcgtgctcctcggcctaaacttgatggtcaccgctgtgcacggtggttgcggaccccactgccctaccccgaccccaccgccgcctccatcgaccaacggcggctcgtgctcgattgacacgttgaagctgcgcgtgtgcgccaacgtgctgaacctgctgaagctcgggcttggcgtgccgcccagcgagcggtgttgcccgctgctggccgatctggccgacctggacgctgcggtgtgcctctgcaccgccatcagggccaaggtcctcggcgtcatcaagctcaatgtccccgtcgacctggtgctcctgctcaaccactgccacaagacctgcccgcctggcttcacctgcccgcactgatcgaacaaagtactcggccaagcatggcatgctgcgtacacatgccatgcatgcagccgtctatacaccactccagtttgtgtttgagttcatctatatgtcttgtgcatgcctaggttctctgtcatgcattagcattatgcatgcatgcagtgatcactaggtaggtacgtaaacataagtgcatgaaagtgtgtcaagtttgtggtgtccaaataaatgacccacgtaaccggggatttgtatcatcatctgaaatactgtaccgggcgcctatatgcccctagcttgtatcatctgaaatctgatgaagttgtgtaaactcgagatgtgtgttacat

SEQ ID NO: 15150 - protein, 129 aa, Glycine max
MEPSTKLFLVLLGLNLMVTAVHGGCGPHCPTPTPPPPPSTNGGSCSIDTLKLRVCANVLNLLKLGLGVPPSERCCPLLADLADLDAAVCLCTAIRAKVLGVIKLNVPVDLVLLLNHCHKTCPPGFTCPH

SEQ ID NO: 15151 - protein, 113 aa, Glycine max
MVTAVHGGCGPHCPTPTPPPPPSTNGGSCSIDTLKLRVCANVLNLLKLGLGVPPSERCCPLLADLADLDAAVCLCTAIRAKVLGVIKLNVPVDLVLLLNHCHKTCPPGFTCPH

SEQ ID NO: 15152 - protein, 79 aa, Glycine max
MSPSTWCSCSTTATRPARLASPARTDRTKYSAKHGMLRTHAMHAAVYTPLQFVFEFIYMSCACLGSLSCISIMHACSDH

SEQ ID NO: 15153 - DNA, 1145 bp, Glycine max
ttgtttttggcccgttaatttccgagcaatcgttcgccgtcgcttgaagctgctgctgctgctgccctttgtgaagtgtttgttctccgtcatctcgcgtcgttagttgagttcagaatggatgggcgacatcagaagcaaaaaaaacaagtacagtataattgttcctacatataatgagcgtctcaacattggtctcattgtttacctcatcttcaagcaccttggggatgctgattttgaaattattattgtggacgatgggagtcctgatggtactcaggatgttgtaaaacaactgcagcaagtttatggagaagatcggattctttaagagcacgccctaggaagttgggtttgggaactgcttatattcatggcatgaagcatgcatctggaaattttgttgtcatcatggatgctgatctatctcaccatccaaaatatttgccaaacttcattagaaagcagtcggagactggtgctgatatagttacagggactcgttatgttaaaggtggtggtgtgcatggatggaatcttatgcgtaagctaactagcaggggggcaaatgttcttgcacaaacacttttatggcctggtgtctcagatttgacaggatcttttagactttataggaaatcagtgcttgaagatatcattagttgctgtgttagtaaaggatatgtctttcaaatggaaatgatagtacgggcatccagaaaagggtaccatattgaagaggtcccaatcacatttgttgatagagtatttggaagttcaaagcttggtggatcagagattgttgaatacctaaagggcctagcttatctcttggtgacaacataaaaggataaatcataacaactcgatataccttacattttggggaagaaaaagagatataaattttgttgttcatttacttatatattgaggacatcaaatttactgctagaatctccgtaactttgccttttgaagttagcaggaagcatctgtatgattctctctgtttataactgtgtgaggctttacaatttttggttttgctgaacttgtaacttaagctgaggtcttccaaaaaaaaaaaaaaaaaaaaaaaaaaagcttatcgataccgtcgacctcgagggggggcccgg

SEQ ID NO: 15154 - protein, 155 aa, Glycine max
MKHASGNFVVIMDADLSHHPKYLPNFIRKQSETGADIVTGTRYVKGGGVHGWNLMRKLTSRGANVLAQTLLWPGVSDLTGSFRLYRKSVLEDIISCCVSKGYVFQMEMIVRASRKGYHIEEVPITFVDRVFGSSKLGGSEIVEYLKGLAYLLVTT

SEQ ID NO: 15155 - protein, 144 aa, Glycine max
MDADLSHHPKYLPNFIRKQSETGADIVTGTRYVKGGGVHGWNLMRKLTSRGANVLAQTLLWPGVSDLTGSFRLYRKSVLEDIISCCVSKGYVFQMEMIVRASRKGYHIEEVPITFVDRVFGSSKLGGSEIVEYLKGLAYLLVTT

SEQ ID NO: 15156 - protein, 101 aa, Glycine max
MRKLTSRGANVLAQTLLWPGVSDLTGSFRLYRKSVLEDIISCCVSKGYVFQMEMIVRASRKGYHIEEVPITFVDRVFGSSKLGGSEIVEYLKGLAYLLVTT

SEQ ID NO: 15157 - DNA, 868 bp, Glycine max
agcactagattagtggaatctttttttttcttttctatcgcttcctccacccaactctaatctcatcgcttccttcttcagctctaatcggagaaaaatggaggcagtaacggcgataaagccactaatcaaagtcgctgcaatctccggttctctccggaaaggctctttcaacaccggtctcctccgcgccgcgatggagttgacgaaagaatcggttccggggatgcatattgagcatatagacatctctccgttgccgttgatcaacaccgatcttgaatccaacgggacttaccctcccgtcgtcgaagctttccggcagaagattcttgaagccgacagcattctcttcgcttcccctgagtacaacttctctgtctcagctccacttaagaacgcgatcgattgggcttcaaggtcacctaacgtttgggctgacaaacctgctgccatcataagcaccggtggaggttttggtggaggaaggtcgcagtaccatcttcgacagattggagtgttccttgatcttcatttcatcaacaaaccggagtttactctcaatgcgtttcagccgcctcagaagttcgatgcagaaggaaacttggtcgatgaagtggctagggagaggttaaaacaagtccttgtctcgttacaggcgtttactctgcgacttcaaggtaaataagtggagggccgttcttgatcatttgtgtgagagattgatgttcgtgtgatgaaaataatgtcagattcttgtgataagaaacattgccacttatcctatgtaaatttatatttctgattaatgtcgtatgtgtttacatgataaaactgtgtttattaaacgagtgattcttgttgtttc

SEQ ID NO: 15158 - protein, 196 aa, Glycine max
MEAVTAIKPLIKVAAISGSLRKGSFNTGLLRAAMELTKESVPGMHIEHIDISPLPLINTDLESNGTYPPVVEAFRQKILEADSILFASPEYNFSVSAPLKNAIDWASRSPNVWADKPAAIISTGGGFGGGRSQYHLRQIGVFLDLHFINKPEFTLNAFQPPQKFDAEGNLVDEVARERLKQVLVSLQAFTLRLQGK

SEQ ID NO: 15159 - protein, 163 aa, Glycine max
MELTKESVPGMHIEHIDISPLPLINTDLESNGTYPPVVEAFRQKILEADSILFASPEYNFSVSAPLKNAIDWASRSPNVWADKPAAIISTGGGFGGGRSQYHLRQIGVFLDLHFINKPEFTLNAFQPPQKFDAEGNLVDEVARERLKQVLVSLQAFTLRLQGK

SEQ ID NO: 15160 - protein, 153 aa, Glycine max
MHIEHIDISPLPLINTDLESNGTYPPVVEAFRQKILEADSILFASPEYNFSVSAPLKNAIDWASRSPNVWADKPAAIISTGGGFGGGRSQYHLRQIGVFLDLHFINKPEFTLNAFQPPQKFDAEGNLVDEVARERLKQVLVSLQAFTLRLQGK

SEQ ID NO: 15161 - DNA, 1872 bp, Glycine max
gaattcggcacgagggcccctccgccggacgtcaaggaggccttctccgccttctccgacgccgctgccgcatccatgtccgccgaccagctcctccgcttcctgcacgatcaccagcgcgaaacggactgctccgctgaggattccaaccgcatcctcgacagcatcattcaatcgcgcaaacaaaacgacaccaatgccgaatgcgaccaccacaccgacaacaacaacaatggtctcagcctcgacgagttcttccgtttcttgttcctcgtcgatttcaacgatcccctcaaatcccaggtacatcatgatatgaatgctccgttgtcacattatttcatatatacagggcacaattcctacctgactgggaatcagctgagcagcgattgcagtgatgtgccaatcataaaggctttgcaacgaggtgtgcgagtaattgaactagatttatggccaaattcaactaaagatgatatcgacgtagttcatggaaggacacttactgctcctgtctcacttatccaatgtttaaagtccataaaagagtatgcttttgttaaatctgactacccagtcatcataactttagaggaccaccttacaccattccttcaagctaaagttgcagagatgatagctcaagtatttggagacatgctctattttcctcaggcagattctctgacagaattccccacaccagaatcgttgaaaggtcgaattcttatatcaaccaaaccaccaaaagaatatcttgaatccaagcaattcaaggatagtgacagtgagagggaatcaactgaagaaggatcattatccccatgtgttatccctgaattggaggctgttgatgagaagttaaatggaagtgatcttgatgaggaaggcttgaatgctcgtgataaaaaatcagaccaacagagtgcacctgagtacaaacgtttgattacaatccatgctgggaagccaaagggtcatgtaaagcaccacttgaacaatgttgggggcgtgaagcgcttgagcttgagcgaacaggaacttgaaaaggcttctgctacttatggatcagatattgttagatttacacagaagaatattatcagggtgtatccaaagggaacacgtgttacctcctcgaattacaggccacatataggatggatgtatggagctcagatggtggcatttaacatgcaggggcatggaaaatcactctggtacatgcaaggcatgtttagagcaaatggcgggtgtggttatgtgaaaaagcctgcatttctaatagaaaaaggtccacataatgaggtttttgatcctaaaagagcattgccagtgaagaaaacattgaaggtgaaagtatatatgggaaatgggtggagctcagatttcagcaaaacacactttgattccttctctccaccggacttttacacaaaggtttgcattgttggagtaccagctgataaagccaataagaagaccaaggtaattcaagacaactggtttcccgtctgggacgaagagtttgaatttcccttgactgttccagaactagctttgctccgaatagaagttcgagaatatgataagcatgaaaaggatgactttggtgggcaaacatgtttgccaatctctgagttaagatctggtttccgtgcagtccctctatttgatcagaagggcgagcaattaaaatctgtaaagcttttaatgcggtttcagttcaaatgaactacaaagattagccattatttaggcatgtaacatgatataatattcctaggtggttttccttttgactagtgtgactaggggcatcaagaagattgttttaactatattatgggcttaagaggtttatttatc

SEQ ID NO: 15162 - protein, 578 aa, Glycine max
EFGTRAPPPDVKEAFSAFSDAAAASMSADQLLRFLHDHQRETDCSAEDSNRILDSIIQSRKQNDTNAECDHHTDNNNNGLSLDEFFRFLFLVDFNDPLKSQVHHDMNAPLSHYFIYTGHNSYLTGNQLSSDCSDVPIIKALQRGVRVIELDLWPNSTKDDIDVVHGRTLTAPVSLIQCLKSIKEYAFVKSDYPVIITLEDHLTPFLQAKVAEMIAQVFGDMLYFPQADSLTEFPTPESLKGRILISTKPPKEYLESKQFKDSDSERESTEEGSLSPCVIPELEAVDEKLNGSDLDEEGLNARDKKSDQQSAPEYKRLITIHAGKPKGHVKHHLNNVGGVKRLSLSEQELEKASATYGSDIVRFTQKNIIRVYPKGTRVTSSNYRPHIGWMYGAQMVAFNMQGHGKSLWYMQGMFRANGGCGYVKKPAFLIEKGPHNEVFDPKRALPVKKTLKVKVYMGNGWSSDFSKTHFDSFSPPDFYTKVCIVGVPADKANKKTKVIQDNWFPVWDEEFEFPLTVPELALLRIEVREYDKHEKDDFGGQTCLPISELRSGFRAVPLFDQKGEQLKSVKLLMRFQFK

SEQ ID NO: 15163 - protein, 553 aa, Glycine max
MSADQLLRFLHDHQRETDCSAEDSNRILDSIIQSRKQNDTNAECDHHTDNNNNGLSLDEFFRFLFLVDFNDPLKSQVHHDMNAPLSHYFIYTGHNSYLTGNQLSSDCSDVPIIKALQRGVRVIELDLWPNSTKDDIDVVHGRTLTAPVSLIQCLKSIKEYAFVKSDYPVIITLEDHLTPFLQAKVAEMIAQVFGDMLYFPQADSLTEFPTPESLKGRILISTKPPKEYLESKQFKDSDSERESTEEGSLSPCVIPELEAVDEKLNGSDLDEEGLNARDKKSDQQSAPEYKRLITIHAGKPKGHVKHHLNNVGGVKRLSLSEQELEKASATYGSDIVRFTQKNIIRVYPKGTRVTSSNYRPHIGWMYGAQMVAFNMQGHGKSLWYMQGMFRANGGCGYVKKPAFLIEKGPHNEVFDPKRALPVKKTLKVKVYMGNGWSSDFSKTHFDSFSPPDFYTKVCIVGVPADKANKKTKVIQDNWFPVWDEEFEFPLTVPELALLRIEVREYDKHEKDDFGGQTCLPISELRSGFRAVPLFDQKGEQLKSVKLLMRFQFK

SEQ ID NO: 15164 - protein, 473 aa, Glycine max
MNAPLSHYFIYTGHNSYLTGNQLSSDCSDVPIIKALQRGVRVIELDLWPNSTKDDIDVVHGRTLTAPVSLIQCLKSIKEYAFVKSDYPVIITLEDHLTPFLQAKVAEMIAQVFGDMLYFPQADSLTEFPTPESLKGRILISTKPPKEYLESKQFKDSDSERESTEEGSLSPCVIPELEAVDEKLNGSDLDEEGLNARDKKSDQQSAPEYKRLITIHAGKPKGHVKHHLNNVGGVKRLSLSEQELEKASATYGSDIVRFTQKNIIRVYPKGTRVTSSNYRPHIGWMYGAQMVAFNMQGHGKSLWYMQGMFRANGGCGYVKKPAFLIEKGPHNEVFDPKRALPVKKTLKVKVYMGNGWSSDFSKTHFDSFSPPDFYTKVCIVGVPADKANKKTKVIQDNWFPVWDEEFEFPLTVPELALLRIEVREYDKHEKDDFGGQTCLPISELRSGFRAVPLFDQKGEQLKSVKLLMRFQFK

SEQ ID NO: 15165 - DNA, 658 bp, Glycine max
tactcaccaaagcattagatacattttacttctcttctttttctctttatatctgtcatctttagctttgtcatatcgaaatggccactgttgaggttgaacaagtgattgctccagtagcagagaacgttgaggtaccagcaaaggcagtggaggagccagacgtagagaccaaacaacccgaagaagtcgtcgccacgacagactctgctgctgctccagccgccctaaaagaacaagaagccgaagccgaagcaccagtcgtggaaacgagcaaagaagtggttgtggaagaagcagagaaaaaagatgaagaaacagaagagccaaaggtagaagagaaagaagagaagacggaagctccggtggctgtggaggaggcaaagatagaagagaaggaggaggtgactgaaactccggcggttgtggaggagagggagaagactgaggctgaggaagttgtggctgctggggaagtcgccgccgagaaggccgaggagtaaagaggaagaaacaatatatgaccttctttggtctcatttcgttgttaaaaagaagattcttcacaaaatttcataagtattttctatcgtttgttatgatgaaatgatatttggttatgatgaaatgatatattttgggagttttgatggttgtt

SEQ ID NO: 15166 - protein, 140 aa, Glycine max
MATVEVEQVIAPVAENVEVPAKAVEEPDVETKQPEEVVATTDSAAAPAALKEQEAEAEAPVVETSKEVVVEEAEKKDEETEEPKVEEKEEKTEAPVAVEEAKIEEKEEVTETPAVVEEREKTEAEEVVAAGEVAAEKAEE

SEQ ID NO: 15167 - DNA, 1087 bp, Glycine max
accagctccatcgcaagggacaatactaccactctagccacttactactggagctagcaggcgccaccccacccaccaaccaacgacaacgagcgcgccgcgagcgcacgccggagcaagcatgtcgatgtcggtgtccatgtccgggaaggcgagcgacccgggttccgcctggttcggcggcggcagcaggagcccgcaaccggggccgacgcacaacgtgcggctcatcgccatggccgttgccgcgttcgtctccgtgctcggcctctccctgctcctgcacctctacatctgccgcgtccgccgcaggaaccgcaggcaggcggaggcagccgcggcggctctggaggccggctcggcggcccccaagccggccaaggttggcctggacccgtccgccatcgcggcgctgccgacagcggcgtacaaggagacgggcgagccgggcagcggcgcaagcgagtgcaccatctgcctcggcgccatgcaggagggcgaggcggtgcgcgtgctgccggcctgcgcccacgtgttccacgtcccctgcgtcgacacgtggctcgcgtccagctcgtcgtgcccggtctgccgcgccctggtggagccgccgccgtcgccggccgcgccagcgtgggtgcaggagaagcagggcctggagaaggagtgtggtgcaagtgggagctcggcgccgccatgtgggctgggggcgtcgctgatgaggatgctgagcagggagaggccgctggcgcggaggccgacgcagggtgaccacgcgcacccgatggaaatgcatgtcgaggacttggaaagccagcagccccagctgcaacactctgtggatagcaattagtctacttttctgttcttcttttttgggttttcgccattcgccgctgctcgattgcaaatcttgcatttgggtggccgattcagaggtgtgaaatacggaaatacacccctgaaagtgtcctatgttttaattaggcactggcgcttgtggatgtgcttggagctcacccatatctctcgtatttgtgcaaacaagggatcatggatatataaatagagctccgttttctcttcc

SEQ ID NO: 15168 - protein, 243 aa, Glycine max
MSMSVSMSGKASDPGSAWFGGGSRSPQPGPTHNVRLIAMAVAAFVSVLGLSLLLHLYICRVRRRNRRQAEAAAAALEAGSAAPKPAKVGLDPSAIAALPTAAYKETGEPGSGASECTICLGAMQEGEAVRVLPACAHVFHVPCVDTWLASSSSCPVCRALVEPPPSPAAPAWVQEKQGLEKECGASGSSAPPCGLGASLMRMLSRERPLARRPTQGDHAHPMEMHVEDLESQQPQLQHSVDSN

SEQ ID NO: 15169 - protein, 241 aa, Glycine max
MSVSMSGKASDPGSAWFGGGSRSPQPGPTHNVRLIAMAVAAFVSVLGLSLLLHLYICRVRRRNRRQAEAAAAALEAGSAAPKPAKVGLDPSAIAALPTAAYKETGEPGSGASECTICLGAMQEGEAVRVLPACAHVFHVPCVDTWLASSSSCPVCRALVEPPPSPAAPAWVQEKQGLEKECGASGSSAPPCGLGASLMRMLSRERPLARRPTQGDHAHPMEMHVEDLESQQPQLQHSVDSN

SEQ ID NO: 15170 - protein, 238 aa, Glycine max
QLHRKGQYYHSSHLLLELAGATPPTNQRQRARRERTPEQACRCRCPCPGRRATRVPPGSAAAAGARNRGRRTTCGSSPWPLPRSSPCSASPCSCTSTSAASAAGTAGRRRQPRRLWRPARRPPSRPRLAWTRPPSRRCRQRRTRRRASRAAAQASAPSASAPCRRARRCACCRPAPTCSTSPASTRGSRPARRARSAAPWWSRRRRRPRQRGCRRSRAWRRSVVQVGARRRHVGWGRR

SEQ ID NO: 15171 - DNA, 743 bp, Glycine max
attgttcctgcgtctccccccttccttccaaacagcggtgacctccaccacctccaccaccacccaagagccgagcgaggagaagagagaagaggagatcgaccatggctgcggacggcgggaggtgggtgggcctggcggtggacttctcggaggggagccgcgcggcgctgcagtgggcggcggacaacctgctccgcgccggcgacaacctgctcctcctgcacgtcctcaaggaccccgactacgagcagggcgagaccctcctctgggaggcctccggctcgcctttgatccccctctcggagttctctcacccttcaattgcaaagaagtatggtgtgaagcctgatgctgaaacgctggacatgctcaacactatagcgaagcagaaggaggttgccgtggtttccaaagtcctgtttggagatccccgcgagaagctgtgccaagccatccatgacatgcccatcagctccctggtcattgggagcaggggccttggcaagctcaagagggtgctcttgggcagcgtcagcgattacgtcgtgaacaacgccgcctgcccggtcaccgttgtcaagccagcgagtaaccatgcctgatctcatggtcgcaaatgtctacatgtgttttagtttgccggagtcctatatatccagttggccgcaacttattgaaccatccagtgttattcgtaataataattgacaattagcctgtggatgattcccaggttgtgc

SEQ ID NO: 15172 - protein, 166 aa, Glycine max
MAADGGRWVGLAVDFSEGSRAALQWAADNLLRAGDNLLLLHVLKDPDYEQGETLLWEASGSPLIPLSEFSHPSIAKKYGVKPDAETLDMLNTIAKQKEVAVVSKVLFGDPREKLCQAIHDMPISSLVIGSRGLGKLKRVLLGSVSDYVVNNAACPVTVVKPASNHA

SEQ ID NO: 15173 - protein, 116 aa, Glycine max
LFLRLPPSFQTAVTSTTSTTTQEPSEEKREEEIDHGCGRREVGGPGGGLLGGEPRGAAVGGGQPAPRRRQPAPPARPQGPRLRAGRDPPLGGLRLAFDPPLGVLSPFNCKEVWCEA

SEQ ID NO: 15174 - protein, 97 aa, Glycine max
IVPASPPFLPNSGDLHHLHHHPRAERGEERRGDRPWLRTAGGGWAWRWTSRRGAARRCSGRRTTCSAPATTCSSCTSSRTPTTSRARPSSGRPPARL

SEQ ID NO: 15175 - DNA, 741 bp, Glycine max
acagaccagagcacaatcccctatgttagctccagttccttaaatagctccatcctccacacgtctcaaaccatctccacactcttcagttttcattgtttggagaacacacaatacacctcccaccttagcagcgcaatggcgaccaccaccatgtccctctcctcgaccttcgccggcaagtcggtgaagaacgtggcttcatcagctctctttggtgaggcccgtgtcactatgcgcaagaccgctgcaaaggccaagccggtttcatcaggcagcccatggtacggtgccgaccgtgtgctctacctcggcccgctttccggagagcccccgagctacttgaccggcgagttccccggcgactacggatgggacaccgccgggctctcggccgaccccgagacctttgccaagaaccgggagctcgaggtgatccactgccggtgggccatgctcggtgcgcttggatgtgtcttccccgagcttcttgcacgcaacggcgtcaagttcggcgaggcggtatggttcaaggccggttcccagatcttcagcgagggtggcctcgactacctgggcaaccccagcctcgtgcacgcacaaagcatccttgctatctgggcatgccaagtcgtgctcatgggcgctgttgaggggtaccgcattgctggcggcccactcggtgaggtagtcgacccactctacctgtttaaacacaataaagttggaacgggagggggg

SEQ ID NO: 15176 - protein, 247 aa, Glycine max
TDQSTIPYVSSSSLNSSILHTSQTISTLFSFHCLENTQYTSHLSSAMATTTMSLSSTFAGKSVKNVASSALFGEARVTMRKTAAKAKPVSSGSPWYGADRVLYLGPLSGEPPSYLTGEFPGDYGWDTAGLSADPETFAKNRELEVIHCRWAMLGALGCVFPELLARNGVKFGEAVWFKAGSQIFSEGGLDYLGNPSLVHAQSILAIWACQVVLMGAVEGYRIAGGPLGEVVDPLYLFKHNKVGTGGG

SEQ ID NO: 15177 - protein, 201 aa, Glycine max
MATTTMSLSSTFAGKSVKNVASSALFGEARVTMRKTAAKAKPVSSGSPWYGADRVLYLGPLSGEPPSYLTGEFPGDYGWDTAGLSADPETFAKNRELEVIHCRWAMLGALGCVFPELLARNGVKFGEAVWFKAGSQIFSEGGLDYLGNPSLVHAQSILAIWACQVVLMGAVEGYRIAGGPLGEVVDPLYLFKHNKVGTGGG

SEQ ID NO: 15178 - protein, 196 aa, Glycine max
MSLSSTFAGKSVKNVASSALFGEARVTMRKTAAKAKPVSSGSPWYGADRVLYLGPLSGEPPSYLTGEFPGDYGWDTAGLSADPETFAKNRELEVIHCRWAMLGALGCVFPELLARNGVKFGEAVWFKAGSQIFSEGGLDYLGNPSLVHAQSILAIWACQVVLMGAVEGYRIAGGPLGEVVDPLYLFKHNKVGTGGG

SEQ ID NO: 15179 - DNA, 486 bp, Glycine max
tatttgcccttataaaccagaagggtccatggctatgatggtaagactaaacctttcacttctggaggatattagcgatgatattgatttttgtttcaagcttgctaaggaggaatccgttatcattcttccaggaactgcggtagggctgaataattggattcgtattattttcgctactgatccatttgctctgttagagggtttgaagagggtaaaatctttttgtgaaaggcatgcaagaaagtgtttaaagacaactgaataaaattcacaaattaaggcggctactatgttgtattgaggacctaataggttctcaaatatccaattttgcgaattggatcgttttacaaataattgtgattctctgtatttttttcagttttattgttagcaagctagtttatcactagcttttaaggaaggattctccaagaatctaagtgtttatcaattggtatttgtgaaaaaaaaaaagcttat

SEQ ID NO: 15180 - protein, 88 aa, Glycine max
ICPYKPEGSMAMMVRLNLSLLEDISDDIDFCFKLAKEESVIILPGTAVGLNNWIRIIFATDPFALLEGLKRVKSFCERHARKCLKTTE

SEQ ID NO: 15181 - protein, 79 aa, Glycine max
MAMMVRLNLSLLEDISDDIDFCFKLAKEESVIILPGTAVGLNNWIRIIFATDPFALLEGLKRVKSFCERHARKCLKTTE

SEQ ID NO: 15182 - protein, 77 aa, Glycine max
MMVRLNLSLLEDISDDIDFCFKLAKEESVIILPGTAVGLNNWIRIIFATDPFALLEGLKRVKSFCERHARKCLKTTE

SEQ ID NO: 15183 - DNA, 634 bp, Glycine max
aaaaacatttcgagcatgtctgggcgaggaaagggaggaaagggactgggaaagggaggagccaagaggcacaggaaggtcctccgagacaacatccaggggatcactaagccggcgattcgtcgtttagcgaggagaggcggtgtgaagcgtatcagcggtttgatctacgaggagactcgcggcgttctcaagatctttctagagaatgtgattcgtgacgctgttacttacactgagcacgctaggaggaagaccgtgacggcgatggatgttgtgtatgctttgaagaggcagggaaggactctgtacgggttcggcggctgaggggattcaattaggggtttttaaatcgcgtttgtgtttttacggtttggttctatttgggagtttaacaactctctaagttgtctttatctgaatgttttaaaaaagctttatctgaacttgtccgtctcttagaaattattgaggcatttagaaggtgggaaggagtatgagcttctgataatcgaatatcgacaagtaatagttgttgtgagctgggacgggtagagatttcgatactggtcatttaacgatgttgtgaaaaggataatgtccgagactaagatgaacctttacatactatgct

SEQ ID NO: 15184 - protein, 108 aa, Glycine max
KNISSMSGRGKGGKGLGKGGAKRHRKVLRDNIQGITKPAIRRLARRGGVKRISGLIYEETRGVLKIFLENVIRDAVTYTEHARRKTVTAMDVVYALKRQGRTLYGFGG

SEQ ID NO: 15185 - protein, 103 aa, Glycine max; identical to SEQ ID NO: 71

SEQ ID NO: 15186 - DNA, 1010 bp, Glycine max
cgtcgcctcgtgcgcatcaccacttcaccacaatccccatttcccaaagctcgaccaaagccgtgacactcctcccccacctcgtcccaaaccctagccacccccgccgatcccaatggccgccgcccaccaccggcccctccacgccctcctcggcggcggcgcagtcgccgacctgctcctctggaggcggaggaacgcctccgcggcggccgtcgcgggcgccacgctcgtctggttcctcttcgagcgcgccgggtacagcctcgcgtcggtcctctccaacgccctcctcctcctcgtcgtcatcctcttcttctgggccaagtccgcctcgctgctcaacagacctcttccaccactgcctaatctagaggtctcagatggggtcgttgagaaagttgtaggtcgggctcttgtatggataaacaaggtgttggctgttgcccatgacattgccatcaagagagaccggacagtttttatacaggttataatggctctatgggtggtttcatgtattgggatgctcttcaacttctttacgctcatttacattggtgtactactcgctctgttggttcccccggtatatgagaggcaccaggatgttattgatgaaaaggttggtttagcacacagcatactgtcaaggcagttgagtaccgtcgctagcaagacagggcaaccacctaaacaaaagaaggctgagtagaagaaatattttggcccatttggaagctctccagttgttctactatgttacaaacaccgtgatccatccaccgctgagagtatttctggatatccagggcataatgtttaactgctgatacgtgggtttagatgcacgctcttcaatctgggaagtggaatgatttgtatattgtttccatgaacatgaaacttgtcgaggtttaccatgggcacatcttgtggataatgctgtatacctttctctacgtgcgatgttgtgtcttgcatgtacaaatgcggtgcttgctcgtgtc

SEQ ID NO: 15187 - protein, 199 aa, Glycine max
MAAAHHRPLHALLGGGAVADLLLWRRRNASAAAVAGATLVWFLFERAGYSLASVLSNALLLLVVILFFWAKSASLLNRPLPPLPNLEVSDGVVEKVVGRALVWINKVLAVAHDIAIKRDRTVFIQVIMALWVVSCIGMLFNFFTLIYIGVLLALLVPPVYERHQDVIDEKVGLAHSILSRQLSTVASKTGQPPKQKKAE

SEQ ID NO: 15188 - protein, 123 aa, Glycine max
SPRAHHHFTTIPISQSSTKAVTLLPHLVPNPSHPRRSQWPPPTTGPSTPSSAAAQSPTCSSGGGGTPPRRPSRAPRSSGSSSSAPGTASRRSSPTPSSSSSSSSSSGPSPPRCSTDLFHHCLI

SEQ ID NO: 15189 - DNA, 1005 bp, Glycine max
ctagaacatcctaatcgaaaaacaacacttgactgatcttttctctcatcctcagacgcaacaagcagcttgttgcaacacacaaaaatggatcaaaccatgctgctaacttccggcatctctgcaaaccatttcttgaggaacaagaaccctctggctcagcccaaagttcaccatctcttcctctccggaaactctccggttactctaccatctcgaataccatcgttggttcctctcgctatcttcaaacccaaaaccaaagctgctcccaaaaaggttgagaaagtgaagccaaaggttgaagacggtatcttcggaacgtctggtgggataggattcacgaagcagaacgagctctttgtgggccgtgttgctatgatcggtttcgctgcatcgttgctaggtgaggcgttgactgggaaagggatattagcacagctgaatttggagacaggaataccgatttacgaagcagagccattgcttctcttcttcatattgttcactctgttgggtgccattggagctcttggagacagaggaaaattcgtcgacgatcctcccaccggactcgagaaagccgtcattcctcccggcaaaggcgttcgctctgccctcggtctcaaagaacaaggtcctttgtttgggttcacgaaggcgaacgagttgttcgtaggaagattggcacaattgggaatagcattttcattgataggagagattattacagggaaaggagcacttgctcaactcaacattgagactggtattccaattcaagatatcgaaccactcgtcctcttaaacgttgctttcttcttcgctgctgccattaatcctggtaatggaaagttcattactgatgatggtgaagaaagctaaactctctatgtactttccagttagtagtttgggagaccattatcatgttgagacaaaaaagaaatggacatcttaaactattgtaatacttaaatccttttgttttaacttggtttttct

SEQ ID NO: 15190 - protein, 265 aa, Glycine max
MDQTMLLTSGISANHFLRNKNPLAQPKVHHLFLSGNSPVTLPSRIPSLVPLAIFKPKTKAAPKKVEKVKPKVEDGIFGTSGGIGFTKQNELFVGRVAMIGFAASLLGEALTGKGILAQLNLETGIPIYEAEPLLLFFILFTLLGAIGALGDRGKFVDDPPTGLEKAVIPPGKGVRSALGLKEQGPLFGFTKANELFVGRLAQLGIAFSLIGEIITGKGALAQLNIETGIPIQDIEPLVLLNVAFFFAAAINPGNGKFITDDGEES

SEQ ID NO: 15191 - protein, 261 aa, Glycine max
MLLTSGISANHFLRNKNPLAQPKVHHLFLSGNSPVTLPSRIPSLVPLAIFKPKTKAAPKKVEKVKPKVEDGIFGTSGGIGFTKQNELFVGRVAMIGFAASLLGEALTGKGILAQLNLETGIPIYEAEPLLLFFILFTLLGAIGALGDRGKFVDDPPTGLEKAVIPPGKGVRSALGLKEQGPLFGFTKANELFVGRLAQLGIAFSLIGEIITGKGALAQLNIETGIPIQDIEPLVLLNVAFFFAAAINPGNGKFITDDGEES

SEQ ID NO: 15192 - protein, 168 aa, Glycine max
MIGFAASLLGEALTGKGILAQLNLETGIPIYEAEPLLLFFILFTLLGAIGALGDRGKFVDDPPTGLEKAVIPPGKGVRSALGLKEQGPLFGFTKANELFVGRLAQLGIAFSLIGEIITGKGALAQLNIETGIPIQDIEPLVLLNVAFFFAAAINPGNGKFITDDGEES

SEQ ID NO: 15193 - DNA, 1068 bp, Glycine max
atcatcatcatcaacaaacaatcaacagcagcagcaataaacctaaacacctttccccttccaatagaaaagaaaactctctctctctctctctctgatggcatccaaggcactctcttctttcacggctaagcccgctgtgtcactgctcccccatggcgtctcctcctctgcctctccgtctgttatgtctctgagcttctcaaggcacactggcggcagaggagtggtggctgcgtcctcaacggtagacacaaacaatatgccgatgacaggagtggtgttccagccgttcgaggaggtgaagaaagccgatctggccattccaatcacatctaatgcctccctcgctcgccagaggtatgccgactctagcgaggctgccattaacgagcaaatcaatgtggaatacaacgtgtcgtatgtgtaccattcaatgtacgcctacttcgacagagacaacgttgctctcaagggtcttgccaaatttttcaaggaatcaagtgatgaagaaagagagcacgctgagaagtttatggagtaccagaacaaaagaggaggaagagtgacactccaccctatcgtctcccctatctctgattttgaacatgctgaaaaaggagatgccttatatgcaatggagttggccctgtctctggagaaacttaccaacgagaagcttctaaaccttcacagagtggcatcagagaacaatgacccacagttagctgattttgttgagagtgagtttcttggagagcagattgaagcaatcaagaagatctcagacttcatcacccagctaaggatggttggcaaaggacacggagtttggcatttcgaccagatgcttttgaactagactggaagttcactttatgctctgcggagattaaaagagaagaaacagaagaagattctgtaaaagttgctagagtgaaagttattattggagcaaaaataagattgtagtagtaatagtagtaagcttttgtgtgttaagatgatgggtttttttttttgtaataatttcctaagtttaatctatgaaggtgttttttgtttcat

SEQ ID NO: 15194 - protein, 254 aa, Glycine max
MASKALSSFTAKPAVSLLPHGVSSSASPSVMSLSFSRHTGGRGVVAASSTVDTNNMPMTGVVFQPFEEVKKADLAIPITSNASLARQRYADSSEAAINEQINVEYNVSYVYHSMYAYFDRDNVALKGLAKFFKESSDEEREHAEKFMEYQNKRGGRVTLHPIVSPISDFEHAEKGDALYAMELALSLEKLTNEKLLNLHRVASENNDPQLADFVESEFLGEQIEAIKKISDFITQLRMVGKGHGVWHFDQMLLN

SEQ ID NO: 15195 - protein, 224 aa, Glycine max
MSLSFSRHTGGRGVVAASSTVDTNNMPMTGVVFQPFEEVKKADLAIPITSNASLARQRYADSSEAAINEQINVEYNVSYVYHSMYAYFDRDNVALKGLAKFFKESSDEEREHAEKFMEYQNKRGGRVTLHPIVSPISDFEHAEKGDALYAMELALSLEKLTNEKLLNLHRVASENNDPQLADFVESEFLGEQIEAIKKISDFITQLRMVGKGHGVWHFDQMLLN

SEQ ID NO: 15196 - protein, 199 aa, Glycine max
MPMTGVVFQPFEEVKKADLAIPITSNASLARQRYADSSEAAINEQINVEYNVSYVYHSMYAYFDRDNVALKGLAKFFKESSDEEREHAEKFMEYQNKRGGRVTLHPIVSPISDFEHAEKGDALYAMELALSLEKLTNEKLLNLHRVASENNDPQLADFVESEFLGEQIEAIKKISDFITQLRMVGKGHGVWHFDQMLLN

SEQ ID NO: 15197 - DNA, 626 bp, Glycine max
acatcaccccaccaccacaccgccgcaacaaccaccaccagcaacacacacacacagagaagcgaagatgtctggccgcggcaagggagggaagggtctcggcaagggcggcgccaagcgccaccggaaggtgctccgcgacaacatccagggcatcaccaagccggccatccgtcgtctcgctcggaggggcggcgtgaagcgcatctcggggctcatctacgaggagacccgcggagtgctcaagatcttcctggagaacgtcatccgcgacgccgtcacctacaccgagcacgcccgccgcaagaccgtcaccgccatggacgtcgtctacgcgctcaagcgccaggggcgaaccctctacggcttcggcggctaggcctgcgcccgctgctccagtctccgtcgactctgactctgctagctgctgttctggtgctatgcgtttcgtttctgaatgcgtgcgtgcgtgcgttgctgttccatcggtctgtgtagttagtggatggcgatggatctgaatgcagtaagttcgtcagagtgcgtgtgttgttctatcggtctctgtagtcagttcctctgtggaaggcgatggatatgaatgcaatgggattgttggttcttcc

SEQ ID NO: 15198 - protein, 165 aa, Glycine max
TSPHHHTAATTTTSNTHTQRSEDVWPRQGREGSRQGRRQAPPEGAPRQHPGHHQAGHPSSRSEGRREAHLGAHLRGDPRSAQDLPGERHPRRRHLHRARPPQDRHRHGRRLRAQAPGANPLRLRRLGLRPLLQSPSTLTLLAAVLVLCVSFLNACVRALLFHRSV

SEQ ID NO: 15199 - protein, 125 aa, Glycine max
HHPTTTPPQQPPPATHTHREAKMSGRGKGGKGLGKGGAKRHRKVLRDNIQGITKPAIRRLARRGGVKRISGLIYEETRGVLKIFLENVIRDAVTYTEHARRKTVTAMDVVYALKRQGRTLYGFGG

SEQ ID NO: 15200 - protein, 103 aa, Glycine max; identical to SEQ ID NO: 71

SEQ ID NO: 15201 - DNA, 880 bp, Glycine max
gactgcgtagtggaacgagtaaacagatctgctctctccctctctttctctctcgtccgcggcgatacgatccgagatggcgatgagggcgtggaggcggagcgcggcggcgagggccccggcgcacctgtgcctgtggctggcgctcgtcgccgccaccctggtgctcgcccaggtgctcatccacctcggcaagaaatccaacctttctgaggtgacgcacaaggtctacttcgacatcgagatcgacggcaagcccgcaggtcgggttgtcatgggacttttcggcaaggctgttcctaaaaccgcagagaacttcagagcactctgcacaggagagaaaggtatgggcaacagcggcaaacctctccactacaaggggagttcgttccacagaattatccccagcttcatgatccaaggaggcgacttcactcttggtgatggaaggggtggtgaatcaatctacggcacaaagttcggcgatgagaacttcaagctcaagcacactggaccaggctacctttccatggccaatgctgggagagataccaacggatcccagttcttcatcaccactgtaactacgagctggttggatggcaagcacgtcgtgttcggcaaggtgttgtctggaatggacgtggtctacaaggtcgaggccgagggcaagcagaacgggacaccaaagagcaaagttgtcattgctgacagcggggaagtgccgctgtgatgacctgaaacggtctctggtggaaagctacggtgactagtttccgttgtagaagcgttattatccggactgttttcgtgtacttccgtgtgaatttagacggcaagttttttcctctttactataaaaaagtacaatgacttgctt

SEQ ID NO: 15202 - protein, 218 aa, Glycine max
MAMRAWRRSAAARAPAHLCLWLALVAATLVLAQVLIHLGKKSNLSEVTHKVYFDIEIDGKPAGRVVMGLFGKAVPKTAENFRALCTGEKGMGNSGKPLHYKGSSFHRIIPSFMIQGGDFTLGDGRGGESIYGTKFGDENFKLKHTGPGYLSMANAGRDTNGSQFFITTVTTSWLDGKHVVFGKVLSGMDVVYKVEAEGKQNGTPKSKVVIADSGEVPL

SEQ ID NO: 15203 - protein, 216 aa, Glycine max
MRAWRRSAAARAPAHLCLWLALVAATLVLAQVLIHLGKKSNLSEVTHKVYFDIEIDGKPAGRVVMGLFGKAVPKTAENFRALCTGEKGMGNSGKPLHYKGSSFHRIIPSFMIQGGDFTLGDGRGGESIYGTKFGDENFKLKHTGPGYLSMANAGRDTNGSQFFITTVTTSWLDGKHVVFGKVLSGMDVVYKVEAEGKQNGTPKSKVVIADSGEVPL

SEQ ID NO: 15204 - protein, 152 aa, Glycine max
MGLFGKAVPKTAENFRALCTGEKGMGNSGKPLHYKGSSFHRIIPSFMIQGGDFTLGDGRGGESIYGTKFGDENFKLKHTGPGYLSMANAGRDTNGSQFFITTVTTSWLDGKHVVFGKVLSGMDVVYKVEAEGKQNGTPKSKVVIADSGEVPL

SEQ ID NO: 15205 - DNA, 479 bp, Glycine max
acttaaaaatcttcttcttcaagcaaattaaaatcttattcgaaaatgtcttgctgtggaggaaactgtggttgcggagctggctgcaagtgcgttggatgcggaggttgcaaaatgtacccagacttgagcttctccggcgagaccaccaccaccgagactcttgtcctcggcgttgctccgtcgatgaactctcagtacgaggcttccggcgagactttcgtggccgagaatgatgcctgcaaatgcggatctgactgcaagtgcaacccttgcacctgcaaatagataaccacataaacccctaagagtcttgcaataaaccgtttatgttatgtgtaataatggctgatttctccggttgttttgccggagacagtgagtcttgctcttctgtgtgtgttttaatggtttggtcatgagacatctctgtaagctttatctctgcgactatatataagccaaaagtattatgggtc

SEQ ID NO: 15206 - protein, 80 aa, Glycine max
MSCCGGNCGCGAGCKCVGCGGCKMYPDLSFSGETTTTETLVLGVAPSMNSQYEASGETFVAENDACKCGSDCKCNPCTCK

SEQ ID NO: 15207 - protein, 77 aa, Glycine max
LKIFFFKQIKILFENVLLWRKLWLRSWLQVRWMRRLQNVPRLELLRRDHHHRDSCPRRCSVDELSVRGFRRDFRGRE

SEQ ID NO: 15208 - protein, 57 aa, Glycine max
MYPDLSFSGETTTTETLVLGVAPSMNSQYEASGETFVAENDACKCGSDCKCNPCTCK

SEQ ID NO: 15209 - DNA, 1073 bp, Glycine max
gtccaaaatcctcactccagccacacgcctcagtagaccatggcctcattgggtgggttacaaaatctaagcggcatcaattttcttatcaaaaaagagggtccaaaagtcaatgcgaagttcgagctgaagccgccaccatatccactgaatggtttggagccggtgatgagccagcagacacttgagtttcattgggggaaacaccacaagacatatgtggaaaatctgaaaaaacaaattgttgggacagagcttgatgggaaatcactagaagagattatagtgacatcatataataagggtgacattcttccagctttcaacaatgcagcacaggtatggaaccatgacttcttctgggagtgcatgaaaccaggtggaggtggaaagccatccggggagcttctagaactgattgaaagagactttggctcatttgaaaaattccttgatgagtttaaggctgctgctgcaacacaatttggttcaggatgggcttggcttgcatatagagcaagcaaatttgatggggaaaatgcagcaaatcctccttcaccagatgaggacaacaagctagtggtgctcaagagtcccaatgctgtgaacccccttgtttggggaggctattatccacttcttaccattgatgtttgggagcatgcttactaccttgattttcagaaccggcgccctgattatatatcagtgttcatggataagcttgtttcctgggatgcagtgagttctagacttgaacaagcaaggctttaattaaccagtgcatgatgctgaattaaatgcagaataagtgatttatcctgatagtgatgatgaattggatggcgtcatgaggaatagtggattatttttatctagaaagtgtacgatggcacatcttttgtactttaaataggtgttgtggtatcaggctaaatcacttcagcctgcagattatgttctataattagaaatcttagttatggttctctttgtgtgactgtgtgaacaataaaattgcttatgcatgaacattcagcaaaataatactatgttgtagaaccttttcacgt

SEQ ID NO: 15210 - protein, 244 aa, Glycine max
MASLGGLQNLSGINFLIKKEGPKVNAKFELKPPPYPLNGLEPVMSQQTLEFHWGKHHKTYVENLKKQIVGTELDGKSLEEIIVTSYNKGDILPAFNNAAQVWNHDFFWECMKPGGGGKPSGELLELIERDFGSFEKFLDEFKAAAATQFGSGWAWLAYRASKFDGENAANPPSPDEDNKLVVLKSPNAVNPLVWGGYYPLLTIDVWEHAYYLDFQNRRPDYISVFMDKLVSWDAVSSRLEQARL

SEQ ID NO: 15211 - protein, 201 aa, Glycine max
MSQQTLEFHWGKHHKTYVENLKKQIVGTELDGKSLEEIIVTSYNKGDILPAFNNAAQVWNHDFFWECMKPGGGGKPSGELLELIERDFGSFEKFLDEFKAAAATQFGSGWAWLAYRASKFDGENAANPPSPDEDNKLVVLKSPNAVNPLVWGGYYPLLTIDVWEHAYYLDFQNRRPDYISVFMDKLVSWDAVSSRLEQARL

SEQ ID NO: 15212 - protein, 134 aa, Glycine max
MKPGGGGKPSGELLELIERDFGSFEKFLDEFKAAAATQFGSGWAWLAYRASKFDGENAANPPSPDEDNKLVVLKSPNAVNPLVWGGYYPLLTIDVWEHAYYLDFQNRRPDYISVFMDKLVSWDAVSSRLEQARL

SEQ ID NO: 15213 - DNA, 674 bp, Glycine max
ctagagttctacacacacaagcacgttctagagagagataggaaattattaaattaagcatatgggtcgcaatagcatagacatggacagggagagattaacggctgagatggacttcaaggactcatcctccgccgtgatcagaatccggcgccggctgccggatttccttcagtcggtgaaactgaaatacgtgaagttgggattgggatacggttactcatactcatgcaaagcagccagcattgtgatgctagccatcaccctccctctcgtgttctctctaaccggtggtatcaagctctccaaactctgctcccacaaccaccagctcgacgccgagaccgtggcggcggcttcggcggcgctactctccctggccgccctgtaccggtggaagcggtccccggcggtgtacctggtggacttcgcgtgctacaagccggagaaagaacgcaaaatatcggtggaggggtttctgaagatgaccgaagagagtggggggttcgaggaagagtctctccaattccagaggaagatttccacaagggcgggtttgggcgacgagacctaccttcccagaggaataacttctcggccgcccaagctctgcatgagcgaagcgcgtctggaggcagaggcagtcatgttcggcgccctggacgctcttttgg

SEQ ID NO: 15214 - protein, 204 aa, Glycine max
MGRNSIDMDRERLTAEMDFKDSSSAVIRIRRRLPDFLQSVKLKYVKLGLGYGYSYSCKAASIVMLAITLPLVFSLTGGIKLSKLCSHNHQLDAETVAAASAALLSLAALYRWKRSPAVYLVDFACYKPEKERKISVEGFLKMTEESGGFEEESLQFQRKISTRAGLGDETYLPRGITSRPPKLCMSEARLEAEAVMFGALDALL

SEQ ID NO: 15215 - protein, 197 aa, Glycine max
MDRERLTAEMDFKDSSSAVIRIRRRLPDFLQSVKLKYVKLGLGYGYSYSCKAASIVMLAITLPLVFSLTGGIKLSKLCSHNHQLDAETVAAASAALLSLAALYRWKRSPAVYLVDFACYKPEKERKISVEGFLKMTEESGGFEEESLQFQRKISTRAGLGDETYLPRGITSRPPKLCMSEARLEAEAVMFGALDALL

SEQ ID NO: 15216 - protein, 188 aa, Glycine max
MDFKDSSSAVIRIRRRLPDFLQSVKLKYVKLGLGYGYSYSCKAASIVMLAITLPLVFSLTGGIKLSKLCSHNHQLDAETVAAASAALLSLAALYRWKRSPAVYLVDFACYKPEKERKISVEGFLKMTEESGGFEEESLQFQRKISTRAGLGDETYLPRGITSRPPKLCMSEARLEAEAVMFGALDALL

SEQ ID NO: 15217 - protein, 141 aa, Glycine max
MLAITLPLVFSLTGGIKLSKLCSHNHQLDAETVAAASAALLSLAALYRWKRSPAVYLVDFACYKPEKERKISVEGFLKMTEESGGFEEESLQFQRKISTRAGLGDETYLPRGITSRPPKLCMSEARLEAEAVMFGALDALL

SEQ ID NO: 15218 - DNA, 677 bp, Glycine max
tacctagaacatcctaatcgaaaataacaaaaaaaataaagcttggaaatagcactaataaactaagaaaatgaaagtcatttactgttctcgacttctattaattttggcagcccttgtaggagctctttttcatccctcgagagctcaaaacagtccacaagactatgtaaacgctcacaaccaagcacgacaggcagtaggcgtaggtcccgtgcagtgggacggtacgcttgcagccttcgctcaaagctacgccgaccgactacgaggcgactgcagactcgtacactccggtgggccttatggagagaacttggcctggagtagcgccgacttttctggcgtcagcgccgtgaacctttgggtcaacgagaaggctaactataactacgcttcgaacacgtgcattaatggagaatgccgtcactatactcaggttgtttggagaaagtctgtgagaattggatgtggcaaagcaaggtgtaacaatggtggaaccatcatttcttgcaactatgatcctcggggaaattatgtgaacgagaagccttactaatgagttactatgcatcgacatataaaacacgtgcatataggacgtgtttacaaattcaataaagaacatcatatgcaggatgtgtatcaatatttaaaataaataaatatcaatggtt

SEQ ID NO: 15219 - protein, 162 aa, Glycine max
MKVIYCSRLLLILAALVGALFHPSRAQNSPQDYVNAHNQARQAVGVGPVQWDGTLAAFAQSYADRLRGDCRLVHSGGPYGENLAWSSADFSGVSAVNLWVNEKANYNYASNTCINGECRHYTQVVWRKSVRIGCGKARCNNGGTIISCNYDPRGNYVNEKPY

SEQ ID NO: 15220 - DNA, 520 bp, Glycine max
accaccgattgagaaatgatgaagcgtcttgtcccaacgttcaaccgcatcctggtgcagagagtcatccagcctgctaaaaccgagagcggcatcctcctcccagagaaagcctcctcgctgaactcgggcaaggtgatagcagtgggacctggttcaagggacaaagatgggaaattgattccggtctctgtcaaggaaggcgacaccgttcttcttccagagtacggtggtactcaggtcaagctcggcgagaaagagtaccatctcttccgggatgaggacgtcttgggaaccttgcacgaggattgagaatgctcaactcaaacacgagcgttcttgtttggcgtttgtcttatggttgaaaacaagagtcattttttatctttttatatgatgcggttggactttgttgattataattgaaatttagacatcaatcacaactgatgcatcttgttattccaatctttttggtttttccgtaatctggtgatcgaataaaagctcatttgagggg

SEQ ID NO: 15221 - protein, 98 aa, Glycine max
MMKRLVPTFNRILVQRVIQPAKTESGILLPEKASSLNSGKVIAVGPGSRDKDGKLIPVSVKEGDTVLLPEYGGTQVKLGEKEYHLFRDEDVLGTLHED

SEQ ID NO: 15222 - protein, 97 aa, Glycine max
MKRLVPTFNRILVQRVIQPAKTESGILLPEKASSLNSGKVIAVGPGSRDKDGKLIPVSVKEGDTVLLPEYGGTQVKLGEKEYHLFRDEDVLGTLHED

SEQ ID NO: 15223 - DNA, 1349 bp, Glycine max
acttttcgagaaaaatttacttccttagaaaatgtcgcgtgcgatgtgcaacccatcaatggtgagtaggagtgttctagggtcccaaacgagttcaaaatcggtgacagagacaatgagtggttcccacgagtttgtgatcaagggttactcactaacgaaaggaatgggcattgggaaatacatcgtgagtgagactttcatagtgggagggttccaatgggccatatactttttccctgatggtagggaccccaaagataatgccgcttatgtctctgtcttcgttgcactccattccaagagcaccaatgttcgtgcgttgttcgatctcacgttgctcgacctatgcaagaaaggagagcacaaggttcatagccacttcagtcactccctcacgattgggccttacactctcataaaccatggcagcatgtggggctatacgcggtttttcaaacggagacaccttgagacgtcaaattttctcaaggatgattgcttgaagataaattgcactattgcggttttagtgtcgtccatagattcttctcagttaaacacaatacaggttcctgaatctgatattggtgaacattttgggatgttgttagaggatgaggaatcatttgatgttactttctcggttggtggagaaaggtttcatgctcataagcttgtattggcagctcgatcaaccatgtttgaaactcaattttttaatgctatgaagaaggatgatcaggagatagttgttattgacatggaacctaaggttttcaaggctttacttcattttgtttatagagacactcttttggaagatgaagagctctttatgttggattcgtcattctttccttcgttttctgaatcatttatagcaaagttgttagctgctggagaaaagtatggtttgccaagactaatgttaatgtgtgaatctatactttgtaaagacatatctgtagattctgttgcctatatttttgctcttgcggaccattattgtgctacccacttgaagtccatctgtcaaaaattttctgctgaaaactttgatgcggtgatgcattctgatggttttgagtatcttaagaaaaattgcccattactgcaatcagaactgctaaagactggagtaggatgcgagaaagaatttagttgagagggaaaatactaaattgtatgtgcttaatccaaggtctagtttagaggagtgacgacctaagatccaagtttggaagagaccagaaaaatataaaagaagattatatatatagttttgcagtaatctttttatatattatattatgttactttataaatgaattgaaattacattcttc

SEQ ID NO: 15224 - protein, 378 aa, Glycine max
MSRAMCNPSMVSRSVLGSQTSSKSVTETMSGSHEFVIKGYSLTKGMGIGKYIVSETFIVGGFQWAIYFFPDGRDPKDNAAYVSVFVALHSKSTNVRALFDLTLLDLCKKGEHKVHSHFSHSLTIGPYTLINHGSMWGYTRFFKRRHLETSNFLKDDCLKINCTIAVLVSSIDSSQLNTIQVPESDIGEHFGMLLEDEESFDVTFSVGGERFHAHKLVLAARSTMFETQFFNAMKKDDQEIVVIDMEPKVFKALLHFVYRDTLLEDEELFMLDSSFFPSFSESFIAKLLAAGEKYGLPRLMLMCESILCKDISVDSVAYIFALADHYCATHLKSICQKFSAENFDAVMHSDGFEYLKKNCPLLQSELLKTGVGCEKEFS

SEQ ID NO: 15225 - protein, 374 aa, Glycine max
MCNPSMVSRSVLGSQTSSKSVTETMSGSHEFVIKGYSLTKGMGIGKYIVSETFIVGGFQWAIYFFPDGRDPKDNAAYVSVFVALHSKSTNVRALFDLTLLDLCKKGEHKVHSHFSHSLTIGPYTLINHGSMWGYTRFFKRRHLETSNFLKDDCLKINCTIAVLVSSIDSSQLNTIQVPESDIGEHFGMLLEDEESFDVTFSVGGERFHAHKLVLAARSTMFETQFFNAMKKDDQEIVVIDMEPKVFKALLHFVYRDTLLEDEELFMLDSSFFPSFSESFIAKLLAAGEKYGLPRLMLMCESILCKDISVDSVAYIFALADHYCATHLKSICQKFSAENFDAVMHSDGFEYLKKNCPLLQSELLKTGVGCEKEFS

SEQ ID NO: 15226 - protein, 369 aa, Glycine max
MVSRSVLGSQTSSKSVTETMSGSHEFVIKGYSLTKGMGIGKYIVSETFIVGGFQWAIYFFPDGRDPKDNAAYVSVFVALHSKSTNVRALFDLTLLDLCKKGEHKVHSHFSHSLTIGPYTLINHGSMWGYTRFFKRRHLETSNFLKDDCLKINCTIAVLVSSIDSSQLNTIQVPESDIGEHFGMLLEDEESFDVTFSVGGERFHAHKLVLAARSTMFETQFFNAMKKDDQEIVVIDMEPKVFKALLHFVYRDTLLEDEELFMLDSSFFPSFSESFIAKLLAAGEKYGLPRLMLMCESILCKDISVDSVAYIFALADHYCATHLKSICQKFSAENFDAVMHSDGFEYLKKNCPLLQSELLKTGVGCEKEFS

SEQ ID NO: 15227 - DNA, 628 bp, Glycine max
atcttctctcgtctccactgatcccaccaaccacacttacttctctcaatggcgacgatgtacgttcctccggcgacgctttacgccggcaaaccgactccagtgacttcaaacctccagagatcgtctttcttgccgtattactcgttgaggatactcggcgacaagaagaagaagtctctttccaagtcttcatcatcctcctctgctccaagattctccatgcgtgtctcctccaagcaagcttatatctgccgtgattgcgggtatatatacaatgacagaactccattcgataagttgcctgataattacttctgtccagtgtgtgctgctcctaaacggcggttcagaccgtacatgcctgatgtgagcaagaacgtcaacgacaaggatgtgagaaaggctagaaaagctgagctccaacgtgacgaagccgttgggaaggctttgcctatagcaattgctgttggggttctagctttagcagctctttacttctatgtcaacagtaccgcatgaactgctgcatcaagaggctagctacattcttgtttcgttttgtattaacatgtcttctctgagttgttgttagacattataaatgaagtaaaatgttgagatttct

SEQ ID NO: 15228 - protein, 157 aa, Glycine max
MATMYVPPATLYAGKPTPVTSNLQRSSFLPYYSLRILGDKKKKSLSKSSSSSSAPRFSMRVSSKQAYICRDCGYIYNDRTPFDKLPDNYFCPVCAAPKRRFRPYMPDVSKNVNDKDVRKARKAELQRDEAVGKALPIAIAVGVLALAALYFYVNSTA

SEQ ID NO: 15229 - protein, 154 aa, Glycine max
MYVPPATLYAGKPTPVTSNLQRSSFLPYYSLRILGDKKKKSLSKSSSSSSAPRFSMRVSSKQAYICRDCGYIYNDRTPFDKLPDNYFCPVCAAPKRRFRPYMPDVSKNVNDKDVRKARKAELQRDEAVGKALPIAIAVGVLALAALYFYVNSTA

SEQ ID NO: 15230 - protein, 99 aa, Glycine max
MRVSSKQAYICRDCGYIYNDRTPFDKLPDNYFCPVCAAPKRRFRPYMPDVSKNVNDKDVRKARKAELQRDEAVGKALPIAIAVGVLALAALYFYVNSTA

SEQ ID NO: 15231 - DNA, 491 bp, Glycine max
acatacaacactctctccaaagttcaaattaagactgaggggtgagaaagagagaattgatatgggtgccggtctagttgcgttcctcttaatggttcttgtgcaattggtctatgcagtgatgaacattacttcaaagcttgcaatagaatctggaatgagccctcttgtccttgttgcttatcgacaactctttgctactgtgtccattgctccctttgcttattggctcgagtggtaattatatatatatatatatataccctttctggttttgttttatttcatatatatacacaatgcatgcatgaaagggtttgatcaactttgaagcacctataacattctcactttgagtgtcaccgtcgatgtcccttttgttttggttgattcatgattgtgttatttatctgtctatctatttatatatgtttgctgtatataaatggagtagagagacactcaaaagaaaaatgctacatgttgttctg

SEQ ID NO: 15232 - protein, 79 aa, Glycine max
HTTLSPKFKLRLRGEKERIDMGAGLVAFLLMVLVQLVYAVMNITSKLAIESGMSPLVLVAYRQLFATVSIAPFAYWLEW

SEQ ID NO: 15233 - protein, 59 aa, Glycine max
MGAGLVAFLLMVLVQLVYAVMNITSKLAIESGMSPLVLVAYRQLFATVSIAPFAYWLEW

SEQ ID NO: 15234 - protein, 49 aa, Glycine max
MVLVQLVYAVMNITSKLAIESGMSPLVLVAYRQLFATVSIAPFAYWLEW

SEQ ID NO: 15235 - DNA, 717 bp, Glycine max
agtttcgacattgtttcgcgattcgtctcgggttttgttttgttgattgagagaaaacatgggaggtgaggaagacaaagagaaagggttttttgggtacccacccgctggatacccgccgggtcctggggcttatccaccagctggatacccaccacaacaagcttaccctcccccaccacctggtgcctacccacctcaacctggttatcctccgggtgcatacccacctccacctggtgcctaccctcctgctcctggttatggtggttatcctcctgcgcctggtcatgctggttatcctcctgctggatatcctcctcatcactcaggacacgcagctggaatcgggggtatgattgcaggtgctgcagctgcctacggagctcaccacatagctcatagctctcacggtccttacggacacgcagcatatggtcacggatttggacatggtcatggctatggctatggttatggtcatggtaagttcaagcacgggaagttcaagcatcacggaggcaagtttaaacatgggaggcatgggatgtttggaggaggtaagttcaagaagtggaagtgatctaaaaacctcttttaatcttatctctcgccggttcaagtttgacaattgaggctttaataatgattatgatatcacatgttgtactatgaagctattatatatggttttatgatattactgattctgttttt

SEQ ID NO: 15236 - protein, 174 aa, Glycine max
MGGEEDKEKGFFGYPPAGYPPGPGAYPPAGYPPQQAYPPPPPGAYPPQPGYPPGAYPPPPGAYPPAPGYGGYPPAPGHAGYPPAGYPPHHSGHAAGIGGMIAGAAAAYGAHHIAHSSHGPYGHAAYGHGFGHGHGYGYGYGHGKFKHGKFKHHGGKFKHGRHGMFGGGKFKKWK

SEQ ID NO: 15237 - DNA, 353 bp, Glycine max
agaagaagaatggggagtttccttgaaattctttgtgcagttctcatacctcctgtcggtgtattcctcagatttgggtgcgggttggagttttggctctctttgctcctgacgttctttggttttatccctggaatggtatatgctatatgggttcttactaaatagaaaccaaagaatttttatatttttttttatattttctttccattaaaacaatttatcacaggttttcaaattttcgtattatgtactcaatcagttgttatctttgaactctctgtaatttttttttttttctcacaatagttttttttgataaaaaaaaaaaaaaaaaagcttatcgataccgt

SEQ ID NO: 15238 - protein, 55 aa, Glycine max
RRRMGSFLEILCAVLIPPVGVFLRFGCGLEFWLSLLLTFFGFIPGMVYAIWVLTK

SEQ ID NO: 15239 - protein, 52 aa, Glycine max
MGSFLEILCAVLIPPVGVFLRFGCGLEFWLSLLLTFFGFIPGMVYAIWVLTK

SEQ ID NO: 15240 - protein, 36 aa, Glycine max
EEEWGVSLKFFVQFSYLLSVYSSDLGAGWSFGSLCS

SEQ ID NO: 15241 - DNA, 667 bp, Glycine max
acctagaacatcctaatcgaaaaattcttctttcccgagatctcccactcgcctccccgcgtcgccgtcgaacccactccgccgccccgtcgccggcagcgcccccctcccgcgatggccacccccgacctcctcttcaacctgcgcaacctcttctacctcggcgcctaccagtccgccatcaacaacagcgacgtcccgggcctcgacgccgacgccgcggccgagcgcgacgtcatcgtcttccgctcctacatcgccctcggatcctaccagctggtgatcagcgagatcgactcgtcggcggcgacgtcgctgcaggccgtcaagctgctcgcgctctacctcaccggagacaaggaaggtgcgatctccagcctgaaggaatggttgagtgattcagctataggaagcaatcctgttctgcgattgattgctggaattatatttatgcatgagcaagactacaatgaggctctcaagcacacacacactggggggactctggacctgcatgcactgaatgtccagatcttccttaagatgcaccggtcagattatgctgacaagcaactgaagatcatgcaacaaaccgacgaggaccatacactgacacaactagcaaatgcttggctcgatattgctgttggtggctctaagatccggg

SEQ ID NO: 15242 - protein, 184 aa, Glycine max
MATPDLLFNLRNLFYLGAYQSAINNSDVPGLDADAAAERDVIVFRSYIALGSYQLVISEIDSSAATSLQAVKLLALYLTGDKEGAISSLKEWLSDSAIGSNPVLRLIAGIIFMHEQDYNEALKHTHTGGTLDLHALNVQIFLKMHRSDYADKQLKIMQQTDEDHTLTQLANAWLDIAVGGSKIR

SEQ ID NO: 15243 - protein, 131 aa, Glycine max
LEHPNRKILLSRDLPLASPRRRRTHSAAPSPAAPPSRDGHPRPPLQPAQPLLPRRLPVRHQQQRRPGPRRRRRGRARRHRLPLLHRPRILPAGDQRDRLVGGDVAAGRQAARALPHRRQGRCDLQPEGMVE

SEQ ID NO: 15244 - DNA, 1061 bp, Glycine max
gctaggttttcagtctctcgcctccaccagcgcctccacgccgccgaggaacggagcaggaagtgacgccggaggaggacgctctgctcgtcgtccgccgcatctcgcgcccgcccaacccgaacgccccgaaaggccaccaaagccgtagccttcttcttcctagagctcccgcagcatgtcggcatccaccagcggcggcggggggctctcgccgcaggcggccgcggcgctccaggagggcgtcgggctggtgttcatgcggtggacggcgctgcagatggcggtggagaacgggtggggcggccgcgactcccgcgccaaggccgaccggctcgccgccgacgtcctcgccttcttcaccacctccaaaggtccatattattatgatgacttggaggagatgatgtttgacagcatatccgaatccttcaatgctgactttgaggatggaagtgttggggaggttgctgaacaagtattgattatgcatgaagaatgcctgcaaaacaactattcgtcgattgagaagctaaggaacacacgtgctcaaggaaatgctgtttcccaaagtagaatgatggtaactgatgaaggcgatgatagctcggatgatagctcggacgatgacgacggcgatgaaccagccagcgcagatgatatgtcggtggatgagccaaagcctcccaagcctgcccctgacgctgatgggtggactgttgtgccaccgaagcgcggcggccggggcaagaattaagcacagaagcaaaccctggcaacaaactgccatctgagaggccgttttggtctgaaggctttgaggtgtgattagcaaaaccttggcaaccacttcctgccacttgtgccattttggtcttggaggttttgaagtgttgcgcttcacctgtattacttcgattttgtcaggaatgttggttgtgtagcatgttttccttggttactctcttggtgttcagacttggcggcgaaagatctggattgtaagcgggtctgacatatccttatgcacattttgaactgatgcttatctgtatcgtcgc

SEQ ID NO: 15245 - protein, 192 aa, Glycine max
MSASTSGGGGLSPQAAAALQEGVGLVFMRWTALQMAVENGWGGRDSRAKADRLAADVLAFFTTSKGPYYYDDLEEMMFDSISESFNADFEDGSVGEVAEQVLIMHEECLQNNYSSIEKLRNTRAQGNAVSQSRMMVTDEGDDSSDDSSDDDDGDEPASADDMSVDEPKPPKPAPDADGWTVVPPKRGGRGKN

SEQ ID NO: 15246 - protein, 165 aa, Glycine max
MRWTALQMAVENGWGGRDSRAKADRLAADVLAFFTTSKGPYYYDDLEEMMFDSISESFNADFEDGSVGEVAEQVLIMHEECLQNNYSSIEKLRNTRAQGNAVSQSRMMVTDEGDDSSDDSSDDDDGDEPASADDMSVDEPKPPKPAPDADGWTVVPPKRGGRGKN

SEQ ID NO: 15247 - protein, 158 aa, Glycine max
MAVENGWGGRDSRAKADRLAADVLAFFTTSKGPYYYDDLEEMMFDSISESFNADFEDGSVGEVAEQVLIMHEECLQNNYSSIEKLRNTRAQGNAVSQSRMMVTDEGDDSSDDSSDDDDGDEPASADDMSVDEPKPPKPAPDADGWTVVPPKRGGRGKN

SEQ ID NO: 15248 - DNA, 828 bp, Glycine max
acactctttctctcaatttctctctcttttaaaacactaatcactaaaatcttgattcactatatcgtcaaaaccaacgctaaatcaattaaactctctcaaagaaaacaagacaaagccctacttttgatggattcagggtcacaacgaccggggcctgttagcgaaggcgatccgggtccgtccatcgtaaccccctcttcaccgcctgcgacgcctagcaggtacgagtcgcagaaacgacgtgactggaccacgttcttgcagtacctcaagaaccacaagccgcctctttccttgtcacggtgtagcggagcacatgccatcgagttcctcaagtacttagatcagttcggtaagaccaaagtccacgtggcggcatgtccttactttggccatcagcaacctccgtctccttgcgcttgtcctctcaagcaagcctgggggtctctcgatgccctgatcggacggttgagagcagcctacgaagagaacggtggacggcccgagtcgaacccgttcgcggcacgtgcggttaggatttacttgagggaagtcagagaaagtcaagccaaggcccgtgggagaccctacgagaaaaagaaacggaaacggccaacaactgttaccaccgtgagagttgacgttgcttcgtcgagacaaagtgaaggagatggttgtaacatcggtgatccgtcgtatgtggccgaggctgtacctccttaattaagttattattattgtcatgatatattaaatacattatatatgtctggaactcacatcaccttcttgagttaactattgaaaatatttttgttctagttc

SEQ ID NO: 15249 - protein, 241 aa, Glycine max
TLFLSISLSFKTLITKILIHYIVKTNAKSIKLSQRKQDKALLLMDSGSQRPGPVSEGDPGPSIVTPSSPPATPSRYESQKRRDWTTFLQYLKNHKPPLSLSRCSGAHAIEFLKYLDQFGKTKVHVAACPYFGHQQPPSPCACPLKQAWGSLDALIGRLRAAYEENGGRPESNPFAARAVRIYLREVRESQAKARGRPYEKKKRKRPTTVTTVRVDVASSRQSEGDGCNIGDPSYVAEAVPP

SEQ ID NO: 15250 - protein, 198 aa, Glycine max
MDSGSQRPGPVSEGDPGPSIVTPSSPPATPSRYESQKRRDWTTFLQYLKNHKPPLSLSRCSGAHAIEFLKYLDQFGKTKVHVAACPYFGHQQPPSPCACPLKQAWGSLDALIGRLRAAYEENGGRPESNPFAARAVRIYLREVRESQAKARGRPYEKKKRKRPTTVTTVRVDVASSRQSEGDGCNIGDPSYVAEAVPP

SEQ ID NO: 15251 - DNA, 1153 bp, Glycine max
atcaccggtttcgaaatccatccatccaaaccagcggaagaagaagaaaagaaaaagagaaaaatccacgcgaaagggcgagcgcaggacagggacgaacaaccttgcgtgcgaggcgaggccgctccgattcgacagacgcaggcgcagcgcagggatggacgccttctactcgacctcgtcggcggcggccagcggatggggctacgactccctcaagaacttccgcgagatctcccccgccgtgcagtcccacctcaagctcgtttacctgaccctatgctttgccctggcctcatctgccgtgggtgcttacctgcacattgccctgaacattggcgggatgctgacaatgctcgcgtgtatcggaaccatcgcctggatgttctcggtgccagtctatgaggagaggaagaggtttgggctgctgatgggtgcagccctcctggaaggggcttcagttggacctctgattgagcttgccatagactttgacccaagcatcctcgtgacagggtttgtcggaaccgccatcgccttcgggtgcttctctggcgccgccatcatcgccaagcgcagggagtacctgtacctcggcggcctgctctcctctggcctgtcgatcctgctctggctgcagtttgccacgtccatctttggccactcctctggcagcttcatgtttgaggtttactttggcctgttgatcttcctggggtacatggtgtacgacacgcaggagatcatcgagagggcgcaccacggtgacatggactacatcaagcacgcgctcaccctcttcaccgacttcgtcgccgtcctcgtccgcatcctcatcatcatgctcaagaacgcaggcgacaagtcggaggacaagaagaagtggaagaggaggtcctgaacgtgtcctctgcacatcgtagataccatcaccaccgcgctactggtaccaccaccactgctaagtacttgtaggaattaagctggcgcagtaacttggcgccgtgccacccttgttaattcgcgctcgtgtgaacattgtgtgagtttgatgctgctgatgaagcatttgcagatgctgtctgcgttccggatctcttgtgttcctgttaccgtcacgataatagaaacctgagacgatttggtttggttc

SEQ ID NO: 15252 - protein, 299 aa, Glycine max
SPVSKSIHPNQRKKKKRKREKSTRKGERRTGTNNLACEARPLRFDRRRRSAGMDAFYSTSSAAASGWGYDSLKNFREISPAVQSHLKLVYLTLCFALASSAVGAYLHIALNIGGMLTMLACIGTIAWMFSVPVYEERKRFGLLMGAALLEGASVGPLIELAIDFDPSILVTGFVGTAIAFGCFSGAAIIAKRREYLYLGGLLSSGLSILLWLQFATSIFGHSSGSFMFEVYFGLLIFLGYMVYDTQEIIERAHHGDMDYIKHALTLFTDFVAVLVRILIIMLKNAGDKSEDKKKWKRRS

SEQ ID NO: 15253 - protein, 247 aa, Glycine max
MDAFYSTSSAAASGWGYDSLKNFREISPAVQSHLKLVYLTLCFALASSAVGAYLHIALNIGGMLTMLACIGTIAWMFSVPVYEERKRFGLLMGAALLEGASVGPLIELAIDFDPSILVTGFVGTAIAFGCFSGAAIIAKRREYLYLGGLLSSGLSILLWLQFATSIFGHSSGSFMFEVYFGLLIFLGYMVYDTQEIIERAHHGDMDYIKHALTLFTDFVAVLVRILIIMLKNAGDKSEDKKKWKRRS

SEQ ID NO: 15254 - protein, 185 aa, Glycine max
MLTMLACIGTIAWMFSVPVYEERKRFGLLMGAALLEGASVGPLIELAIDFDPSILVTGFVGTAIAFGCFSGAAIIAKRREYLYLGGLLSSGLSILLWLQFATSIFGHSSGSFMFEVYFGLLIFLGYMVYDTQEIIERAHHGDMDYIKHALTLFTDFVAVLVRILIIMLKNAGDKSEDKKKWKRRS

SEQ ID NO: 15255 - DNA, 479 bp, Glycine max
gtttgtctatgggcgaatctctccggcaacggcgacctctcttcccctgcgcgtccctcttccggcgttgccaccccgtcgtccatcgctaccagatcgacgaccgccccttcatcctctctggtctctgcagatctacgccggcggcccgccttaccgacggttcttcctagccacgctgaagtctccatcctagagggtagaggcattccatttccttcagttcagtgattgagaatggaaaatggatttcctggcgaagttctgaaggctgtttttcctctactggatggtaaagacttagtcttttgcatgcttgtatgccgccaatggtgcgaaattgcaaaggatgattacttctggaaatgcatctgctcacggaaatggccttccatctgcaagcagcctccttctgacacaaacttccaaaagctctatttaacgttctccaagccacggaagacggtgcaccttcctgt

SEQ ID NO: 15256 - protein, 80 aa, Glycine max
MENGFPGEVLKAVFPLLDGKDLVFCMLVCRQWCEIAKDDYFWKCICSRKWPSICKQPPSDTNFQKLYLTFSKPRKTVHLP

SEQ ID NO: 15257 - protein, 76 aa, Glycine max
VCLWANLSGNGDLSSPARPSSGVATPSSIATRSTTAPSSSLVSADLRRRPALPTVLPSHAEVSILEGRGIPFPSVQ

SEQ ID NO: 15258 - protein, 64 aa, Glycine max
FVYGRISPATATSLPLRVPLPALPPRRPSLPDRRPPLHPLWSLQIYAGGPPYRRFFLATLKSPS

SEQ ID NO: 15259 - DNA, 1503 bp, Glycine max
ctccattcgatccgaacccatccgattcggaagagaggtactcacttgccccaaccaatcgaagcagggcgagctcgactttgcggcgctaattcgtcggcagctagtatcccgcgctgtgtgtttccctcgttcgtgttcaggtggtgatgccgcttgtggaatcgcctcaatggcgccggaaggccaccgatttcttctcttcatctagcttcaagctgaagcaggcagggcaatctgcaggggataatatagctgatgttgccgggaaggttggaacagtggtgaagagtcggtgggctatcttccaggatgctagacagcgaccgccaccaccaggagatactgtgcaggagcgcttcatctctgctgctgccaacactggagtgattctgaggaagggcatttcagagacaaaggagaaggtcgcggtgggaaaggtcaaagttgaagaggctgccaaaaaaactgcggacaaaagcaaaactattttgaacaatattgaacgctggcagaagggagttgcgagcaatgacgtttttggtgttcctgttgaagccactgtacaacgggagcaatatggtaaagctgtgcctctgatactggtgaggtgtgcagaccacttggttatatcaggcttgagtaatgagtgcttgttcaaatctgaaggtgacagaaaagttcttcagcaactagtttcactttacaatgaggattcgggtgcatctttgcctgatggtgttagccctcttgatgtagctgcactgatcaagtgctaccttgccagcatccccgaaccgcttacaacatttgctctttatgatgagcttaaagacgcgagggttagcattgatgatcttaagaacatactgaagaagcttccaaatgtgaactacatgacactagaatttgttacagcattgctactgagagtaagccgtaaatcagcactcaacaagatggactctcgtacccttgctgtggagttcgcacctttgatcatatggcagcaaggggattctggaacagatttacggaatcatctcagattcacactgaaaccacctccaaaaattgtggacgcgacgacaagtaccactacatgggacttgctagatgaggatgatgtggatgcttcgtcgcaaatccccttggacgatggttcgcctctagactatggtgctattgaggtgattcaatgcttaattgagcatcacaatcccatattcacggatgcaaacgagactgtatggagatgacctgacctggccggctcctctttagatttctgtggtatttagctcgtgctatgtacaagttccaggtagtaggatggagtggagtgccgcgaataagtctagtcttggggaagcattttggtccaaacttttttttgtgggagtaaaagttggaactgtatatattaattgtccacatgacagagttgtcttgtgggatttgcctcgacatggctcgtcaataatgtaccatgattcttgtgct

SEQ ID NO: 15260 - protein, 369 aa, Glycine max
MPLVESPQWRRKATDFFSSSSFKLKQAGQSAGDNIADVAGKVGTVVKSRWAIFQDARQRPPPPGDTVQERFISAAANTGVILRKGISETKEKVAVGKVKVEEAAKKTADKSKTILNNIERWQKGVASNDVFGVPVEATVQREQYGKAVPLILVRCADHLVISGLSNECLFKSEGDRKVLQQLVSLYNEDSGASLPDGVSPLDVAALIKCYLASIPEPLTTFALYDELKDARVSIDDLKNILKKLPNVNYMTLEFVTALLLRVSRKSALNKMDSRTLAVEFAPLIIWQQGDSGTDLRNHLRFTLKPPPKIVDATTSTTTWDLLDEDDVDASSQIPLDDGSPLDYGAIEVIQCLIEHHNPIFTDANETVWR

SEQ ID NO: 15261 - DNA, 1191 bp, Glycine max
actccgcactgttcctcggactctcgtctcgctagttccccaacttccggcgcaagctgaaccctcggacccgaccgcggcagccgccgatccagccccgccgcgatggaattcgccctcgtcgacggcgagaagttctcgccctcctgctccacgctcgtcatgcccgcgctttcgatcggcaacgtggggcagctcgccgtggacctgctgataccgtcggcgaaggcgaggcgcgtggcgtacctcgatgagccctccgtgctgccctgcatcggcaacgacgccttcggaccgggcgctgtcggcgacctcgcgctcgcgctcgaagaatacgagtcaccgtctcacgggctggctttcattcaacaaagatctccagttattacggggatgatggtttcgtttgccaaaaatgttgctaatttcatcagtagcattgagaaggaccatgttgttattctttcaagtttagattctggcaagagaagagtaattgatgcatccagtgatatgctgtattacctttcaagctgcaatgaggatggttctgatccagaatgtgagaaactagggtggaagaaacttgaggaatataatccatctcaacgactgtggaaatgtcttgctagtctaattgagggtggtgttctttcagaagatatggctgatgatcctgaagagatgaccgcaagtgattactatgcgaccttaccatttgcagctctattctttgcctgcaaggccaaaggtttgaaagttagctgtgtattatgttactgttcagaaggggacaatatgccagaatctttccacttagcagaagcagtatgcaaacttcgaggtcaagaccctgaacaattccatggaaatgggtcaaatggatggactattcccttgtcatggaaatcaatttatggaccacctcctgatatgtctattttctagactgactgacctaggaagttgcaatcatggacagcgctgtatctagaatgaggaaggatattagctttaggttgtgtactagaaatccccaggatggtgagtcgccgaccctcttttgaagcaacaacagttttcaacttccgtttagaactggagggatcgtgaacctggaatttatctgccgcggctattcctcatgtctaagtggaatagatttattcgtttttattaaaaaaattcact

SEQ ID NO: 15262 - protein, 280 aa, Glycine max
MEFALVDGEKFSPSCSTLVMPALSIGNVGQLAVDLLIPSAKARRVAYLDEPSVLPCIGNDAFGPGAVGDLALALEEYESPSHGLAFIQQRSPVITGMMVSFAKNVANFISSIEKDHVVILSSLDSGKRRVIDASSDMLYYLSSCNEDGSDPECEKLGWKKLEEYNPSQRLWKCLASLIEGGVLSEDMADDPEEMTASDYYATLPFAALFFACKAKGLKVSCVLCYCSEGDNMPESFHLAEAVCKLRGQDPEQFHGNGSNGWTIPLSWKSIYGPPPDMSIF

SEQ ID NO: 15263 - protein, 261 aa, Glycine max
MPALSIGNVGQLAVDLLIPSAKARRVAYLDEPSVLPCIGNDAFGPGAVGDLALALEEYESPSHGLAFIQQRSPVITGMMVSFAKNVANFISSIEKDHVVILSSLDSGKRRVIDASSDMLYYLSSCNEDGSDPECEKLGWKKLEEYNPSQRLWKCLASLIEGGVLSEDMADDPEEMTASDYYATLPFAALFFACKAKGLKVSCVLCYCSEGDNMPESFHLAEAVCKLRGQDPEQFHGNGSNGWTIPLSWKSIYGPPPDMSIF

SEQ ID NO: 15264 - protein, 184 aa, Glycine max
MMVSFAKNVANFISSIEKDHVVILSSLDSGKRRVIDASSDMLYYLSSCNEDGSDPECEKLGWKKLEEYNPSQRLWKCLASLIEGGVLSEDMADDPEEMTASDYYATLPFAALFFACKAKGLKVSCVLCYCSEGDNMPESFHLAEAVCKLRGQDPEQFHGNGSNGWTIPLSWKSIYGPPPDMSIF

SEQ ID NO: 15265 - DNA, 791 bp, Glycine max
attcaccgtttctctctcttccttatcatcaaacttgctctgatctgatcagcgcttttgaaaatgtcggagggatcagaagaaacgaagacaaagatcgattccaccggagagttatcggacgtcgataacgagaactgcagtagcagtggaagtggcggcggcgagacgaagaagacatgcgttgattgcggaacattcaaaactcctctctggcgtggtggccctgccggacctaagtcactgtgcaatgcttgtgggatcaagagcaggaagaagaggcaagcggctctcgggatcaaaccagagaagaagatcagaaaaagcaacagctgtgacagtgatctaagcctcgaagatgatggccgtaacgtcaataacaagatcaagaaaggtgatgatcacaaaacttgcagtagcaagagtggtactagtactagtagcagctgcagcaaaagagtgagtaagtttttggatctgggattggaagtgccggtgatgaagagatcagcggttgagaagaagaggctgtggaagaaacgcggcgacgaagaaagagccgccgtgcttctcatggcgctctcttgcggctctgtttatgcgtaaacgatggagatcaagcttctttgtttggtgtcgttcgagaataattaaagtgaggggttctgattaattatttaattaacttaagacaatagagataactgtgtaatagctagtgatgtcgtggttttttttggcttgttcccactgatgttatgtgttcttttgctaatcaagtttcaattttt

SEQ ID NO: 15266 - protein, 180 aa, Glycine max
MSEGSEETKTKIDSTGELSDVDNENCSSSGSGGGETKKTCVDCGTFKTPLWRGGPAGPKSLCNACGIKSRKKRQAALGIKPEKKIRKSNSCDSDLSLEDDGRNVNNKIKKGDDHKTCSSKSGTSTSSSCSKRVSKFLDLGLEVPVMKRSAVEKKRLWKKRGDEERAAVLLMALSCGSVYA

SEQ ID NO: 15267 - DNA, 539 bp, Glycine max
acccacagcacacaactccaccggtagtaacaaagccagtacgtagcgcaagcagagagtttaggtcgctcccagcccggccgctcaccatgtggaccaagaaggtggcgacgcaggtggctttggtcctgcttctccttctcatcgcacaggaggcggcggtgccgggggcggaggcgaaggtctgccggcagcgcagcgcggggttcaaagggccgtgcgtgtccgataagaactgcgcgcaggtctgcctgcaggaaggctggggcggcggcaactgcgacggacccttccgccggtgcaagtgcatcaggcagtgctgatcataatatgtgctacggctagctggccctcgccgtacgtcagctagctagcccatggaatcatacgtctgtgtacctacttgaatgtgtgtgtgtgtgccgccttctacgtacgtatgtcgtatgtatatccgtatcaccactagccagctgctgcatctcgatcgatgcatgcgagagaataataataagaataaaaacgtacggttcatgttc

SEQ ID NO: 15268 - protein, 106 aa, Glycine max
PQHTTPPVVTKPVRSASREFRSLPARPLTMWTKKVATQVALVLLLLLIAQEAAVPGAEAKVCRQRSAGFKGPCVSDKNCAQVCLQEGWGGGNCDGPFRRCKCIRQC

SEQ ID NO: 15269 - protein, 77 aa, Glycine max
MWTKKVATQVALVLLLLLIAQEAAVPGAEAKVCRQRSAGFKGPCVSDKNCAQVCLQEGWGGGNCDGPFRRCKCIRQC

SEQ ID NO: 15270 - DNA, 850 bp, Glycine max
gaaaaaccactctgtagaccaccaactcacaccacccgttgagggcgttaccttccaaaactcctgcatccaatggcgttacgcctctccgtctcctcgccgcagagcacggcctcgtcgccggccatctcctcatgccgccccgccgcctgcggccgcttcctggcctgcgtggcggcttctcagaagaggagcctgatggtggtgtctggcgctgacgcgagggcagtggctccggtgaagtcgggcggcttggagacggccacgactggagctgacgaggtggaagcgcccacagcggcggtggcggtgaccgggcaggtcaccgaggtctgcaaggacaccttctggccaattgtcaaggcagcaggggagaagcccgtcgtcctcgacatgtacacccaatggtgcggcccttgcaaagttatggcaccaaaattccaggagatgtctgagaaggaccacgacgtcgtattcctcaagctcgattgcaatcaagacaacaggccacttgcaaaggagcttggtataagggttgtaccaacattcaagattttcaaggatgggaaggttgcaaaggaggtcactggtgcgaagattgatgaattagcgcgtgccattgaggaagtgaagtcaagctgagcaattccctggaaagaaatgcagcaattagcatgctatcactagtgtacactatgggatgaaaacagcctttgtggaagtggataatcaccgtggagaaaaacagttattatagttcttctgcttatgatgatttaccaatcgttctggacaatatacacccatccatgtggagtgtatgctgtaaatagtcatttaaatctttctg

SEQ ID NO: 15271 - protein, 189 aa, Glycine max
MALRLSVSSPQSTASSPAISSCRPAACGRFLACVAASQKRSLMVVSGADARAVAPVKSGGLETATTGADEVEAPTAAVAVTGQVTEVCKDTFWPIVKAAGEKPVVLDMYTQWCGPCKVMAPKFQEMSEKDHDVVFLKLDCNQDNRPLAKELGIRVVPTFKIFKDGKVAKEVTGAKIDELARAIEEVKSS

SEQ ID NO: 15272 - protein, 147 aa, Glycine max
MVVSGADARAVAPVKSGGLETATTGADEVEAPTAAVAVTGQVTEVCKDTFWPIVKAAGEKPVVLDMYTQWCGPCKVMAPKFQEMSEKDHDVVFLKLDCNQDNRPLAKELGIRVVPTFKIFKDGKVAKEVTGAKIDELARAIEEVKSS

SEQ ID NO: 15273 - DNA, 841 bp, Glycine max
aaccaagcagccgctgcaacatactgtacaattactttgcactagcaacacaacgctcttactgagctcatagcgtttgcacctgcccatcttaactagttgatcaccgcagcaatggcctccaccaacagctggacccacgagatcgagtcgtcggtcgcggcaccgcgcctgttccgtgccggcgtcatggactggcacactctggcacccaagctcgcgccccacatcgtcgccagcgcccaccccgtggagggcgaaggcggcatcggcagcgtcaggcagttcaacttcacctcagtcatgccctttaccctcatgaaggagaggcttgagttcctggacacagacaagtgtgagtgcaagtcgaccctcgtcgagggcggcggcatcgacacggcgatcgagactgcgacgtcgcacatcaaggtggagccggcggccaacggagggtgcttcgtgaaggtggactcgacgtacaagctgctgccaggcgtggaggtgaatgacgaaatcaccaaggccaaggaatccgtcaccgccatctttaaagccgccgatgcctacctcatcgccaaccctgacgcctacaactgaatcagttgagagggatcatatatgattatgatgtccctagtttgattcttttgtgctttcttcccgatgtaataaagctgctccatctctaagctacaaatagtaacgccgagggcgagagcaccgaggagagtgtggacgtgagaagttgaaaatttagtatttgtaactactaaaggggcctgtttgtttgatgatgttggtgcttgctttatgtgaaatacctaaacgctcttgttttctt

SEQ ID NO: 15274 - protein, 160 aa, Glycine max
MASTNSWTHEIESSVAAPRLFRAGVMDWHTLAPKLAPHIVASAHPVEGEGGIGSVRQFNFTSVMPFTLMKERLEFLDTDKCECKSTLVEGGGIDTAIETATSHIKVEPAANGGCFVKVDSTYKLLPGVEVNDEITKAKESVTAIFKAADAYLIANPDAYN

SEQ ID NO: 15275 - protein, 135 aa, Glycine max
MDWHTLAPKLAPHIVASAHPVEGEGGIGSVRQFNFTSVMPFTLMKERLEFLDTDKCECKSTLVEGGGIDTAIETATSHIKVEPAANGGCFVKVDSTYKLLPGVEVNDEITKAKESVTAIFKAADAYLIANPDAYN

SEQ ID NO: 15276 - protein, 97 aa, Glycine max
MPFTLMKERLEFLDTDKCECKSTLVEGGGIDTAIETATSHIKVEPAANGGCFVKVDSTYKLLPGVEVNDEITKAKESVTAIFKAADAYLIANPDAYN

SEQ ID NO: 15277 - DNA, 1210 bp, Glycine max
acatcgccacaaagcctgcgcctccatccacctccctcccacacgctccccaccccccgcgccgccgctcgtcggagccccgcctcgccgtgtcaagcccgctaccaatcgagccctgaatggctgccggcaggggcattaaccagcttctgaggaaaactcttcagagccagtcttctggctcatctctgctttcttcatttcggggaaagcatgaagagtcctctgctggactgagagcattggctcttcttggagttggtgcttctggtcttttaagttttggtacgatagcatctgcagatgaagctgagcacggtttggcggctgcagagtacccctggccgcatgctggcatccttagctcatatgatcatgcatcaatccgccgtggacatcaagtttaccagcaagtgtgtgcatcttgtcactccatgtcattgatttcataccgtgatttggttggggtggcctatactgaggaggaaactaaggcaatggctgctgaaattgaagtggttgatggtcctaatgatgagggtgaaatgttcacacgtcctggcaagctgagtgatcgcttcccgcagccttatccaaatgaacaagcagcccgatttgcaaatggtggggcatatcccccagatctcagccttatcacgaaggcaaggcacgatggccagaactacgtgtttgctcttcttactggttaccatgacccacctgctggtgttcagattcgtgagggtctgcattacaatccctacttccctggtggtgccatagccatgcctaagatgcttatggatggagctattgagtatgaagatggtactcctgcaactgaagctcagatgggcaaggatgttgtgtcattcttgtcgtgggctgctgagcctgaaatggaagagaggaaactgatgggtgtcaaatggatcttcctactgtcacttgctcttctccaagccgcatactaccgtcgcatgaggtggtccgtcctcaagtcccgcaagctggtcctggacgtcgtcaactgatgaccattgtttcttctttttattgcaacgttgaggctttaagcagaagcgatcgaaataatgacttccgttgtatatttttgctactggggttgtctcccatcataccttgggtacaatctcttttgttttcttcctctgctgcaaaagcatttctccaaggagcagttattttc

SEQ ID NO: 15278 - protein, 304 aa, Glycine max
MAAGRGINQLLRKTLQSQSSGSSLLSSFRGKHEESSAGLRALALLGVGASGLLSFGTIASADEAEHGLAAAEYPWPHAGILSSYDHASIRRGHQVYQQVCASCHSMSLISYRDLVGVAYTEEETKAMAAEIEVVDGPNDEGEMFTRPGKLSDRFPQPYPNEQAARFANGGAYPPDLSLITKARHDGQNYVFALLTGYHDPPAGVQIREGLHYNPYFPGGAIAMPKMLMDGAIEYEDGTPATEAQMGKDVVSFLSWAAEPEMEERKLMGVKWIFLLSLALLQAAYYRRMRWSVLKSRKLVLDVVN

SEQ ID NO: 15279 - protein, 199 aa, Glycine max
MSLISYRDLVGVAYTEEETKAMAAEIEVVDGPNDEGEMFTRPGKLSDRFPQPYPNEQAARFANGGAYPPDLSLITKARHDGQNYVFALLTGYHDPPAGVQIREGLHYNPYFPGGAIAMPKMLMDGAIEYEDGTPATEAQMGKDVVSFLSWAAEPEMEERKLMGVKWIFLLSLALLQAAYYRRMRWSVLKSRKLVLDVVN

SEQ ID NO: 15280 - protein, 178 aa, Glycine max
MAAEIEVVDGPNDEGEMFTRPGKLSDRFPQPYPNEQAARFANGGAYPPDLSLITKARHDGQNYVFALLTGYHDPPAGVQIREGLHYNPYFPGGAIAMPKMLMDGAIEYEDGTPATEAQMGKDVVSFLSWAAEPEMEERKLMGVKWIFLLSLALLQAAYYRRMRWSVLKSRKLVLDVVN

SEQ ID NO: 15281 - DNA, 626 bp, Glycine max
atgttttaaatatttatatgaagaacgaaataaaagacccatatgatatggttgcctatatatgaataaatgtcacatgcatgtgcagaagaatggataaagcattacctcactcacagtagattgctattactaattttcttactaccaagtgaagaagaatattgggttagctgatttcatttatgtaccctgcaatgttaaattgtgacagatcaagctggcatctgtaaaattggccatgaagtatatgaagagagtctctgctgagcttgaaacaggtggtggtgggcctgaagaagaagagcttattgtccaaggagttagatttgcattccgagtacatcagtttgctggaggttttgatgtggagacaatgagggcgtttcaagagttgagagataaagcgaggtcgtgccatgttcaatgtcacagccagcaacagaaattattttgcaggtctgccacatgctaatgctggagcaaactcagcttcagagaattagttgcgccgcactcccccctcccctattgtttttctgtattttgtgaatagaatggcaaatagtattagccatccttaaaagtgtagaacacattcataattcatgattcatccattcatt

SEQ ID NO: 15282 - protein, 77 aa, Glycine max
MKYMKRVSAELETGGGGPEEEELIVQGVRFAFRVHQFAGGFDVETMRAFQELRDKARSCHVQCHSQQQKLFCRSATC

SEQ ID NO: 15283 - protein, 74 aa, Glycine max
MKRVSAELETGGGGPEEEELIVQGVRFAFRVHQFAGGFDVETMRAFQELRDKARSCHVQCHSQQQKLFCRSATC

SEQ ID NO: 15284 - protein, 41 aa, Glycine max
MSQPATEIILQVCHMLMLEQTQLQRISCAALPPPLLFFCIL

SEQ ID NO: 15285 - DNA, 1226 bp, Glycine max
gattttgtctaagagtcatagaagaagcgcagttaacgaaggtataagactgcagagagactgagagagaaagagatctggaagaagaaatgagtgaagcgcagaagcacgtttgggaaggggcaattcctctccagattcacctccacgaatccgaagtcaccactctccctcctcctccacccgctctcgtgttggcacctcggctaggttatttgcctttgctgatttcgctattgaagcctcagttcagcagcacgcttccacctggagtcgacaccatttggtttgagtacaaaggcctccctctcaagtggtatatacctactggagttctttttgatcttttgtgcgtggagccagagaggccgtggaatttaacggtacacttcagaggatatccaagtaatatattacttccctgtgaaggtgaagacagtgtaaagtggagctttattaactcactgaaagaggctgcatatgtaataaatgggaatagcaaaaatgtgatgaacatgtctcaaactgatcaggtaatttggaaacttatcgacgggtggcatcgaagcttaagcttggaacttttgaagatgaatatatggaaaatgttagttcagtcttgattaaatctccacaaagtccaggggatactgatgttacgggacaagtgaagactggtatgattcctgttcgtttatatctgtggactgtcaatgaggagtttgatgattttgaagatgctccacaaattgataattgggacaaagtctcatatatcaatcgacctgttgagatttataaggaagatggtaaatactttagcttaaatgatgcagttaaaagaatattgcccgagttttttccggaaaattcctttgtaactgaaggagatgcaaacatcaaccaaattgaagagggagaaagttcatctgatccagggtcatcttgcaacacacttgagattgctgaaatcaaatttgtacgcgttcaaggaatagaaccaattttagacatacctttttcttgggtggttagcaacttgatgaatcccgaatattttcttcatatgtgtgtttgcttaaaagtttcaaagtccaatgctgtgcaatagggataattttagttatgttggacattttactggaaaaatcagaaggtgcaattcttttgtacatatatgtacataacggtttcatatcatatattcatttcatgattcgattgct

SEQ ID NO: 15286 - protein, 177 aa, Glycine max
MSEAQKHVWEGAIPLQIHLHESEVTTLPPPPPALVLAPRLGYLPLLISLLKPQFSSTLPPGVDTIWFEYKGLPLKWYIPTGVLFDLLCVEPERPWNLTVHFRGYPSNILLPCEGEDSVKWSFINSLKEAAYVINGNSKNVMNMSQTDQVIWKLIDGWHRSLSLELLKMNIWKMLVQS

SEQ ID NO: 15287 - protein, 170 aa, Glycine max
MENVSSVLIKSPQSPGDTDVTGQVKTGMIPVRLYLWTVNEEFDDFEDAPQIDNWDKVSYINRPVEIYKEDGKYFSLNDAVKRILPEFFPENSFVTEGDANINQIEEGESSSDPGSSCNTLEIAEIKFVRVQGIEPILDIPFSWVVSNLMNPEYFLHMCVCLKVSKSNAVQ

SEQ ID NO: 15288 - protein, 143 aa, Glycine max
MIPVRLYLWTVNEEFDDFEDAPQIDNWDKVSYINRPVEIYKEDGKYFSLNDAVKRILPEFFPENSFVTEGDANINQIEEGESSSDPGSSCNTLEIAEIKFVRVQGIEPILDIPFSWVVSNLMNPEYFLHMCVCLKVSKSNAVQ

SEQ ID NO: 15289 - DNA, 870 bp, Glycine max
ttacctagaacatcctaatcgaaaaataaaaaccctaaacacaaccaccgtcctcaaccaccatggcagagcgtgaccgccgcgaacgagagagggatagagaccgtgagcgcgaccgcgatagacgccgtgacagagacgaccgtgaccgtgaccgtgggattcgaagcaagaagtcccgatctcgtactccagaccaccaccaccacgctcgccctcctcgccacgtgcgctctcccgagaggtatcgatcccggtcccgctccgctgaccgtgaccgtcatcgccaccacagcaggcgcaggactccctctccagatcccccgccgcggaaacggcctcgccatggctcagcggaagacgacaaggaaaggagtcgcaaacgagaggagactgcgacggagcaagctaagaagaaggagaataaagaaccaagcggcggcggaggaggagaagcggaaacggatgtgaatgagatagagatgatgaagatgttagggatccctactggtttcgactccacgaaagggaagcatgtcgaaggcgctgacgtcagcgggattagggctgttaccaagcgccagccgaggcagtacatgaaccgtcgcggtggctttaaccgtcctttgcctgctgagcgtaaccgctaaaggtccttgtcaatgctgtcttaaacacgaggtcagatgatgagagttcgagcttgtatttactgcaattcttccccagacgctgttctaatgtccttagagaacaaacatgtactctctggagttagaaacatcttatctctttttaggggtttagagttgtgaatgatgttatgtgtattaatttcccggctctaacttttagactatgatttagttg

SEQ ID NO: 15290 - protein, 195 aa, Glycine max
MAERDRRERERDRDRERDRDRRRDRDDRDRDRGIRSKKSRSRTPDHHHHARPPRHVRSPERYRSRSRSADRDRHRHHSRRRTPSPDPPPRKRPRHGSAEDDKERSRKREETATEQAKKKENKEPSGGGGGEAETDVNEIEMMKMLGIPTGFDSTKGKHVEGADVSGIRAVTKRQPRQYMNRRGGFNRPLPAERNR

SEQ ID NO: 15291 - DNA, 615 bp, Glycine max
gtatctagggtttttttacctccgcgctccgcctgcccacacgcggttccgtccagaagcttctagacacttccagtcggaggaggagctcacgccgcagcagcagccatggcgtccaccaaagtccagcgtatcatgacccagcccatcaacctcatctttcggttcctccagagcaaagcgcgcatccagatctggcttttcgagcagaaggatatgcggatcgagggtcgtatcatcggctttgatgagtacatgaacctggttctcgaggatgctgaggaaatcaacattaagaagaacaccaggaaatcgttgggaaggatactcttgaaaggcgacaacataactctgatgatgaacactggaaagtgaagcttctctctctaggatggctggcgttgtcgttcctatgttgagcgttcctgtgatactttgtactccacccaggctgatatgcatgtagcttgtcgttgtggtcatttgaggatatgtaacgtctgttgtccatctatgaacccagacccagtaaatccattctgtctactccgtgcaagatgtttgatcaagatgatgagcttattggttgtgtttaagattgacatgaacagatcc

SEQ ID NO: 15292 - protein, 88 aa, Glycine max
MASTKVQRIMTQPINLIFRFLQSKARIQIWLFEQKDMRIEGRIIGFDEYMNLVLEDAEEINIKKNTRKSLGRILLKGDNITLMMNTGK

SEQ ID NO: 15293 - protein, 79 aa, Glycine max
MTQPINLIFRFLQSKARIQIWLFEQKDMRIEGRIIGFDEYMNLVLEDAEEINIKKNTRKSLGRILLKGDNITLMMNTGK

SEQ ID NO: 15294 - protein, 53 aa, Glycine max
MHVACRCGHLRICNVCCPSMNPDPVNPFCLLRARCLIKMMSLLVVFKIDMNRS

SEQ ID NO: 15295 - protein, 52 aa, Glycine max
MRIEGRIIGFDEYMNLVLEDAEEINIKKNTRKSLGRILLKGDNITLMMNTGK

SEQ ID NO: 15296 - DNA, 1147 bp, Glycine max
accattacctagaacatcctaatcgaaaacagccctacctgccattttcctccgttcgttcatctccttcgcctcgccaccgtccctcctcctctcttccctccctcatccctcatctcgtgtcggctcgaaagtcgaaaccctagaccaaccaccctcccctagtacgtaggaacagggacagagatgtatgcagaccagatctccaccggccgcaagcgctccatccatgaccgccttgacgccgacctcccctccgaccgcggcggcgcggacgccgccggccgggctcgtaacgcgctgtccaagaggcaacgacaaactgatgataaatggaagcatgatctttaccgggatgatgaatcagcttcaagatcagttgatccacgggatttgcgattcaagcttcagaagaaaagctctcagcaagggtttgctggccaaaagggttccggggtacgtgatctacgtgagatgttatctggaacaatgcacgcacaaccatcaaatgttgaccctcaaaagaggaaaccggtgtcagaggttgtgaaagtcacaaggcgtgaaattgttgatgaaaggcctgtacgcctaagtaagaaagtatcaaaaccatcaacatccaagaagacttctcagccaaaggctgaaagtccactcgacagttttctgaaatcacttggacttgagaagtattctattaccttccaggcggaggaggttgacatggcggccctacgtcacatgactgaaagtgatctcaaggcgttgggcatcccgatgggtcctaggaagaagattacccttgccttggaatccagagcgtagggcaatgtccctggagtacaatgtagaaaagcagggagatgtggtaggtttttgctcatctgcaaatttggcatatcttggaaagcagtggtacaggtaaacaatgcggtgtctcttgtaatggcatgttgctgtaagattattagactgctgttgtttatctggtctgcatgctttcctggccagaccagctgatttaactgatgaggtatccgtgctgttgaagctgcggtgatgttctcgctgtatactattattatgccttttttttcattggaaactggcattattagagtaatagagttgagattcttcagtc

SEQ ID NO: 15297 - protein, 213 aa, Glycine max
MYADQISTGRKRSIHDRLDADLPSDRGGADAAGRARNALSKRQRQTDDKWKHDLYRDDESASRSVDPRDLRFKLQKKSSQQGFAGQKGSGVRDLREMLSGTMHAQPSNVDPQKRKPVSEVVKVTRREIVDERPVRLSKKVSKPSTSKKTSQPKAESPLDSFLKSLGLEKYSITFQAEEVDMAALRHMTESDLKALGIPMGPRKKITLALESRA

SEQ ID NO: 15298 - protein, 119 aa, Glycine max
MQTRSPPAASAPSMTALTPTSPPTAAARTPPAGLVTRCPRGNDKLMINGSMIFTGMMNQLQDQLIHGICDSSFRRKALSKGLLAKRVPGYVIYVRCYLEQCTHNHQMLTLKRGNRCQRL

SEQ ID NO: 15299 - protein, 117 aa, Glycine max
MLSGTMHAQPSNVDPQKRKPVSEVVKVTRREIVDERPVRLSKKVSKPSTSKKTSQPKAESPLDSFLKSLGLEKYSITFQAEEVDMAALRHMTESDLKALGIPMGPRKKITLALESRA

SEQ ID NO: 15300 - DNA, 593 bp, Glycine max
accatcaatctcatcgcccaccaccaaaacaatccaatccaatcccaccgtagagaggggagaagcgcggaggatgtcgggccgcggcaagggaggcaaggggctgggcaagggcggcgcgaagcgccaccggaaggtgctccgcgacaacatccagggcatcaccaagccggcgatccggcggctggcgcgcaggggcggcgtgaagcgcatctcggggctcatctacgaggagacccgcggcgtgctcaagatcttcctcgagaacgtcatccgcgacgccgtcacctacaccgagcacgcccgccgcaagaccgtcaccgccatggacgtcgtctacgcgctcaagcgccagggccgcaccctctacggcttcggaggctaggccgagggttcatcgatccagctcgcgacgccgccgtccgaccgagagtagtagtgctatctatctagttgctgtctagggttcgtggttctccgtgcaagagcagtggtatctccttggtgtttgctcccgtcttgtgagctgatgttgctgttgtagagatgtactggaagaagtttggaatggaaattgcagcagtttatccctc

SEQ ID NO: 15301 - protein, 150 aa, Glycine max
TINLIAHHQNNPIQSHRREGRSAEDVGPRQGRQGAGQGRREAPPEGAPRQHPGHHQAGDPAAGAQGRREAHLGAHLRGDPRRAQDLPRERHPRRRHLHRARPPQDRHRHGRRLRAQAPGPHPLRLRRLGRGFIDPARDAAVRPRVVVLSI

SEQ ID NO: 15302 - protein, 127 aa, Glycine max
PSISSPTTKTIQSNPTVERGEARRMSGRGKGGKGLGKGGAKRHRKVLRDNIQGITKPAIRRLARRGGVKRISGLIYEETRGVLKIFLENVIRDAVTYTEHARRKTVTAMDVVYALKRQGRTLYGFGG

SEQ ID NO: 15303 - protein, 103 aa, Glycine max; identical to SEQ ID NO: 71

SEQ ID NO: 15304 - DNA, 497 bp, Glycine max
atttccagtggagtcaaaacttcagagagtcgcctgctgtatggggtgaaatgctacgaccgatacctgctgcgctcgcatcctgcacccggttcttcgaggccatgtctgcgatgagggaatccttttctactctccaaacactacgtgttggtccttcttctctgtcaatgaccccaggtggctccagtgatgattcaaagttcttgacgccacctcagtggagagagggttcaatactcaatagctggaagcaagtggacgacgtaaaccctgaaagtggtggactcgacagtgtaaaccagaggaggctgtcatggccatcctccattaacagggacctgtaggtcacagctcaccaagcaaatacccaccggtttgcattctgtataaataggatcaccgaggcttgccttgattttattatgtgtggtttcttttggttgctggcaaaagctattatgaaagatcggaactaagtaaattaccaataggcg

SEQ ID NO: 15305 - protein, 114 aa, Glycine max
FQWSQNFRESPAVWGEMLRPIPAALASCTRFFEAMSAMRESFSTLQTLRVGPSSLSMTPGGSSDDSKFLTPPQWREGSILNSWKQVDDVNPESGGLDSVNQRRLSWPSSINRDL

SEQ ID NO: 15306 - protein, 98 aa, Glycine max
MLRPIPAALASCTRFFEAMSAMRESFSTLQTLRVGPSSLSMTPGGSSDDSKFLTPPQWREGSILNSWKQVDDVNPESGGLDSVNQRRLSWPSSINRDL

SEQ ID NO: 15307 - protein, 80 aa, Glycine max
MSAMRESFSTLQTLRVGPSSLSMTPGGSSDDSKFLTPPQWREGSILNSWKQVDDVNPESGGLDSVNQRRLSWPSSINRDL

SEQ ID NO: 15308 - DNA, 788 bp, Glycine max
  misc_feature (121)..(121): n is a, c, g, or t
gtgaagataagaagttgaatgcaacatatataatcagtgtcgcccgaaaacttgggtgttccattttcctgttacctgaggacataatagaggtcaaccagaagatgattctcattttagntgctagtataatgtattggagcctcaagaaacctgaagaaaacatcacccctgaagcatcgcctaaagcttcagtagatggtgaaagcgaaacagatttagttgatgaggtatcccatttagccattgacgaggtatccaatttagccattgatgatacaacttcggagaatgctagctcttcttaagttagtaaggttgaagcaaaccatacccaatggagaatgagcgggaaaaaacgcatttttgtttatagggcaaaaggaagatgccaacctcttggttcccagttcgaaagaaagcttattgttatgaaaaaccacagataatagaaggatcttgtaaattattctttagaatttttttgtacttaggcatattctttcatgaaaattgcatgcaaattttcccaataataatgtgggcggaaggcatcattttattttcggtctgattgttaagattattcttaatgcgtgcatacggatacgggttgaagtggatgaactgaaccagtaatgattatgcacttcatttaagtggtttttctatttcaagtctgggattcaagtataatacatgtagttgatgctatagcaattggagacctttatgccaaaaaaaaaaaaaaaaaatatcgataccgtcgacctcgagggggggcccgg

SEQ ID NO: 15309 - protein, 101 aa, Glycine max
  misc_feature (40)..(40): Xaa can be any naturally occurring amino acid
EDKKLNATYIISVARKLGCSIFLLPEDIIEVNQKMILILXASIMYWSLKKPEENITPEASPKASVDGESETDLVDEVSHLAIDEVSNLAIDDTTSENASSS

SEQ ID NO: 15310 - protein, 67 aa, Glycine max
  misc_feature (6)..(6): Xaa can be any naturally occurring amino acid
MILILXASIMYWSLKKPEENITPEASPKASVDGESETDLVDEVSHLAIDEVSNLAIDDTTSENASSS

SEQ ID NO: 15311 - protein, 61 aa, Glycine max
MPTSWFPVRKKAYCYEKPQIIEGSCKLFFRIFLYLGIFFHENCMQIFPIIMWAEGIILFSV

SEQ ID NO: 15312 - DNA, 464 bp, Glycine max
atacaaagaagggaaaagacgaatcagaagacagagatatctatcaggagtggcatggaaaatcaattagagatggaagggtcagaggctctaaaaatgtatgtcctccctttcccttcgccaggacacacgatcccgctcattaacctggctcaaattttggccttaaaagggcaccacatcaccaycctcaccactccctccaacgctcaagtcctcccaaacaacctcaatgtccacacctttgatttcccctccgaccaagttggtctcccttccggcctcgaaaacgcagcctccgccggagacagcgtaaccgcccacaagattctgaaarkgccgcgctgcttctgaaaccacaaatagaaaccctagtgcagcaaaaccctcctcatgttttgatctcagacttcatgtttagatggagttcgaaactgggagtccccacgctctcttcaccccat

SEQ ID NO: 15313 - protein, 117 aa, Glycine max
  misc_feature (63)..(63): Xaa can be any naturally occurring amino acid
  misc_feature (113)..(113): Xaa can be any naturally occurring amino acid
IQRREKTNQKTEISIRSGMENQLEMEGSEALKMYVLPFPSPGHTIPLINLAQILALKGHHITXLTTPSNAQVLPNNLNVHTFDFPSDQVGLPSGLENAASAGDSVTAHKILKXPRCF

SEQ ID NO: 15314 - protein, 99 aa, Glycine max
  misc_feature (45)..(45): Xaa can be any naturally occurring amino acid
  misc_feature (95)..(95): Xaa can be any naturally occurring amino acid
MENQLEMEGSEALKMYVLPFPSPGHTIPLINLAQILALKGHHITXLTTPSNAQVLPNNLNVHTFDFPSDQVGLPSGLENAASAGDSVTAHKILKXPRCF

SEQ ID NO: 15315 - protein, 93 aa, Glycine max
  misc_feature (39)..(39): Xaa can be any naturally occurring amino acid
  misc_feature (89)..(89): Xaa can be any naturally occurring amino acid
MEGSEALKMYVLPFPSPGHTIPLINLAQILALKGHHITXLTTPSNAQVLPNNLNVHTFDFPSDQVGLPSGLENAASAGDSVTAHKILKXPRCF

SEQ ID NO: 15316 - DNA, 710 bp, Glycine max
tttttttcgccattaccccagggctcacagctagctagatccaccagccatggccggcagcaaggcactgctcctcctcctgtgcgcggcggcggtgctgctgaccccggcctccgcggcggaggacagcctgaccaagttcaagctgtattggcacgacgtgctggcggggacgagcccgaccgcgatccggattgcgcaggcggcgtccagcaacagctcctccaccttcttcggcgcggtggtggccatcgacgacccgctcaccaccggccccgccgtcacgggctccgccaaatccaaggacgagatcggccgcgcgcaggggacctacacgttcgccgaccaggccacgttcggcctcctcatgaacatgaacttcgtgttcaccgccggggactacaagggcagcggcctcaccatctacggccgcaacgaggtgctgtcggcggtgagggagatgagcatcatcggcggcacgggcaagttccgcatggcgcgcggctacgtcgaggcgcgcaccatggactccggcgccaagtccggcgagaccgtcgtcgagtacaccgtctacgtcaaggcggcggcggcgtcgtagcggcagctgccagaggttaatttagctaatgatgttcagtccatgactaacggaaaagatggttttacttgtaataaatggatttcgcagatttgctgcgtttgttatcgtg

SEQ ID NO: 15317 - protein, 205 aa, Glycine max
FFSPLPQGSQLARSTSHGRQQGTAPPPVRGGGAADPGLRGGGQPDQVQAVLARRAGGDEPDRDPDCAGGVQQQLLHLLRRGGGHRRPAHHRPRRHGLRQIQGRDRPRAGDLHVRRPGHVRPPHEHELRVHRRGLQGQRPHHLRPQRGAVGGEGDEHHRRHGQVPHGARLRRGAHHGLRRQVRRDRRRVHRLRQGGGGVVAAAARG

SEQ ID NO: 15318 - protein, 182 aa, Glycine max
MAGSKALLLLLCAAAVLLTPASAAEDSLTKFKLYWHDVLAGTSPTAIRIAQAASSNSSSTFFGAVVAIDDPLTTGPAVTGSAKSKDEIGRAQGTYTFADQATFGLLMNMNFVFTAGDYKGSGLTIYGRNEVLSAVREMSIIGGTGKFRMARGYVEARTMDSGAKSGETVVEYTVYVKAAAAS

SEQ ID NO: 15319 - DNA, 847 bp, Glycine max
atattttcagctaaagttttcaatgacttcatcaatggcgtcctcctccctttctcctgctactcagcttggttcgagcagaaacgctatgttggcgatgtctcgtgtgatgtttgtgaagccaacgaatcatcagatggtgagaaaggagaagcttggtctgagaattgcttgtcaagcaacgagtataccagcagacaatgttccagatatggagaagaggaagcttttgaatcttcttcttgtcggagctctttctctcccaactggcttcatgcttgtcccttacgctaccttctttgcccctcctggatccggaggtggaggtggtggtacaccagccaaggatgcacttggaaacgatgtcgttgcagcagaatggcttaagactcatggtcccggtgatcgaaccttgacccaaggattaaagggagatccaacttaccttgtcgtggagaacgacaagaccctagcaacatacggtataaacgcagtgtgcactcatcttggatgtgttgtgccatggaacaaagctgagaacaagttcctatgcccttgccatggttcccaatacaacgcccaaggcagagtcgttagaggtccagcaccattgtcgcttgccttggctcacgcggatattgatgacagtggaaaggttctatttgttccatgggttgaaactgatttcaggactggtgatgccccatggtggtcttaagactgtgcaacaactcttttgtgtaatacttgtatgaatgttcttataatgtaaaagctatgtgtaatcatacacttcatggcattactctgtgaattcttccctcttatatgaattttatgttcattc

SEQ ID NO: 15320 - protein, 238 aa, Glycine max
YFQLKFSMTSSMASSSLSPATQLGSSRNAMLAMSRVMFVKPTNHQMVRKEKLGLRIACQATSIPADNVPDMEKRKLLNLLLVGALSLPTGFMLVPYATFFAPPGSGGGGGGTPAKDALGNDVVAAEWLKTHGPGDRTLTQGLKGDPTYLVVENDKTLATYGINAVCTHLGCVVPWNKAENKFLCPCHGSQYNAQGRVVRGPAPLSLALAHADIDDSGKVLFVPWVETDFRTGDAPWWS

SEQ ID NO: 15321 - protein, 231 aa, Glycine max
MTSSMASSSLSPATQLGSSRNAMLAMSRVMFVKPTNHQMVRKEKLGLRIACQATSIPADNVPDMEKRKLLNLLLVGALSLPTGFMLVPYATFFAPPGSGGGGGGTPAKDALGNDVVAAEWLKTHGPGDRTLTQGLKGDPTYLVVENDKTLATYGINAVCTHLGCVVPWNKAENKFLCPCHGSQYNAQGRVVRGPAPLSLALAHADIDDSGKVLFVPWVETDFRTGDAPWWS

SEQ ID NO: 15322 - protein, 227 aa, Glycine max
MASSSLSPATQLGSSRNAMLAMSRVMFVKPTNHQMVRKEKLGLRIACQATSIPADNVPDMEKRKLLNLLLVGALSLPTGFMLVPYATFFAPPGSGGGGGGTPAKDALGNDVVAAEWLKTHGPGDRTLTQGLKGDPTYLVVENDKTLATYGINAVCTHLGCVVPWNKAENKFLCPCHGSQYNAQGRVVRGPAPLSLALAHADIDDSGKVLFVPWVETDFRTGDAPWWS

SEQ ID NO: 15323 - DNA, 565 bp, Glycine max
cattacctagaacatcctaatcgaaaatctattgattgtgagcatattcttgcacgagaactctggtcatgtataaccatgatataccgattgactcgaaagataaaagtcttgcggtgttgcaaaaggataagcgccttgttttgacaatggaagacctttcaaaggcattgcgtgagtatggcgtgaatttaaggcatcaagaatattttgctgatagtccttctaccggaatggatcctgctactcgtgaagaatgagtccttgtttgtgtgttcaggcttctaaaatgtcgtgtttagtaagtatttctatatacaaattctgaattgaatgtattctattgatatgttgctagttctctagttttatgcactgtatctgaagtcatagcacagcatgcccattttatgtagttggatacacatcatattactggcttcaatttgtgtttcaaaaaaaaaaaaaaaaaagcttatcgataccgtcgacctcgagggggggcccggtacccaattcgccctatagtgagtcgtattacgcgcgctcactggccgtcgtttta

SEQ ID NO: 15324 - protein, 63 aa, Glycine max
MYNHDIPIDSKDKSLAVLQKDKRLVLTMEDLSKALREYGVNLRHQEYFADSPSTGMDPATREE

SEQ ID NO: 15325 - protein, 48 aa, Glycine max
HYLEHPNRKSIDCEHILARELWSCITMIYRLTRKIKVLRCCKRISALF

SEQ ID NO: 15326 - protein, 42 aa, Glycine max
MPILCSWIHIILLASICVSKKKKKKLIDTVDLEGGPGTQFAL

SEQ ID NO: 15327 - DNA, 889 bp, Glycine max
aacatcctaatcgaaaaaaggcccgagaatcgcgaacgcttgatctgtttcttcccttccttttatgacattaatcctgtcggatcctcctgctctccacacctctgaaaatggcggatgcaaatgccgaaccagccgctggttcttcgagctcaaatgagagcgttactcagatcgagccgatccggatgccaacgatagaggagatgcgagcccaagaggtttggaacaactgcgccgtcaaaagtgttgctagtggagtcatgggaggaggacttgggttgatgatgggtttgttcttgggagcattggataatcctataacgaatgataccatgactggtaggcagcagtttgtcttcactgctaaacaaatggggtctaggagttggagttcttgcaagacttttgcggttatgggtttggttttctctgctgctgaatgcattatcgagaaggcaagggcgaagcatgacacaacaaacaccgcttttgctggatgtgtgaccggtggctcaatgtctgcccgaggtgggccaaaagctgcgtgtataggttgcgctggctttgcaactttctctgtactgatagagaagttcttcgacaggcatacgtaaaccaacagtatctctaacaaacgccattgctgggaattgtttagctgtttcctttctgtgattctgatacagttcatcatcacctgagcacagggagagggaaatctagaattacatttttcaaacatagaagagtgaagcttgttttgattgaatatttgttcagttgttgtcattatttatcatagtttttggtaacactcagtgctccaatattacagtgttcctcagaaaataagggcctgtccttgcataaaagtttcaggtttcag

SEQ ID NO: 15328 - protein, 168 aa, Glycine max
MADANAEPAAGSSSSNESVTQIEPIRMPTIEEMRAQEVWNNCAVKSVASGVMGGGLGLMMGLFLGALDNPITNDTMTGRQQFVFTAKQMGSRSWSSCKTFAVMGLVFSAAECIIEKARAKHDTTNTAFAGCVTGGSMSARGGPKAACIGCAGFATFSVLIEKFFDRHT

SEQ ID NO: 15329 - protein, 142 aa, Glycine max
MPTIEEMRAQEVWNNCAVKSVASGVMGGGLGLMMGLFLGALDNPITNDTMTGRQQFVFTAKQMGSRSWSSCKTFAVMGLVFSAAECIIEKARAKHDTTNTAFAGCVTGGSMSARGGPKAACIGCAGFATFSVLIEKFFDRHT

SEQ ID NO: 15330 - protein, 136 aa, Glycine max
MRAQEVWNNCAVKSVASGVMGGGLGLMMGLFLGALDNPITNDTMTGRQQFVFTAKQMGSRSWSSCKTFAVMGLVFSAAECIIEKARAKHDTTNTAFAGCVTGGSMSARGGPKAACIGCAGFATFSVLIEKFFDRHT

SEQ ID NO: 15331 - DNA, 698 bp, Glycine max
tgtgcaactctttgatttgtgttctattaacttcctctgttttcagcttactccttttctccttttagtcctaaacacaatcgtttttctttctttttcagtttcctttgtttccaaaaaagaaaaaaaatgggtggaaattccccttgtgcctcatgcaaattgctgagacgccggtgcacaaaagactgcaccttcgctccttattttccttctgatgacccgcagaagtttgccatagttcacaaggtttttggtgctagcaatgttagcaaaatgttgcaggtactttttccttactgtttctatttgccttcttttgatgataataataaaaaaaaccctttgtggttagttagttatttgatcaatttcagaagcaaagaaattaggaggtgggagattcaggaacttccagttcaccagagagcagatgcagtgagtagtctagtgtatgaggcaaatgcaagagtgagggatcctgtgtatggttgtgttggagccatatcctacttgcaaaatcaagtttctgagctccaaatgcagcttgcagttgctcaagcagagatactctgcatccagatggaacatgagccagtgatgccagcctcacaaattgatctagaccacaagtcttactttctccaaaaaaaaaaaaaaaaaaatatcgataccgtcgacctcgagggggggcccgg

SEQ ID NO: 15332 - protein, 189 aa, Glycine max
MGGNSPCASCKLLRRRCTKDCTFAPYFPSDDPQKFAIVHKVFGASNVSKMLQVLFPYCFYLPSFDDNNKKNPLWLVSYLINFRSKEIRRWEIQELPVHQRADAVSSLVYEANARVRDPVYGCVGAISYLQNQVSELQMQLAVAQAEILCIQMEHEPVMPASQIDLDHKSYFLQKKKKKNIDTVDLEGGP

SEQ ID NO: 15333 - protein, 140 aa, Glycine max
MLQVLFPYCFYLPSFDDNNKKNPLWLVSYLINFRSKEIRRWEIQELPVHQRADAVSSLVYEANARVRDPVYGCVGAISYLQNQVSELQMQLAVAQAEILCIQMEHEPVMPASQIDLDHKSYFLQKKKKKNIDTVDLEGGP

SEQ ID NO: 15334 - DNA, 437 bp, Glycine max
  misc_feature (82)..(82): n is a, c, g, or t
atccaaacaagccaaggcaagctactagccagtacttggagaaaccaacaatggcgccgctcgcagcccggagccggaggcnagcctgcctcctagccctcctctccgtcgccgcggccttattcctgaccccgccggccttggcggcggggggggggagaccggccaggtgacggtgttctggggacggaacaaggcggaggggtccctgcgtgaggcctgcgactccggcatgtacaccatggtcaccatgtccttcctcgacgtcttcggcgccaacggcaagtaccacctcgacctctccggccacgacctctcctccgtcggcgccgacatcaagcactgccagttcaagggcgtgcccgtctccctctccatcggcggctacgacaccggctactcgctgccgtccaaccgctccgcgctcgacctcttcg

SEQ ID NO: 15335 - protein, 68 aa, Glycine max
MYTMVTMSFLDVFGANGKYHLDLSGHDLSSVGADIKHCQFKGVPVSLSIGGYDTGYSLPSNRSALDLF

SEQ ID NO: 15336 - protein, 65 aa, Glycine max
MVTMSFLDVFGANGKYHLDLSGHDLSSVGADIKHCQFKGVPVSLSIGGYDTGYSLPSNRSALDLF

SEQ ID NO: 15337 - protein, 62 aa, Glycine max
MSFLDVFGANGKYHLDLSGHDLSSVGADIKHCQFKGVPVSLSIGGYDTGYSLPSNRSALDLF

SEQ ID NO: 15338 - DNA, 862 bp, Glycine max
atggccttgaaggagataaacctactgttacagcatttgatacaagcaaaggtactaaatatctgttggaggcagatattaacgcgaagaacctaaaggagttctccttaagccttttggatggtacactccctccatacttccgctcagaaccagtaccacaagaaaagggacttgttgaaaaggttgttggacgtacatttgattcttctgtcctgcaaagccctcacaatgtcctccttgaggctcatgcaccttggtgtgttgactgtgaagccatcagtaaaaacattgagaagttggccaagcatttcagtggtgtggacaatcttaaatttgcacgtattgatgcttcggtgaatgaacatccaaaattgcaggtaatcaattaccccacactcttgctttatcctgctgaagacaagaccaacccgatcaaactttcaaagaaattaagcctgaaagacatggcgagattcatcaaggagaagctgcagatttcggacgttgaaatcaaggagaagctgcagatttcggacgttgaaatcaaggagaagctccaaactcctgaggtcgaaacagtagctgccgctgacaatgtcaaggatgagctatagtagatttgctggttcaagcatgctgggcgcgttgaaggaaaatgacagcgtatgtgcgttgctgtggcatgaccatggagcatggccttgtagagaagcaaatagagtaggggttggtcacggttatacacagtagtcatctaaaatcaaacatatatgatgatgtaccacatgttctaacacgtcagttggcaatgtatggtgtaccacatgtctgaattagcttgttcatgtattatataatg

SEQ ID NO: 15339 - protein, 204 aa, Glycine max
GLEGDKPTVTAFDTSKGTKYLLEADINAKNLKEFSLSLLDGTLPPYFRSEPVPQEKGLVEKVVGRTFDSSVLQSPHNVLLEAHAPWCVDCEAISKNIEKLAKHFSGVDNLKFARIDASVNEHPKLQVINYPTLLLYPAEDKTNPIKLSKKLSLKDMARFIKEKLQISDVEIKEKLQISDVEIKEKLQTPEVETVAAADNVKDEL

SEQ ID NO: 15340 - DNA, 1424 bp, Glycine max
ctaaaccacccctgaaaaccctcagacgaacgaaagacctagcgctcctctcccttcgtctctcgcgactggcggcggcggtcgaacgaggccacccgacggcggcagagcgagtaggtgctttccaagcttcgccagaggtgtaaacccttcgctagaggcctcagtccctttcccgcgcggcttgagcaagatgagcaagatggcgatcagggttcccaagtccatgcgcgccaagcgtgagctcctcaagcacgcgcccaagctcgttgagaatggcaagaagatgcttattcttcatggtacaaagaccagcgcagttttgaactctgtgctggcagatcttttccacctgaagcgtgatcatgctgtcaagtacaccaagaagaacgacagcatcaggccatttgagagcgggggtgaaacttccctggagttcttctcccttaaatctgactgcagcctcttagtgtatggttctcactcaaagaagaggcccaacaatcttgttctgggaaggacttacgatcaccacatatatgacctcgttgaagtgggagttgagaactacaaatccatagaatcctatgcatatgataaaaagttggcacctaaacttgggacaaagcctttctttgctttcattggggagcactttgagagtgttgaaggactgaagcatttgaaggaaatgctgcttgatcatttcaaaggagaggtggtagagaatctgaaccttgctggtgtagatcggatattcgtgtgcacagcaatttctcctactaccgtctacatgatgcactgcgctctccgtctaaaaaggtcaggcacatctattcctagaatggagctggttgaagttgggccttcagtggacctggtacttaggcggcaccgacaagcagctgaaagtttacagaaagaagctatgaaggctcctggtcatgctaagaaggtgaaaaatgtcaccaataatccagttgaaggcaagcagggcaggatctacattccagaccaggaggtctcaaaattgaccgtaacaagcaacataaagggtctgaagcgggagcgccgtgacgccaagaaaaacaaggagcactcgaagaagcaaaaggtggccgaaaaccctgagtgaccactggagaaggctagtatctgtaaccggtcagtttaaggactttcggtcgataggttcagtggtaaatagtccagtaccatcttttaaggctatcaaacctgtgtacggacttaggcatcagtatcgaggcagcctctctatcagacataagcatgaaattttggagcaacatatgctacaagtattttttttactgttgttattcgcccctgatattagccaatcagagacgactgttgtgatgacatggttaagtttggttatcatggacattatgccttttctg

SEQ ID NO: 15341 - protein, 313 aa, Glycine max
MSKMAIRVPKSMRAKRELLKHAPKLVENGKKMLILHGTKTSAVLNSVLADLFHLKRDHAVKYTKKNDSIRPFESGGETSLEFFSLKSDCSLLVYGSHSKKRPNNLVLGRTYDHHIYDLVEVGVENYKSIESYAYDKKLAPKLGTKPFFAFIGEHFESVEGLKHLKEMLLDHFKGEVVENLNLAGVDRIFVCTAISPTTVYMMHCALRLKRSGTSIPRMELVEVGPSVDLVLRRHRQAAESLQKEAMKAPGHAKKVKNVTNNPVEGKQGRIYIPDQEVSKLTVTSNIKGLKRERRDAKKNKEHSKKQKVAENPE

SEQ ID NO: 15342 - protein, 310 aa, Glycine max
MAIRVPKSMRAKRELLKHAPKLVENGKKMLILHGTKTSAVLNSVLADLFHLKRDHAVKYTKKNDSIRPFESGGETSLEFFSLKSDCSLLVYGSHSKKRPNNLVLGRTYDHHIYDLVEVGVENYKSIESYAYDKKLAPKLGTKPFFAFIGEHFESVEGLKHLKEMLLDHFKGEVVENLNLAGVDRIFVCTAISPTTVYMMHCALRLKRSGTSIPRMELVEVGPSVDLVLRRHRQAAESLQKEAMKAPGHAKKVKNVTNNPVEGKQGRIYIPDQEVSKLTVTSNIKGLKRERRDAKKNKEHSKKQKVAENPE

SEQ ID NO: 15343 - protein, 302 aa, Glycine max
MRAKRELLKHAPKLVENGKKMLILHGTKTSAVLNSVLADLFHLKRDHAVKYTKKNDSIRPFESGGETSLEFFSLKSDCSLLVYGSHSKKRPNNLVLGRTYDHHIYDLVEVGVENYKSIESYAYDKKLAPKLGTKPFFAFIGEHFESVEGLKHLKEMLLDHFKGEVVENLNLAGVDRIFVCTAISPTTVYMMHCALRLKRSGTSIPRMELVEVGPSVDLVLRRHRQAAESLQKEAMKAPGHAKKVKNVTNNPVEGKQGRIYIPDQEVSKLTVTSNIKGLKRERRDAKKNKEHSKKQKVAENPE

SEQ ID NO: 15344 - DNA, 1453 bp, Glycine max
agaaccacaagcagttagcaccccgcattgtttctctgtagatcactaacaggttgtagagagagagagagagagagagagagagagagagaggaggaaggagggagagatggggagggatcagcaggcaggtgtaggtgcaggcgcggcggcggcgcaccgggagaaggtgaagctgttcatgggggtgctggcgctgcagttcctgctcgccggcttccacatcgtcagccgggcggcgctcaacatgggcatcagcaagctcgtcttcatcgtctaccgcaacgtcatctccctcgccctcctcgcccccttcgcctacttcctcgagaagaaggaccggccgccgctcaccttctcgctgctggcggagttcttcgtgctggcgctcatcgggatcacggcgaaccaggggttctacctgctggggctgtaccacctgtcgccgacctacgcgtcggcgatccagaacatggtgccagccatcaccttcgtgctggccacggtcctccggctggagcaggtggacctgggccggcggcacggggtggccaaggtggtgggcaccgtggtgagcatcggcggcgccacggtgatcacgctctacaagggcctgccgctcttcagccacaacctgcacgtgcaggccgtcctctcctggacctccggcagccccatcttcaactggaccctaggctgcgtcttcatcctcggccactgcctctcctggtccggctggatggtgctccaggtgccggtgctcaagcggtacccggcgaggctgtcggtcatctcgctcacctgcgtcttcgggctgctccagttcctcgtcatcgccgccttcaccgaggaggacctcagccggtggaaggtgcagtccggcggggagctgttcaccatcctctacgcggggctggtggcctccggcgtggcgttcgcgctgcagatctggtgcatcgaccgcggcggcccgctcttcaccgccgtgttccagcccgtgcagaccgtcgccgtcgccgtcatggccgccgtcatcctcggcgaccagctctacaccggagggatcatcggcgcggtgctgatcgtcatcgggctctacttcgtgctgtggggcaagagcgaggagaagaagacgaggagccaagacccggagatggcgaggcgcctgctcggggaagacggcggcgcagctgacaaagatcagcaagtgagcaccactgtcctggcgtgaaagctgctgcttgctggatttggagatgtgtgtactgatgtgggtgtttgtacctacgtttttaactagtgtttcaagcgtgcgaccaagaagaagaagactcgtactagttgacgatgtgaactgccaaacacactcagtcatatttggtacctactgtgtatagccccttgtcttcgagttgtgtgtgtgtctataaatacactatgctccctaattttc

SEQ ID NO: 15345 - protein, 373 aa, Glycine max
MGRDQQAGVGAGAAAAHREKVKLFMGVLALQFLLAGFHIVSRAALNMGISKLVFIVYRNVISLALLAPFAYFLEKKDRPPLTFSLLAEFFVLALIGITANQGFYLLGLYHLSPTYASAIQNMVPAITFVLATVLRLEQVDLGRRHGVAKVVGTVVSIGGATVITLYKGLPLFSHNLHVQAVLSWTSGSPIFNWTLGCVFILGHCLSWSGWMVLQVPVLKRYPARLSVISLTCVFGLLQFLVIAAFTEEDLSRWKVQSGGELFTILYAGLVASGVAFALQIWCIDRGGPLFTAVFQPVQTVAVAVMAAVILGDQLYTGGIIGAVLIVIGLYFVLWGKSEEKKTRSQDPEMARRLLGEDGGAADKDQQVSTTVLA

SEQ ID NO: 15346 - protein, 349 aa, Glycine max
MGVLALQFLLAGFHIVSRAALNMGISKLVFIVYRNVISLALLAPFAYFLEKKDRPPLTFSLLAEFFVLALIGITANQGFYLLGLYHLSPTYASAIQNMVPAITFVLATVLRLEQVDLGRRHGVAKVVGTVVSIGGATVITLYKGLPLFSHNLHVQAVLSWTSGSPIFNWTLGCVFILGHCLSWSGWMVLQVPVLKRYPARLSVISLTCVFGLLQFLVIAAFTEEDLSRWKVQSGGELFTILYAGLVASGVAFALQIWCIDRGGPLFTAVFQPVQTVAVAVMAAVILGDQLYTGGIIGAVLIVIGLYFVLWGKSEEKKTRSQDPEMARRLLGEDGGAADKDQQVSTTVLA

SEQ ID NO: 15347 - protein, 327 aa, Glycine max
MGISKLVFIVYRNVISLALLAPFAYFLEKKDRPPLTFSLLAEFFVLALIGITANQGFYLLGLYHLSPTYASAIQNMVPAITFVLATVLRLEQVDLGRRHGVAKVVGTVVSIGGATVITLYKGLPLFSHNLHVQAVLSWTSGSPIFNWTLGCVFILGHCLSWSGWMVLQVPVLKRYPARLSVISLTCVFGLLQFLVIAAFTEEDLSRWKVQSGGELFTILYAGLVASGVAFALQIWCIDRGGPLFTAVFQPVQTVAVAVMAAVILGDQLYTGGIIGAVLIVIGLYFVLWGKSEEKKTRSQDPEMARRLLGEDGGAADKDQQVSTTVLA

SEQ ID NO: 15348 - DNA, 927 bp, Glycine max
acatttgggttgtttgagacaaaacaaaaggtaagaacaagaagcacagaacacaggttgcttgaaccttacacgtcagcatcgttccgtgtggagtgttgagagatggggaattcgttcggatgttcggcctccggcgagaggcttgtgtcggcggcgagggacggcgacttggtggaagcgcagatgcttctgaactgcaacccgtgtctcgccaagtattctactttcggtggcctcaattcccctctccattttgcagctgccaaaggccacaacgagattgtggcattgttgctggagaatggagctgatgtgaattccagaaattattgtggccagacggcgttgatgcaagcttgtagatatgggcattgggaggttgtacaaacacttctactcttcagatgcaatgttatgagagctgattatcttagtgggaggacagctcttcactttgcagctgtgcatgggcatgtaagatgtattagacttgttgtggctgactttgtaccaagtgcactttatcaagctatacatgctggcacagatgttgacaggggtggtggatcaaatgcgaaagggaaacatgagcaaagtgccctgtccaagtttataaataaaaccgctgatggaggtatcactgcccttcatatggctgcactaaatgggtactttgattgtgtacaactgctgcttgatcttaatgcaaatgtgaatgctgtgacttatcattatggaacatcaatggatttaataggggctggaagtactccattgcattatggtgcttgtggaggcaatttaaaatgttgtcagatccttgttgcacgaggtgcaagtcgtctggctttaaattgcaatgggtggcttcctcttgatattgctaggatgtatcgataccgtcgacctcgagggggggcccgg

SEQ ID NO: 15349 - protein, 274 aa, Glycine max
MGNSFGCSASGERLVSAARDGDLVEAQMLLNCNPCLAKYSTFGGLNSPLHFAAAKGHNEIVALLLENGADVNSRNYCGQTALMQACRYGHWEVVQTLLLFRCNVMRADYLSGRTALHFAAVHGHVRCIRLVVADFVPSALYQAIHAGTDVDRGGGSNAKGKHEQSALSKFINKTADGGITALHMAALNGYFDCVQLLLDLNANVNAVTYHYGTSMDLIGAGSTPLHYGACGGNLKCCQILVARGASRLALNCNGWLPLDIARMYRYRRPRGGAR

SEQ ID NO: 15350 - protein, 247 aa, Glycine max
MLLNCNPCLAKYSTFGGLNSPLHFAAAKGHNEIVALLLENGADVNSRNYCGQTALMQACRYGHWEVVQTLLLFRCNVMRADYLSGRTALHFAAVHGHVRCIRLVVADFVPSALYQAIHAGTDVDRGGGSNAKGKHEQSALSKFINKTADGGITALHMAALNGYFDCVQLLLDLNANVNAVTYHYGTSMDLIGAGSTPLHYGACGGNLKCCQILVARGASRLALNCNGWLPLDIARMYRYRRPRGGAR

SEQ ID NO: 15351 - protein, 192 aa, Glycine max
MQACRYGHWEVVQTLLLFRCNVMRADYLSGRTALHFAAVHGHVRCIRLVVADFVPSALYQAIHAGTDVDRGGGSNAKGKHEQSALSKFINKTADGGITALHMAALNGYFDCVQLLLDLNANVNAVTYHYGTSMDLIGAGSTPLHYGACGGNLKCCQILVARGASRLALNCNGWLPLDIARMYRYRRPRGGAR

SEQ ID NO: 15352 - DNA, 645 bp, Glycine max
tctgcgcagtgattcatacaagtcagaactagaaattgaaccaagatatccgctttttggtgggtggcactgcactttcaccatcggctatggtatgccactgcaagatttcctgtttgaatcggctgatggccgacgctttgccaatcttacatttggatgccctctactgaatactgtggttgataatcttaccatcaaggttgtgcttcccgagggatcgaaaagcccgcaggctgttgttcctttcgagaccgagcaacatcttgagactagctattcatacctggatgttgtggggaggacgacagtggtgataaagaagaaaaacgtagtaggagagcacaatgttccattccaggtgtactacgagttcagcccgatcttcatgctggcggagccgctgatgctggtaaccgcagtgctgctcttgttcgcggcgtgcattgtgtatcttcacccggatctgtccatcgcgaaatcgcaggcctcctcctgaaggaggagtagctgcaaactagtcgttgtgatgaagtaattgatggtggtgaaacattagctttggggagttttgtagaagaagcaagcatgacgataattgattgctgtaggaactttgactcttttttttttattttcctgtgg

SEQ ID NO: 15353 - protein, 165 aa, Glycine max
LRSDSYKSELEIEPRYPLFGGWHCTFTIGYGMPLQDFLFESADGRRFANLTFGCPLLNTVVDNLTIKVVLPEGSKSPQAVVPFETEQHLETSYSYLDVVGRTTVVIKKKNVVGEHNVPFQVYYEFSPIFMLAEPLMLVTAVLLLFAACIVYLHPDLSIAKSQASS

SEQ ID NO: 15354 - protein, 134 aa, Glycine max
MPLQDFLFESADGRRFANLTFGCPLLNTVVDNLTIKVVLPEGSKSPQAVVPFETEQHLETSYSYLDVVGRTTVVIKKKNVVGEHNVPFQVYYEFSPIFMLAEPLMLVTAVLLLFAACIVYLHPDLSIAKSQASS

SEQ ID NO: 15355 - DNA, 410 bp, Glycine max
acagccacatcctaggtcaccatggcttcttctccctctccgtcggctgctcgtgccctgctcgtcctcgccgcagcagctctggtgctgagctctgtgtcagccgcggctggctcgccgccgcttgccaagggcctgtcgttcgacttctacagcgccaagtgcccgcaggcggaggccatcgtcttctccttcctcaaggacgccgtccgcaaggacgtcggcctcgccgcggcgctcctccgcatccacttccacgactgcttcgtgcagggctgcgacggctccgtgctcctcgacamgaccamcggcgtcgacagcgagaaggtgtctcctccgaacgtcacsctccgtccgtccgcgttcaaggccatcaacgccatccgcgcgctcctccagagkgcgtgcgg

SEQ ID NO: 15356 - protein, 136 aa, Glycine max
  misc_feature (100)..(100): Xaa can be any naturally occurring amino acid
  misc_feature (102)..(102): Xaa can be any naturally occurring amino acid
  misc_feature (116)..(116): Xaa can be any naturally occurring amino acid
  misc_feature (134)..(134): Xaa can be any naturally occurring amino acid
SHILGHHGFFSLSVGCSCPARPRRSSSGAELCVSRGWLAAACQGPVVRLLQRQVPAGGGHRLLLPQGRRPQGRRPRRGAPPHPLPRLLRAGLRRLRAPRXDXRRRQREGVSSERHXPSVRVQGHQRHPRAPPEXVR

SEQ ID NO: 15357 - protein, 129 aa, Glycine max
  misc_feature (94)..(94): Xaa can be any naturally occurring amino acid
  misc_feature (96)..(96): Xaa can be any naturally occurring amino acid
  misc_feature (109)..(109): Xaa can be any naturally occurring amino acid
  misc_feature (127)..(127): Xaa can be any naturally occurring amino acid
MASSPSPSAARALLVLAAAALVLSSVSAAAGSPPLAKGLSFDFYSAKCPQAEAIVFSFLKDAVRKDVGLAAALLRIHFHDCFVQGCDGSVLLDXTXGVDSEKVSPPNVXLRPSAFKAINAIRALLQXAC

SEQ ID NO: 15358 - DNA, 769 bp, Glycine max
attccattcaaaatccatttgagcttcacaacagctagtgtgtccgtgagcttctctcttccatgtgcgtgtgtgtgtaagcagcactagtgagtgtgtgtgctttgctagtgtgctgagcgcaggcagtagtagcacttggctcttccgccggtcgtgtattagtgtattcgagtgctagcgagtagttctgggctaacactcaccacttcggctacctcagcgtcatgctctgggtagcgctctacgaccgcgccatcgtcctgcttgcgcgccgcctcacagggcaccaccgcaggttcacccaactggcgcgcatgggcatcggcttcgtcatactcatggtcgccatgcttgccgccggcatgctcggcgccgcgtcgtcgcgcgccatggcatacacgtcatcagcgccgacggggcggagtacgtgccgatgtcgatcttctggtaggtgccacagtacgtggtgttgggggcggcggaggtgttcacgttcatcgggcagatggagttcttctatgaccaggcgccagacgccatgcgcagcgtctgctcagggctctgcaccgcgttcgcgatgggcaactacgcgagctcggcgctcatcagcgtggtggtgcgtgccaccatgaggggcggacggcccgggtggattcccgacgacatcaacgagggccacctagaatacttctgttaagttgggaagcgttcctactcctcgatgaggagccgcatttggtttatattgatgtgtggcaaatagccg

SEQ ID NO: 15359 - protein, 135 aa, Glycine max
MLWVALYDRAIVLLARRLTGHHRRFTQLARMGIGFVILMVAMLAAGMLGAASSRAMAYTSSAPTGRSTCRCRSSGRCHSTWCWGRRRCSRSSGRWSSSMTRRQTPCAASAQGSAPRSRWATTRARRSSAWWCVPP

SEQ ID NO: 15360 - protein, 105 aa, Glycine max
MGIGFVILMVAMLAAGMLGAASSRAMAYTSSAPTGRSTCRCRSSGRCHSTWCWGRRRCSRSSGRWSSSMTRRQTPCAASAQGSAPRSRWATTRARRSSAWWCVPP

SEQ ID NO: 15361 - protein, 97 aa, Glycine max
MVAMLAAGMLGAASSRAMAYTSSAPTGRSTCRCRSSGRCHSTWCWGRRRCSRSSGRWSSSMTRRQTPCAASAQGSAPRSRWATTRARRSSAWWCVPP

SEQ ID NO: 15362 - DNA, 809 bp, Glycine max
ccatcccaccacattcaagtcgaagaagctcctcgatctccatcactgcaaccagccacttgagctctgaatctttgaagctcagccagttcgccgcgaccaccgagagcctcaagtttcgccatgtcgagcgccggccagaagcagcagcagcagcagcaggcgaagaagccggcggcggcggaggacgtcgagatcaagaaggtcttctcccgcttcgacacggacggcgacggccggatctcgccgtccgagctggcggccgtgtcgcgcgccatcgcgccgccggccaccgagtccgcgcagggccgcgaggtggcgtccatgatggacgagctcgacaccgaccgcgacggctacgtggacctcggcgagttcgccgccttccacggccgcggccgcgaggagcgcgagctcgacgccgagctgcgcgacgccttcgacgtctacgacatcaacggcgacggccgcatctccgtcgccgagctcagcaaggtcctgagccgcatcggcgagggatgcagcaccgaggagtgcgagaagatgatcgcctccgtcgacgtcgacggcgacggctgcgtcggattcgaggagttcaagaagatgatgaccgccggtgacgccggcgcaccacctcaacccgaagcgatcgccgtgcctgacagcaacaaacccaagaaggagtgatacatgtgcttttgcttgtaaaaaaattgtaatccgagggagcgaattagttgtcagtccctgttggccatagtcttctggtctgaaaaaaaatgggaataaggatcaatgtgcaattgccg

SEQ ID NO: 15363 - protein, 205 aa, Glycine max
IPPHSSRRSSSISITATSHLSSESLKLSQFAATTESLKFRHVERRPEAAAAAAGEEAGGGGGRRDQEGLLPLRHGRRRPDLAVRAGGRVARHRAAGHRVRAGPRGGVHDGRARHRPRRLRGPRRVRRLPRPRPRGARARRRAARRLRRLRHQRRRPHLRRRAQQGPEPHRRGMQHRGVREDDRLRRRRRRRLRRIRGVQEDDDRR

SEQ ID NO: 15364 - protein, 187 aa, Glycine max
MSSAGQKQQQQQQAKKPAAAEDVEIKKVFSRFDTDGDGRISPSELAAVSRAIAPPATESAQGREVASMMDELDTDRDGYVDLGEFAAFHGRGREERELDAELRDAFDVYDINGDGRISVAELSKVLSRIGEGCSTEECEKMIASVDVDGDGCVGFEEFKKMMTAGDAGAPPQPEAIAVPDSNKPKKE

SEQ ID NO: 15365 - protein, 120 aa, Glycine max
MMDELDTDRDGYVDLGEFAAFHGRGREERELDAELRDAFDVYDINGDGRISVAELSKVLSRIGEGCSTEECEKMIASVDVDGDGCVGFEEFKKMMTAGDAGAPPQPEAIAVPDSNKPKKE

SEQ ID NO: 15366 - DNA, 812 bp, Glycine max
  misc_feature (307)..(307): n is a, c, g, or t
aaaaacacagcagctctgcgccattacaacagtcacagctcacatcatttgcaccggtactagcttgatcatcatagcaatggcctccaccaacagctggacccatgagattgagtcgccggtcgctgcatcacgcctctttcgtgccggcgtcatggactggcacaccctggcccccaagctcgtgccacagatcgtcgccagcgcccaccctgttgagggagaaggcggcatcggcagtgtcaggcagttcaacttcacctcagccatgcccttcaacctcatgaaggagaggctcgagttcatngacgtggacaagtgtgaatgcaagtcagccctcatcgagggtggtggcatcggcacggcaatcgagacgggcacgtcgcacatcaagggtggagccggcagccaacggtgggagcgtggtgaaggtggaatcgacatacaagctgcttccaggcgtagaggtgaacgatgagatcaccaaggccaaggactctgtcacggccatcttcaaggccgccgaggcctaccttattgccaacccggatgcctacaactaaatcagttgagaggaatcatacataattatgttgtccctggtttgattttttgtgctttcttcttgaactaataaagctgttacaacggtccagcctccaagctctgaagcgagagcagtgagcagagtatggacttgagaagtttaaaagttgtgtatttgtaactatcaaagtttgctgttgtttgatgatgttgctgctttttgtactgtaataaaaggaagtatttgaaacacataatgaacttct

SEQ ID NO: 15367 - protein, 158 aa, Glycine max
  misc_feature (102)..(102): Xaa can be any naturally occurring amino acid
KTQQLCAITTVTAHIICTGTSLIIIAMASTNSWTHEIESPVAASRLFRAGVMDWHTLAPKLVPQIVASAHPVEGEGGIGSVRQFNFTSAMPFNLMKERLEFXDVDKCECKSALIEGGGIGTAIETGTSHIKGGAGSQRWERGEGGIDIQAASRRRGER

SEQ ID NO: 15368 - protein, 132 aa, Glycine max
  misc_feature (76)..(76): Xaa can be any naturally occurring amino acid
MASTNSWTHEIESPVAASRLFRAGVMDWHTLAPKLVPQIVASAHPVEGEGGIGSVRQFNFTSAMPFNLMKERLEFXDVDKCECKSALIEGGGIGTAIETGTSHIKGGAGSQRWERGEGGIDIQAASRRRGER

SEQ ID NO: 15369 - protein, 107 aa, Glycine max
  misc_feature (51)..(51): Xaa can be any naturally occurring amino acid
MDWHTLAPKLVPQIVASAHPVEGEGGIGSVRQFNFTSAMPFNLMKERLEFXDVDKCECKSALIEGGGIGTAIETGTSHIKGGAGSQRWERGEGGIDIQAASRRRGER

SEQ ID NO: 15370 - DNA, 550 bp, Glycine max
acctagaacatcctaatcgaaaaatcagcaccgcagcagccacctcacaaagacaagtcaacctcaccgaggagaagcagagagaagggagaagatgtcggggcgcggcaagggaggcaaggggctcggcaagggcggcgccaagcgccatcggaaggtgctccgggacaacatccagggcatcaccaagccggcgattcgacgtctggcacgtcggggcggcgtgaagcgcatctcggggctcatctacgaggagacccgcggcgtgctcaagatcttcctcgagaacgtcatccgcgacgccgtcacctacaccgagcacgcccgccgcaagactgtcactgccatggacgtcgtctacgcactcaagcgccagggacgcaccctctatggattcggaggctaggctccggcgaggcgaatccagctcgcacctgctgatcagatattcagattagcagtagctaggcgttgttcagtgttcatggtgatcgatgtaatttatgatgtatggtgcctgttcgttggaatggataaatcgctgttattt

SEQ ID NO: 15371 - protein, 103 aa, Glycine max; identical to SEQ ID NO: 71

SEQ ID NO: 15372 - protein, 74 aa, Glycine max
LEHPNRKISTAAATSQRQVNLTEEKQREGRRCRGAAREARGSARAAPSAIGRCSGTTSRASPSRRFDVWHVGAA

SEQ ID NO: 15373 - DNA, 586 bp, Glycine max
agattcagcttctatctttgagacgaggtcgttgattgatatgaccaacagctcatcttcgacaaagcacggtcaagatcagcctgatttaagtggtcctacccccaaatcacagcgaaccaaaatgggcaaatccgaagacaacgataagaagaacttaggtaagaaactcaaagatgtggaaataagcattccaatagtatatgggaacgtagcattttggcttggcaaaaaggctagcgagtatcagtcgcacaaatggacagtatatgttcgtggagctaccaatgaggatcttgggacgataataaagcatgctgtttttcagttgcattctagtttcaataatcccacacgtgttgtggagtcaccgccttttgaattgtcagagtcaggatggggggaatttgaagtttccatcacactttttttccacagtgatgtttgtgacaagcctttgaacttatatcatcacttgaagttgtatccagaggatgaaaacagttccatgtccacaaagaagcctgttgttgtggagttttatgatgagatagttttccctgatccttgcttctcgcggcacgag

SEQ ID NO: 15374 - protein, 195 aa, Glycine max
DSASIFETRSLIDMTNSSSSTKHGQDQPDLSGPTPKSQRTKMGKSEDNDKKNLGKKLKDVEISIPIVYGNVAFWLGKKASEYQSHKWTVYVRGATNEDLGTIIKHAVFQLHSSFNNPTRVVESPPFELSESGWGEFEVSITLFFHSDVCDKPLNLYHHLKLYPEDENSSMSTKKPVVVEFYDEIVFPDPCFSRHE

SEQ ID NO: 15375 - protein, 182 aa, Glycine max
MTNSSSSTKHGQDQPDLSGPTPKSQRTKMGKSEDNDKKNLGKKLKDVEISIPIVYGNVAFWLGKKASEYQSHKWTVYVRGATNEDLGTIIKHAVFQLHSSFNNPTRVVESPPFELSESGWGEFEVSITLFFHSDVCDKPLNLYHHLKLYPEDENSSMSTKKPVVVEFYDEIVFPDPCFSRHE

SEQ ID NO: 15376 - protein, 154 aa, Glycine max
MGKSEDNDKKNLGKKLKDVEISIPIVYGNVAFWLGKKASEYQSHKWTVYVRGATNEDLGTIIKHAVFQLHSSFNNPTRVVESPPFELSESGWGEFEVSITLFFHSDVCDKPLNLYHHLKLYPEDENSSMSTKKPVVVEFYDEIVFPDPCFSRHE

SEQ ID NO: 15377 - DNA, 1283 bp, Glycine max
cttgccttagttttagacgccggcgccgtagagcccgttccccctcacgcggccagcgaccatgtcgagtggcctgaacatgtccctagatgacctcatcaagcaatccaagtccaggcccaaagccaaccccgccttctcttccgggcccacccgccgggcggcgccgtccgcccggaccatgccctacccgccgtctgctcccaaggccgccaccgccgactctctgtacggtgtctactccgagcacgttgccgccatggcaacctccccgccaccgccggcggtggccgggccacaggcactcgagacgggcacgaagctgcacatctccaacctcgactccagcgtcaccgtcgaggacgtccaggaactcttttcagagattggtgagctcaaacgttattctgttaactacgataaggatgggaagtctcagggaagtgcggaagttgtctttgcaagaaaagtagatgctttggatgctattgagagatataatggtgttctgcttgatgggaagccaatgaagatagagctcattggaaataagaccgagccacacccaacagaacctttgatgtacaacggcacttcttctaactacaatgcaatgccaaacagtctgcttcagagaggtggcccgagagggccatttcatggtaatggtcgttctggaggcagtggtcagggcggtgctggcaaaagaggaatgtttcaaggcaacgttcgtcctggaaacactgtccaggacggtggtgggcggggacagggtagagccagggggcatgatcgcagccgagttccgacctctgctgcggatcttgatgctgaactggagcagtatcatgcagcagcagtgaagcaaaaatgaggctctgatgtatattttatactccctccttccatatataagtgacgtagttttagtccaaatttaaactaaaaccacgtcacttatttatgaactgagggagtatatacatagactgttgcattattagttttctgcttttagtcgtcaggtaccatgttgagaaaagttggaaggcattaattcgacatttacatctgctgcgctttttatatccctactccgagtgctggatatattgtattacctaattttgaaacatgggtgttctcttggggtttatttggatagtaagattacaaagaactagttcttgttaaattcaatttctaactgaatcttggatatgtcatatcatcttgtttggattgtctaactgaatctttagatataaaatcctgagttttgc

SEQ ID NO: 15378 - protein, 270 aa, Glycine max
MSSGLNMSLDDLIKQSKSRPKANPAFSSGPTRRAAPSARTMPYPPSAPKAATADSLYGVYSEHVAAMATSPPPPAVAGPQALETGTKLHISNLDSSVTVEDVQELFSEIGELKRYSVNYDKDGKSQGSAEVVFARKVDALDAIERYNGVLLDGKPMKIELIGNKTEPHPTEPLMYNGTSSNYNAMPNSLLQRGGPRGPFHGNGRSGGSGQGGAGKRGMFQGNVRPGNTVQDGGGRGQGRARGHDRSRVPTSAADLDAELEQYHAAAVKQK

SEQ ID NO: 15379 - protein, 264 aa, Glycine max
MSLDDLIKQSKSRPKANPAFSSGPTRRAAPSARTMPYPPSAPKAATADSLYGVYSEHVAAMATSPPPPAVAGPQALETGTKLHISNLDSSVTVEDVQELFSEIGELKRYSVNYDKDGKSQGSAEVVFARKVDALDAIERYNGVLLDGKPMKIELIGNKTEPHPTEPLMYNGTSSNYNAMPNSLLQRGGPRGPFHGNGRSGGSGQGGAGKRGMFQGNVRPGNTVQDGGGRGQGRARGHDRSRVPTSAADLDAELEQYHAAAVKQK

SEQ ID NO: 15380 - protein, 230 aa, Glycine max
MPYPPSAPKAATADSLYGVYSEHVAAMATSPPPPAVAGPQALETGTKLHISNLDSSVTVEDVQELFSEIGELKRYSVNYDKDGKSQGSAEVVFARKVDALDAIERYNGVLLDGKPMKIELIGNKTEPHPTEPLMYNGTSSNYNAMPNSLLQRGGPRGPFHGNGRSGGSGQGGAGKRGMFQGNVRPGNTVQDGGGRGQGRARGHDRSRVPTSAADLDAELEQYHAAAVKQK

SEQ ID NO: 15381 - DNA, 662 bp, Glycine max
ctagaacatcctaatcgaaaaattcctcctcttctccgcatccacccgaacgaaaccctagtctcccatcacttggatccggtctttgacattcttcgacgcaggacgccgtaagaaatttcgctagagatcttgcagctgccatggcggacaatgaacctattgacccaaagaattaccttgaggaacgctgcaagccgcaatgtgtaaaatcattgtatgactatgagagatgtgtgaagagagtcaagaatgatgaaactgggcagaagcactgcaccgggcaattcttcgactactggtcatgcgttgacaaatgtgtagcaccaaagctctttgagaagctcaaatgatggatggggtggcgctgattgccacagaccccaataaatcgatccactgtcctgatttctgattgtgctgaacctgtaacaaggagcttccttctatctgttgctaaaacttgtcaaaacaagcaaacacaattattttggcagtgggaacaataacttttattttgcttgtgtaatgttcgttctgtccctgttacttgggcagatgaaagcatttctgctttacttcaatccatcttcaataatttttgcaaaaaaaaaaaaaaaaaagcttatcgataccgtcgacctcgagggggggcccggtac

SEQ ID NO: 15382 - protein, 69 aa, Glycine max
MADNEPIDPKNYLEERCKPQCVKSLYDYERCVKRVKNDETGQKHCTGQFFDYWSCVDKCVAPKLFEKLK

SEQ ID NO: 15383 - protein, 44 aa, Glycine max
MFVLSLLLGQMKAFLLYFNPSSIIFAKKKKKKLIDTVDLEGGPG

SEQ ID NO: 15384 - protein, 37 aa, Glycine max
LEHPNRKIPPLLRIHPNETLVSHHLDPVFDILRRRTP

SEQ ID NO: 15385 - DNA, 473 bp, Glycine max
acctagaacatcctaatcgaaaaatctttatatctgtgaactgtgaacatcatcatcacaattaagatgagtagtgcaacaagcaaggcttggattgtggcagcgagtgttggagccgtggaggctttgaaggaccagctgggtgtgtgcaggtggaactatgttttgagatgtgctcagcagcacatgaaaaaccactttagatccttgtctcaagcaaaaaatgtttcttcttcatctgctcttgttgcaagcaaattaaagggtgatgagaaggctaaaaaggctgaagagtccttgaggactgtcatgtacttaagctgctggggtcctaactgatcttaaaggagagagattttcttaattgctggggattaattgtgatttgaaatgaatattgctttgtgtaaatagagatatgatagattgtatgaaaattgtaatgccaaacaatattaattaatatactattc

SEQ ID NO: 15386 - protein, 90 aa, Glycine max
MSSATSKAWIVAASVGAVEALKDQLGVCRWNYVLRCAQQHMKNHFRSLSQAKNVSSSSALVASKLKGDEKAKKAEESLRTVMYLSCWGPN

SEQ ID NO: 15387 - protein, 50 aa, Glycine max
MKNHFRSLSQAKNVSSSSALVASKLKGDEKAKKAEESLRTVMYLSCWGPN

SEQ ID NO: 15388 - DNA, 722 bp, Glycine max
acacccaaacacgtagtgcaccacttccgctaaaagatcatcagcattcagcagagctacactagctccaagccaccgagagaaaatggccggcttctcgtacacgagccacgttgcagttgcactggtttcggtgctgctgctgagcctcgcgcacggctcactggggctgggggccaggaggctcatggagctgtacaagccggaccccagcgagctcctcacgtaccacaacggcgccgtgctgcagggcgccatcccggtctccgtgctctggtacggccgcttcacgcccgcgcagaaggccgtcgtctccgacttcctcctctcgctcaccaccgcctcgccggcgctgaccccgtccgtctctcagtggtggaacaccatccaccagctctacctctccaaggccaagggcgccaacggccaagcgcgcgacgcaggtggcgctcgccgggcaggtctccgacgagcggtgctcgctcgggaagagcctcaagctaccccagctcgcggcgctggcggcgagcgccaagccccggaagggcgggatcgcgctggtgctcaccgcggaggacgtggccgtggagggcttctgccggagccggtgcggcctgcacggctccgacgccgcggcccgcaccgcgtacgtgtgggtcggcaactccgcctcgcagtgccccgtgttaaacacaataaagtgggaactggaggggggaaag

SEQ ID NO: 15389 - protein, 212 aa, Glycine max
MAGFSYTSHVAVALVSVLLLSLAHGSLGLGARRLMELYKPDPSELLTYHNGAVLQGAIPVSVLWYGRFTPAQKAVVSDFLLSLTTASPALTPSVSQWWNTIHQLYLSKAKGANGQARDAGGARRAGLRRAVLAREEPQATPARGAGGERQAPEGRDRAGAHRGGRGRGGLLPEPVRPARLRRRGPHRVRVGRQLRLAVPRVKHNKVGTGGGK

SEQ ID NO: 15390 - protein, 178 aa, Glycine max
MELYKPDPSELLTYHNGAVLQGAIPVSVLWYGRFTPAQKAVVSDFLLSLTTASPALTPSVSQWWNTIHQLYLSKAKGANGQARDAGGARRAGLRRAVLAREEPQATPARGAGGERQAPEGRDRAGAHRGGRGRGGLLPEPVRPARLRRRGPHRVRVGRQLRLAVPRVKHNKVGTGGGK

SEQ ID NO: 15391 - DNA, 907 bp, Glycine max
atcttatccccctccgtccccgcttcctcctcctcttcctcccgctcactcccgaagcgaagcctcgagagctcccaatggcttccaccacgttctcctccgccttctccatcctctctctcccctcttcctcaccatccccctccgcctcggcccccaggaccctccccgtcgccaaccgccgccgccgcgccgtcgccgtcgcctccaccgtcactgagtccccgaaggtccttgagctcggcgacgccattgccgggctcacccttgaggaggctcgcaaccttgtcgaccatctccaagaacgtcttggcgtctctgccgcctccttcgctcccgctgccgcggtcgcggctcccgccgcggcggcggccgaggaggcaccggtcgagaagacggagttcgacgtggtcatcgaggaggtgcccagcagcgcgcgtatcgcaaccatcaaggttgtgcgcgcactgaccaacctggcgctgaaggaggccaaggatcttatcgaggggctcccaaagaagctcaaggaggcagtgagcaaggacgaggccgaggaggccaagaagcagctcgagggagtcggcgccaaggtgtccatagcgtgagactaggtatactaggctccttttttctcccattacattttatgtttcatatcaaccttttgtattcctcttgtaattgccgtggactgttgtttcatatgagattagtgcgcgtgtggaattattagttcatgttcgtgtgttgtattcagtcttgtataattactggatgttgcattctttagattcctaatgggtactattggttttggaaatgatactgtcatgtttgtagagattatgcattgccagttttagagtttgtattggagcaatagagcggcatatctctcgttttg

SEQ ID NO: 15392 - protein, 201 aa, Glycine max
LIPLRPRFLLLFLPLTPEAKPRELPMASTTFSSAFSILSLPSSSPSPSASAPRTLPVANRRRRAVAVASTVTESPKVLELGDAIAGLTLEEARNLVDHLQERLGVSAASFAPAAAVAAPAAAAAEEAPVEKTEFDVVIEEVPSSARIATIKVVRALTNLALKEAKDLIEGLPKKLKEAVSKDEAEEAKKQLEGVGAKVSIA

SEQ ID NO: 15393 - protein, 176 aa, Glycine max
MASTTFSSAFSILSLPSSSPSPSASAPRTLPVANRRRRAVAVASTVTESPKVLELGDAIAGLTLEEARNLVDHLQERLGVSAASFAPAAAVAAPAAAAAEEAPVEKTEFDVVIEEVPSSARIATIKVVRALTNLALKEAKDLIEGLPKKLKEAVSKDEAEEAKKQLEGVGAKVSIA

SEQ ID NO: 15394 - protein, 156 aa, Glycine max
ILSPSVPASSSSSSRSLPKRSLESSQWLPPRSPPPSPSSLSPLPHHPPPPRPPGPSPSPTAAAAPSPSPPPSLSPRRSLSSATPLPGSPLRRLATLSTISKNVLASLPPPSLPLPRSRLPPRRRPRRHRSRRRSSTWSSRRCPAARVSQPSRLCAH

SEQ ID NO: 15395 - DNA, 1169 bp, Glycine max
atttagaagttgaatcggtgctacggggtatggaggcgaagacacatggcgaggatgaatccgcataactcaaccgccgatcttctttcggaatctctccaagctgctaacgagccgtctgatgtagccagcaagaaccttagttgcggtcaaatcaccaacgaggaagatgaatctcttgacaagcaaaacaagtgttgtagtgacattgtctctgacagttgtaaagatgattcaaattacaagacaggactcaattgccatcaggaggaccagcggaggacgagtctagtagcatcgattgtggagacatctcacgacgctcccactaggagaaccattgatcttggtcatggaagtgacctcatctacatccagaggtttcttccctttcaaaagtcttggactttatttgattatctcgacaagcatattccttggaccaggcccaccatccgcgtctttggtcgttcttgcctccagccaagagatacatgttacgttgcaagtagcggattgactccgctaatgtacagtggataccgacctgatgcctattcttgggatgactttccacctctcaaggacatccttgatgctatttgcgtagcgtttcctggaagcagattcaacagcttgcttttgaataggtacaacggcgccaacgactacgttggttggcatgctgatgatgaaaagctttacggccccactcctgaaattgcttccctctcttttggatgcaaacgtgactttgtgctcaagaaaaagaaacttcaagactcttcccgtgagaaaagaggagagggtggaccagcgaagaagaggttgaagaaaagcagcagcggagaggaggatcagcatagtttcgcattgaagcatggatcgttgctggtgatgaggggatacactcaaagggactggattcattctgtgccaaagcgtgcaaaggcggagggcactcgtatcaacctcaccttcaggcttgttttgtaaaccatgcatcattcatcattcatcatcatcatcaacaagcttagcttgatctcaagtcacattgattgactaggcttttctcatcttagttcttcgacatgagatataacatataagttggtgtagacattttgaaaaatcttaattactaattaacgtgaagattattaagg

SEQ ID NO: 15396 - protein, 316 aa, Glycine max
MARMNPHNSTADLLSESLQAANEPSDVASKNLSCGQITNEEDESLDKQNKCCSDIVSDSCKDDSNYKTGLNCHQEDQRRTSLVASIVETSHDAPTRRTIDLGHGSDLIYIQRFLPFQKSWTLFDYLDKHIPWTRPTIRVFGRSCLQPRDTCYVASSGLTPLMYSGYRPDAYSWDDFPPLKDILDAICVAFPGSRFNSLLLNRYNGANDYVGWHADDEKLYGPTPEIASLSFGCKRDFVLKKKKLQDSSREKRGEGGPAKKRLKKSSSGEEDQHSFALKHGSLLVMRGYTQRDWIHSVPKRAKAEGTRINLTFRLVL

SEQ ID NO: 15397 - protein, 313 aa, Glycine max
MNPHNSTADLLSESLQAANEPSDVASKNLSCGQITNEEDESLDKQNKCCSDIVSDSCKDDSNYKTGLNCHQEDQRRTSLVASIVETSHDAPTRRTIDLGHGSDLIYIQRFLPFQKSWTLFDYLDKHIPWTRPTIRVFGRSCLQPRDTCYVASSGLTPLMYSGYRPDAYSWDDFPPLKDILDAICVAFPGSRFNSLLLNRYNGANDYVGWHADDEKLYGPTPEIASLSFGCKRDFVLKKKKLQDSSREKRGEGGPAKKRLKKSSSGEEDQHSFALKHGSLLVMRGYTQRDWIHSVPKRAKAEGTRINLTFRLVL

SEQ ID NO: 15398 - DNA, 843 bp, Glycine max
aaaacacacttatctattaaaccatggcgacttctctctccgtctccagactcctctcttcctccgccatctccgtcgccaaaccgctactctccccaacctccgccttcaccgccccaatctccttctcccgctccctcgctcccaacctctccctcaaatcccacacccgccgcacctccatctccgccgccagatccttctcagcaacaaccgtctccgcctccatctccgtcggagacaaactcccagactccaccctctcctacctcgatcccgccaccaacgacgtcaaaacagtcaccgtctcctccctaaccgccgggaagaaaaccatcctcttcgccgtcccgggcgccttcactcccacctgctcgcagaaacacgtcccgggattcgtctccaaggccggggagctcagatccaaaggcgtggacgtcatcgcgtgcgtctccgtgaacgacgcgttcgtgatggaggcgtggaggaaggacctcgggatcagcgacgaggtgatgctgttgtcggatgggaacggagagttcacggggaagctcggcgtggagttggatttgagggataagcctgtggggctcggagttaggtcgaggaggtacgcgattctggcggaggatggtgtggtgaaggtgctgaatcttgaggaaggaggtgctttcactaactctagtgctgaggatatgcttaaagctctttgattccgttttgtcttaagacttttgttctctttgtgttgaattttcttctgtgttttgaattttcgtgaagctttcagattatatatcgaatctgtaatggaataaaacatcggagttgtttttgtct

SEQ ID NO: 15399 - protein, 230 aa, Glycine max
MATSLSVSRLLSSSAISVAKPLLSPTSAFTAPISFSRSLAPNLSLKSHTRRTSISAARSFSATTVSASISVGDKLPDSTLSYLDPATNDVKTVTVSSLTAGKKTILFAVPGAFTPTCSQKHVPGFVSKAGELRSKGVDVIACVSVNDAFVMEAWRKDLGISDEVMLLSDGNGEFTGKLGVELDLRDKPVGLGVRSRRYAILAEDGVVKVLNLEEGGAFTNSSAEDMLKAL

SEQ ID NO: 15400 - protein, 193 aa, Glycine max
KHTYLLNHGDFSLRLQTPLFLRHLRRQTATLPNLRLHRPNLLLPLPRSQPLPQIPHPPHLHLRRQILLSNNRLRLHLRRRQTPRLHPLLPRSRHQRRQNSHRLLPNRREENHPLRRPGRLHSHLLAETRPGIRLQGRGAQIQRRGRHRVRLRERRVRDGGVEEGPRDQRRGDAVVGWERRVHGEARRGVGFEG

SEQ ID NO: 15401 - DNA, 759 bp, Glycine max
aaagcagcttctccccccagattattcacttccaaggcatttcatcttattcacttccaaaggggtaccctgagatcacaaaggatcacaaaactatggccaagggagttgcagttctgaacagcagtgagggtgttaaggggaccatcttcttcacccatgaaggaaacggtgccactactgtgacaggaactgtttctggccttaaacctggtctccatggtttccatgtccatgctcttggtgacaccactaacggttgcatgtctaccggtccacatttcaaccctgatggtaaaactcacggtgcaccggaggatgctaatcgtcatgctggcgatctaggaaacatcattgttggggatgatggaactgccaccttcacaatcactgacagccagattccccttagtggtccaaactctattgtcggaagggccgttgttgtccacgcagaccctgatgacctcggaaagggaggccatgaactcagcttgtctactggaaacgcaggcggccgtgttgcttgtggtattattggtcttcagggctaagctgttgcttttcgacgaagagagtgatgtaataaggaggttcgacctctagacatggctagtttgtgtatctttggtgtgtgtgtgtgtggctgtaataattgagcttagtggctcattgcttttggtttaagacgaaagaacacataatgttttctgtttcatgaataacagagatggttgaaaacaataaaataatattgat

SEQ ID NO: 15402 - protein, 183 aa, Glycine max
SSFSPQIIHFQGISSYSLPKGYPEITKDHKTMAKGVAVLNSSEGVKGTIFFTHEGNGATTVTGTVSGLKPGLHGFHVHALGDTTNGCMSTGPHFNPDGKTHGAPEDANRHAGDLGNIIVGDDGTATFTITDSQIPLSGPNSIVGRAVVVHADPDDLGKGGHELSLSTGNAGGRVACGIIGLQG

SEQ ID NO: 15403 - protein, 152 aa, Glycine max
MAKGVAVLNSSEGVKGTIFFTHEGNGATTVTGTVSGLKPGLHGFHVHALGDTTNGCMSTGPHFNPDGKTHGAPEDANRHAGDLGNIIVGDDGTATFTITDSQIPLSGPNSIVGRAVVVHADPDDLGKGGHELSLSTGNAGGRVACGIIGLQG

SEQ ID NO: 15404 - protein, 96 aa, Glycine max
MSTGPHFNPDGKTHGAPEDANRHAGDLGNIIVGDDGTATFTITDSQIPLSGPNSIVGRAVVVHADPDDLGKGGHELSLSTGNAGGRVACGIIGLQG

SEQ ID NO: 15405 - DNA, 816 bp, Glycine max
ttttttcttcggttcggggttttagcagtgaagtagcgaaaatggcgtctacatcgtgttttgatccttatcaacttgagcgagttgcagatattttcacaggccaagatctaagatccgagttacaaagcaaaatggcgatggtttcaggaagacgttctacgctaaaccccaacgcgcctctctttgtcccagcagccgttagacaagtggaagatttctctccggagtggtggcagttggtgacgacctccacttggtaccacgactactggatcagccagcaccaaggagctgacggattctacgacaacggagagagtggtgaagtcgatgtagctgatcttcttccagagtcgtttgatttcgatgatattgaagatgtcttcgaggccgagtttgatcatcaaggttacggtggatatgttggacaacagatgtatcatgcaccttctgactttggtttagggaagaatggtgagatggtgaggaaatcgagtgggaacaggagtcctaggtcgattgttgaaccggcgaagtatgcagagaagccagcgaaatgggggaaccagaaggttgctccacgaaacattcaccagcctcgttgaagtgcaaagttaactaggcagagtatgttgtatctttagccacttgtacctttgtaatttttagtattttctgctttccacaagagagaacctgtaacttctttgtacctttatgatgttcagtctcaaacttgttatctcaaaaaaaaatgtaaaaacataaaaaaattgtaaaatttgaagagtaatgagaaatagagtttcacat

SEQ ID NO: 15406 - protein, 201 aa, Glycine max
FSSVRGFSSEVAKMASTSCFDPYQLERVADIFTGQDLRSELQSKMAMVSGRRSTLNPNAPLFVPAAVRQVEDFSPEWWQLVTTSTWYHDYWISQHQGADGFYDNGESGEVDVADLLPESFDFDDIEDVFEAEFDHQGYGGYVGQQMYHAPSDFGLGKNGEMVRKSSGNRSPRSIVEPAKYAEKPAKWGNQKVAPRNIHQPR

SEQ ID NO: 15407 - protein, 188 aa, Glycine max
MASTSCFDPYQLERVADIFTGQDLRSELQSKMAMVSGRRSTLNPNAPLFVPAAVRQVEDFSPEWWQLVTTSTWYHDYWISQHQGADGFYDNGESGEVDVADLLPESFDFDDIEDVFEAEFDHQGYGGYVGQQMYHAPSDFGLGKNGEMVRKSSGNRSPRSIVEPAKYAEKPAKWGNQKVAPRNIHQPR

SEQ ID NO: 15408 - protein, 157 aa, Glycine max
MAMVSGRRSTLNPNAPLFVPAAVRQVEDFSPEWWQLVTTSTWYHDYWISQHQGADGFYDNGESGEVDVADLLPESFDFDDIEDVFEAEFDHQGYGGYVGQQMYHAPSDFGLGKNGEMVRKSSGNRSPRSIVEPAKYAEKPAKWGNQKVAPRNIHQPR

SEQ ID NO: 15409 - DNA, 1350 bp, Glycine max
acgttagcgagaggtaaaaatccgactgcccaggggacgaaccggaacaagggttccgggcccgtctcttcttcgtttcgtttccatccacagctcgtcctccccccaaaccttaccccatgtccgacggcggcggcgagcccggggccggcggctcggcgccggtgtgcaacttcgttcagaagccgccgaagaatattcggaagcgtcccgccgcctccgtcggctctgatgacgaagaaggtagcggcggcgacgattccggggccatcgcggcggcgcgatctaagaagccgccgcctactaccagcaagctcttcttctcctccgccgacaactcacacgagccccgccgtttccagttcgagtcgtcccggactattcagtcctctaccgacaaccgcgccactgcgacgcttgagacggagacggcgtacgaccgtgatgcgcgcgccatccgcgagcgacagctcaagcaggctgaggaatccctcaagaagaacccctctgcctcctcctcctccggggagctctacaaggggatccacggctacacggatcacaaggccggcttccggcgggagcacacggtttccggagagaaggccggcggcgctcacggccccctgcgggcgtcagcgcacatacgcctctccacgcggttcgactaccaacccgacatctgcaaggattataaggagaccggctattgtggctatggcgattcctgcaagttcatgcacgacagaggtgactacaagtccggatggcagctcgagagggagtgggacgaggccgagaaagcccgcaaacggcgcatagcgatgcgtgagttgggtggtagtgatggcgaggcagaggaggaagacagcgacgacgaggaggcactgccctttgcctgcttcatatgcagggagccctttgttgacccggtggtcacaaagtgtaagcattatttctgcgagcattgcgcattaaagcatcactcgaagaacaagaagtgctttgtctgcaataaaccgacgcttggcatcttcaatgcagcgcaggagatccggaagaagattgcccaggacaagaagcagcaggacctttgatgactgctgcacaatgtagcttgtatcatggaggattacttctcttctgtaattgtattgtttgaaaatgagggggaaatgtccaggaatcagttttgtttctttagctctgtactagctcctacttaccattagccattttgccgcaacttaaaaggactacaaggaaggattgtaggagtttttgagaaaatcaacaacgaaagaactagcttattgtggacctatggaaaaatatctcaaaacttgaagg

SEQ ID NO: 15410 - protein, 325 aa, Glycine max
MSDGGGEPGAGGSAPVCNFVQKPPKNIRKRPAASVGSDDEEGSGGDDSGAIAAARSKKPPPTTSKLFFSSADNSHEPRRFQFESSRTIQSSTDNRATATLETETAYDRDARAIRERQLKQAEESLKKNPSASSSSGELYKGIHGYTDHKAGFRREHTVSGEKAGGAHGPLRASAHIRLSTRFDYQPDICKDYKETGYCGYGDSCKFMHDRGDYKSGWQLEREWDEAEKARKRRIAMRELGGSDGEAEEEDSDDEEALPFACFICREPFVDPVVTKCKHYFCEHCALKHHSKNKKCFVCNKPTLGIFNAAQEIRKKIAQDKKQQDL

SEQ ID NO: 15411 - protein, 273 aa, Glycine max
TLARGKNPTAQGTNRNKGSGPVSSSFRFHPQLVLPPNLTPCPTAAASPGPAARRRCATSFRSRRRIFGSVPPPPSALMTKKVAAATIPGPSRRRDLRSRRLLPASSSSPPPTTHTSPAVSSSSRPGLFSPLPTTAPLRRLRRRRRTTVMRAPSASDSSSRLRNPSRRTPLPPPPPGSSTRGSTATRITRPASGGSTRFPERRPAALTAPCGRQRTYASPRGSTTNPTSARIIRRPAIVAMAIPASSCTTEVTTSPDGSSRGSGTRPRKPANGA

SEQ ID NO: 15412 - protein, 196 aa, Glycine max
MTKKVAAATIPGPSRRRDLRSRRLLPASSSSPPPTTHTSPAVSSSSRPGLFSPLPTTAPLRRLRRRRRTTVMRAPSASDSSSRLRNPSRRTPLPPPPPGSSTRGSTATRITRPASGGSTRFPERRPAALTAPCGRQRTYASPRGSTTNPTSARIIRRPAIVAMAIPASSCTTEVTTSPDGSSRGSGTRPRKPANGA

SEQ ID NO: 15413 - DNA, 651 bp, Glycine max
acacccaccttatccgcaatctcctatttctctaaaatataaagcttcccttcttttgcttctctcatacttgagtcgacccactttctgttgcatccttcaaaacttaattcattagcgaaaggaatggctacagcagcggcgccggcggtggttgcatggacaagaacgggaactgcgttcaagtccggacaggcacagatgaaatcggagatgaaagtttcttacgtaagaggactaaattcttacggtggtctcaaggcacagaacaacaaggttgtctctatgggattaccagtctgcaccgaacagtgctttgctaacgtcgtgatgtctctcaaaggacgcacaagtcgtggaggagcattgacctcgacctgtaacgcggtcggagagattttcaagattgcagcaatcatgaacgctcttactctcgttggcgttgcggttggattcgttctccttcgaatcgaagcttctgttgaggaagctgagtaaatagattgaggaatcctttttcttatattattattatattgttgttgtcaagcttggatgcattatatgacatttgtttatgatgaagctcttttgttcttggaatcctcactgatcaaacggtactttttttttgtttggaagagcatctgc

SEQ ID NO: 15414 - protein, 123 aa, Glycine max
MATAAAPAVVAWTRTGTAFKSGQAQMKSEMKVSYVRGLNSYGGLKAQNNKVVSMGLPVCTEQCFANVVMSLKGRTSRGGALTSTCNAVGEIFKIAAIMNALTLVGVAVGFVLLRIEASVEEAE

SEQ ID NO: 15415 - protein, 98 aa, Glycine max
MKSEMKVSYVRGLNSYGGLKAQNNKVVSMGLPVCTEQCFANVVMSLKGRTSRGGALTSTCNAVGEIFKIAAIMNALTLVGVAVGFVLLRIEASVEEAE

SEQ ID NO: 15416 - protein, 94 aa, Glycine max
MKVSYVRGLNSYGGLKAQNNKVVSMGLPVCTEQCFANVVMSLKGRTSRGGALTSTCNAVGEIFKIAAIMNALTLVGVAVGFVLLRIEASVEEAE

SEQ ID NO: 15417 - DNA, 394 bp, Glycine max
tctttttctttatctatctgatctgaatgcgaagaacgaacgagagtgcagcgccagcggcaatgggaaggagcactttggctttggttctcgcgattctgatctctttgcagggaaccccccacgttagatccgatgcctccgatcatcgttacaaggacggagactccgttcctctttacgccaacaaagtcggtccctttcacaaccccagtgaaacgtatcggtactttgacctgccattctgtgtaacaggtcatgagaaagataagactgaagccctcggtgaggtgttaaatggcgatcgccttgttagtgctccttatgaacttagtttcaagaaggagaaagactctaaggttgtatgcaagaggaagctcacaaaggagcaagt

SEQ ID NO: 15418 - protein, 122 aa, Glycine max
MRRTNESAAPAAMGRSTLALVLAILISLQGTPHVRSDASDHRYKDGDSVPLYANKVGPFHNPSETYRYFDLPFCVTGHEKDKTEALGEVLNGDRLVSAPYELSFKKEKDSKVVCKRKLTKEQ

SEQ ID NO: 15419 - protein, 110 aa, Glycine max
MGRSTLALVLAILISLQGTPHVRSDASDHRYKDGDSVPLYANKVGPFHNPSETYRYFDLPFCVTGHEKDKTEALGEVLNGDRLVSAPYELSFKKEKDSKVVCKRKLTKEQ

SEQ ID NO: 15420 - DNA, 863 bp, Glycine max
aaagaaacattctagagctccgctccactcccagtaatggcggcgacatggacttgttttgtaacttcgttgtgtatttcttcaccttcttataaaccatcgtcgttgcacggtctgtctttccggaggcaagcagtgaccagaacgaacagattttttaccaggatatatgcgctgtctagcaacgacatcaaagtcgggacaagcatagaagtcgatggtgctccgtggcgtgttctggagtttctgcatgtgaagccaggcaaaggtgctgcttttgtcagaaccaaaatcaggaactacgtcaatggtagcacagtcgagagaacctttcgtgctgggattactatagaagaggccaatgtctccaaggagactaagcaattcacttataaagacggctctcagtttgttttcatggacttgagcagttatgaggaaacacgtttaaacgaggctgatatgggcgacaagaccaaatggcttaaagagggaatggactgcaatttgctctactggaaggacaaggtcatcgattttgaacttcccattacagttcagcttaaaatagttgacgttgatcctggtctccgaggtgacactgcacaaggtggaactaaacctgccacactcgagactggtgcagttgtcaatgtacccctctttgtcaatgttggtgaagatattatggtggacacgagaaccggtacgtacatgagccgggtctgacacttcttccctattgctaacgactaaggaatgtgatatttaatgagcggttttgcttagactactctgattagttgagtgaacgcccagaattgctactattggtttccctaataatgattctgtattatttt

SEQ ID NO: 15421 - protein, 230 aa, Glycine max
MAATWTCFVTSLCISSPSYKPSSLHGLSFRRQAVTRTNRFFTRIYALSSNDIKVGTSIEVDGAPWRVLEFLHVKPGKGAAFVRTKIRNYVNGSTVERTFRAGITIEEANVSKETKQFTYKDGSQFVFMDLSSYEETRLNEADMGDKTKWLKEGMDCNLLYWKDKVIDFELPITVQLKIVDVDPGLRGDTAQGGTKPATLETGAVVNVPLFVNVGEDIMVDTRTGTYMSRV

SEQ ID NO: 15422 - DNA, 1311 bp, Glycine max
atcttaaagacgaaccaaaatgagagagagaattattcatgatatgttttgttcttaattggaaaattgtaatgcatgcacactctcttgaagggtaagtttctgagaattttctgtcactttctcggcaaaaaattatgtcttccctctccaatcttgaacgctttctcctacgcgtcactccagatgttccgtcactcactcttcagagctgctgtagtgatctaaatgcacaatggctacctcctggcaaagacacaatcgaatatttcactctgaaagatctttgggactgctactatgaatggagtgcctttggtgctggcattcctatgatattggaaaatggtgacactctggtgcaatactatgctccatatctgtctgctacccaaatctatatcagtaaatctaggattcggaaagagtacggtgaaggagttgaagttgaatgtgattccttgagcgaggacagtgcaagtgataacctttctagatcacccagtaacaattctagcaaagcatgggatgatgcttctttggattcaggctctgaccaagtgggttcatgcacaacaaaggatatgcttggcgctctttacttacaatactctgagaactctccaccttaccagcgggttccattttctgagaagataaccgagttagctaaaagccatccaggattgatgaggttgaagagtgtggatatttcccccacaagttggatggctgtttcatggtatcccatttattccgtaccatgccacaaaaataaaagggaccaaacaagcttcctcactttccattcactttcatctttccaagactgtgcaagcaaatatgacgaaattcacacagggaataacaaaagttgtttaattgattggcgaagtattgtgggagagaaatgcaagaaaaaagagaggggttgcatgtctctctctccttttgggttagccacgtacaaaatgaggaaaaacatatggttaaatccctataacaataaccaagtggtgaccgatctatacaacgctgcagactggtggttgaagcatatcaacgctgaccaccctgacttcaacttcttcacacgccaacctaccttgtagattggtttgtgttgtgttcatcaccaccagctcaatgcccctttgctcagtttgctactctcatttcggtatcagaatttgcttagtttggtactctgaccttcaccctaggtccaactctgagaacattaataaataaaatgtaaagtttagtttaatgggttcatgtaaagtgatatttatcttagcttctttaccc

SEQ ID NO: 15423 - protein, 324 aa, Glycine max
MSSLSNLERFLLRVTPDVPSLTLQSCCSDLNAQWLPPGKDTIEYFTLKDLWDCYYEWSAFGAGIPMILENGDTLVQYYAPYLSATQIYISKSRIRKEYGEGVEVECDSLSEDSASDNLSRSPSNNSSKAWDDASLDSGSDQVGSCTTKDMLGALYLQYSENSPPYQRVPFSEKITELAKSHPGLMRLKSVDISPTSWMAVSWYPIYSVPCHKNKRDQTSFLTFHSLSSFQDCASKYDEIHTGNNKSCLIDWRSIVGEKCKKKERGCMSLSPFGLATYKMRKNIWLNPYNNNQVVTDLYNAADWWLKHINADHPDFNFFTRQPTL

SEQ ID NO: 15424 - protein, 259 aa, Glycine max
MILENGDTLVQYYAPYLSATQIYISKSRIRKEYGEGVEVECDSLSEDSASDNLSRSPSNNSSKAWDDASLDSGSDQVGSCTTKDMLGALYLQYSENSPPYQRVPFSEKITELAKSHPGLMRLKSVDISPTSWMAVSWYPIYSVPCHKNKRDQTSFLTFHSLSSFQDCASKYDEIHTGNNKSCLIDWRSIVGEKCKKKERGCMSLSPFGLATYKMRKNIWLNPYNNNQVVTDLYNAADWWLKHINADHPDFNFFTRQPTL

SEQ ID NO: 15425 - protein, 175 aa, Glycine max
MLGALYLQYSENSPPYQRVPFSEKITELAKSHPGLMRLKSVDISPTSWMAVSWYPIYSVPCHKNKRDQTSFLTFHSLSSFQDCASKYDEIHTGNNKSCLIDWRSIVGEKCKKKERGCMSLSPFGLATYKMRKNIWLNPYNNNQVVTDLYNAADWWLKHINADHPDFNFFTRQPTL

SEQ ID NO: 15426 - DNA, 669 bp, Glycine max
atcgcttctcttctcctccatagttctccgtcgaccgtcgtccgagcagacagaaaaaaaccctaaaaatggatgggcatgattctgaggaccctactaagcagagcactgctgatatgactgcttttgtccaaaatcttctgcagcagatgcaatccaggttccagacaatgtccgactccatcatcacaaagatcgatgacatgggaggcagaatcaatgagctggagcaaagcatcaatgatctaagagccgagatgggagttgaaggcactcctcctgctgcctccaaatctggcgatgaacccaaaacaccccctagttccacttgaacactaagtgtcacatgatcttcctgcttatgtatgcatctgcagaaacattctcaagtttgttcaggagcagtgttattacttttagatttcagtttcaaaaggcatgaatatgttgttgagttcatcagattgattgatggaggatgtgggtacattacattattatgcacttatgttgacttgctttctatgttggttttgagataactgagaaagaccagtgcttgatggatctatactccgcttggttatacattttattctctatagtccgaatgtatagcaattacaactttgtgtgtaccctaacaatctatcattatcgatttttatc

SEQ ID NO: 15427 - protein, 87 aa, Glycine max
MDGHDSEDPTKQSTADMTAFVQNLLQQMQSRFQTMSDSIITKIDDMGGRINELEQSINDLRAEMGVEGTPPAASKSGDEPKTPPSST

SEQ ID NO: 15428 - protein, 71 aa, Glycine max
MTAFVQNLLQQMQSRFQTMSDSIITKIDDMGGRINELEQSINDLRAEMGVEGTPPAASKSGDEPKTPPSST

SEQ ID NO: 15429 - protein, 60 aa, Glycine max
MQSRFQTMSDSIITKIDDMGGRINELEQSINDLRAEMGVEGTPPAASKSGDEPKTPPSST

SEQ ID NO: 15430 - DNA, 1000 bp, Glycine max
agttttaccgttgttgttggcaatgaaaaaatcatcatcagcttcaaaaggtgcagcagccaatgatggagttattaagggaggaagcatagattgggagctaagacctggtggcatgcttgttcagaagagacaaccccttgattcctcttctagttccatgatcaaaatcaaggtctctcatggttcttaccaccatgaggtcactgttcctgcacaatccacttttgggcatctaaaaatggtgcttacatccgagactggtcttgagcctaaagagcaaaggttactatttagagggaaagagaaagaggatgaggaatgcttgcatatggtgggagtgaaagacatgtctaaggttatattgctagaggatccagccagcaaagagagaaagcttgaggagatgcataagagtgaagatatctcaaaggcatgtgaagccatctccaaagtcagaacagaagttgacaagctatatcaaaaggtggttgctttggagacaactgtttgtggtggtgctaaggttgaagacaaagaatttgctatcttgacagaattgctaatggttcaattgcttaaactggattccattgctgctgagggagaagccaaagggcagagaagagttgaggttcgtcgtgtacagagttatgtggacacaattgacaacctgaaggcaagaaattttgctgcatttagcaatgctggtaacaatgcagtccctgtgatttgggaggccttggaatccggagttggaagcttgaagtcaccaacttcatttccaacatctacagtgattactcaaaactgggagcactttgaataaatacaagttaatccttccactttatttatagaagaggcttctatgatgacacttggttttttgtaatgacaagctgtttttggtagggaagggttatgcttgtacaaaattaatacatgtacatgttacttctctatgtccaaataaacactgattttgccttgtgtgttc

SEQ ID NO: 15431 - protein, 275 aa, Glycine max
VLPLLLAMKKSSSASKGAAANDGVIKGGSIDWELRPGGMLVQKRQPLDSSSSSMIKIKVSHGSYHHEVTVPAQSTFGHLKMVLTSETGLEPKEQRLLFRGKEKEDEECLHMVGVKDMSKVILLEDPASKERKLEEMHKSEDISKACEAISKVRTEVDKLYQKVVALETTVCGGAKVEDKEFAILTELLMVQLLKLDSIAAEGEAKGQRRVEVRRVQSYVDTIDNLKARNFAAFSNAGNNAVPVIWEALESGVGSLKSPTSFPTSTVITQNWEHFE

SEQ ID NO: 15432 - protein, 268 aa, Glycine max
MKKSSSASKGAAANDGVIKGGSIDWELRPGGMLVQKRQPLDSSSSSMIKIKVSHGSYHHEVTVPAQSTFGHLKMVLTSETGLEPKEQRLLFRGKEKEDEECLHMVGVKDMSKVILLEDPASKERKLEEMHKSEDISKACEAISKVRTEVDKLYQKVVALETTVCGGAKVEDKEFAILTELLMVQLLKLDSIAAEGEAKGQRRVEVRRVQSYVDTIDNLKARNFAAFSNAGNNAVPVIWEALESGVGSLKSPTSFPTSTVITQNWEHFE

SEQ ID NO: 15433 - protein, 237 aa, Glycine max
MLVQKRQPLDSSSSSMIKIKVSHGSYHHEVTVPAQSTFGHLKMVLTSETGLEPKEQRLLFRGKEKEDEECLHMVGVKDMSKVILLEDPASKERKLEEMHKSEDISKACEAISKVRTEVDKLYQKVVALETTVCGGAKVEDKEFAILTELLMVQLLKLDSIAAEGEAKGQRRVEVRRVQSYVDTIDNLKARNFAAFSNAGNNAVPVIWEALESGVGSLKSPTSFPTSTVITQNWEHFE

SEQ ID NO: 15434 - DNA, 794 bp, Glycine max
cacaaattacccttgttgaagcctttagaaacatgcagattgaggaaggagaggagcatctggagaatggggactctactcatgagttgacagaacaaagtggagaagagcactacacagaggatcaggaggaacagaatggagaggaaggaagccaagaggaggcagttgtagtggatgcagattctacagatggtgcagtactcgttaatggtaacgaggctgacgaagagtggggtacgaataatgaaggagccccgtcagcctaaaagcaattggttggggtggtgtgaaaatcgaaattttgtctctgtgcttgcaccacatcactaggttccatcaagacagtctattccagcttctgggatattttatgaggtttatcaatcgattaacagtttttggttattattatgatcttattaccacccggatagactatttttggtttgataaagcattccttcattcaatttggatgctcacatagacgagtagtgttgcaaaaagaagacatgctcgtgtttatgtgcatccgcaggtcttctcaaggttacatgaagagattttttggactggttgtttgtttcctggtgttgtggatttgtagtgccctgaattttgtcattttgctcgttgtatgaacaatattccttagggtcagttacaatttactagagtttatatatagcacattcttttgaggcttttacctcaatatactcgtgccattgtgaatgtagaaaagcggaactagagacgggttgcccgtttaaactttagataagtttttt

SEQ ID NO: 15435 - protein, 88 aa, Glycine max
QITLVEAFRNMQIEEGEEHLENGDSTHELTEQSGEEHYTEDQEEQNGEEGSQEEAVVVDADSTDGAVLVNGNEADEEWGTNNEGAPSA

SEQ ID NO: 15436 - protein, 78 aa, Glycine max
MQIEEGEEHLENGDSTHELTEQSGEEHYTEDQEEQNGEEGSQEEAVVVDADSTDGAVLVNGNEADEEWGTNNEGAPSA

SEQ ID NO: 15437 - protein, 51 aa, Glycine max
MQILQMVQYSLMVTRLTKSGVRIMKEPRQPKSNWLGWCENRNFVSVLAPHH

SEQ ID NO: 15438 - DNA, 405 bp, Glycine max
aaaaactaaaaccctagagaaatggcgatctctaagactactaccgttgttgctctcgtcgcggtgattgtctccgtcgtcgctaccgtagcttcggctcaggttgaggccccggcgccgagtcctacttctggatctggtgctttctcgccgtcgatcgtgtcagctggtgttgcggcagtcgcggctctcgttttcggctctgctcttcggatctaagtctgtgtgatggagattcgtacagagatagtattcaggagctatagatctcactctctttttttttttactttatttaccttcatgtcattgtgaaggatatatatattattgtgtggctttgtaatttctagacggtgtttttggattgtgattctatttatttatggatggtttctcagattt

SEQ ID NO: 15439 - protein, 65 aa, Glycine max
MAISKTTTVVALVAVIVSVVATVASAQVEAPAPSPTSGSGAFSPSIVSAGVAAVAALVFGSALRI

SEQ ID NO: 15440 - DNA, 922 bp, Glycine max
acatcctaatcgaaaaatcctcattctctctctttgggttctgaacttgtaatagctatagatagaaatacagtgacagacacaatagaagaagaaacccaacccaagcaaacgcactcagagaagagagaatgaccaccccaagaggaaaccaccacccgcagcctaacggtgagcgaagaagacaatggccaccggcacatccagcagcggcagcggcagcggctccggaagcggcagagacagcgacagcaacagcaacagcagcaggcggacattcttacaatgggtaccgacagtaccacccaagaacgccgggtcgttcgtcgtcgtcgtcggcatcgttcaaagggtgctgttgctgcctcttccttctattctcgttcctggcgctgctggtgctagcggtggtgctggtaataatcctagcggtgaagccgaagaagccacagttcgatctggagcaagtgggggtgcagtacatgggcatcacacccaatcccccctccaccgcttccctctctctcaccattcgcctcctcttcgccgccaccaaccccaacaaggtcgggatcaggtacggtcagtccagcttcaccgtcatgtaccgcggcatcccattgggaaaagccaccgtccccggcttcttccaacagcctcacagcacccgacaggtcatcgccaccatcgccgtcgatcgcgtcaatttgcttcaggccgacgccgccgatttgatccgagacgcctccctcagcgaccgagtcgacctcagagtcttgggcgacgttgctgccaagatccgcgtcatcaacttcgattctccaggtgttcagattaacgacaagaactcaattacacaggtctcggtggattgtgctattgtgatcagtccaagaaagcaatctctgacttacaagcagtg

SEQ ID NO: 15441 - protein, 263 aa, Glycine max
MTTPRGNHHPQPNGERRRQWPPAHPAAAAAAAPEAAETATATATAAGGHSYNGYRQYHPRTPGRSSSSSASFKGCCCCLFLLFSFLALLVLAVVLVIILAVKPKKPQFDLEQVGVQYMGITPNPPSTASLSLTIRLLFAATNPNKVGIRYGQSSFTVMYRGIPLGKATVPGFFQQPHSTRQVIATIAVDRVNLLQADAADLIRDASLSDRVDLRVLGDVAAKIRVINFDSPGVQINDKNSITQVSVDCAIVISPRKQSLTYKQ

SEQ ID NO: 15442 - protein, 216 aa, Glycine max
MATGTSSSGSGSGSGSGRDSDSNSNSSRRTFLQWVPTVPPKNAGSFVVVVGIVQRVLLLPLPSILVPGAAGASGGAGNNPSGEAEEATVRSGASGGAVHGHHTQSPLHRFPLSHHSPPLRRHQPQQGRDQVRSVQLHRHVPRHPIGKSHRPRLLPTASQHPTGHRHHRRRSRQFASGRRRRFDPRRLPQRPSRPQSLGRRCCQDPRHQLRFSRCSD

SEQ ID NO: 15443 - protein, 146 aa, Glycine max
MGITPNPPSTASLSLTIRLLFAATNPNKVGIRYGQSSFTVMYRGIPLGKATVPGFFQQPHSTRQVIATIAVDRVNLLQADAADLIRDASLSDRVDLRVLGDVAAKIRVINFDSPGVQINDKNSITQVSVDCAIVISPRKQSLTYKQ

SEQ ID NO: 15444 - DNA, 919 bp, Glycine max
aaatacaaccaacccctctcgccgtctgctcgcttgcccgtccgtccgtccccccaaatccaaccccctccccgcacgaaccccggcggcgtcaccggcgatggagtgcgtcatcggcgtggtcggccgcgacttcgcggtggtggccgcggacacgtccgccgtgcagagcatcctcgtccacaagacggacgaggacaagatcatgctcctcgactcccacaagctcatgggcgcctccggggagcccggcgaccgcgtgcagttcaccgagttcatccagaagaacctccacctctaccagttccgcaacaacatgccgctcagcaccgccgccaccgccaacttcacccgcggcgagctcgccaccgccctccgcaagaatccctactctgtaaacatcatacttgcagggtttgataaagatgctggtgcatcgatgtactacattgactacatcgcaacgctccacaaaattgacaagggagcattcgggtacgggtcgtacttctgtttgtcgctgatggacaagttgtaccgccctgacatgactgtcgaggaagcggtagaccttgttgacaagtgcatcaaggagatcagactccggctggtcgtcgcgcctcagaatttcgccatcaagatcgtggacaaggatggcgccagggactatgctaggcgtgagataggaggtgacagtcctgcagtcgcaaccgcaaccgcaacaatagcaacaactgcctgaggtgattggcgctgtcggtggtcatttggctggctggaggctgaaccctttctgttaattgtttccaagtactgtcactatgtaatcgcaatacgtttcggttcgagaactgtgttgcaaattctcccagatgtggactagtctgtttatgacccctatttcatggttatatgttcc

SEQ ID NO: 15445 - protein, 246 aa, Glycine max
NTTNPSRRLLACPSVRPPKSNPLPARTPAASPAMECVIGVVGRDFAVVAADTSAVQSILVHKTDEDKIMLLDSHKLMGASGEPGDRVQFTEFIQKNLHLYQFRNNMPLSTAATANFTRGELATALRKNPYSVNIILAGFDKDAGASMYYIDYIATLHKIDKGAFGYGSYFCLSLMDKLYRPDMTVEEAVDLVDKCIKEIRLRLVVAPQNFAIKIVDKDGARDYARREIGGDSPAVATATATIATTA

SEQ ID NO: 15446 - protein, 213 aa, Glycine max
MECVIGVVGRDFAVVAADTSAVQSILVHKTDEDKIMLLDSHKLMGASGEPGDRVQFTEFIQKNLHLYQFRNNMPLSTAATANFTRGELATALRKNPYSVNIILAGFDKDAGASMYYIDYIATLHKIDKGAFGYGSYFCLSLMDKLYRPDMTVEEAVDLVDKCIKEIRLRLVVAPQNFAIKIVDKDGARDYARREIGGDSPAVATATATIATTA

SEQ ID NO: 15447 - protein, 178 aa, Glycine max
MLLDSHKLMGASGEPGDRVQFTEFIQKNLHLYQFRNNMPLSTAATANFTRGELATALRKNPYSVNIILAGFDKDAGASMYYIDYIATLHKIDKGAFGYGSYFCLSLMDKLYRPDMTVEEAVDLVDKCIKEIRLRLVVAPQNFAIKIVDKDGARDYARREIGGDSPAVATATATIATTA

SEQ ID NO: 15448 - DNA, 1276 bp, Glycine max
acctagaacatcccaatcaaaaaatcaaagccctgctgaatggcgccaccggcaccacccaagtcaagtcagggtcaggtgatgaataatgcaaggattcacttcttttccattctcctcgctctccaatacggtgctcaacctttgatctccaaacgcttcatcagacgtgaagttattgtgacttcatctgttttgacttgtgagcttgcaaaggttatatgtgcagtgttttttatggcaaaagatggtagtctgaggaaattgtataaagagtggactttggttggtgcgttgactgcatcaggacttcctgcagctatatatgcattgcaaaatagtttgctgcaaatttcttacaagaatcttgattcactcacattctcaatgctgaatcagaccaaaatatttttcaccgcgctctttgcatatttcatattgaggcaaaaacaatcgattgagcaaattggagccttgttcttgttaatagttgcggcagttcttttaagtgttggcgaaggctctaccaaaggttctgctattggcaatgctgatcaaattttattttatggaattattcctgtattagttgcttcagtgctctctggattggcttcatccttgtgtcaatgggcctctcaggttaagaaacactcatcatacttgatgactatagaaatgtctattgttggaagtctatgtttgcttgccagtactttgaaatctccagatggggaagctatgagacaacatgggtttttctatggttggactcctcttactttgatcccagtaattttcaatgcccttggaggaattcttgtcggtttagttacaagccatgctggtggtgttcggaaggggtttgtcattgtttctgctttactcattacagcattgctacagtttattttcgatggaaagacaccttcattgtattgccttttggctcttccactagtggtcactagcatttcaatataccagaaatacccctaccaggttaagaagaaggagtcatagaatctgaccatggggaatttatttcattagttccccccgaaactactttgtttttttatccagaatatatagcatattgtaaatgatagaacatagaaggcaagcattcttcttgatgtcttctggatctcaatagaattaggatgttatacagagctatttttttttttttgaatattctggaatctttaaatgatcaattatttgtctcctaaaaaaaaaaaaaaaaaagcttatcgataccgtcgacctc

SEQ ID NO: 15449 - protein, 327 aa, Glycine max
MAPPAPPKSSQGQVMNNARIHFFSILLALQYGAQPLISKRFIRREVIVTSSVLTCELAKVICAVFFMAKDGSLRKLYKEWTLVGALTASGLPAAIYALQNSLLQISYKNLDSLTFSMLNQTKIFFTALFAYFILRQKQSIEQIGALFLLIVAAVLLSVGEGSTKGSAIGNADQILFYGIIPVLVASVLSGLASSLCQWASQVKKHSSYLMTIEMSIVGSLCLLASTLKSPDGEAMRQHGFFYGWTPLTLIPVIFNALGGILVGLVTSHAGGVRKGFVIVSALLITALLQFIFDGKTPSLYCLLALPLVVTSISIYQKYPYQVKKKES

SEQ ID NO: 15450 - protein, 313 aa, Glycine max
MNNARIHFFSILLALQYGAQPLISKRFIRREVIVTSSVLTCELAKVICAVFFMAKDGSLRKLYKEWTLVGALTASGLPAAIYALQNSLLQISYKNLDSLTFSMLNQTKIFFTALFAYFILRQKQSIEQIGALFLLIVAAVLLSVGEGSTKGSAIGNADQILFYGIIPVLVASVLSGLASSLCQWASQVKKHSSYLMTIEMSIVGSLCLLASTLKSPDGEAMRQHGFFYGWTPLTLIPVIFNALGGILVGLVTSHAGGVRKGFVIVSALLITALLQFIFDGKTPSLYCLLALPLVVTSISIYQKYPYQVKKKES

SEQ ID NO: 15451 - protein, 261 aa, Glycine max
MAKDGSLRKLYKEWTLVGALTASGLPAAIYALQNSLLQISYKNLDSLTFSMLNQTKIFFTALFAYFILRQKQSIEQIGALFLLIVAAVLLSVGEGSTKGSAIGNADQILFYGIIPVLVASVLSGLASSLCQWASQVKKHSSYLMTIEMSIVGSLCLLASTLKSPDGEAMRQHGFFYGWTPLTLIPVIFNALGGILVGLVTSHAGGVRKGFVIVSALLITALLQFIFDGKTPSLYCLLALPLVVTSISIYQKYPYQVKKKES

SEQ ID NO: 15452 - DNA, 1236 bp, Glycine max
gcggtctcggttttctgcaattggctggcggcctggcgctccaccccgtgcgtccttcagtccttctatccaaaagcgacggagagactcccggcggcgagcaggttgtcctgttgttctatccgattgtgcactgctggttgtcctgctctccagctgactgcagtggtgttcttctcgcagtttgaagatggatctcaaggatagcctctccagatttaagcagcagcaggagaggtgccagtcatctttggccagcatagctgcaagccaagcttcaaccacaaaaccaaagcacagggcccaaccgattaatgctccatctgctccagcaaggcctgcacaacctattaaattttcaaacgatacagaaaggctgcaagacattaattcgattaggaaatctcctgttggggcacagatcaaacttgtcattgaattgctttacaagacaagacaagcttttacggcagagcaaataaatgatgcaacttacgttgatatcaatggtaataaggctgtctttgacagtctgaggaataacctcaaagtacactatgatgggagacgtttctcgtacaagtccaagcatgatctggaggggaaagatcaactacttgatttgataaggtgtcaccaggagggtcttgctgttgtggaagtgaaggatgcatacccaagtgtattggaagatttgcaggctctgaaggcagcaggtgaagtttggctgttgtcaaacatggattcacaggaggacattgtttaccctaatgatccaaaagtgaagatcaaggttgatgatgacctgaaggagctcttccgtgggattgagttaccgcgtgatatggttgatatcgaaaaggagctccagaagaacggcatgaagccgatgaccgacaccacgaaacgacgagcagcagcccagatccatggcgtgaaaccaaaggctaagcctaagaagaagcaacgcgagataactaaacggaccaagctcacgaatgcccatctgcctgagctgttccaacatcttaaatcttgattgtgccgttatcagcaactccgatgtatttcgtttcatcctacctctagttaatgtcatcgattatatgtgcctgcaaccctagtttgtggttatgtgagctccaagatcttgatctgagagccctgttgtatgtagcataatctgacttggaagagtttgagattgttttttatcataatcctctcaaacctgcc

SEQ ID NO: 15453 - protein, 282 aa, Glycine max
MDLKDSLSRFKQQQERCQSSLASIAASQASTTKPKHRAQPINAPSAPARPAQPIKFSNDTERLQDINSIRKSPVGAQIKLVIELLYKTRQAFTAEQINDATYVDINGNKAVFDSLRNNLKVHYDGRRFSYKSKHDLEGKDQLLDLIRCHQEGLAVVEVKDAYPSVLEDLQALKAAGEVWLLSNMDSQEDIVYPNDPKVKIKVDDDLKELFRGIELPRDMVDIEKELQKNGMKPMTDTTKRRAAAQIHGVKPKAKPKKKQREITKRTKLTNAHLPELFQHLKS

SEQ ID NO: 15454 - DNA, 1183 bp, Glycine max
cttcctctcctcagatcgttcctcttcgtctccttcaatcactcgtaagactcttccgagacggtgtgttcgctctttgattgaatggaaagtgaagacatgcattcgaaacctgacggtgggaatcagatcgtttcagagtcggttcatcatcactccataaatagtttaaacccttggcaacgtgctgctgctgcctgcaatgcaagttctttagtggaggaagctggagataagtctatagctttggagaaccaaaacaattgggaatcaactaatggttccaagtcaccatctcataaagatgaaaatggtaacaaggaatcaccacaagtcacatcctctccccaacaatcagctggagattacagtgaaaaaagtcaagaacttgtgcatgttggcgtcacaggacctcctcaccctcaacttgttagccacacaggatgggcatcctcaaatccataccaggatccttattatgctggaatgatgggagcctatcccatggcttatgttccatatggtgggatgcctcattcaagaatgccactgcctcctgaggtggcacaggaaccagtttatgtgaatgctaaacagtaccaggcgatacttaggcgaaggcaggcacgcgccaaggcagagcttgaaatgaagctaatcaaatccagaaagccttatctccatgaatctcggcatcagcatgctatgaggaggcctaggggcactggaggccggtttgcaaagaaaacaaacaccgaagtttcacagccgaaacctggagaaaagaacaatgctactcagtccccgacgtcatctcactctgaccaacctgaagcctggaatgatgagtgtagaaaacagtctgaagagatgcaaagctcagcttctaagagaagggaagaagcagactgttcagggcaacaatggaacagcatttcctcaaaccatacttctgaagctcgtctagccatcaaatgacatctccactggcaactcattcttggctctctctttgttggcttatttggtagcagccattgaagagtcccctgtacaaatacttctgtgtttttcttcttttgtgatatgtcaaatgttactgctttcttttgtcaactctctttagcacatttttgaatcaaaaactatgtgtttaaaattaaattccaaagtgtgcaaactg

SEQ ID NO: 15455 - protein, 297 aa, Glycine max
MESEDMHSKPDGGNQIVSESVHHHSINSLNPWQRAAAACNASSLVEEAGDKSIALENQNNWESTNGSKSPSHKDENGNKESPQVTSSPQQSAGDYSEKSQELVHVGVTGPPHPQLVSHTGWASSNPYQDPYYAGMMGAYPMAYVPYGGMPHSRMPLPPEVAQEPVYVNAKQYQAILRRRQARAKAELEMKLIKSRKPYLHESRHQHAMRRPRGTGGRFAKKTNTEVSQPKPGEKNNATQSPTSSHSDQPEAWNDECRKQSEEMQSSASKRREEADCSGQQWNSISSNHTSEARLAIK

SEQ ID NO: 15456 - protein, 292 aa, Glycine max
MHSKPDGGNQIVSESVHHHSINSLNPWQRAAAACNASSLVEEAGDKSIALENQNNWESTNGSKSPSHKDENGNKESPQVTSSPQQSAGDYSEKSQELVHVGVTGPPHPQLVSHTGWASSNPYQDPYYAGMMGAYPMAYVPYGGMPHSRMPLPPEVAQEPVYVNAKQYQAILRRRQARAKAELEMKLIKSRKPYLHESRHQHAMRRPRGTGGRFAKKTNTEVSQPKPGEKNNATQSPTSSHSDQPEAWNDECRKQSEEMQSSASKRREEADCSGQQWNSISSNHTSEARLAIK

SEQ ID NO: 15457 - protein, 163 aa, Glycine max
MMGAYPMAYVPYGGMPHSRMPLPPEVAQEPVYVNAKQYQAILRRRQARAKAELEMKLIKSRKPYLHESRHQHAMRRPRGTGGRFAKKTNTEVSQPKPGEKNNATQSPTSSHSDQPEAWNDECRKQSEEMQSSASKRREEADCSGQQWNSISSNHTSEARLAIK

SEQ ID NO: 15458 - DNA, 1460 bp, Glycine max
aatttatagatcgagcgagttcaacaccttattaatttgttttgtttctttcttttgatttccttagagggagggaaagagtgacacaaacaaagcaatgaaggagaagaagagaggtttcaaagaatggttcacatcatcccaagttctattgggtatgatactagtacaaatttttcttactgggttgcagttactatcaaggatcatattggttcgtggctttttcatcttttccctcattgtatatcgtcaccttgttgctgctatttgtgttgccccctttgcattctactttgaaagaggccgcacaaagaaatatactttgaaagtttggttttggctctttgttaacgcattgacagggatggttctggctcaaggattattctattatggtttgagagatacttctgccacttactctgtcaattttctcaacttggttcctatatccaccttctttacctctatcatatttagatgggagaaattgggtctgcacacttgggcgggtagagctaagtgtggaggggcaattttgtgtgttgggggagcattagctagtctttacaaagggaaggaattttatcttggtcatcatagtcatcatgttcaaattgttgttgcggcacacaaaactcacatgcttcggggcactttccttttgatttgcagttgcttctcatacacaacatggtttattgttcaagtccaattgcttaaagtatttccactaaggtatacaggaacaatgctagcatgcattttggcagcaattcaaggaggaataataggtatttgcatagattccagaaaagctgcttggagattagagtggaatttacaattggtcactatattgtactcgggagcactagctacagctgctacattcagcctactatcttgggtaattacaatcaaaggaccaagttatcccccaatgttcaatcccctaggtcttatttttgtggccttttcagaagctatcatacttggcgaaccattaaccgttggaatgttgctaggcatgattttgatcatggtaggattatacttctttttgtggggcaaaaacaatgagactaaacgcatggttcaacaaccaattgtatcaattgcagaagtatcaaacgtgactgatttgtctactggggcagaatcagtggccacaatagtgccaaattcttcacctacaaattcagtaattctagaacttgaaaagtctgacaaaaactaaaaaaaataaataatcctttgaatgtatgagagctaaagttcaaggcagagattagaaaagtgcaatattttttaaccatagtatgtgaaaggtacaacacaatgtttaaatttaaaggattgtgttgtaaaattgatagttagctttggccttcatcacaaagtggataaaatagactaaaatgcttgacatataaattaccctactaaaatgctcg

SEQ ID NO: 15459 - protein, 381 aa, Glycine max
MKEKKRGFKEWFTSSQVLLGMILVQIFLTGLQLLSRIILVRGFFIFSLIVYRHLVAAICVAPFAFYFERGRTKKYTLKVWFWLFVNALTGMVLAQGLFYYGLRDTSATYSVNFLNLVPISTFFTSIIFRWEKLGLHTWAGRAKCGGAILCVGGALASLYKGKEFYLGHHSHHVQIVVAAHKTHMLRGTFLLICSCFSYTTWFIVQVQLLKVFPLRYTGTMLACILAAIQGGIIGICIDSRKAAWRLEWNLQLVTILYSGALATAATFSLLSWVITIKGPSYPPMFNPLGLIFVAFSEAIILGEPLTVGMLLGMILIMVGLYFFLWGKNNETKRMVQQPIVSIAEVSNVTDLSTGAESVATIVPNSSPTNSVILELEKSDKN

SEQ ID NO: 15460 - protein, 361 aa, Glycine max
MILVQIFLTGLQLLSRIILVRGFFIFSLIVYRHLVAAICVAPFAFYFERGRTKKYTLKVWFWLFVNALTGMVLAQGLFYYGLRDTSATYSVNFLNLVPISTFFTSIIFRWEKLGLHTWAGRAKCGGAILCVGGALASLYKGKEFYLGHHSHHVQIVVAAHKTHMLRGTFLLICSCFSYTTWFIVQVQLLKVFPLRYTGTMLACILAAIQGGIIGICIDSRKAAWRLEWNLQLVTILYSGALATAATFSLLSWVITIKGPSYPPMFNPLGLIFVAFSEAIILGEPLTVGMLLGMILIMVGLYFFLWGKNNETKRMVQQPIVSIAEVSNVTDLSTGAESVATIVPNSSPTNSVILELEKSDKN

SEQ ID NO: 15461 - protein, 291 aa, Glycine max
MVLAQGLFYYGLRDTSATYSVNFLNLVPISTFFTSIIFRWEKLGLHTWAGRAKCGGAILCVGGALASLYKGKEFYLGHHSHHVQIVVAAHKTHMLRGTFLLICSCFSYTTWFIVQVQLLKVFPLRYTGTMLACILAAIQGGIIGICIDSRKAAWRLEWNLQLVTILYSGALATAATFSLLSWVITIKGPSYPPMFNPLGLIFVAFSEAIILGEPLTVGMLLGMILIMVGLYFFLWGKNNETKRMVQQPIVSIAEVSNVTDLSTGAESVATIVPNSSPTNSVILELEKSDKN

SEQ ID NO: 15462 - DNA, 618 bp, Glycine max
aaatcatttacttagaaaacaattaaaacaaaaatggcgtttgcttcaaagatcatcacatgcctcctcgtccttaaggtctacatggcagctccaacagagtcacacataacgtgtgggatagtgacatccacattggctcagtgcatgggctacttgaccaacttttttccagtgccatcagactactgctgcgcggaagtcaaagcattgaatcaaatggctcagaccactccggaccgccgacaagtatgtaagtgccttaaagcagtggctaaggaaaacaaaggattcattaacatcgagcttgtgggcacactccctaccatttgtggtgtttcagttccctacccatttaatttcagcaccaattgtgacactatatcgactgccgtgtgaaggagggtagctagagatgtacgactaatcaaagttgccagctttataacctagcatcataattattctgctttccattttatgacctcattgtcttattattagtagttgtccacttcatatggtaataacgacaaaggaactccctctctctttactgtcactttaatgtatgtacacgtaccgtaccatcagggtcagggataacacttacatctt

SEQ ID NO: 15463 - protein, 121 aa, Glycine max
MAFASKIITCLLVLKVYMAAPTESHITCGIVTSTLAQCMGYLTNFFPVPSDYCCAEVKALNQMAQTTPDRRQVCKCLKAVAKENKGFINIELVGTLPTICGVSVPYPFNFSTNCDTISTAV

SEQ ID NO: 15464 - protein, 104 aa, Glycine max
MAAPTESHITCGIVTSTLAQCMGYLTNFFPVPSDYCCAEVKALNQMAQTTPDRRQVCKCLKAVAKENKGFINIELVGTLPTICGVSVPYPFNFSTNCDTISTAV

SEQ ID NO: 15465 - protein, 83 aa, Glycine max
MGYLTNFFPVPSDYCCAEVKALNQMAQTTPDRRQVCKCLKAVAKENKGFINIELVGTLPTICGVSVPYPFNFSTNCDTISTAV

SEQ ID NO: 15466 - DNA, 1759 bp, Glycine max
aacggttccctttgttttctttttttctctgctagttgagcaaaaatggaggaagcgagtcctaaaattttcattccaaacacgatccagggagtgagtgagcacgtgacggggcagattgaactgctctgggagttagtgaaagtgccattgatagtgcctctgctgaagcttggagtgtacatttgtttagcaatgtcacttatgcttttcatggagaggctctacatgggcatcgtcatcattctagtgaaactcttctggaaaaaacccgaacagcgttacaactacaagcccctccaagacgacgtcgaattgggctccttcatcttccccacggtcctaatacaaatcccaatgttcaacgaaaaagaggtttacaaggtgtccatcggagcagcttgtgggctttcatggcccagtgaccgtctcgttatccaagtcctggacgattcaactgacactgtcattaaggaaatggtggagcaagaatgtttgagatgggcaagtaaaggcatcaacataacgtaccaaataagggagaacagaacgggttacaaagctggtgcgttgaaagaaggcctcaagcgaagctatgtggagcattgcgagtacgtggcaatattcgacgcggatttcaggccagagccagactttctcaggcgagcgattccattcttggtggggaaccctgagattgccctggttcaagctcgttggaggtttgtgaatgcgaatgagtgcttgttgacaagaatgcaagagatgtcactggattatcatttcacagtagagcaagaagttgggtcagccactcatgctttctttggtttcaatgggacagcgggtatatggagaattgctgctatcaatgaagctggagggtggaaagacagaacaacggtggaggacatggatcttgctgttcgtgccagccttaggggctggaagtttttgtacctcggagaccttcaggcgaaaagtgagcttccaagtactcttagagccttccgcttccagcagcatcgatggtcttgtggtcctgctaatctattccgcaaaatggtgatggagatagtaaggaacaagaaagtaaaattctggaagaaagtgtacgttatatacagcttcttctttgttcgtaaaatcatagctcacatggtcacattcttcttctactgtgtggtgcttcccttgacaattttggtccctgaagttcgtgttccaatttggggagctgtttatattccttccatcatcaccaccctcaactcagtaggcacaccaaggtccattcatctgttgttctactggatcctttttgagaatgcgatgtcattgcaccgtacgaaggcgaccttcataggcctgctagaggccgggagagccaatgagtgggtcgttactgaaaaacttggtgactctgtcaataataagaacaaaagcaatgtcaccaaagcaatcagaaaatctcgattcaaatttggtgaaagacttcatttattggagcttggattcgctgccttcctcttcctttgtggatgctatgactatgtgcacggcaagaactactactttttgtacctcttccttcagaccataaccttctcaatcgtaggatttggctatgttggcaccattgtttagtacttgttaagctaaaatcttcagtgacttaagtttcagagtcactagtgttcatgtcttactagtttctctcctcaataaaatgcaaaaggtagggctgatttctcaagct

SEQ ID NO: 15467 - protein, 533 aa, Glycine max
MEEASPKIFIPNTIQGVSEHVTGQIELLWELVKVPLIVPLLKLGVYICLAMSLMLFMERLYMGIVIILVKLFWKKPEQRYNYKPLQDDVELGSFIFPTVLIQIPMFNEKEVYKVSIGAACGLSWPSDRLVIQVLDDSTDTVIKEMVEQECLRWASKGINITYQIRENRTGYKAGALKEGLKRSYVEHCEYVAIFDADFRPEPDFLRRAIPFLVGNPEIALVQARWRFVNANECLLTRMQEMSLDYHFTVEQEVGSATHAFFGFNGTAGIWRIAAINEAGGWKDRTTVEDMDLAVRASLRGWKFLYLGDLQAKSELPSTLRAFRFQQHRWSCGPANLFRKMVMEIVRNKKVKFWKKVYVIYSFFFVRKIIAHMVTFFFYCVVLPLTILVPEVRVPIWGAVYIPSIITTLNSVGTPRSIHLLFYWILFENAMSLHRTKATFIGLLEAGRANEWVVTEKLGDSVNNKNKSNVTKAIRKSRFKFGERLHLLELGFAAFLFLCGCYDYVHGKNYYFLYLFLQTITFSIVGFGYVGTIV

SEQ ID NO: 15468 - protein, 483 aa, Glycine max
MSLMLFMERLYMGIVIILVKLFWKKPEQRYNYKPLQDDVELGSFIFPTVLIQIPMFNEKEVYKVSIGAACGLSWPSDRLVIQVLDDSTDTVIKEMVEQECLRWASKGINITYQIRENRTGYKAGALKEGLKRSYVEHCEYVAIFDADFRPEPDFLRRAIPFLVGNPEIALVQARWRFVNANECLLTRMQEMSLDYHFTVEQEVGSATHAFFGFNGTAGIWRIAAINEAGGWKDRTTVEDMDLAVRASLRGWKFLYLGDLQAKSELPSTLRAFRFQQHRWSCGPANLFRKMVMEIVRNKKVKFWKKVYVIYSFFFVRKIIAHMVTFFFYCVVLPLTILVPEVRVPIWGAVYIPSIITTLNSVGTPRSIHLLFYWILFENAMSLHRTKATFIGLLEAGRANEWVVTEKLGDSVNNKNKSNVTKAIRKSRFKFGERLHLLELGFAAFLFLCGCYDYVHGKNYYFLYLFLQTITFSIVGFGYVGTIV

SEQ ID NO: 15469 - protein, 480 aa, Glycine max
MLFMERLYMGIVIILVKLFWKKPEQRYNYKPLQDDVELGSFIFPTVLIQIPMFNEKEVYKVSIGAACGLSWPSDRLVIQVLDDSTDTVIKEMVEQECLRWASKGINITYQIRENRTGYKAGALKEGLKRSYVEHCEYVAIFDADFRPEPDFLRRAIPFLVGNPEIALVQARWRFVNANECLLTRMQEMSLDYHFTVEQEVGSATHAFFGFNGTAGIWRIAAINEAGGWKDRTTVEDMDLAVRASLRGWKFLYLGDLQAKSELPSTLRAFRFQQHRWSCGPANLFRKMVMEIVRNKKVKFWKKVYVIYSFFFVRKIIAHMVTFFFYCVVLPLTILVPEVRVPIWGAVYIPSIITTLNSVGTPRSIHLLFYWILFENAMSLHRTKATFIGLLEAGRANEWVVTEKLGDSVNNKNKSNVTKAIRKSRFKFGERLHLLELGFAAFLFLCGCYDYVHGKNYYFLYLFLQTITFSIVGFGYVGTIV

SEQ ID NO: 15470 - DNA, 1412 bp, Glycine max
atttaaaatttgccgaagaatccaattcagcgatctccgaagagctccatttgttgcactccaattggaaaaaagaagtgaacttgcgatctgggtatccaattttcgaactctttcgatggggaatgatgcagggtcaccgcagggtccggttacgtgtgggtcgtggattcggaggcccgagaatttgaatttggtggtgttgggaaggtccagacgtggcagttcttgtccttctctcttagagattttctccttcgatcccaaaaccacttctttgtctacctctcctctgaccacttatgtgttggaagcagaggaaggtgatcctgttgccattacagttcacccaagtggggatgattttgtgtgcgctctcagcaatggtagctgcaaattgtttgagctgtatggtcgtgaaacaaacatgaagttgttggctaaggaactggctcctctacagggtattggtcctcagaaatgtatttcttttagtgttgatgggtctaaatttgctgctggcggaatggatggacatctcagaatcatggagtggcctagtatgcgtgtgattttggatgaacctagagcacacaattcagttcaggatatggattttagtctagattcagaatttctagcttcaacttctactgatggttcagcaagaatctggaagactgaagatggtgttcctttgaatactttgtctcgcaactcggatgaaaagattgaattatgtcgattttccaaggacggaaccaaaccatttttattttgctctgttcaaaaaggtgatacttctgtcactgcggtttatgatattagcacatggaataaaattgggcataagaggctgattagaaagtctgcttcagtaatgtcaattagcaatgatgggaaatacctttctctgggcagtaaagatggagacatatgtgtagttgaagtaaagaaaatgcagatataccattatagcaagagactgcacctgggtacaaatattgcatcgcttgagttctgtcccggggaaagggttgtacttacaacctcagtagaatggggagcgctggtcactaagctgactgtacctaaagattggaaagaatggcagatctatttggtgctattgggactatttttagcatcagctgttgcattttacatattctttgagaactctgattcattctggaactttcccatgggcaaagaccaaccagcaagaccaaggtttaaacctgtgttaaaagatccccagtcttatgatgatcaaaatatttgggggccagtagatatgtgatcacacagacgttcttgattttagtcttcagtgctgttttggaagctgtaactggtatcaacatttatttttattttttttattactggtatcaacatttatttaagcc

SEQ ID NO: 15471 - protein, 433 aa, Glycine max
FKICRRIQFSDLRRAPFVALQLEKRSELAIWVSNFRTLSMGNDAGSPQGPVTCGSWIRRPENLNLVVLGRSRRGSSCPSLLEIFSFDPKTTSLSTSPLTTYVLEAEEGDPVAITVHPSGDDFVCALSNGSCKLFELYGRETNMKLLAKELAPLQGIGPQKCISFSVDGSKFAAGGMDGHLRIMEWPSMRVILDEPRAHNSVQDMDFSLDSEFLASTSTDGSARIWKTEDGVPLNTLSRNSDEKIELCRFSKDGTKPFLFCSVQKGDTSVTAVYDISTWNKIGHKRLIRKSASVMSISNDGKYLSLGSKDGDICVVEVKKMQIYHYSKRLHLGTNIASLEFCPGERVVLTTSVEWGALVTKLTVPKDWKEWQIYLVLLGLFLASAVAFYIFFENSDSFWNFPMGKDQPARPRFKPVLKDPQSYDDQNIWGPVDM

SEQ ID NO: 15472 - protein, 394 aa, Glycine max
MGNDAGSPQGPVTCGSWIRRPENLNLVVLGRSRRGSSCPSLLEIFSFDPKTTSLSTSPLTTYVLEAEEGDPVAITVHPSGDDFVCALSNGSCKLFELYGRETNMKLLAKELAPLQGIGPQKCISFSVDGSKFAAGGMDGHLRIMEWPSMRVILDEPRAHNSVQDMDFSLDSEFLASTSTDGSARIWKTEDGVPLNTLSRNSDEKIELCRFSKDGTKPFLFCSVQKGDTSVTAVYDISTWNKIGHKRLIRKSASVMSISNDGKYLSLGSKDGDICVVEVKKMQIYHYSKRLHLGTNIASLEFCPGERVVLTTSVEWGALVTKLTVPKDWKEWQIYLVLLGLFLASAVAFYIFFENSDSFWNFPMGKDQPARPRFKPVLKDPQSYDDQNIWGPVDM

SEQ ID NO: 15473 - protein, 291 aa, Glycine max
MKLLAKELAPLQGIGPQKCISFSVDGSKFAAGGMDGHLRIMEWPSMRVILDEPRAHNSVQDMDFSLDSEFLASTSTDGSARIWKTEDGVPLNTLSRNSDEKIELCRFSKDGTKPFLFCSVQKGDTSVTAVYDISTWNKIGHKRLIRKSASVMSISNDGKYLSLGSKDGDICVVEVKKMQIYHYSKRLHLGTNIASLEFCPGERVVLTTSVEWGALVTKLTVPKDWKEWQIYLVLLGLFLASAVAFYIFFENSDSFWNFPMGKDQPARPRFKPVLKDPQSYDDQNIWGPVDM

SEQ ID NO: 15474 - DNA, 650 bp, Glycine max
ttatgcaccccttgtttataaatcacggtgtcctatttaattgttgtttgaattgcccttatcgaagaagtaacttcgatgcacaaccttctctgtttccaggtcagggccatatgtaaagactttggtgttgtttgtatacgtagggaaggaaaagatgttcaaaagctaatatgcagcagcgagacactgcaagaatgcagggataacatcatttcggttgatgagattgtgccaaatcagatcagttcatccagagtaagagaatgcataagaaaacatctctcaataaagtatcttacttgcgacgaagtaatcgagtacattagagagcacagactgtacatggaaactggagagagtgataccagatcatgacaatgttgcaagcctttcgaaacaaccatcgagcatggactgtgccgccttgggcttcagtgtaatgataaaatctgaactatcatcgacaagctgcgattatcatgaatgggtctgactgcctttgaagcatcatgaatggatgcaaatgtatggaccagtaggctatacacaatacttactagtagaaggttcttgaatcttccttacgttgttgtcaatgtatcggtctttcgaccaacagaatatatcgctaataaagcatttatatg

SEQ ID NO: 15475 - protein, 99 aa, Glycine max
MHNLLCFQVRAICKDFGVVCIRREGKDVQKLICSSETLQECRDNIISVDEIVPNQISSSRVRECIRKHLSIKYLTCDEVIEYIREHRLYMETGESDTRS

SEQ ID NO: 15476 - DNA, 875 bp, Glycine max
ccacgcagtttcgaatccgcaatgaaactcaaccacgtttgaaaaccatgtcaaacatccccacaacgctctcggagatttgcctcacccagtttcggcttgccatgtccatagcagacccgtggcccttctcaagaacccacccagcaagtcccaagtagcaccctcggtcctccttttcacttccattcattccaatacacaccacaccaaacacatctctctcaattcaaattaaggcacatgtccaagaaccgcggattcaacctcaggaggcgcctcatccgggtctcgaaatggatcttcaggaagatacggacgcgggctccacgcgagtaccattgcctgggtgactctcctccgtcacccatggtgaagctccttacgtggggccgcaagctgacagcgggtgccaagtcccgcttgaaagtggcgtccggatccggttatgcccaattaggaaccgatccggacccgagtgtgccgaaggggcacctggccgtgtacgtagggcagaaggacggcgagttgcaccgtgttctggtgccggtaatatacttcaaccaccctttgtttggagaattgctgaagcaggcggaggaggagttcgggttccaccacgaagggggaatcaccatcccgtgccggttcaccgagtttgaacgggtgaagacccgaattgcatccggatctcgcagaggcacccgtccgaaaagattggcctggcgctgaggactgaggtgatgctgaattgctgcccatcctgtaactcaacaaataatattgctttttaggatttttttttttcgtgttgttaattattttttttaacctcgtttaatccgtgaggtaaattttagctttcctgtttacct

SEQ ID NO: 15477 - protein, 162 aa, Glycine max
MSKNRGFNLRRRLIRVSKWIFRKIRTRAPREYHCLGDSPPSPMVKLLTWGRKLTAGAKSRLKVASGSGYAQLGTDPDPSVPKGHLAVYVGQKDGELHRVLVPVIYFNHPLFGELLKQAEEEFGFHHEGGITIPCRFTEFERVKTRIASGSRRGTRPKRLAWR

SEQ ID NO: 15478 - protein, 120 aa, Glycine max
MVKLLTWGRKLTAGAKSRLKVASGSGYAQLGTDPDPSVPKGHLAVYVGQKDGELHRVLVPVIYFNHPLFGELLKQAEEEFGFHHEGGITIPCRFTEFERVKTRIASGSRRGTRPKRLAWR

SEQ ID NO: 15479 - DNA, 860 bp, Glycine max
ctgttccaattcgttccgaaacaatcttctcaattcctttcggttattataatctgagttaaaaagaaaataggaggaggtaaagacaagcatcatgacgagcaagacaaagggtttcatgggttcccaggaggtggacatcattacccacccgctggataccctccacaacaagggtatcctccagctgggggctatccaccagctggttacccacccggtgcttaccctcctggacctggaggttatcctcctgctccgggtcacggtggctatcctcctgcaggctatcctgctcctcaccactcaggacactctagtggtggactcggaggtatgatcgctggtgcagctggtgcagccgcagcagcctatggaactcaccacgttggtcatgcatcacacaacccttacggtcatgcaggccacggaggatttggccacggaggatttggccacgttggccatgcctctcatgggtatggtggtcatggtcatggcaaattcaagcacggaaagcatggaggcaagcatggaggcaagttcaagcatggaaagcatgggaaacatggtatgtttggaggaggaggaggcaaattcaagaagtggaagtaatctaaagaaaccaccctttcattctctcctccggtagtctcatttacctgaccgatgttttctaataatcccctccaaacacattatattttaactatatcggtttagagattactggttcagaggaaataaatggagagtggtagtataatgtaaacaaaccttatggtatctgcagaagaggtttcttcaatctcttaatagcagatgccctgaaacttatctataatttggttttataatcg

SEQ ID NO: 15480 - protein, 92 aa, Glycine max
MELTTLVMHHTTLTVMQATEDLATEDLATLAMPLMGMVVMVMANSSTESMEASMEASSSMESMGNMVCLEEEEANSRSGSNLKKPPFHSLLR

SEQ ID NO: 15481 - protein, 92 aa, Glycine max
MIAGAAGAAAAAYGTHHVGHASHNPYGHAGHGGFGHGGFGHVGHASHGYGGHGHGKFKHGKHGGKHGGKFKHGKHGKHGMFGGGGGKFKKWK

SEQ ID NO: 15482 - protein, 85 aa, Glycine max
MHHTTLTVMQATEDLATEDLATLAMPLMGMVVMVMANSSTESMEASMEASSSMESMGNMVCLEEEEANSRSGSNLKKPPFHSLLR

SEQ ID NO: 15483 - DNA, 1875 bp, Glycine max
  misc_feature (1670)..(1670): n is a, c, g, or t
  misc_feature (1705)..(1705): n is a, c, g, or t
  misc_feature (1714)..(1714): n is a, c, g, or t
  misc_feature (1737)..(1737): n is a, c, g, or t
  misc_feature (1740)..(1740): n is a, c, g, or t
  misc_feature (1768)..(1768): n is a, c, g, or t
  misc_feature (1779)..(1779): n is a, c, g, or t
atttgaaaatcttgcttcccccattcatattccaactattattattattcttttcttcaattccagattgaagcttttcacatcaacaataccctttagagccccaaacccattttcccactcttcattttcgcctccttcaacaggcaatgtaaacatgagtatttgcttttctactagtcagtcctcaataaatgctgttgtcctgaaaggtcgtactccgctgctgatgagcagtaacattcatggcctttggtcccaaggaatatcgacttcaatttcttccagtttgtctcctgggaagtcagagataagtcatgttggtctttctgtttgcacaaaattgtcttgctccactgttatgggccaaacaattagaggaggtttccttggatcatgctgctccaagcaaaggggcaatcctcgattctttagttctgtagtacctcggaagaggtatcatgaaatttcattggcatgccaaactataaatatgaggcttttggtacctaaacaaaatatgatgcgcaaagttaagtgtaatttgggatcagtaagttggccgcggggatgtgcttcagttggcttaatttttggattacttgtatgtaatttaagttctgaacctgctcatgctgagtcacattctgaaaatgaaaataggaaagatgactgcaacgagtatgagtcaaatgttaaagtcttgcatgggaagaaagtttatactaactattctgtaattggaataccaggggatggaagatgcttgttccgctctgttgctcgtggggcctgtttgaggtctggaaagccccctcctaatgaaagcattcagagagagctggcagatgatttacgagccagagttgctgatgagtttatcaaaagaaaggaagagaccgaatggtttgttgaaggtgattttgatacatatgtttcacaaataaggaagcctcatgtgtggggaggtgaacccgaattgttcattgcatcacatgttttgcagatgcctatcacagtatacatgtatgataaagatgctggtggtttgatatcaattgctgagtatggtcaagagtacggcaaagaaaacccaattagagttctctaccatggctttggtcattatgatgcattagagattcctagaaggaagggtcctaagccaagactgtagcatttcatatttaaaatgtggaagagattaaagcttgtattggttcccttcagtaacattcataatgtcatctataggtcaagtttcctgaaaaccttatgccttttatgtcttggaggacgtttggtccaaggcctcagtgaacagtgatattcactttattgctgtgccatgcacacggttgtttatgttggtctgaagaaagagagcctttgacttcaggtggaccttaaaggttcaaactatccactaacttctgtaagccctttctgtgaaaggtagaaataatggtatacccttctgtctctgagtccaccactatggaggggtgcatggatcttggtactgtactgcttccattgagaaaatatatgtaatggctgacaaagctgaaagttggataattatcgagagttcattaatatcaagtacatggggggtaagttgtgtttagggaattactagtgttttaggttttacttaaccaaacttntttgtttgccctattcactttttcatctcttaaanactttcatntccctcatttgcctcacagggtntcnccatttgaatatgttgtagtcaagtgtntcacatttttntgttagtaacaaggatgggtatcaaagcaaaaatatattgtagctaactgaacttaagctaattaaaacttatcaatttgttaacattggttatgg

SEQ ID NO: 15484 - protein, 391 aa, Glycine max
FENLASPIHIPTIIIILFFNSRLKLFTSTIPFRAPNPFSHSSFSPPSTGNVNMSICFSTSQSSINAVVLKGRTPLLMSSNIHGLWSQGISTSISSSLSPGKSEISHVGLSVCTKLSCSTVMGQTIRGGFLGSCCSKQRGNPRFFSSVVPRKRYHEISLACQTINMRLLVPKQNMMRKVKCNLGSVSWPRGCASVGLIFGLLVCNLSSEPAHAESHSENENRKDDCNEYESNVKVLHGKKVYTNYSVIGIPGDGRCLFRSVARGACLRSGKPPPNESIQRELADDLRARVADEFIKRKEETEWFVEGDFDTYVSQIRKPHVWGGEPELFIASHVLQMPITVYMYDKDAGGLISIAEYGQEYGKENPIRVLYHGFGHYDALEIPRRKGPKPRL

SEQ ID NO: 15485 - protein, 339 aa, Glycine max
MSICFSTSQSSINAVVLKGRTPLLMSSNIHGLWSQGISTSISSSLSPGKSEISHVGLSVCTKLSCSTVMGQTIRGGFLGSCCSKQRGNPRFFSSVVPRKRYHEISLACQTINMRLLVPKQNMMRKVKCNLGSVSWPRGCASVGLIFGLLVCNLSSEPAHAESHSENENRKDDCNEYESNVKVLHGKKVYTNYSVIGIPGDGRCLFRSVARGACLRSGKPPPNESIQRELADDLRARVADEFIKRKEETEWFVEGDFDTYVSQIRKPHVWGGEPELFIASHVLQMPITVYMYDKDAGGLISIAEYGQEYGKENPIRVLYHGFGHYDALEIPRRKGPKPRL

SEQ ID NO: 15486 - protein, 315 aa, Glycine max
MSSNIHGLWSQGISTSISSSLSPGKSEISHVGLSVCTKLSCSTVMGQTIRGGFLGSCCSKQRGNPRFFSSVVPRKRYHEISLACQTINMRLLVPKQNMMRKVKCNLGSVSWPRGCASVGLIFGLLVCNLSSEPAHAESHSENENRKDDCNEYESNVKVLHGKKVYTNYSVIGIPGDGRCLFRSVARGACLRSGKPPPNESIQRELADDLRARVADEFIKRKEETEWFVEGDFDTYVSQIRKPHVWGGEPELFIASHVLQMPITVYMYDKDAGGLISIAEYGQEYGKENPIRVLYHGFGHYDALEIPRRKGPKPRL

SEQ ID NO: 15487 - DNA, 1119 bp, Glycine max
aattcctaagatgctgatcataattgtaataacaaagaccaatattttgtgtgtgccagtgagctagttaggtgttaaatatttgattgcaatattaatatgaaggcacagtgtgagtagtgagaaggggcattagtaaagaggatgggtagacgaccctgctgccccaaagagatcaacaaaggtgcttggtctcgagaagaagatgaaaccctctccaaatatgtttccatccatggagaaggaaaatggcagaaggttgcccaaaatgcagggttaaagcgatgtggaaagagttgcagacaaagatggttgaattatctcaagcccggtataaaaagaggccacatctctgtggatgaagaggatatgattataagacttcatcgtcttcttggtaacagataggcattgattgcaaagaggctacctggacgaacagacaatgaaatcaagaactattggaacacaaatctgtcaaagaagttacaaaaacatccaacatcatcagtttcttcacttcaacacaaacgtcatgaaaaagaaaaaaccatacaaatgcatgtatcacccgaagcaccacggcctaggagagttaatgcagttgaatacagtaaaaatttggagaatggtgggtgtggaaatagacctagtacaactcccagtccctcaaataaagtagagggtagtagtgaagaagcttcttttagtgatttcctcatccacgacattgatcaaaaccaatttttgattgctgatgattcaaactcaaaggtgccacaaatggaagaagatcaccaccacaacaacaaggtggaattaataaccaacaacagtcctagctcttcatcaccttctgatcattgtcaccatctcttgccagagaaatttgacccttttgagacccttttggatgtggagctggcttcctttcttggatttgaaaatgattgatcaagagattttatttattattattgcatgcagtgagatgaatgaaaaaaggtcaagtacttagggagtgttatagataatatcccatctatatatggaatgcctaactaattatgcatctagctatagctagatgtaatatacaaatccagggtttctttttcg

SEQ ID NO: 15488 - protein, 131 aa, Glycine max
MHVSPEAPRPRRVNAVEYSKNLENGGCGNRPSTTPSPSNKVEGSSEEASFSDFLIHDIDQNQFLIADDSNSKVPQMEEDHHHNNKVELITNNSPSSSSPSDHCHHLLPEKFDPFETLLDVELASFLGFEND

SEQ ID NO: 15489 - protein, 87 aa, Glycine max
MGRRPCCPKEINKGAWSREEDETLSKYVSIHGEGKWQKVAQNAGLKRCGKSCRQRWLNYLKPGIKRGHISVDEEDMIIRLHRLLGNR

SEQ ID NO: 15490 - protein, 78 aa, Glycine max
MKSRTIGTQICQRSYKNIQHHQFLHFNTNVMKKKKPYKCMYHPKHHGLGELMQLNTVKIWRMVGVEIDLVQLPVPQIK

SEQ ID NO: 15491 - DNA, 1334 bp, Glycine max
atgaatcttctgatcagttcggttgctgcattgctcatattggagtttttggttatgagcttctttgatcggaagctttatacctggtgctttttggcccttgggatactagcttcagtttgtggagccttttctattgaagctagccctgctgttgcaatatacacatggctcgcatgctggttcctgtctgtattcacattgatgccagctgaaattccagagaacaacaacttagtaatttttagtggggcacttataatactgatcgcaatggcttcgagatgggcgaccatcaataccactaccttttggttgtatcttaatcgagcaaacaaacaagcccctaaatcctccatgttattttccgttcaggttattttgatctcagtgtcttcaataatggtgtggttaactacatctcatcggtcccagcacaaagaactgcacccgttgcaccagttgatcaactggtgcgtagctgctatgaagcggttttctatagtgcttttgcgctggtactcatgggatggatatttcttgaatctgccaacttgttttgctctgaaggaagcaattcttcatgccacagtagccttgcggatggatcagtttatggctatgacgaaagatgcttacaactatctgatttacgaatccctctgttatttatgatcttattcaatgttgctttctttggaactggtaattttgcaagtattgcaagctttgagatctcatctgtgtacagattcatcacaatatttagtccatttcttatgacggcacttcttattttcaaattgttcattccatatatgcttgtcatatgtacatttagtgccataaccaagattgtacggattccacgtatcggttgttattttcttgtaatactgctttcagatgtgatgacaattcatttcttttttctggtccaaaacacagggagctggatggagattggcaacagcattagtcattttggaattgtgagtgcacaagtagtcttcgtgttgctgctttttgcactcacaaatatatacacaaaagatatcgaagtctcgtctcggcaattaacctcgcgaaaatttatgtgaattgatctgactttatatagattttgcagaatgtatccatttttgtagaactaacttatgggctgtgtttttacatgtggcctaagttttgggactaagctcttgtagtttatatatgttcattgtattgggtggattaacttgtttacccatgtcgtttcttagagacagaagtgcctgcttaaagacataatctggccacgacatcatgaatttgttaatgcaaattgtcgc

SEQ ID NO: 15492 - protein, 224 aa, Glycine max
MNLLISSVAALLILEFLVMSFFDRKLYTWCFLALGILASVCGAFSIEASPAVAIYTWLACWFLSVFTLMPAEIPENNNLVIFSGALIILIAMASRWATINTTTFWLYLNRANKQAPKSSMLFSVQVILISVSSIMVWLTTSHRSQHKELHPLHQLINWCVAAMKRFSIVLLRWYSWDGYFLNLPTCFALKEAILHATVALRMDQFMAMTKDAYNYLIYESLCYL

SEQ ID NO: 15493 - protein, 206 aa, Glycine max
MSFFDRKLYTWCFLALGILASVCGAFSIEASPAVAIYTWLACWFLSVFTLMPAEIPENNNLVIFSGALIILIAMASRWATINTTTFWLYLNRANKQAPKSSMLFSVQVILISVSSIMVWLTTSHRSQHKELHPLHQLINWCVAAMKRFSIVLLRWYSWDGYFLNLPTCFALKEAILHATVALRMDQFMAMTKDAYNYLIYESLCYL

SEQ ID NO: 15494 - protein, 191 aa, Glycine max
MGWIFLESANLFCSEGSNSSCHSSLADGSVYGYDERCLQLSDLRIPLLFMILFNVAFFGTGNFASIASFEISSVYRFITIFSPFLMTALLIFKLFIPYMLVICTFSAITKIVRIPRIGCYFLVILLSDVMTIHFFFLVQNTGSWMEIGNSISHFGIVSAQVVFVLLLFALTNIYTKDIEVSSRQLTSRKFM

SEQ ID NO: 15495 - DNA, 803 bp, Glycine max
acatcctaatcgaaaaaaaacctatttagtgtaagaaatagctaggttccacacagctgggttttgtactaaggcaagccattcattcggtgtgacagtccctgagactcgagagactgttgccgccggtattaattctcctcctcctcctccttcttcttcttctccccaaaaccctaatttcttctattcaccaaatcatattcatggctgaacacaacgacccaccccaagaacccacattgccctccaagcgcatgtccgatcccgacctccaagacctcccttccaaaatccccaagctcgacctcaaagaaacactacccactgcaaacgacaacgacctccaaaacgacgatgaagatgacgacgacaacgacgacgacgaggaggagcaggaggataaccgaaagggaaaggggattatgcgtgacgacaagggcaaagggaaaatgattgtagaagaagaagacgacgacgacgatgattccgacgaggatagtgctagcgacgacgacggaagcgatttctctaacgactcgctcacggaggtcgatttgaataacattctgccgtccaggactcgggggcggacggtgagttccggagtgcacattgccggtgactcggggaatgctgctgctgccgtggccgcgggcattgacgacgaagatagcgacagcgacgatagcgatgcttgaattcctgccgaggttagtgagggtttgggaggaaacggaaatggattagttctgttgttgactatgagaaagaagtgtttctttagatttttctttgagccc

SEQ ID NO: 15496 - protein, 164 aa, Glycine max
MAEHNDPPQEPTLPSKRMSDPDLQDLPSKIPKLDLKETLPTANDNDLQNDDEDDDDNDDDEEEQEDNRKGKGIMRDDKGKGKMIVEEEDDDDDDSDEDSASDDDGSDFSNDSLTEVDLNNILPSRTRGRTVSSGVHIAGDSGNAAAAVAAGIDDEDSDSDDSDA

SEQ ID NO: 15497 - protein, 147 aa, Glycine max
MSDPDLQDLPSKIPKLDLKETLPTANDNDLQNDDEDDDDNDDDEEEQEDNRKGKGIMRDDKGKGKMIVEEEDDDDDDSDEDSASDDDGSDFSNDSLTEVDLNNILPSRTRGRTVSSGVHIAGDSGNAAAAVAAGIDDEDSDSDDSDA

SEQ ID NO: 15498 - protein, 91 aa, Glycine max
MRDDKGKGKMIVEEEDDDDDDSDEDSASDDDGSDFSNDSLTEVDLNNILPSRTRGRTVSSGVHIAGDSGNAAAAVAAGIDDEDSDSDDSDA

SEQ ID NO: 15499 - DNA, 696 bp, Glycine max
accgctccagaggtcgccgccgccgccgccgcttccccgccgtcggccgctacgagaaccccagagtaaaggaagatgccttcacttcagaaagctttacctccagaacttgccgataacgcgcttagattataccgcgaatgcttaaggagggctaagttcatcggtagtcagcaacataatacagggcttcttgtttccatggtgaggcaacagttcaagaaaaacatgcatgaaactgatccagagaagatacagaaaatgaaggatgatgcggcacggggccttatcaatcacataatatatgaatccgagaagatgacgggacgtaaattctcaggttaagaaagttgaaagtagacttttggcatatgctgtacgagttgaacagcgacttgatcctatggctgttgaattatttttctcctccgacacaaggaccatctaatgcttttctttgttgttgacttaataaagcagtgttttttcgtcagttgcatttcactgtgcttctggatgtaattgacccacacatgccaagcgttagctgttttgttaaggtgtaaatcttcagcaatttcaagtgctccaatctgtgtgaaaacggatgtgttgcttgaattttcttcttctcatgatgtattgaggcagtttcaacatgttcactggttccatttccatggagctgaattgttc

SEQ ID NO: 15500 - protein, 89 aa, Glycine max
MPSLQKALPPELADNALRLYRECLRRAKFIGSQQHNTGLLVSMVRQQFKKNMHETDPEKIQKMKDDAARGLINHIIYESEKMTGRKFSG

SEQ ID NO: 15501 - protein, 48 aa, Glycine max
PLQRSPPPPPLPRRRPLREPQSKGRCLHFRKLYLQNLPITRLDYTANA

SEQ ID NO: 15502 - protein, 47 aa, Glycine max
MVRQQFKKNMHETDPEKIQKMKDDAARGLINHIIYESEKMTGRKFSG

SEQ ID NO: 15503 - DNA, 1175 bp, Glycine max
ataagtggtatagtctaggccaattcatttcactatcttctttttctccctcttctgtttccatttgagtctcctactagcacacagattattgagatccaaagatcttaactatatggtggcaagaagaatctaaagagaaacaaccaaagcttaagcaaacagtcttgtctactgttgaaaaacaggagaaaatgtcttgtaataatggaatgtcttttttcccttcaaatttcatgatccaaacctcttacgaagatctacctccttctctttcacctctccttccttcttgctctatacctcaagatcttcatgggtttgcttcgtttctaggtaagcgatctccagtagaagggttagaagctgggaacattatgaacggagaagaggattattcagatgatgggtctcaaatgggagagaagaagaggagattgaacatggagcaagtgaagacattagagaagaacttcgagcttggaaacaagcttgacccagagaggaaaatgcagttggctcgtgccttgggtttacagccaagacagatagcgatttggtttcagaacagaagagctcgctggaaaacaaagcagcttgagaaagattatgatacacttaaacgacagtttgattcccttaaagctgaaaacgatcatcttcaaactcacaaccagaaactccaagctgagataatgagttcaaggaacagagaacaaacagaatcaataaatctgaacaaagaaacagaaggatcttgcagtaacagaagcgacaacagttccgataatttcaggctggacatctcgacggctgtgccatcagtagacagcacaataacaggcggccatccaccagcgccacagactgttggtcgacacttctttccaccagcgaccgcgacgaccaccacaacgactatgcaattctttcaaaactcgtcttctggtcagagtatggttaaagaagaaaacagtatcagtaacatgttctgtgcaatggatgaccactcaggtttttggccatggcttgatcagcaacagtacaactgaaactggtcgacctgtttttatttctttcaaagtttttatatattttgttttgtttttttgttttgatatcagaaagaacatgcatgtttcaaaaacttggaatctatcattcacttttgagtt

SEQ ID NO: 15504 - protein, 285 aa, Glycine max
MSCNNGMSFFPSNFMIQTSYEDLPPSLSPLLPSCSIPQDLHGFASFLGKRSPVEGLEAGNIMNGEEDYSDDGSQMGEKKRRLNMEQVKTLEKNFELGNKLDPERKMQLARALGLQPRQIAIWFQNRRARWKTKQLEKDYDTLKRQFDSLKAENDHLQTHNQKLQAEIMSSRNREQTESINLNKETEGSCSNRSDNSSDNFRLDISTAVPSVDSTITGGHPPAPQTVGRHFFPPATATTTTTTMQFFQNSSSGQSMVKEENSISNMFCAMDDHSGFWPWLDQQQYN

SEQ ID NO: 15505 - protein, 279 aa, Glycine max
MSFFPSNFMIQTSYEDLPPSLSPLLPSCSIPQDLHGFASFLGKRSPVEGLEAGNIMNGEEDYSDDGSQMGEKKRRLNMEQVKTLEKNFELGNKLDPERKMQLARALGLQPRQIAIWFQNRRARWKTKQLEKDYDTLKRQFDSLKAENDHLQTHNQKLQAEIMSSRNREQTESINLNKETEGSCSNRSDNSSDNFRLDISTAVPSVDSTITGGHPPAPQTVGRHFFPPATATTTTTTMQFFQNSSSGQSMVKEENSISNMFCAMDDHSGFWPWLDQQQYN

SEQ ID NO: 15506 - protein, 271 aa, Glycine max
MIQTSYEDLPPSLSPLLPSCSIPQDLHGFASFLGKRSPVEGLEAGNIMNGEEDYSDDGSQMGEKKRRLNMEQVKTLEKNFELGNKLDPERKMQLARALGLQPRQIAIWFQNRRARWKTKQLEKDYDTLKRQFDSLKAENDHLQTHNQKLQAEIMSSRNREQTESINLNKETEGSCSNRSDNSSDNFRLDISTAVPSVDSTITGGHPPAPQTVGRHFFPPATATTTTTTMQFFQNSSSGQSMVKEENSISNMFCAMDDHSGFWPWLDQQQYN

SEQ ID NO: 15507 - DNA, 1389 bp, Glycine max
  misc_feature (1007)..(1007): n is a, c, g, or t
  misc_feature (1016)..(1016): n is a, c, g, or t
  misc_feature (1045)..(1045): n is a, c, g, or t
  misc_feature (1174)..(1174): n is a, c, g, or t
  misc_feature (1325)..(1325): n is a, c, g, or t
  misc_feature (1342)..(1342): n is a, c, g, or t
  misc_feature (1352)..(1352): n is a, c, g, or t
tacttaagttttgctggttgtgtgtgtgttttttgttcttggtcgagccttgtactgattaacgagaatggacaaggaagtggagcttggttcccttgaaggtgaaatggccacccagcacatttcacaaccacagaagcgcaagggtggtcttgttaccatgcctttcatcattgcaaatgaggcacttgcgagggtggcaagtttgggccttttgcccaacatgatactgtatttgatggggacctacaggcttcaccttgcccaagcaacccagatacttctctggtcccatgctaccagcaatttcacacctgtggtgggtgctttcattgctgattcttatctgggtcgattcctcgctgttgggttgggttcggccatcacttttctgggaatgacactgctgtggttaacagctatgatcccacaggcacggcctcccacttgcagtagcaataaagctggaggctgtaaatcggcaacaggagggcaaatggcaatcttaatctctgcccttgctctcatgtctgttggaaatggtggtctttcatgctccttagcatttggtgcagaccaggtgaacagaaaagataaccccaacaacagaagggtcttggaaatattcttcagctggtattatgcttctgctgctatttctgtcataattgctctcacaggaatagtttatatccaagatcatcttggatggaaagtgggttatggagttccagcagcactcatgcttttatctactgtctccttcctccttgcctctccactttatgtaaagaataaagtagaatccagcttgttcacaggatttgtacaagtgattgttgttgcctacaagaacagaaaacttccattaccaccaaacaactcccctgaacattaccatcataagaaggagtcagaccttgtcgttccaaccgataaactaagtttcctgaatagagcctgtgttatcaaagatcgggaacaagaaatagcctcggatggttcancatcaaatntatggaaactctgcacagtagatcaagtngaggaactaaaagccattattaaagtgattcccttgtggtctacagggatcatgatgtcagttaacattggaggctcatttggattgctgcaagctaagtccctggacagacacatcacctcacacttncaagtgccacctggctcttttagtgtagtcatggtacttacaatatttttatggatagctctctatgaccgagccattcttcctttagcatcaaagataagaggcaaaccggttaggatcagtgcaaagagaagaatgggacttggcttgnttttctcttttatccanttggtaactncggctattgtcgaatccgtaaggcgaaggaaagcaat

SEQ ID NO: 15508 - protein, 440 aa, Glycine max
  misc_feature (314)..(314): Xaa can be any naturally occurring amino acid
  misc_feature (317)..(317): Xaa can be any naturally occurring amino acid
  misc_feature (326)..(326): Xaa can be any naturally occurring amino acid
  misc_feature (369)..(369): Xaa can be any naturally occurring amino acid
  misc_feature (420)..(420): Xaa can be any naturally occurring amino acid
  misc_feature (425)..(425): Xaa can be any naturally occurring amino acid
  misc_feature (429)..(429): Xaa can be any naturally occurring amino acid
MDKEVELGSLEGEMATQHISQPQKRKGGLVTMPFIIANEALARVASLGLLPNMILYLMGTYRLHLAQATQILLWSHATSNFTPVVGAFIADSYLGRFLAVGLGSAITFLGMTLLWLTAMIPQARPPTCSSNKAGGCKSATGGQMAILISALALMSVGNGGLSCSLAFGADQVNRKDNPNNRRVLEIFFSWYYASAAISVIIALTGIVYIQDHLGWKVGYGVPAALMLLSTVSFLLASPLYVKNKVESSLFTGFVQVIVVAYKNRKLPLPPNNSPEHYHHKKESDLVVPTDKLSFLNRACVIKDREQEIASDGSXSNXWKLCTVDQXEELKAIIKVIPLWSTGIMMSVNIGGSFGLLQAKSLDRHITSHXQVPPGSFSVVMVLTIFLWIALYDRAILPLASKIRGKPVRISAKRRMGLGLXFSFIXLVTXAIVESVRRRKA

SEQ ID NO: 15509 - protein, 427 aa, Glycine max
  misc_feature (301)..(301): Xaa can be any naturally occurring amino acid
  misc_feature (304)..(304): Xaa can be any naturally occurring amino acid
  misc_feature (313)..(313): Xaa can be any naturally occurring amino acid
  misc_feature (356)..(356): Xaa can be any naturally occurring amino acid
  misc_feature (407)..(407): Xaa can be any naturally occurring amino acid
  misc_feature (412)..(412): Xaa can be any naturally occurring amino acid
  misc_feature (416)..(416): Xaa can be any naturally occurring amino acid
MATQHISQPQKRKGGLVTMPFIIANEALARVASLGLLPNMILYLMGTYRLHLAQATQILLWSHATSNFTPVVGAFIADSYLGRFLAVGLGSAITFLGMTLLWLTAMIPQARPPTCSSNKAGGCKSATGGQMAILISALALMSVGNGGLSCSLAFGADQVNRKDNPNNRRVLEIFFSWYYASAAISVIIALTGIVYIQDHLGWKVGYGVPAALMLLSTVSFLLASPLYVKNKVESSLFTGFVQVIVVAYKNRKLPLPPNNSPEHYHHKKESDLVVPTDKLSFLNRACVIKDREQEIASDGSXSNXWKLCTVDQXEELKAIIKVIPLWSTGIMMSVNIGGSFGLLQAKSLDRHITSHXQVPPGSFSVVMVLTIFLWIALYDRAILPLASKIRGKPVRISAKRRMGLGLXFSFIXLVTXAIVESVRRRKA

SEQ ID NO: 15510 - protein, 409 aa, Glycine max
  misc_feature (283)..(283): Xaa can be any naturally occurring amino acid
  misc_feature (286)..(286): Xaa can be any naturally occurring amino acid
  misc_feature (295)..(295): Xaa can be any naturally occurring amino acid
  misc_feature (338)..(338): Xaa can be any naturally occurring amino acid
  misc_feature (389)..(389): Xaa can be any naturally occurring amino acid
  misc_feature (394)..(394): Xaa can be any naturally occurring amino acid
  misc_feature (398)..(398): Xaa can be any naturally occurring amino acid
MPFIIANEALARVASLGLLPNMILYLMGTYRLHLAQATQILLWSHATSNFTPVVGAFIADSYLGRFLAVGLGSAITFLGMTLLWLTAMIPQARPPTCSSNKAGGCKSATGGQMAILISALALMSVGNGGLSCSLAFGADQVNRKDNPNNRRVLEIFFSWYYASAAISVIIALTGIVYIQDHLGWKVGYGVPAALMLLSTVSFLLASPLYVKNKVESSLFTGFVQVIVVAYKNRKLPLPPNNSPEHYHHKKESDLVVPTDKLSFLNRACVIKDREQEIASDGSXSNXWKLCTVDQXEELKAIIKVIPLWSTGIMMSVNIGGSFGLLQAKSLDRHITSHXQVPPGSFSVVMVLTIFLWIALYDRAILPLASKIRGKPVRISAKRRMGLGLXFSFIXLVTXAIVESVRRRKA

SEQ ID NO: 15511 - DNA, 635 bp, Glycine max
gatgaagaccgaatccccgcgtcatcttcgtaaccctctgctcgtcctcctcttcctcgcagcagcagcagcagcgtcggcagcccccgtcgtccagatcgccatggcggccgagccggagcaggcgcccgcggcgcaggaggcggccgtgcacatcgtctacgtggaccgccccgaggacgccgaccccgaggagttccacatccgcacccttgcccccgtcctcggcagcgaggagaaggccaggggcgcggtcctctaccactacaagcacgccgccagcggattctccgcaaagctcaccaccgagcaggtcgaggacctcaagaagcaaccaggtgtccttcaggttgtgccgagccagacctaccagctccatggaaatgagggtggacatgccagcacaacccgcaccatgggccttatgtgaaagccccgggtaggctctgttcttctaatgtgggaatggtcgcatctcatggctgtaacctaagaataagagatgtatccacttgactttgaagggatccagttcctgaagtgtgtaaatgtaatgaattaatgcatgatggcgaacaaatgtgctgatctaatctcgtttggctacaagtttgaattaatgtgatggcaaactc

SEQ ID NO: 15512 - protein, 142 aa, Glycine max
MKTESPRHLRNPLLVLLFLAAAAAASAAPVVQIAMAAEPEQAPAAQEAAVHIVYVDRPEDADPEEFHIRTLAPVLGSEEKARGAVLYHYKHAASGFSAKLTTEQVEDLKKQPGVLQVVPSQTYQLHGNEGGHASTTRTMGLM

SEQ ID NO: 15513 - protein, 108 aa, Glycine max
MAAEPEQAPAAQEAAVHIVYVDRPEDADPEEFHIRTLAPVLGSEEKARGAVLYHYKHAASGFSAKLTTEQVEDLKKQPGVLQVVPSQTYQLHGNEGGHASTTRTMGLM

SEQ ID NO: 15514 - DNA, 1007 bp, Glycine max
cctttcccccctcccgttccaactttattgtgtttaacaacctagaacatcctaatcgaaaaacaacccaccccacgtattccccgcacctttcccccctcccccggcctcggcaagaccgcgcgcggcgcgccatgacgagctccgcctcctcctccccttcccgcaaggtgctgagcaagatcgcgtgcctccggctgcagaaggagctcggggagtggcaggccagccctcccggcggcttcacctacaaggtctccgacaacctccagcggtgggtcatcgaggtgtccggggcggaggggacgctctacgccggcgagacgtaccggctgcaggttgacttcccggagcagtaccccatggaggctccacaggttatatttatgcatccggcgccgatgcatccgcacatttacagcaatgggcacatctgtctagatatattgtacgactcgtggtcaccagcaatgacggtcagttccgtgtgcatcagcatcttgtccatgttgtcaagttcaccagcgaaggaacgcccatccgataacgatcgctatgtcaggaactgccgcaacgggaggtctccgaaggagacgaggtggtggtttcatgatgacaaagtgtgatgcgctccagctggtttcttcttccggcatcagcagctcttacacatcatcctgcctaccgtagtatggcgtgcgtcgttcatgaaaagattatttaggcaaatatttcaagccatctatttggcggcaaattgacatgcccatgtatgtggttttgtacatgatgaatctgcacctgtatcaactcccgtgcttaccaactcttatcccttttgatatgatgaaagtagtaatcgagtgttttatcttaacaaaaaaaaaaaaaaaaaaaaaaaaaaaaaaaaaaaaaaaaaaaaaaaaaaaaaaaaaaaaaaaaaaaaaagaaaaaaaaaaaaaaaaaggtttatcgatcccgccaacctcaagggggggcccggaacc

SEQ ID NO: 15515 - protein, 207 aa, Glycine max
FPPSRSNFIVFNNLEHPNRKTTHPTYSPHLSPLPRPRQDRARRAMTSSASSSPSRKVLSKIACLRLQKELGEWQASPPGGFTYKVSDNLQRWVIEVSGAEGTLYAGETYRLQVDFPEQYPMEAPQVIFMHPAPMHPHIYSNGHICLDILYDSWSPAMTVSSVCISILSMLSSSPAKERPSDNDRYVRNCRNGRSPKETRWWFHDDKV

SEQ ID NO: 15516 - protein, 163 aa, Glycine max
MTSSASSSPSRKVLSKIACLRLQKELGEWQASPPGGFTYKVSDNLQRWVIEVSGAEGTLYAGETYRLQVDFPEQYPMEAPQVIFMHPAPMHPHIYSNGHICLDILYDSWSPAMTVSSVCISILSMLSSSPAKERPSDNDRYVRNCRNGRSPKETRWWFHDDKV

SEQ ID NO: 15517 - DNA, 1428 bp, Glycine max
gaacatcctaatcgaaaaattttttttcccttatttttcttaaatatttttatggctccggagtcaaaagttcctggagcaagtagaaagaagaaagcgagtgacgagggaaacgtttaaaccatatatgttttgttgtttctagctccattctatagcaatggccacgtctgttcttagtcctcctttctttcatcctctgcatcaacttcaattctcgaaatgcccccgcctttcttctaaatcccactttcgccctcgcctcctccgctccatatcccaaagaaccattcgcgctatctccgcagttgccgcagaatcagagttaggtacacagcaggatcatgcaattgaagcagacatctttgcttgccctgtatgttatgaaccattgataagaaaaggtccttctggccttaacttgtctggtttcatgtgtaagagatgtaagaagacatattctagcaaagataggtatctggatctgactgtaactgctggattgagagactacactgaaattcaacctgctcggactgagcttttcaggagtcccctggtttcattcttgtatgaaagaggttggcgtcagaatttcaggcaaagtggctttcctggtcctgatgaagagttcaaaatggctcaagagtactttgaatctgctgaaggtggacttcttgttgatgttagctgtggtagtggtttattttcccgaaaattcgccaaatctggaacatattcgggagtcatagcactagatttttctgagaatatgcttcgtcaatgttatgatttcattgagaaagataacacactttcaacaaataatattgctcttgtaagggcagatgtttctagacttcccttctcatcaggttcggttgatgctgttcatgctggtgcagctttgcattgctggccatctccctccaatgctgttgctgaaatcacccggacactaaaaaatggtggagtatttgttgggagcacttttctgcgttatagttcaaaaactccctggtttttacgccctttcagggagaggactccacaaggctatggctatctaacagaggaagagatcaaagacctttgcacctcatgtggtcttaccaattactcaagcaaaattcagcaggcttttattatgttcacagctcagaagccataaaactgggtctgatctatttataacattgattctccactgcattttatcaattccttctgtatgtatgtattgtatcacttgtttcatctgtaaagaagaaattgtaaataaatgagaaatgaaaaggtcaaaacctgagtccggtgtgttcgcaggttgtaaaatgcatcgtgtatcagtgcctaataatatatccaaattctgacaatttttgtaaagaatatatattttgttggcttaaatatatttttggttct

SEQ ID NO: 15518 - protein, 336 aa, Glycine max
MATSVLSPPFFHPLHQLQFSKCPRLSSKSHFRPRLLRSISQRTIRAISAVAAESELGTQQDHAIEADIFACPVCYEPLIRKGPSGLNLSGFMCKRCKKTYSSKDRYLDLTVTAGLRDYTEIQPARTELFRSPLVSFLYERGWRQNFRQSGFPGPDEEFKMAQEYFESAEGGLLVDVSCGSGLFSRKFAKSGTYSGVIALDFSENMLRQCYDFIEKDNTLSTNNIALVRADVSRLPFSSGSVDAVHAGAALHCWPSPSNAVAEITRTLKNGGVFVGSTFLRYSSKTPWFLRPFRERTPQGYGYLTEEEIKDLCTSCGLTNYSSKIQQAFIMFTAQKP

SEQ ID NO: 15519 - protein, 245 aa, Glycine max
MCKRCKKTYSSKDRYLDLTVTAGLRDYTEIQPARTELFRSPLVSFLYERGWRQNFRQSGFPGPDEEFKMAQEYFESAEGGLLVDVSCGSGLFSRKFAKSGTYSGVIALDFSENMLRQCYDFIEKDNTLSTNNIALVRADVSRLPFSSGSVDAVHAGAALHCWPSPSNAVAEITRTLKNGGVFVGSTFLRYSSKTPWFLRPFRERTPQGYGYLTEEEIKDLCTSCGLTNYSSKIQQAFIMFTAQKP

SEQ ID NO: 15520 - protein, 177 aa, Glycine max
MAQEYFESAEGGLLVDVSCGSGLFSRKFAKSGTYSGVIALDFSENMLRQCYDFIEKDNTLSTNNIALVRADVSRLPFSSGSVDAVHAGAALHCWPSPSNAVAEITRTLKNGGVFVGSTFLRYSSKTPWFLRPFRERTPQGYGYLTEEEIKDLCTSCGLTNYSSKIQQAFIMFTAQKP

SEQ ID NO: 15521 - DNA, 883 bp, Glycine max
  misc_feature (718)..(718): n is a, c, g, or t
  misc_feature (720)..(720): n is a, c, g, or t
aacagagcaaaacaaaaacaatttcaagccaattgtaccattagttaagagtttaccaactcttactccttttaaatactcatattttgtagcaatggacttgctggcaactttgactgctgacaagccagtggtgatcttcagcaagagcacttgtgccattagccattctgtgaaagctctcatatgcagctttggtgccaaccctacggttatcgagattgacaaaatgacaaatggtcagcaaatagagagggcactgattcaggttggttgccacccaactgtaccagcagtgttcattggacaacaacttataggtggtgctgacgaagtcatatgcctcaacgtccaaaacaggcttgcccagttgcttttgagggctagagctatatttatctggagttcatagccatgcaatgcaaaatcacctcagaggatcaaacaagaggctctaatcttcttaaagctaataatattactacatagttcctagctatgactactatatatcagaaggtttagtaacagagcttctagtctgtttgtactcttaattcttcgtttcttgttctggtgcactatgtcattctcaatttttgtataatgtaagtcaagcctatgctagacatgactgtcagccatggcatgcacgtgttatcaaatgcaactatgcaaggctcagttataaaatgaaatatattctgattttcataananaaaaaaaaaaaaaaaaaaaaaaaaaaaaaaaaaaaatttaaaaaaaaaaaaaaaaaaaaaaaaaaaaaaaaaaaaggaaaaaaaaaaaaaaaaaggtttatcaataccgccaaccccaaggggggccccggaacccaattcccccaaaaggaagccaaataac

SEQ ID NO: 15522 - protein, 136 aa, Glycine max
TEQNKNNFKPIVPLVKSLPTLTPFKYSYFVAMDLLATLTADKPVVIFSKSTCAISHSVKALICSFGANPTVIEIDKMTNGQQIERALIQVGCHPTVPAVFIGQQLIGGADEVICLNVQNRLAQLLLRARAIFIWSS

SEQ ID NO: 15523 - protein, 105 aa, Glycine max
MDLLATLTADKPVVIFSKSTCAISHSVKALICSFGANPTVIEIDKMTNGQQIERALIQVGCHPTVPAVFIGQQLIGGADEVICLNVQNRLAQLLLRARAIFIWSS

SEQ ID NO: 15524 - DNA, 601 bp, Glycine max
acatcctaatcgaaaaaagcaagatctacctagcaattgtttatcaattaaggtttctaagagaaagtacgtgtttggaaaatgggttccaagggtgtttcccttctcctgttcctcaacctccttttcttttccatgattagctcaagcagcagctacaaatcaccaccaccaccaccaccttgtaatgtcccttctcctgtaacaccaccacccccaacaccctctggcacaccagcaccaccaccccctgtcctctctccaccaccacctaactcatcatcaccgccgccaccacccccccctgtcctctctccaccaccaccaactaactcatcatcaccgccaccaccaacaccccctgtcctctctccaccaccacctccccctatcctctctccaccaccaccaactaactcatcatcaccgccaccaccaccaccccctgtcctctctccaccaccacccccccctgtcctctctccaccaccaccaactaactcatcatcaccgccaccaccaccaccccctgtcctctctccaccaccacctcctcgttgtcccgatctaagtgtttgcatcaatatttttccaaggccac

SEQ ID NO: 15525 - protein, 173 aa, Glycine max
MGSKGVSLLLFLNLLFFSMISSSSSYKSPPPPPPCNVPSPVTPPPPTPSGTPAPPPPVLSPPPPNSSSPPPPPPPVLSPPPPTNSSSPPPPTPPVLSPPPPPPILSPPPPTNSSSPPPPPPPVLSPPPPPPVLSPPPPTNSSSPPPPPPPVLSPPPPPRCPDLSVCINIFPRP

SEQ ID NO: 15526 - protein, 155 aa, Glycine max
MISSSSSYKSPPPPPPCNVPSPVTPPPPTPSGTPAPPPPVLSPPPPNSSSPPPPPPPVLSPPPPTNSSSPPPPTPPVLSPPPPPPILSPPPPTNSSSPPPPPPPVLSPPPPPPVLSPPPPTNSSSPPPPPPPVLSPPPPPRCPDLSVCINIFPRP

SEQ ID NO: 15527 - DNA, 881 bp, Glycine max
atcgaaaaacaccaaacaacacactaacatacacatcatctcctctctcttctcttatcttctccgctatgaagctcgccactagcctcagctccaagttcctccgcctcagccctaaacgtatcttccgcgccaagtccaagtcctcctccgtctccagatccgaaccttcttccttcagctccggtgcttcatccgacggctcctacagcgacctcaagccaggtcccgccgccactcccgtcagtgtcctccccggagaacaagatttttactccgagctgatacaggcctttaagctcatagaccgcgacgacgacggtgtggtttcaagaaaagaactagctgcgctgcttagcgggctcagtcctgagcctccgagtcaagaagaggttactctgatgcttcaagaagtcgatggaggaggagacggttgtatcagcctcgaggagcttgctagccgcgtggcgggatcctcctctgactctgatgaaagctcggtcgagatgagagaggtgtttgagttttttgacgtggatcacgacgggaggatatcggcggaggagcttcatagagtttttggagttatcggagacgagcggtgcacgttagaggagtgtgtgcgtatgatagcgacggttgatgggaacggtgacggttttgtttgctttgatgacttttgccgcatgatggaagcttcaggctccagcgatgagtgatcatcattgagtcatgtttgtatgattgatgataatgacatcgttatgctctcctttgtttacacattattttttactattactgtaatttgggtataattttgtcacggcaaagcacttcaaatttttaccgtcaagaatcaatcaatcactataccagtg

SEQ ID NO: 15528 - protein, 238 aa, Glycine max
RKTPNNTLTYTSSPLSSLIFSAMKLATSLSSKFLRLSPKRIFRAKSKSSSVSRSEPSSFSSGASSDGSYSDLKPGPAATPVSVLPGEQDFYSELIQAFKLIDRDDDGVVSRKELAALLSGLSPEPPSQEEVTLMLQEVDGGGDGCISLEELASRVAGSSSDSDESSVEMREVFEFFDVDHDGRISAEELHRVFGVIGDERCTLEECVRMIATVDGNGDGFVCFDDFCRMMEASGSSDE

SEQ ID NO: 15529 - protein, 216 aa, Glycine max
MKLATSLSSKFLRLSPKRIFRAKSKSSSVSRSEPSSFSSGASSDGSYSDLKPGPAATPVSVLPGEQDFYSELIQAFKLIDRDDDGVVSRKELAALLSGLSPEPPSQEEVTLMLQEVDGGGDGCISLEELASRVAGSSSDSDESSVEMREVFEFFDVDHDGRISAEELHRVFGVIGDERCTLEECVRMIATVDGNGDGFVCFDDFCRMMEASGSSDE

SEQ ID NO: 15530 - DNA, 541 bp, Glycine max
acatctttcccgacaatggcttcagcttcaccgacagctactcttctcaaacccaatcctcctcctccgccgcataaaccgaccgtcatcaccgcctccctccgtcgccagcttctgccgccgaagacgaagagtacgtgaaggatacgtcggcggtgatctctaaagttcgaacgacgctctcgatggagaggacggatccgaacgtggcggacacggtggcggagctgagagaggcgtcgaactcgtgggtggcgaagtacaggaaagagaaagcgctgctggggaaagcgtcgttcagggacatgtacgcggcgttgaacgcagtgtcgggacattacgtgagctttggaccgacggctccgataccggcgaagaggaaggcgaggattcttgaagagatggagactgctgagaaagctctttcaagaggaagataaaatttacagtaacacagttattcttgttgttgatagaatttcattttcacaaaaatgcctatcgaattatttatgagaagataaatttgaatttgctcaag

SEQ ID NO: 15531 - protein, 84 aa, Glycine max
MERTDPNVADTVAELREASNSWVAKYRKEKALLGKASFRDMYAALNAVSGHYVSFGPTAPIPAKRKARILEEMETAEKALSRGR

SEQ ID NO: 15532 - protein, 54 aa, Glycine max
HLSRQWLQLHRQLLFSNPILLLRRINRPSSPPPSVASFCRRRRRVREGYVGGDL

SEQ ID NO: 15533 - protein, 46 aa, Glycine max
TSFPTMASASPTATLLKPNPPPPPHKPTVITASLRRQLLPPKTKST

SEQ ID NO: 15534 - DNA, 1900 bp, Glycine max
tcctaatcgaaaaaactactctcagacatcagtttggtactttactcattgttgttcatttatcactgagcttccttccttgttctctcgctaaccactctctcatcaatcaaaggtactcattgtgggaatacaatgccctccacttcctttagcaatggatggaaatatgatgttttcctcaacttcagaggctctgatactcgctatggttttactggtcatctctacaaagctctgtgtgatggaaaagtccgcaccttcattgatgatgaggagcttcaaagaggagaacagatcacaccatcactcttgaaggcaattgaagagtccaggattttcatccccgtgttctctaacaactatgcctcttccacttcttgcttagatgaacttgtccacatctttgcctgtgttaagaaaaagagtagattagtttttccggttttttatgaggttgatccttctcatgtgagacatcagacaggtagctatgaagaagcactgaataaccataagaagaggtttgatggtgaccaagagaaattgaaggaatggagggttgctctggctcaagcagctaacttgtcgggctatcatttcaaacaggggaaggaagaatatgaatatgactttattgcgaagatcgttgaagaggtttctcaaaaaattaatcgcactcttttgcatgttgcggatttccccgttggactggagtatcgtatgcaagacgtaaactcacttgtgaatattgaatctggtggagtccacatgataggaatccatggagttggcggagtaggcaaatcaacacttgctcgagcaatttataatttgattgccgatcaaagggtattgttttcttaatgtgagagaatactcaatgcaaaatggattggtgcatctccaaaagaaacttctttctaaaacaattggagagaagggtattaagttaggaggtgtcaatgaaggaattccaataataaagcataggctccacttaatgaagattcttttggttcttgatgatgtcgatgatctagatcagttgcgggcaattgctggagggacagactggtttggttctggtagcaggatcatcattaccacccgagacaggcatttactaacttgccatggggttaaaaataaatatgaggtacatgggttaaataaagaagaagctcttaaattgcttacctggagtgcttttaaaattgataaagtggatccatgttacgtcaacattttaaaccgtgtagtaacttatacttctggccttccattggctttggaagtaataggttccaacttgtctggaaaaaggaaagaagtatgggaatctgccctagatcagtatgaaagaattccagataaaaagattcaagacatacttaaagtaagttttgattctttacaagaagatgagcataaaatttttcttgatattgcttgttgcttcaaaggatatgattttacatatgttaaagaagtactttttatccatcatggtttttgccctgaatatgctataggagtgttgattgacaaatctctcctatgtcgacggtccagttacttgacaatgcatgacttgatagaggacatgggtaaagaaattgtaagacaggaatctccaggagagccaggcaaacgcagtaggttatggttgcatgaagatatagttcaagtcttagaagaaaatgaggtatgactaagatatatataattggttttgtttttcaaatttaacctttatttctcatgattatgtgctagatgcctggatgattgtataatcactcctatgtctccaatctttcattgacaatgatattttgctattttatgctttctttatatgatatgtaatcttcttcacatatgtttgtaaaattcc

SEQ ID NO: 15535 - protein, 276 aa, Glycine max
MQNGLVHLQKKLLSKTIGEKGIKLGGVNEGIPIIKHRLHLMKILLVLDDVDDLDQLRAIAGGTDWFGSGSRIIITTRDRHLLTCHGVKNKYEVHGLNKEEALKLLTWSAFKIDKVDPCYVNILNRVVTYTSGLPLALEVIGSNLSGKRKEVWESALDQYERIPDKKIQDILKVSFDSLQEDEHKIFLDIACCFKGYDFTYVKEVLFIHHGFCPEYAIGVLIDKSLLCRRSSYLTMHDLIEDMGKEIVRQESPGEPGKRSRLWLHEDIVQVLEENEV

SEQ ID NO: 15536 - protein, 243 aa, Glycine max
MPSTSFSNGWKYDVFLNFRGSDTRYGFTGHLYKALCDGKVRTFIDDEELQRGEQITPSLLKAIEESRIFIPVFSNNYASSTSCLDELVHIFACVKKKSRLVFPVFYEVDPSHVRHQTGSYEEALNNHKKRFDGDQEKLKEWRVALAQAANLSGYHFKQGKEEYEYDFIAKIVEEVSQKINRTLLHVADFPVGLEYRMQDVNSLVNIESGGVHMIGIHGVGGVGKSTLARAIYNLIADQRVLFS

SEQ ID NO: 15537 - protein, 236 aa, Glycine max
MKILLVLDDVDDLDQLRAIAGGTDWFGSGSRIIITTRDRHLLTCHGVKNKYEVHGLNKEEALKLLTWSAFKIDKVDPCYVNILNRVVTYTSGLPLALEVIGSNLSGKRKEVWESALDQYERIPDKKIQDILKVSFDSLQEDEHKIFLDIACCFKGYDFTYVKEVLFIHHGFCPEYAIGVLIDKSLLCRRSSYLTMHDLIEDMGKEIVRQESPGEPGKRSRLWLHEDIVQVLEENEV

SEQ ID NO: 15538 - DNA, 1104 bp, Glycine max
aaaaaggacctatatgttaggccataactagcctgcactttgaaatctatttcagtttgaattttgaaagtgagtgtggcgtaccgtgtacgtatctgcagaaagtgaatgaatggtaatgggggaagaagggtgcaaggtatgtgttacaggaggcagtggttacattggttcctggctcatcaagaagctactggccaagggctacacagttcatgcaactctcagagacttgaagaatgagtcaaaggttggcctcttaaagagccttccacaatcagaaggaaaactggtgctgtttgaagctgatatttacaacccaaatgattttgaccttgcaattgaaggctgcaagtttgtgtttcatgttgctactcccatgatccatgaacctggctcccagggctatacttattcaaagacactgtcggagagacatgtgctgagctacgggaacgaagaaaatggtggaggaatggaggtggtaacactcacttgtggactagtgggaggtgacacccttctatcttctacacccgctagcggagtagtttgtatcgctcagatcatgcagaatgaaagggcgtacatatcactcaagttcctaaaggaattgttggggaaaattcctcttgtacacgttgatgatgtctgtgaagctcatattttctgcatggaaagcacctcgatcagtggaagattcttgtgtgcaagttcatatatttcattagaagagatggctaatcattacgctcttcattatccagaattcaatgtgaaacaagaatatgaagatgggctgaagaaggatatcaagtgggcctcaacaaagctgtgtgacaaaggctttgtatacaaatatgacgccaagatgctattggatgattgtatcaaatgtgcaagaaggatgggtgatatctagtctccatctacacccttgattgctatatctgcttgtaatacaatatgcaccaggcgtctgcctcatttcttcttgctccctatcttactgttgttactattgttttcgcaattatgattaaaaaataaactcggcttcaaatcaattagaaaagtgaattgactgcgactatgagagtttcc

SEQ ID NO: 15539 - protein, 269 aa, Glycine max
MVMGEEGCKVCVTGGSGYIGSWLIKKLLAKGYTVHATLRDLKNESKVGLLKSLPQSEGKLVLFEADIYNPNDFDLAIEGCKFVFHVATPMIHEPGSQGYTYSKTLSERHVLSYGNEENGGGMEVVTLTCGLVGGDTLLSSTPASGVVCIAQIMQNERAYISLKFLKELLGKIPLVHVDDVCEAHIFCMESTSISGRFLCASSYISLEEMANHYALHYPEFNVKQEYEDGLKKDIKWASTKLCDKGFVYKYDAKMLLDDCIKCARRMGDI

SEQ ID NO: 15540 - protein, 267 aa, Glycine max
MGEEGCKVCVTGGSGYIGSWLIKKLLAKGYTVHATLRDLKNESKVGLLKSLPQSEGKLVLFEADIYNPNDFDLAIEGCKFVFHVATPMIHEPGSQGYTYSKTLSERHVLSYGNEENGGGMEVVTLTCGLVGGDTLLSSTPASGVVCIAQIMQNERAYISLKFLKELLGKIPLVHVDDVCEAHIFCMESTSISGRFLCASSYISLEEMANHYALHYPEFNVKQEYEDGLKKDIKWASTKLCDKGFVYKYDAKMLLDDCIKCARRMGDI

SEQ ID NO: 15541 - protein, 180 aa, Glycine max
MIHEPGSQGYTYSKTLSERHVLSYGNEENGGGMEVVTLTCGLVGGDTLLSSTPASGVVCIAQIMQNERAYISLKFLKELLGKIPLVHVDDVCEAHIFCMESTSISGRFLCASSYISLEEMANHYALHYPEFNVKQEYEDGLKKDIKWASTKLCDKGFVYKYDAKMLLDDCIKCARRMGDI

SEQ ID NO: 15542 - DNA, 1250 bp, Glycine max
attgttattattattattagcagaactcaatgggtgtttgttggtttcattggtgggagtggaagctccaatccaatggcaatttttgtctgtgactgtgatgcacagtgaaataatcaaccctattcatcaatctccagtgttgcactgccatcaatgtccaccaccatttcttcccttcccttctctctcccccttcgccaaaactctagggttacccttttcaatccaccctcttctcctaatccatcccaatcatcagtcacctttcctaaaaaaaaatggagacttttgtggtttaggcatggaaacacttcatcaaaaactgatggttctgagctcaatgaagataaattgtcagaagatttggtgaagctcgaaggtgtccagtccaaagacctgaagaaagactggcttgcaaccatccttacgcactccctaaactactggcttcgaggcaccagcaacctcctaaggagaagaagacacagagaagaagaggtcataactgtcattcgtggtgtggaaccctggacagttccttggacagcaaagaccattgttcaggtaatgctcctgtggattgcctcattttggtttgtaggatcttggatagttccatttttagcatacacagcagggtttagaaaggaatctcttacatacagagggcaagcattgtgcagcctcttgactgatgttgctgaaggcgtggttggaatagcaattcttcgccattgtcttgcaaagtttcaacctctttcatctgattggttcaaatttgaagtcaaggggaagtggcagtttgatgttggtttaggctgcctcatgttcccccttatcaatcagctatcacaaatgaacctaaatttgctgcctgttcttcaatatactccagttaccatctcaagtgtagagcaatccattgttgcgcgagaccctgtggcaatggccctctatgcagtggtagtctcggtttgtgccccaatatgggaggagattgttttccgtggtttccttcttccatctttaaccaagtacatgcctgtatggagtgcaatattagttagctcaatagcttttgccttggcacattttaacattcagagaatgctaccacttgtatttcttggcatggtgatgggtactgtctttgtacggtctaggaacctctttccatcaatgttgttgcatagtttgtggaatgcttttgtatttctggatctcatgaaataaattaaaagtttttg

SEQ ID NO: 15543 - protein, 359 aa, Glycine max
MSTTISSLPFSLPLRQNSRVTLFNPPSSPNPSQSSVTFPKKKWRLLWFRHGNTSSKTDGSELNEDKLSEDLVKLEGVQSKDLKKDWLATILTHSLNYWLRGTSNLLRRRRHREEEVITVIRGVEPWTVPWTAKTIVQVMLLWIASFWFVGSWIVPFLAYTAGFRKESLTYRGQALCSLLTDVAEGVVGIAILRHCLAKFQPLSSDWFKFEVKGKWQFDVGLGCLMFPLINQLSQMNLNLLPVLQYTPVTISSVEQSIVARDPVAMALYAVVVSVCAPIWEEIVFRGFLLPSLTKYMPVWSAILVSSIAFALAHFNIQRMLPLVFLGMVMGTVFVRSRNLFPSMLLHSLWNAFVFLDLMK

SEQ ID NO: 15544 - protein, 221 aa, Glycine max
MLLWIASFWFVGSWIVPFLAYTAGFRKESLTYRGQALCSLLTDVAEGVVGIAILRHCLAKFQPLSSDWFKFEVKGKWQFDVGLGCLMFPLINQLSQMNLNLLPVLQYTPVTISSVEQSIVARDPVAMALYAVVVSVCAPIWEEIVFRGFLLPSLTKYMPVWSAILVSSIAFALAHFNIQRMLPLVFLGMVMGTVFVRSRNLFPSMLLHSLWNAFVFLDLMK

SEQ ID NO: 15545 - DNA, 992 bp, Glycine max
agaacatcctaatcgaaaaaccaagctcctcctcctccacaggaaaagcaacagcgcagcgcggcttcactggtttcgccctcaatttcgagagcgagtcttggaaggccttccatggctcagccgtcgctgctcctcggctctccggcatcgatcgtcctcctccttctctccttcttccaagggccggtagtgagcgccatcacgttcaccttcgccaaccggtgcacggacacggtgtggcccgggctgctctcgggctccacctcgccgccgctggaaaccaccggcttcgcgctctcgccgggccagtcgcgctcaatctacgggcccaccgggtggtcgggccgcttctgggcgcgctctggctgtaatttcaacggcggcaagggcacctgcgtcacgggggactgcggctccggcgagatagagtgccgcggcgccggggccaccccgcccgccacgctcgcggagttcaccctcgacggcgacggcgggaaggacttctacgacgtcagcctcgtcgacggctacaacctgcccatgctggtgcagccgtccgcgcctgggtgccccgacaccgggtgcctcgtcgacctcaacgagcgctgcccctcggagctccgctccggcggcggcctcgcctgccgcagcgcctgcgaggccttcggcaagcccgagttctgctgcaacggcgcctacgggaaccctgacacgtgccacccctcccagtactcgcagctcttcaagtcggcgtgccccaagtcctacagctacgcctacgacgacgccacctccaccttcacctgcaaccacaccgattacaccattaccttctgcccgcagtccaatccttacaggtacctacctctgaatagtttctgatgctatgacagtgcaatctagttgaaatcatagtgttgcagatctgaatctgattcaactcaacaatgatattttctctgggctagaaatataatgagattttgatt

SEQ ID NO: 15546 - protein, 256 aa, Glycine max
MAQPSLLLGSPASIVLLLLSFFQGPVVSAITFTFANRCTDTVWPGLLSGSTSPPLETTGFALSPGQSRSIYGPTGWSGRFWARSGCNFNGGKGTCVTGDCGSGEIECRGAGATPPATLAEFTLDGDGGKDFYDVSLVDGYNLPMLVQPSAPGCPDTGCLVDLNERCPSELRSGGGLACRSACEAFGKPEFCCNGAYGNPDTCHPSQYSQLFKSACPKSYSYAYDDATSTFTCNHTDYTITFCPQSNPYRYLPLNSF

SEQ ID NO: 15547 - DNA, 1242 bp, Glycine max
aagaatgaatgaaaggcattagaaatcagtgaccggcgtgagagagcaaagatggtggttcttggcaccacctcaccttcaatttcctgcttgccgtcttcaactcaaaccgactacaaggcgcgtcgatactgttcttttccgcaacgcccacgcccacgcccacgcgcttcacgtttcttttgcggattccctttcgctccaaatgccatccattctccttctctgtctgtgacgaatgaagcactgaatgttatgatttctggggctcctgcttctggtaaaggaacccagtgccacctcatcaccaacaagtacggtttggttcatattgctgctggagatttacttagggcagaaattgccactggaagtgataatggaaagcgagccaaacagtatatggagaagggacagttggtccctgacgaaattgttgtgatgatggttaaggagcgtctcttgaaaccagattcgaaagagaatggttggcttttggatggatatcccatgagcttatcacaggccactgcacttgaggctcttggctttcggcctcatatttttcttcttcttgaggtttctgaagatgttcttgtggagagagtagttggacggagattagatcctgttaccggcaagatatatcacttgaagtattctcctccagagacacaagaaatagccgcaaggcttacccaacgctttgatgatacagaagaaaaggtgaaattgcgattgaatacccatcatcaaaatgtggagtcagtcctttccatgtacaaagacataactgttaagattaacggaaatgtctcaaaggaggaagtatttgctcaaattgatagtgcactgacaagtcttatagaggaaaggaaggctgcttcaggatctgtggcagcatagaagacccatcttttgacattttgatctagcatggtgcgttgctggtggtagtggattttaaatgatttatttatagagttaaacaaaagagtcttcactcaaactaagctgcattttctcgtgaagattgtctcacggcttatatcctcccatttggaaagcaatgtgatgattggcttggaccatgcatgaggacctgtgatagtgtagtgcgcagtatattttacaaatttattttttatgagaaaatgattaccttaaattaaaatcgtttttatgtaatgactagcttgtaaatgcaggattttgtgaattatcgtttgttggtttcctgtt

SEQ ID NO: 15548 - protein, 284 aa, Glycine max
MVVLGTTSPSISCLPSSTQTDYKARRYCSFPQRPRPRPRASRFFCGFPFAPNAIHSPSLSVTNEALNVMISGAPASGKGTQCHLITNKYGLVHIAAGDLLRAEIATGSDNGKRAKQYMEKGQLVPDEIVVMMVKERLLKPDSKENGWLLDGYPMSLSQATALEALGFRPHIFLLLEVSEDVLVERVVGRRLDPVTGKIYHLKYSPPETQEIAARLTQRFDDTEEKVKLRLNTHHQNVESVLSMYKDITVKINGNVSKEEVFAQIDSALTSLIEERKAASGSVAA

SEQ ID NO: 15549 - protein, 216 aa, Glycine max
MISGAPASGKGTQCHLITNKYGLVHIAAGDLLRAEIATGSDNGKRAKQYMEKGQLVPDEIVVMMVKERLLKPDSKENGWLLDGYPMSLSQATALEALGFRPHIFLLLEVSEDVLVERVVGRRLDPVTGKIYHLKYSPPETQEIAARLTQRFDDTEEKVKLRLNTHHQNVESVLSMYKDITVKINGNVSKEEVFAQIDSALTSLIEERKAASGSVAA

SEQ ID NO: 15550 - protein, 167 aa, Glycine max
MEKGQLVPDEIVVMMVKERLLKPDSKENGWLLDGYPMSLSQATALEALGFRPHIFLLLEVSEDVLVERVVGRRLDPVTGKIYHLKYSPPETQEIAARLTQRFDDTEEKVKLRLNTHHQNVESVLSMYKDITVKINGNVSKEEVFAQIDSALTSLIEERKAASGSVAA

SEQ ID NO: 15551 - DNA, 1529 bp, Glycine max
aataacttagatgggttgggaatgagggtagtggcgagacagtgagagggtggaaatggcggctgtggcagcgagaagcacaggcagcgttggtgttggtgctgtcatcttcatctcagtcgctctcaccacttatttcatctcgaaaaagaagaagaagaagaagaaggaatccaggaagaagaagaagggactggtggacgccataggcaacactcctttgattcggatcaacagcctctccgccgccactggttgccaaattctcggcaagtgcgagttcttaaaccccggaggcagcgtcaaagaccgcgttgctgttcaaattattcaagaggctctagaatctggccagctacgtccaggtggaatagtcactgaagggagtgctggaagcactgccattagcattgccactgttgctcctgcctacgggtgcaggacccatgtggttataccagatgatgctgccattgagaagtctcaaatacttgaagcccttggggcaactgttgaaagagtgagaccggtgtccatcacccacaaagaccattttgtcaatattgcaagaagacgggcatctgaagcaaatgagtttgcattgaagcgtagaaattcacaacaattgaatggcaaggaggacaccgagaaaataaatggttatgaatctaatggatgcaattacagctctctgtttcctgaagattgtcaaggtggcttttttgctgatcagtttgagaacctagcgaacttcagggcccattatgagggtacagggcctgagatttgggaacagaccaatggaaagttagatgcatttgttgcagcagcgggtaccggtggtactgtggctggtgtttctaagtttcttcaggaaaagaatccaaacatcaagtgcttcctcttagatcctcctggctctggtttgtttaataaggtaactaggggagtgatgtacaccaaagaggaggcagaaggaagaagactcaagaatccatttgacactataacagaaggaattggaattaacaggataacaaggaattttgcaatggcaaaacttgatggggcctttagaggcaccgatagggaagctgttgaaatgtctaggtttcttttgaagaacgatggtctcttccttgggagttcttctgcaatgaactgtgttggagcagttagagtagcgcaagcaattggcactggtcacacaattgtaaccattctctgcgacagtggaatgagacatttgagcaaattctatgatgctgaatacttgtctcagcttggtttgacaccgaaagcaattggtttggagttcttaggcgtcaagtgagaaggtttcttcagagtttaaaattttaatgccactgccttggatgagagtggccacctagaagttagaactgagggtgttgtagttattgatatagaagatattacacttattaatacaatgttttggggatattacatggctcattctttgttagtctttcatggtttattgatttattaactaggccaagatg

SEQ ID NO: 15552 - protein, 425 aa, Glycine max
MAAVAARSTGSVGVGAVIFISVALTTYFISKKKKKKKKESRKKKKGLVDAIGNTPLIRINSLSAATGCQILGKCEFLNPGGSVKDRVAVQIIQEALESGQLRPGGIVTEGSAGSTAISIATVAPAYGCRTHVVIPDDAAIEKSQILEALGATVERVRPVSITHKDHFVNIARRRASEANEFALKRRNSQQLNGKEDTEKINGYESNGCNYSSLFPEDCQGGFFADQFENLANFRAHYEGTGPEIWEQTNGKLDAFVAAAGTGGTVAGVSKFLQEKNPNIKCFLLDPPGSGLFNKVTRGVMYTKEEAEGRRLKNPFDTITEGIGINRITRNFAMAKLDGAFRGTDREAVEMSRFLLKNDGLFLGSSSAMNCVGAVRVAQAIGTGHTIVTILCDSGMRHLSKFYDAEYLSQLGLTPKAIGLEFLGVK

SEQ ID NO: 15553 - DNA, 1076 bp, Glycine max
atctctcccccacgttttccacccaccagacactcccacggctgccggcaatggcggcggcggcggagcaggactactggggcctgttccgggaggagacgggctggtacaacgagatcttcctcagcgccgtcgtgccgggcggcggcggctggtggcgggcgctgccgcacccgctccgctcctggctgcgcaactgcatcggcggctacctcctctacttcgccaccggcttcctctggtgcttcgtcatctactactggaagcgcaacgcctacatccccaaagatgctgtccctacagtagaagctatgaagaagcaaataattgttgcatcaaaggctatgccgttctactgtgctcttccgtccatatctgagcacatgattgagagtggatggacacggtgtttttttcatatcagtgaagttggttggcctatgtacattgtctatgtgtctctatatctcatctttgtggagttcggaatttactggatgcacagagagttgcatgacataaagccactatacaagcacctacatgcaacccaccacatttacaacaaggagaataccctatcaccatttgctggactagcattccatccattggacgggatactgcaagccatatcgcacgtgattgctctgttccttctgccgatgcacttcaggacgcacattgctctgttattcatagaggcggtgtggacggccaacatccatgactgcatccacggcaagatctggccagtgatgggtgccggctaccacaccatccaccacacgacgtaccggcacaactatggccactacaccgtgtggatggactggctgtttggcaccctccgcgagccggaggatctcctcaagaaggactgagctcgtgtgagcgcggtctttcctgtctctgtagcaatgtgaagtgtagtagaagtgttaaggcttaaccctccatctgttctcttattctgctgaaagatgtttgttgtggtgtttacgacagttagcggtgtgctgtttcagtctccgtccggtaggtggaaataataaggttgttcatttaccagacat

SEQ ID NO: 15554 - protein, 293 aa, Glycine max
LSPTFSTHQTLPRLPAMAAAAEQDYWGLFREETGWYNEIFLSAVVPGGGGWWRALPHPLRSWLRNCIGGYLLYFATGFLWCFVIYYWKRNAYIPKDAVPTVEAMKKQIIVASKAMPFYCALPSISEHMIESGWTRCFFHISEVGWPMYIVYVSLYLIFVEFGIYWMHRELHDIKPLYKHLHATHHIYNKENTLSPFAGLAFHPLDGILQAISHVIALFLLPMHFRTHIALLFIEAVWTANIHDCIHGKIWPVMGAGYHTIHHTTYRHNYGHYTVWMDWLFGTLREPEDLLKKD

SEQ ID NO: 15555 - protein, 277 aa, Glycine max
MAAAAEQDYWGLFREETGWYNEIFLSAVVPGGGGWWRALPHPLRSWLRNCIGGYLLYFATGFLWCFVIYYWKRNAYIPKDAVPTVEAMKKQIIVASKAMPFYCALPSISEHMIESGWTRCFFHISEVGWPMYIVYVSLYLIFVEFGIYWMHRELHDIKPLYKHLHATHHIYNKENTLSPFAGLAFHPLDGILQAISHVIALFLLPMHFRTHIALLFIEAVWTANIHDCIHGKIWPVMGAGYHTIHHTTYRHNYGHYTVWMDWLFGTLREPEDLLKKD

SEQ ID NO: 15556 - protein, 190 aa, Glycine max
MKKQIIVASKAMPFYCALPSISEHMIESGWTRCFFHISEVGWPMYIVYVSLYLIFVEFGIYWMHRELHDIKPLYKHLHATHHIYNKENTLSPFAGLAFHPLDGILQAISHVIALFLLPMHFRTHIALLFIEAVWTANIHDCIHGKIWPVMGAGYHTIHHTTYRHNYGHYTVWMDWLFGTLREPEDLLKKD

SEQ ID NO: 15557 - DNA, 699 bp, Glycine max
  misc_feature (69)..(69): n is a, c, g, or t
atgctggcatagaacaacttgtggcaaccatcacacctcgcataagaccgttattagacagtgtaggancaatcagctatgagctttcagaggctgagtatgcagataatgaggtgaatgacccatgggtttagagacttctccatgccgttgagtcaaatgtggcatggctgcagccactaatgactgctaacaattatgacacgtttgttcatttgattattgacttcattgtgaaaaggctagaagtcattatgatgcagaaaagatttagtcagctaggtggtcttcagcttgaccgagatgctagagctttggtaagccatttcagtgccatgacacagagaactgttagggacaagtttgcacgtcttactcaaatggcaacaatcctaaatttagaaaaggtttctgagattctagatttctggggtgaaaactctggacctatgacctggagattaactccagcagaggttaggcgtgtattgggtctgcgagttgattttaaatcagaagcaatagctgctctgaagttgtaatatccgtttatatggtctcttcacattcttctttttattgggttattacatcttcattcttactatttttggtgtttgggaagtgaacatacagttccattatgcgatttgcataaacaaaagaataagcaagtgtattgttcagatttgtcaccct

SEQ ID NO: 15558 - protein, 119 aa, Glycine max
MTANNYDTFVHLIIDFIVKRLEVIMMQKRFSQLGGLQLDRDARALVSHFSAMTQRTVRDKFARLTQMATILNLEKVSEILDFWGENSGPMTWRLTPAEVRRVLGLRVDFKSEAIAALKL

SEQ ID NO: 15559 - protein, 95 aa, Glycine max
MMQKRFSQLGGLQLDRDARALVSHFSAMTQRTVRDKFARLTQMATILNLEKVSEILDFWGENSGPMTWRLTPAEVRRVLGLRVDFKSEAIAALKL

SEQ ID NO: 15560 - protein, 94 aa, Glycine max
MQKRFSQLGGLQLDRDARALVSHFSAMTQRTVRDKFARLTQMATILNLEKVSEILDFWGENSGPMTWRLTPAEVRRVLGLRVDFKSEAIAALKL

SEQ ID NO: 15561 - DNA, 1420 bp, Glycine max
gatgctgttctgccaaaccccaaaccctagttttgtcagtagcacacttcacccatggcagtagcagcagctcgccctatcgtctccgtccaaaccctagagggcgatgcaacccctaccgttcctcttcccgacgtcatgaaagcctccattcggcctgacatcgtcaatttcgtccactccaacatttctcgcaacagccgccaaccctacgccgtcagcaagcgcgccggccaccaaacctccgccgagtcctgggggcaccgggccgcgccgtctcgcgtatcccgcgagtccccggcggtggtacccaccgcgccggccagggcaccttcggaaacatgtgccgtggcggccgcatgtttgctcccaccaagatctggcgccgctggcaccgcaagatcaacgttcaacagaagcgccacgccgtcgtctccgccatcgccgcctccgcaatcccctcgctcgtccaggctcgcggccaccgcatcgagtccgtcccggaactccccctcgtcgtcagcgacactgtcgaaagcgtcgagaaatccaaagaagccgtcaaaattctccagaaaatcggcgcattcacagacgcggagaaagctaaactcagccacggaattcgtcccgggaagggaaaaatgaggaaccgcaggtatatctctggcaagggtcctcttatagtgtacggaacagaaggtgctaaggccattaaagccttcaggaacattcccggtgtagaggtggcaaacgttgataggctcaaccttctgaagctggcacccggtggccaccttggaaggttcattatttggaccaagtccgcatttgagaaattggactctatctatggatccttcgataaggcctccgagaagaaaaatggctacttgcttcccaggcccaagatgatcaactctgacttggcccgtatcattaactccgacgaggtccagtccgtggtcaggcccattaagaaagatgttaagagagcacctctcaagaagaaccctctcacgaacctcaatgcgatgttgaagctcaatccctatgctaagaccgctaagagaatggctcttctcgctgagaagcagcgcattgtggctaagaaggagaagcttcataagaagcgcaacattgtctccaaggaggaggcttctgctatcaaagctgctggaaaatctgttggtcataaaataatattgtggatccgcttacaaaagggttgacgcgtcaacaagtacttgagttgtcgaggggaatgggattaaagcccattatttagttacaacaatggacacccgtctccgtgtgattggtgatcccatgaatggagttcaacgggtaacaacgaaattgtttgttgactaaagtacaccaaaatgaaatttgacggagctgttccgtttctcattcc

SEQ ID NO: 15562 - protein, 296 aa, Glycine max
MCRGGRMFAPTKIWRRWHRKINVQQKRHAVVSAIAASAIPSLVQARGHRIESVPELPLVVSDTVESVEKSKEAVKILQKIGAFTDAEKAKLSHGIRPGKGKMRNRRYISGKGPLIVYGTEGAKAIKAFRNIPGVEVANVDRLNLLKLAPGGHLGRFIIWTKSAFEKLDSIYGSFDKASEKKNGYLLPRPKMINSDLARIINSDEVQSVVRPIKKDVKRAPLKKNPLTNLNAMLKLNPYAKTAKRMALLAEKQRIVAKKEKLHKKRNIVSKEEASAIKAAGKSVGHKIILWIRLQKG

SEQ ID NO: 15563 - protein, 290 aa, Glycine max
MFAPTKIWRRWHRKINVQQKRHAVVSAIAASAIPSLVQARGHRIESVPELPLVVSDTVESVEKSKEAVKILQKIGAFTDAEKAKLSHGIRPGKGKMRNRRYISGKGPLIVYGTEGAKAIKAFRNIPGVEVANVDRLNLLKLAPGGHLGRFIIWTKSAFEKLDSIYGSFDKASEKKNGYLLPRPKMINSDLARIINSDEVQSVVRPIKKDVKRAPLKKNPLTNLNAMLKLNPYAKTAKRMALLAEKQRIVAKKEKLHKKRNIVSKEEASAIKAAGKSVGHKIILWIRLQKG

SEQ ID NO: 15564 - protein, 197 aa, Glycine max
MAVAAARPIVSVQTLEGDATPTVPLPDVMKASIRPDIVNFVHSNISRNSRQPYAVSKRAGHQTSAESWGHRAAPSRVSRESPAVVPTAPARAPSETCAVAAACLLPPRSGAAGTARSTFNRSATPSSPPSPPPQSPRSSRLAATASSPSRNSPSSSATLSKASRNPKKPSKFSRKSAHSQTRRKLNSATEFVPGREK

SEQ ID NO: 15565 - DNA, 1383 bp, Glycine max
gaaacacgcgaatggctgctactgctccttggttttttagttgttgtgttgttgtcttcaactccacacagttccctcacttctcttccctttgaccattcaaccttcctcgcctttgcctccgtttccgtgactgagatggctggaggtgttattcagcagatattgaggaggaaactccaccctcggtttactaactctcccttgttgtcacccatcgtagcaaaaaaagatgatgctggctctactggcagtcagtccttaagagcacttgcattaattggagctggtttgtcaggtcttttcagtttttcaacaatggcagcagctgatgaagctgaacatggcctggcatgtccaagctatccatggcctcacaagggaattcttagttcatatgatcacgcttcgattcgtcgtggtcatcaagtttatacagaagtctgtgcttcctgccattctatgtctttgatatcgtatcgtgatttggttggtgttgcttatacagaagaagaggtaaaggctatggcagctgagattgaggtggttgatggccctaacgatgagggtgagatgtttacacgccctggtaaactcagtgatcgttttcctcagccatatgcaaatgaagcagctgctaggtttgctaatggaggagcttatcctccagatctaagtcttgttaccaaagcccgtcacaatggtcagaactatgtttttgcccttctgactggttatcgtgacccacctgctggtgtttcgataagagagggacttcattataatccttactttcctggtggagcaattgccatgcctaaaatgcttaatgatggtgctgtggaatatgaagatggtactcctgctacagaagctcagatggggaaggatgttgtgtcattcttaacttgggccgccgaacccgagatggaagagagaaaactgatgggatttaaatggatatttgtactgtcattggcactacttcaggctgcctattaccgccgcttgaggtggtcagttctaaagtctcgcaagctggttcttgatgttgtcaactagctctgcctcgagtttcattttcacttgaacaaagtttactgttggcaataatttgtcagatgattaagttgtttcatcatttcaaattctttcagctaagttaatgtttaatggaacaacaactagaagagtgttataattttgtttgagataaaaaaaaatgttccatgcacgagatgcgtttaatttttctcatcacccatctcggacttgtgtattgttgcattttccgagagctgttcctgtttcataaactattgaattttgtggaacttgtcgttattattcaagaaaaataatagataaatatgctcacgttgg

SEQ ID NO: 15566 - protein, 353 aa, Glycine max
ETREWLLLLLGFLVVVLLSSTPHSSLTSLPFDHSTFLAFASVSVTEMAGGVIQQILRRKLHPRFTNSPLLSPIVAKKDDAGSTGSQSLRALALIGAGLSGLFSFSTMAAADEAEHGLACPSYPWPHKGILSSYDHASIRRGHQVYTEVCASCHSMSLISYRDLVGVAYTEEEVKAMAAEIEVVDGPNDEGEMFTRPGKLSDRFPQPYANEAAARFANGGAYPPDLSLVTKARHNGQNYVFALLTGYRDPPAGVSIREGLHYNPYFPGGAIAMPKMLNDGAVEYEDGTPATEAQMGKDVVSFLTWAAEPEMEERKLMGFKWIFVLSLALLQAAYYRRLRWSVLKSRKLVLDVVN

SEQ ID NO: 15567 - protein, 307 aa, Glycine max
MAGGVIQQILRRKLHPRFTNSPLLSPIVAKKDDAGSTGSQSLRALALIGAGLSGLFSFSTMAAADEAEHGLACPSYPWPHKGILSSYDHASIRRGHQVYTEVCASCHSMSLISYRDLVGVAYTEEEVKAMAAEIEVVDGPNDEGEMFTRPGKLSDRFPQPYANEAAARFANGGAYPPDLSLVTKARHNGQNYVFALLTGYRDPPAGVSIREGLHYNPYFPGGAIAMPKMLNDGAVEYEDGTPATEAQMGKDVVSFLTWAAEPEMEERKLMGFKWIFVLSLALLQAAYYRRLRWSVLKSRKLVLDVVN

SEQ ID NO: 15568 - protein, 247 aa, Glycine max
MAAADEAEHGLACPSYPWPHKGILSSYDHASIRRGHQVYTEVCASCHSMSLISYRDLVGVAYTEEEVKAMAAEIEVVDGPNDEGEMFTRPGKLSDRFPQPYANEAAARFANGGAYPPDLSLVTKARHNGQNYVFALLTGYRDPPAGVSIREGLHYNPYFPGGAIAMPKMLNDGAVEYEDGTPATEAQMGKDVVSFLTWAAEPEMEERKLMGFKWIFVLSLALLQAAYYRRLRWSVLKSRKLVLDVVN

SEQ ID NO: 15569 - DNA, 668 bp, Glycine max
tttttatgaggcagtatacatgggacaaacaccttgaaacttgggtgaagacctcaggcatccttggtggacccaagaacacttctccaactgtgatatcaccacagcagtacaagaaacggtttaggaaagccatgagcttatattttcttatggtgccagatcaatggtcccctccagagttacaccccagtgggtcccaatctgacatttgtgacgaaaatgcgtgaggcatgggactcatttcattgatgtggtcaaagtttgaatcttgtaaatgttaccattccagcatacatcattgacacgggtctctccttccttatgcccttaatatttgtctcctgcataatgcagctgctgttgatttgtgtcccttaagcaatggaggtgcacctcctgttaccagagattgttgaaagggtaactaagtgtacagcgattctcctcctctttcttttttatacatttttttatatcatgtatttaatctcttgctttcataatctgtcgtaaatttgatttaaagttcacaacctattattgaattgcacaccgcgtttctttttctacgcatgtgaaaggcgttgataaattcttacctcactgttatatgacccgtgtgaaagtatatatttgaaaattgtttctttctaaaaaaaaaaaaa

SEQ ID NO: 15570 - protein, 75 aa, Glycine max
FMRQYTWDKHLETWVKTSGILGGPKNTSPTVISPQQYKKRFRKAMSLYFLMVPDQWSPPELHPSGSQSDICDENA

SEQ ID NO: 15571 - protein, 74 aa, Glycine max
MRQYTWDKHLETWVKTSGILGGPKNTSPTVISPQQYKKRFRKAMSLYFLMVPDQWSPPELHPSGSQSDICDENA

SEQ ID NO: 15572 - protein, 43 aa, Glycine max
MEVHLLLPEIVERVTKCTAILLLFLFYTFFYIMYLISCFHNLS

SEQ ID NO: 15573 - DNA, 1638 bp, Glycine max
atggagagcatacatgtctgtcgaggagcttgatgacaatgaaagacaagctttcttaatttggcgtcgcagactggcaagacttgaggaaaatgagaatcttgtcctaaccccgtttgagaaaaatcttgatatttggagacaactctggcgggttgttgagcgcagtgatttgctcgttatggttgttgattcccgagatccgctattctatcgctgtcctgatcttgaggcatatgcacgagaggtggatgaccataaacgcacattgctcttggttaataaggcagatcttttacccgcttctgtcagagagaaatgggtagagtatttttgtgctcataatattctatatatcttctggtcagctaaagctgcttcagcagctgttgaaggtaaaatgcttaggtcaccattggaagctgatgattcagggaagaacaataatccagacacgaagatatatgacagggatgagcttcttgcacggatgcagtcagaggcagaaaagatagtagagatgaggagaaattctagctctgacacagggccgtctaacattcaatcttctggtgaaaatgttggtggtagttcctcatcaaataatgtaattgtgggatttgttgggtatcctaatgttggcaaaagttcaactattaatgctctggttggtaaaaaaaggacaggtgtcacctctactccagggaagacaaagcatttccaaacattaattatttctgaccaactgaccctttgtgactgtcctggattagttttcccatctttctcaagctcaaggtataagatgattgcttgtggagtgttgcctatcgataggatgactgaacatagggaggctgtccaagttgtagccgataaagttccaagacaggtcattgaggagatttataagatcagtctaccaaaacctaagccatatgaaccccaatcacgcccccctctggcatctgagcttttgagagcatattgtgcttctcgtggatatgttaccgctagtggactgcctgatgaaactagagctgctcgccagatactgaaagattacattgatgggaagctgcctcaccatgaaatgcccccaggaatgtcaaatgtggaaccagacccagttaacttgcatggctctgtttcatatggtactgaagatgttgacagcaaagttgcacctgattttgagcaagtgttggatgacctcaattcatttgacttggctaatggacttgtttcaaatgaagttacaatcaagaagtctgatgcatctcataatcaccataagaaacctcaggggaaaaaagatcgttctcagagaacagagaataatgatgctgacgggatgccagttgtaaagttccttagaaaccattaaacacaagtcatgtgaaggtctaatatgttcatacccctcggatatctgtacagcagacaacacctgatctgtgagcccagtatgtacattgttagtcaaagactgaataagttaaagttatatatatactttgtaatgcattgtagaactaagtagacaatcacgatgagtataacacaaaagtattttgtatttacagtgatgaggtatttttattattaatctatgtaatataagctaattttgtatgc

SEQ ID NO: 15574 - protein, 461 aa, Glycine max
WRAYMSVEELDDNERQAFLIWRRRLARLEENENLVLTPFEKNLDIWRQLWRVVERSDLLVMVVDSRDPLFYRCPDLEAYAREVDDHKRTLLLVNKADLLPASVREKWVEYFCAHNILYIFWSAKAASAAVEGKMLRSPLEADDSGKNNNPDTKIYDRDELLARMQSEAEKIVEMRRNSSSDTGPSNIQSSGENVGGSSSSNNVIVGFVGYPNVGKSSTINALVGKKRTGVTSTPGKTKHFQTLIISDQLTLCDCPGLVFPSFSSSRYKMIACGVLPIDRMTEHREAVQVVADKVPRQVIEEIYKISLPKPKPYEPQSRPPLASELLRAYCASRGYVTASGLPDETRAARQILKDYIDGKLPHHEMPPGMSNVEPDPVNLHGSVSYGTEDVDSKVAPDFEQVLDDLNSFDLANGLVSNEVTIKKSDASHNHHKKPQGKKDRSQRTENNDADGMPVVKFLRNH

SEQ ID NO: 15575 - protein, 457 aa, Glycine max
MSVEELDDNERQAFLIWRRRLARLEENENLVLTPFEKNLDIWRQLWRVVERSDLLVMVVDSRDPLFYRCPDLEAYAREVDDHKRTLLLVNKADLLPASVREKWVEYFCAHNILYIFWSAKAASAAVEGKMLRSPLEADDSGKNNNPDTKIYDRDELLARMQSEAEKIVEMRRNSSSDTGPSNIQSSGENVGGSSSSNNVIVGFVGYPNVGKSSTINALVGKKRTGVTSTPGKTKHFQTLIISDQLTLCDCPGLVFPSFSSSRYKMIACGVLPIDRMTEHREAVQVVADKVPRQVIEEIYKISLPKPKPYEPQSRPPLASELLRAYCASRGYVTASGLPDETRAARQILKDYIDGKLPHHEMPPGMSNVEPDPVNLHGSVSYGTEDVDSKVAPDFEQVLDDLNSFDLANGLVSNEVTIKKSDASHNHHKKPQGKKDRSQRTENNDADGMPVVKFLRNH

SEQ ID NO: 15576 - protein, 401 aa, Glycine max
MVVDSRDPLFYRCPDLEAYAREVDDHKRTLLLVNKADLLPASVREKWVEYFCAHNILYIFWSAKAASAAVEGKMLRSPLEADDSGKNNNPDTKIYDRDELLARMQSEAEKIVEMRRNSSSDTGPSNIQSSGENVGGSSSSNNVIVGFVGYPNVGKSSTINALVGKKRTGVTSTPGKTKHFQTLIISDQLTLCDCPGLVFPSFSSSRYKMIACGVLPIDRMTEHREAVQVVADKVPRQVIEEIYKISLPKPKPYEPQSRPPLASELLRAYCASRGYVTASGLPDETRAARQILKDYIDGKLPHHEMPPGMSNVEPDPVNLHGSVSYGTEDVDSKVAPDFEQVLDDLNSFDLANGLVSNEVTIKKSDASHNHHKKPQGKKDRSQRTENNDADGMPVVKFLRNH

SEQ ID NO: 15577 - DNA, 740 bp, Glycine max
atcgccaacgccacccaccgcgccccgtttattattccccttcgcgcagccgcccccgtgtctcccgtgcgcaccttctcgaagcctcccccatggcggaccagctcaccgacgagcagatcgccgagttcaaggaggccttcagcctcttcgacaaggatggcgacggttgcatcaccaccaaggagcttggaaccgtgatgcggtccctcgggcagaaccccacggaggcggagctgcaggacatgatcaacgaggttgacgcggacggcaacggcaccatcgacttccccgagttcctgaacctgatggcgaggaagatgaaggacacggactcggaggaggagctcaaggaggcgttccgcgtgttcgacaaggaccagaacggcttcatctcggcggcgggctgcgccacgtgatgaccaacctcggggagaagctgacggacgaggaggtggacgagatgatccgggaggcggacgtggacggcgacggccagatcaactacgaggagttcgtcaaggtcatgatggccaagtgaggtggcggcgggacaggggtcttccctcccacgaaataagcttaaaattcaagtggattggaatgccagacagactcgcgtggttgtattttgtgctatgttttttaaggatactgttgcctgttgggtagttggtcgggttatctatcttgtagcggtgtagtcttgggggagcagcatcggaattactacctggttt

SEQ ID NO: 15578 - protein, 138 aa, Glycine max
RQRHPPRPVYYSPSRSRPRVSRAHLLEASPMADQLTDEQIAEFKEAFSLFDKDGDGCITTKELGTVMRSLGQNPTEAELQDMINEVDADGNGTIDFPEFLNLMARKMKDTDSEEELKEAFRVFDKDQNGFISAAGCAT

SEQ ID NO: 15579 - protein, 108 aa, Glycine max
MADQLTDEQIAEFKEAFSLFDKDGDGCITTKELGTVMRSLGQNPTEAELQDMINEVDADGNGTIDFPEFLNLMARKMKDTDSEEELKEAFRVFDKDQNGFISAAGCAT

SEQ ID NO: 15580 - protein, 86 aa, Glycine max
SPTPPTAPRLLFPFAQPPPCLPCAPSRSLPHGGPAHRRADRRVQGGLQPLRQGWRRLHHHQGAWNRDAVPRAEPHGGGAAGHDQRG

SEQ ID NO: 15581 - DNA, 525 bp, Glycine max
  misc_feature (1)..(1): n is a, c, g, or t
natgaagcagagtgcgcattcccatgtctgcattcacatattatatctggatgaacagctgcgcctctttgaacgatcttgatggggtggagagaatctacgaggagatgaaaactgaagatgaagaccaaattggttggcagacttacagcaaccttgcttctatttatgttaagtttaaggactttgagaaagctgagatgatgcttaagatgctggaaaaacaagtgaagccgaaacagcgtgatgcttaccattgcttgcttggcctttatgcagggaccggtaatcttggggaggttcatagagtgtggaattccctcaagtctgtctcccctgtcaccaacttcagctatcttgttatgcttagtaccctccgaaggcttaatgatatagaggggttaacaaaatgctttaaggagtgggaggctagttgtgttagctatgatgtgaggttggttagtgtctgtgttagtgctcacttgaatcagaacaagctggaagaagctgaatcggtatttgagg

SEQ ID NO: 15582 - protein, 167 aa, Glycine max
MSAFTYYIWMNSCASLNDLDGVERIYEEMKTEDEDQIGWQTYSNLASIYVKFKDFEKAEMMLKMLEKQVKPKQRDAYHCLLGLYAGTGNLGEVHRVWNSLKSVSPVTNFSYLVMLSTLRRLNDIEGLTKCFKEWEASCVSYDVRLVSVCVSAHLNQNKLEEAESVFE

SEQ ID NO: 15583 - protein, 158 aa, Glycine max
MNSCASLNDLDGVERIYEEMKTEDEDQIGWQTYSNLASIYVKFKDFEKAEMMLKMLEKQVKPKQRDAYHCLLGLYAGTGNLGEVHRVWNSLKSVSPVTNFSYLVMLSTLRRLNDIEGLTKCFKEWEASCVSYDVRLVSVCVSAHLNQNKLEEAESVFE

SEQ ID NO: 15584 - protein, 139 aa, Glycine max
MKTEDEDQIGWQTYSNLASIYVKFKDFEKAEMMLKMLEKQVKPKQRDAYHCLLGLYAGTGNLGEVHRVWNSLKSVSPVTNFSYLVMLSTLRRLNDIEGLTKCFKEWEASCVSYDVRLVSVCVSAHLNQNKLEEAESVFE

SEQ ID NO: 15585 - DNA, 823 bp, Glycine max
atgctgtagcaaaccaaggtgtgaacactgaggttcataaatcagaaagttcagatcaacgggtaacaagtctgggcagagtgcctcctgcgaaaatgaccatgtcaaatgaaacccgacatgctctgccaattgccctgaagaaactttttcagactcacaaagtttgcagcttcaaattgatatgcgaaggattgcgcgaaatggcagtttccaaagctatgctttcaaagggagattctaaaatggctgtggatgcagctcacagtcttgatggtccccataatgagttgatggctgtcataagtgaagttgcatgcgaaatcaatggttcttatgtgctgaagtcatcacccgatgatccattcagggatgttgtaattgatatgctttgtggaagtggacccaatgccaagctgaagaaggctgagatacttgaagctgccagaagaaaactcggtagggaggtcgctagcaatgaatataccaaggtcatgagcgagttatgtgtgtcaaaaggttctgtttgggtcttgaaaagcggtgatggaagtaagtaagcaatgatccgaggtccccgaggattgaactgcccacctgctcatgaatggaagtcatactctgctttctcatgagactaccagagtttagtttattggtcatagtcattattctcaaatattcaaatcttttccaactttttagctttagataaggaataaatttaaagagaatattttttattgttcgaatcaaaagaaaaaggtagagaagttagatgaaagaaaacaggaatggacaaagattgccctgttagctatta

SEQ ID NO: 15586 - protein, 185 aa, Glycine max
AVANQGVNTEVHKSESSDQRVTSLGRVPPAKMTMSNETRHALPIALKKLFQTHKVCSFKLICEGLREMAVSKAMLSKGDSKMAVDAAHSLDGPHNELMAVISEVACEINGSYVLKSSPDDPFRDVVIDMLCGSGPNAKLKKAEILEAARRKLGREVASNEYTKVMSELCVSKGSVWVLKSGDGSK

SEQ ID NO: 15587 - protein, 154 aa, Glycine max
MTMSNETRHALPIALKKLFQTHKVCSFKLICEGLREMAVSKAMLSKGDSKMAVDAAHSLDGPHNELMAVISEVACEINGSYVLKSSPDDPFRDVVIDMLCGSGPNAKLKKAEILEAARRKLGREVASNEYTKVMSELCVSKGSVWVLKSGDGSK

SEQ ID NO: 15588 - protein, 152 aa, Glycine max
MSNETRHALPIALKKLFQTHKVCSFKLICEGLREMAVSKAMLSKGDSKMAVDAAHSLDGPHNELMAVISEVACEINGSYVLKSSPDDPFRDVVIDMLCGSGPNAKLKKAEILEAARRKLGREVASNEYTKVMSELCVSKGSVWVLKSGDGSK

SEQ ID NO: 15589 - DNA, 1316 bp, Glycine max
attacctcacttctttgcatgactacttcctaaactcttctcttctacactttgctctctaccctctttctttctctttctttttcccttccctcaagtactatcatacacaaacacaaggtacttcacatacccacatacacacacataagcaaaaactcttacttccctttttcaagttcttaaactcatcactacttaactcaggagtgtgcatattttcgttgtatggatggatccttctagtggacaacaccagcaaatgtctagccagtcattggagaacatgttggcatgttcaaaagcccaccaagagagaaaaccaacgcctcagccagaacaagctctaaagtgccccagatgtgactccaccaacaccaaattctgctactacaacaattacagcctttcccagccaaggtacttctgcaagtcatgcaggagatattggaccaaaggaggtacacttaggaatgtccctgtgggaggagggtgcaggaagaacaaaaggtcatcatcatcatcttcaacatcaaagagagttcaagatcaagcattcacaccaaatgttaaccctctcactggccttccttcattaatgtcttatgactccaatgacctcactcttgcattggcaaggcttcaaaagcagtcatgtgggcaattagggtatgatgatcatgatctttcaatgttggggaaccaccacacaaacaccccatgtggtgataatatccttggcatgcatcaccactcatcatcctcatccacaaacccagggttcttggatgccctcagaagtgggttccttggaacacaaagtaataataatatgcatcagaatatgtactatggatatgggaatggggacatgggggaggtggacaatggtggtggggttggggttagtagtagtggagagatgatgatgatgatgatgccttataataatgatcaagaaatgagtattgcatccacacaggcagtgacagtcaccaccatgaagcaagagatttgcaacggaagggaacaaaaggtgttgtggggttttccatggcaactcaatggagacacaaacatgggtgaacttgactcaggaagagctagtaattggaatggcatcaattcatcatggcatggacttctcaacagtcccctaatgtagacaacaaccacagggcctctactactgataattttatttccttaatttctcatgttttgttttactaaaaatgttattagtctaattaggattttcaatatccttttgagtgctgggttaattaattacaggggtttggttgattcccttg

SEQ ID NO: 15590 - protein, 310 aa, Glycine max
MDPSSGQHQQMSSQSLENMLACSKAHQERKPTPQPEQALKCPRCDSTNTKFCYYNNYSLSQPRYFCKSCRRYWTKGGTLRNVPVGGGCRKNKRSSSSSSTSKRVQDQAFTPNVNPLTGLPSLMSYDSNDLTLALARLQKQSCGQLGYDDHDLSMLGNHHTNTPCGDNILGMHHHSSSSSTNPGFLDALRSGFLGTQSNNNMHQNMYYGYGNGDMGEVDNGGGVGVSSSGEMMMMMMPYNNDQEMSIASTQAVTVTTMKQEICNGREQKVLWGFPWQLNGDTNMGELDSGRASNWNGINSSWHGLLNSPLM

SEQ ID NO: 15591 - protein, 300 aa, Glycine max
MSSQSLENMLACSKAHQERKPTPQPEQALKCPRCDSTNTKFCYYNNYSLSQPRYFCKSCRRYWTKGGTLRNVPVGGGCRKNKRSSSSSSTSKRVQDQAFTPNVNPLTGLPSLMSYDSNDLTLALARLQKQSCGQLGYDDHDLSMLGNHHTNTPCGDNILGMHHHSSSSSTNPGFLDALRSGFLGTQSNNNMHQNMYYGYGNGDMGEVDNGGGVGVSSSGEMMMMMMPYNNDQEMSIASTQAVTVTTMKQEICNGREQKVLWGFPWQLNGDTNMGELDSGRASNWNGINSSWHGLLNSPLM

SEQ ID NO: 15592 - protein, 292 aa, Glycine max
MLACSKAHQERKPTPQPEQALKCPRCDSTNTKFCYYNNYSLSQPRYFCKSCRRYWTKGGTLRNVPVGGGCRKNKRSSSSSSTSKRVQDQAFTPNVNPLTGLPSLMSYDSNDLTLALARLQKQSCGQLGYDDHDLSMLGNHHTNTPCGDNILGMHHHSSSSSTNPGFLDALRSGFLGTQSNNNMHQNMYYGYGNGDMGEVDNGGGVGVSSSGEMMMMMMPYNNDQEMSIASTQAVTVTTMKQEICNGREQKVLWGFPWQLNGDTNMGELDSGRASNWNGINSSWHGLLNSPLM

SEQ ID NO: 15593 - DNA, 724 bp, Glycine max
  misc_feature (685)..(686): n is a, c, g, or t
agatttggccgccgtcacacggctgctgaactgcttgcttcagggaaccatgacaaacttactgttttggtctgtgccactgtccaaaagattgtgtttgatagaaaaggaaagagaccaaaagctgtgggggttattttccaagatgaacatgggaaacagcatgaggctattctgtcaaatgataagcacagtgaagtgataatgtctagtggggcaattgggactcctcagttgctaatgcttagtggaattgggccaaaagcagaactccagaagttgagcatcccagtggtccttgacaaccactttgttgggaaaggaatggtagataatcccatgaacacaatgtttgttttttctaatagaccagttaatcagtcactcatagaaactgttggtatcaccaaaatgggtgtctacattgaggctagcagtgggtttagtcagtccaatgatagcattcactgtcaccatggtatcatgtcagctgagattgggcagctgtctacaattcctcctaaggaaagatcaccagaagctgttcaagaatttatcaagaacaagaaagacataccggttgaattattcaagggaggttttattttgtcaaaagttgccaatccttggtcagtaggtgaactcaggctgaacaacaccaatgtgaacgacaaccctgtcgttnnccttcactacttcagtcatccatatgatcttcatcgct

SEQ ID NO: 15594 - protein, 241 aa, Glycine max
  misc_feature (229)..(229): Xaa can be any naturally occurring amino acid
RFGRRHTAAELLASGNHDKLTVLVCATVQKIVFDRKGKRPKAVGVIFQDEHGKQHEAILSNDKHSEVIMSSGAIGTPQLLMLSGIGPKAELQKLSIPVVLDNHFVGKGMVDNPMNTMFVFSNRPVNQSLIETVGITKMGVYIEASSGFSQSNDSIHCHHGIMSAEIGQLSTIPPKERSPEAVQEFIKNKKDIPVELFKGGFILSKVANPWSVGELRLNNTNVNDNPVVXLHYFSHPYDLHR

SEQ ID NO: 15595 - protein, 173 aa, Glycine max
  misc_feature (161)..(161): Xaa can be any naturally occurring amino acid
MSSGAIGTPQLLMLSGIGPKAELQKLSIPVVLDNHFVGKGMVDNPMNTMFVFSNRPVNQSLIETVGITKMGVYIEASSGFSQSNDSIHCHHGIMSAEIGQLSTIPPKERSPEAVQEFIKNKKDIPVELFKGGFILSKVANPWSVGELRLNNTNVNDNPVVXLHYFSHPYDLHR

SEQ ID NO: 15596 - protein, 161 aa, Glycine max
  misc_feature (149)..(149): Xaa can be any naturally occurring amino acid
MLSGIGPKAELQKLSIPVVLDNHFVGKGMVDNPMNTMFVFSNRPVNQSLIETVGITKMGVYIEASSGFSQSNDSIHCHHGIMSAEIGQLSTIPPKERSPEAVQEFIKNKKDIPVELFKGGFILSKVANPWSVGELRLNNTNVNDNPVVXLHYFSHPYDLHR

SEQ ID NO: 15597 - DNA, 1247 bp, Glycine max
taacttgtgtgctgccgtgctgagtaacccagagagagtaatgggaacggtttgctgctgcataagcaagtttgctactttgagcaacatcaggtcacgacccttcttctcttcacacttcccctctcaccattttccctccacaacaacttccatcaacttcagcatcgcctcttcttctttttcttctgccacatcttcattcacatgggatgatgtctttcgcatatctgaatctcaatctgccactcaagaccgctctcgctacctccaaggcttctcccacaaacttcaactatgcaatcgtgcttctgagaaacaatctgaattccttccatttgtcattgaggaccacgttgttggattcattcacaatggataaaaacaatggaggcccctatggtgactttgtttctttgcatccaacactgaagacagctgacgaaagaaccagcgcagttggatatgtggtagagcgtttgggagaggagcagattccaggcatacgggatgagctttaccccgtgacatcatcatttggtgcacccattttcttttcattagagcgtgctgcagctccttattttggcattaagattaggcttatggagtccatatgaatggctatgttgaggtggatgggcagaaacacatgtgggtagggaagagaagtgacacgaaacagacatatcctgggatgcttgatcatctagttgcaggaggactgccacacggaattgactgtcaggagaatctcataaaggaatgtgaggaggaagcaggaatacctagatctatctctgtcaaagccatacctgttggtgctatttcatatatggacattgatgggtatagatacaagagagatgttgaattctgttatgatctaaaacttccaaaaagtttcttacctaaaaatgaagatggagaagttgatagcttcaagttgatccctgttacgcaagttgcagaagtcatacgcaagacagagtttttcaagccgaattgctctcttgtaatcattgacttcctgtttcgacatggatacatcactcctgaatatcttggatatttggatctcctacgaaacttaagaataggagattgctcctgactcaaagcatcatgaccatttactatgttgctatgcattgatatgctgctcaagtttcttggttattgttatcctttatattgttgaaattctataatgatttattcaatattatattaactcttgggattgt

SEQ ID NO: 15598 - protein, 165 aa, Glycine max
MNGYVEVDGQKHMWVGKRSDTKQTYPGMLDHLVAGGLPHGIDCQENLIKECEEEAGIPRSISVKAIPVGAISYMDIDGYRYKRDVEFCYDLKLPKSFLPKNEDGEVDSFKLIPVTQVAEVIRKTEFFKPNCSLVIIDFLFRHGYITPEYLGYLDLLRNLRIGDCS

SEQ ID NO: 15599 - protein, 153 aa, Glycine max
MWVGKRSDTKQTYPGMLDHLVAGGLPHGIDCQENLIKECEEEAGIPRSISVKAIPVGAISYMDIDGYRYKRDVEFCYDLKLPKSFLPKNEDGEVDSFKLIPVTQVAEVIRKTEFFKPNCSLVIIDFLFRHGYITPEYLGYLDLLRNLRIGDCS

SEQ ID NO: 15600 - protein, 138 aa, Glycine max
MLDHLVAGGLPHGIDCQENLIKECEEEAGIPRSISVKAIPVGAISYMDIDGYRYKRDVEFCYDLKLPKSFLPKNEDGEVDSFKLIPVTQVAEVIRKTEFFKPNCSLVIIDFLFRHGYITPEYLGYLDLLRNLRIGDCS

SEQ ID NO: 15601 - DNA, 572 bp, Glycine max
atttttcatcccagattatgtgggacaagttcgatggattgacgatggattccgaggtcttcttcccatcccatttaattctaccctaggggggactgcatcagcaccaccatatttcaacaataaaaacatggcatcagacaaacaatatctccatgatgttgatgcttgtactttccttgtcgagctgcagctagagcggccttacctgactcgtggaagtgacttgtcaacatgggagcctattgctgcattgccttatctggacagggagctttcaccggcactgtataggtcctttttcattccttacctttggcaagagaagaatgtttttggaatgtataagctgcttaaaagaagaaccacctgattttctatttgggcgggggatggggcattagattgtcctagaatatggtggtggattaacaacaaaaccatttttgttagagacagtaagcttgtaggatttccctcatctgttgttgaatatttgatttagttctaatcttcttagattccccgagtgttgtctgatgtctttttcccacggaagcattcagtttatt

SEQ ID NO: 15602 - protein, 123 aa, Glycine max
FFIPDYVGQVRWIDDGFRGLLPIPFNSTLGGTASAPPYFNNKNMASDKQYLHDVDACTFLVELQLERPYLTRGSDLSTWEPIAALPYLDRELSPALYRSFFIPYLWQEKNVFGMYKLLKRRTT

SEQ ID NO: 15603 - protein, 80 aa, Glycine max
MASDKQYLHDVDACTFLVELQLERPYLTRGSDLSTWEPIAALPYLDRELSPALYRSFFIPYLWQEKNVFGMYKLLKRRTT

SEQ ID NO: 15604 - DNA, 884 bp, Glycine max
acctagaacatcctaatcgaaaaattatcattgccgttcattttccttcttatcactactcagacaataaacgcctcagtctctcatttcagggtgcaaaatcttccatgtataaatattactatgtgcttgcattaactgattgatttactccaaaatttaggttctaatgattataaaaggattgtttggaaggtacgaaagatggaaccctgttcatccaactcatggagccttttggggaatgggtgtgggcgttggttgtggtgtcggatggggtcctgggtttggccctgaagtgataggctatgttggagctggttgtggcattggattcaatgtaggcatcacttttgctggtgttggagttggcctacctgctaattttatctttgaaggtccatataatggggttagctggattggaaatttaccttgtatctctgacttgcaaagagaagccaatggaaaattgtttgaatttaggcaaaagcatttatcaataaagggaattaacttctttgacaagaagaacagcttgcctttgctcacttctgccagtaaaagtatacaagcattccgtaaccaaatattcagctctcataaagggaaagattgatgacttccaccactgtcagttttgtgcttacattttttgacacattttgtattttgttgggtcggaggcgaagctcttgttttcacagttaaccagataatctattattgttctgctctatctctccccacatggccacattcaaattcagttgtattttatagtcttgttacatgtgtttcttcagaaaatctcagccaaattttgtaaccaatatattaaaagcatatttatactagtaagaaataagatttcctactgtggg

SEQ ID NO: 15605 - protein, 149 aa, Glycine max
MIIKGLFGRYERWNPVHPTHGAFWGMGVGVGCGVGWGPGFGPEVIGYVGAGCGIGFNVGITFAGVGVGLPANFIFEGPYNGVSWIGNLPCISDLQREANGKLFEFRQKHLSIKGINFFDKKNSLPLLTSASKSIQAFRNQIFSSHKGKD

SEQ ID NO: 15606 - protein, 124 aa, Glycine max
MGVGVGCGVGWGPGFGPEVIGYVGAGCGIGFNVGITFAGVGVGLPANFIFEGPYNGVSWIGNLPCISDLQREANGKLFEFRQKHLSIKGINFFDKKNSLPLLTSASKSIQAFRNQIFSSHKGKD

SEQ ID NO: 15607 - DNA, 1052 bp, Glycine max
attacctagaacatcctaatcgaaaaccttttctttcttttgtgtttcttgctttcttcttcttcgctttcgtcccttttcggagtatccctcccaaccatggacgttgatccttgccaatacgaacaaattgctataaatgaaaaagatgtcaacaacatcattctgtcataccttatacataattgctacaaagagtcatcagagtcattcatttcttgcactgggatgaagcagcctgcagatcatttggagaacatggaaaaaagaaaaagaatctttcaccatgcattggagggaaatgtacttaaggcgattgagctcacagggcagctggcacaggatattctggagaacaataatgatttgctgtttgatcttctaagccttcattttgtagaccttgtctgctctaaggaatgggcagaagctttggagtttgctcagaccaagttgagtccttttagtgtgaaggagcagaaatatatggaaaaaatagaaggttttatgtcccttcttgcttatgagaatccagtggaatgcccaatgtttcatctgattggcttagactatcggcaacaagttgtggatagtttgaatcaaactattctcgatgttggtgatggccagcacactttaaccttcccatccacactgccatggagcggcttatacaacagacctcagtagttagacaatgcttaagcctggaggatggggggcctccaccattttccttgaaggatattcttaaaagtcaatgaaaagcagttaaatatccactgggatgttgaggaatgaagcatgtgtacattgtgccttttttgccacataagggattggtgcatgcatgatttgatcactagtgtaaagttgtcttcgtatacttttgtataaattttttggtagcaggctatctagatctttcgggtcatattgcattctttaggtattagtgttccatgaaaatggagaaaattgcaattctaccggattaagataatattttctttctggggaatttgatctaattgtggccttaagatgtcgtc

SEQ ID NO: 15608 - protein, 196 aa, Glycine max
MDVDPCQYEQIAINEKDVNNIILSYLIHNCYKESSESFISCTGMKQPADHLENMEKRKRIFHHALEGNVLKAIELTGQLAQDILENNNDLLFDLLSLHFVDLVCSKEWAEALEFAQTKLSPFSVKEQKYMEKIEGFMSLLAYENPVECPMFHLIGLDYRQQVVDSLNQTILDVGDGQHTLTFPSTLPWSGLYNRPQ

SEQ ID NO: 15609 - protein, 153 aa, Glycine max
MKQPADHLENMEKRKRIFHHALEGNVLKAIELTGQLAQDILENNNDLLFDLLSLHFVDLVCSKEWAEALEFAQTKLSPFSVKEQKYMEKIEGFMSLLAYENPVECPMFHLIGLDYRQQVVDSLNQTILDVGDGQHTLTFPSTLPWSGLYNRPQ

SEQ ID NO: 15610 - protein, 143 aa, Glycine max
MEKRKRIFHHALEGNVLKAIELTGQLAQDILENNNDLLFDLLSLHFVDLVCSKEWAEALEFAQTKLSPFSVKEQKYMEKIEGFMSLLAYENPVECPMFHLIGLDYRQQVVDSLNQTILDVGDGQHTLTFPSTLPWSGLYNRPQ

SEQ ID NO: 15611 - DNA, 829 bp, Glycine max
actttgtctacttaattaataaaggtttcaactttgaggataaacctcaccggttgtcacagggtttatcgtttaacggttgaaacgaagcgaaacttccaacttcatcttcaaccctgcgcttcttttgaactggtaaaaacttcgatcattttttgctctttagtcggtgttcatttcaactcagaagtcagaacatcggagctcatcaagcatggcaagctctttgacaacattagccattacctattctcctgtcaacaatggttccaggggtttcagaaagtctgttaatgcttctaaaggaaggggttgcataaaagcaatgaggatagagaaatccttggaggaattgtacaatgtgaaggtggaaagaaaagttcctcctgagagactagccgagcttggagtttcaaaatggtcagtgtggaagactgggaaaagcaggttaccttgggactggcaggtagaccaactggtgtacgtagaagaaggggaagtgagagttgtgcctgaaggaagcaagcgtttcatgcaatttgtggccggagacttggtccggtacccaaagtggtttgaagctgacctatggttcaatggtccatatcaagaacgttatagtttcagagcatatggtgatgatcattgatgagaagatgatgcttggtaaccacataaaagtcacatgcacatcttatttggatgttttatgtaatggatgtttttcaaaagttatagttttccagttctaaatgtattaccaatatttttgaatgtttgtgatactttgccatcatttaaaagaaatagtcctaaatgcttctgttgt

SEQ ID NO: 15612 - protein, 144 aa, Glycine max
MASSLTTLAITYSPVNNGSRGFRKSVNASKGRGCIKAMRIEKSLEELYNVKVERKVPPERLAELGVSKWSVWKTGKSRLPWDWQVDQLVYVEEGEVRVVPEGSKRFMQFVAGDLVRYPKWFEADLWFNGPYQERYSFRAYGDDH

SEQ ID NO: 15613 - protein, 107 aa, Glycine max
MRIEKSLEELYNVKVERKVPPERLAELGVSKWSVWKTGKSRLPWDWQVDQLVYVEEGEVRVVPEGSKRFMQFVAGDLVRYPKWFEADLWFNGPYQERYSFRAYGDDH

SEQ ID NO: 15614 - DNA, 1039 bp, Glycine max
gggtctgaatattttttttctaaaaaaatatagaaaaaaataataattggaggataaaattatgaattattattctctagctcaaaaagcagattcttttggttagaaagaggcatggaataaaaaaaggaaactaataattcactgagtgtctgtctcaggcagcaacattaccatgggaacgccgtacccaactccgatctcaccctccgaaacccgaatcggctggatcggcatcggcgtaatgggcttcgccatggcctctcgcctcctttctgctggctacaccctctctttctacgcccgcaacccttccaaccctaacgccctctctctccaatcccaaggcgccaccctggcccaatccccggcccaactggcccaactctccgacgtcctcttcaccatggtgggccacccctccgacgttcgctccctcctcctcgactcccccgtcctctcctccctccgccccaactccgtcgtcgtcgacaccaccagctcccaccccgacctcgcccgccagatcttctccgcagcacgctccctcggcgcctggtccgtcgacgcccccgtctccggcggcgacatcggcgcgcgcgacggcaagctcgccatcctagccgccggagaaaaagccgtagtcgaatggctgagccctctgttctcgatcctcgggagagccacttacatgggccccgcggggtgcgggcagagctgcaagatcgcgaaccagatcacgattggcgcgaacttgatcgggctgagcgaggggctggtgttcgccaagcgtgcggggctggacctgagggagttcgtggaagccataaaagacggtgctgcgggttcgaaggcgcttgaattgttcggggagaggatgattgagagggattttcgaccagggggttttgcggagtatcaggttaaggatttggggatgggggttgatgttgtggaaggaggagatgatgctcatcttgttgtcttgccaggggcttccttgtctaaacagttgttttctagcatgctggctaatggt

SEQ ID NO: 15615 - protein, 288 aa, Glycine max
MGTPYPTPISPSETRIGWIGIGVMGFAMASRLLSAGYTLSFYARNPSNPNALSLQSQGATLAQSPAQLAQLSDVLFTMVGHPSDVRSLLLDSPVLSSLRPNSVVVDTTSSHPDLARQIFSAARSLGAWSVDAPVSGGDIGARDGKLAILAAGEKAVVEWLSPLFSILGRATYMGPAGCGQSCKIANQITIGANLIGLSEGLVFAKRAGLDLREFVEAIKDGAAGSKALELFGERMIERDFRPGGFAEYQVKDLGMGVDVVEGGDDAHLVVLPGASLSKQLFSSMLANG

SEQ ID NO: 15616 - protein, 265 aa, Glycine max
MGFAMASRLLSAGYTLSFYARNPSNPNALSLQSQGATLAQSPAQLAQLSDVLFTMVGHPSDVRSLLLDSPVLSSLRPNSVVVDTTSSHPDLARQIFSAARSLGAWSVDAPVSGGDIGARDGKLAILAAGEKAVVEWLSPLFSILGRATYMGPAGCGQSCKIANQITIGANLIGLSEGLVFAKRAGLDLREFVEAIKDGAAGSKALELFGERMIERDFRPGGFAEYQVKDLGMGVDVVEGGDDAHLVVLPGASLSKQLFSSMLANG

SEQ ID NO: 15617 - protein, 261 aa, Glycine max
MASRLLSAGYTLSFYARNPSNPNALSLQSQGATLAQSPAQLAQLSDVLFTMVGHPSDVRSLLLDSPVLSSLRPNSVVVDTTSSHPDLARQIFSAARSLGAWSVDAPVSGGDIGARDGKLAILAAGEKAVVEWLSPLFSILGRATYMGPAGCGQSCKIANQITIGANLIGLSEGLVFAKRAGLDLREFVEAIKDGAAGSKALELFGERMIERDFRPGGFAEYQVKDLGMGVDVVEGGDDAHLVVLPGASLSKQLFSSMLANG

SEQ ID NO: 15618 - DNA, 562 bp, Glycine max
ggagattcgttcggctgctcagagtatcaatgtgtcggtgaacatgcttttcactttcttgattgcacaagtcttcttgacaatgctttgccacatgaagttcggcttgttcctcttctttgccttcttcgtgttgatcatgacattcttcgtctacttcttcttgcccgaaacaaagggcattccaattgaagaaatggggcaggtttggcaggcacaccccttctggtccagattcgtggagcatgatgattatggcaatggtgttgagatgggaaagggagctattaaagaagtgtagttagtcctcgtcttggtttatttttctcaatgactagcgttttagcttttgttggtaaatcatactattggtttcaatgtattgaattgttcctaaaaattaaaaagggttatttttcttatgtatcccctgcttcttcatatgaagcaagtttacaggatacttttctatattaatccaattgcacaaattgttatgcctttgaaaacatcaagttggatgtacactcatacctcatagacatccgatttcttatccttt

SEQ ID NO: 15619 - protein, 99 aa, Glycine max
EIRSAAQSINVSVNMLFTFLIAQVFLTMLCHMKFGLFLFFAFFVLIMTFFVYFFLPETKGIPIEEMGQVWQAHPFWSRFVEHDDYGNGVEMGKGAIKEV

SEQ ID NO: 15620 - protein, 85 aa, Glycine max
MLFTFLIAQVFLTMLCHMKFGLFLFFAFFVLIMTFFVYFFLPETKGIPIEEMGQVWQAHPFWSRFVEHDDYGNGVEMGKGAIKEV

SEQ ID NO: 15621 - protein, 72 aa, Glycine max
MLCHMKFGLFLFFAFFVLIMTFFVYFFLPETKGIPIEEMGQVWQAHPFWSRFVEHDDYGNGVEMGKGAIKEV

SEQ ID NO: 15622 - DNA, 473 bp, Glycine max
aaaaacaagttctttgcatttttgtaacataaaatatttcctacacaagttcattcaaatcattctcttgatctgcaatgggtttccgtttgctcggtcttcaaaggcgtagtaatgtaccaaagggttatcttgcagtctacgtgggaaaaaatgaaaagaagcggttcatgattcctatatcatatttgaaccaaccatcaatccaagaccttcttagtcaagctgaacaagaatttgggtttgctcatccaatgggtggccttacaatcccgtgtagagaagatgtcttcctagatatcacttctcgcttgcaaaggtcatagaggagatgaatgaaatgtagatggtcaatgaccaattcaattttgtagagaagacatatagttgaacattgtaaatattttatcttatttttatacttagagaattggaaagatgtatcctgccagaaacttataaacatatattat

SEQ ID NO: 15623 - protein, 82 aa, Glycine max
MGFRLLGLQRRSNVPKGYLAVYVGKNEKKRFMIPISYLNQPSIQDLLSQAEQEFGFAHPMGGLTIPCREDVFLDITSRLQRS

SEQ ID NO: 15624 - protein, 51 aa, Glycine max
MIPISYLNQPSIQDLLSQAEQEFGFAHPMGGLTIPCREDVFLDITSRLQRS

SEQ ID NO: 15625 - DNA, 1002 bp, Glycine max
attttcttgttgaggaagaaagatgctgatgaaattcaaataccctcgtcgatcacacgcacccaagaccaagaactcaagaagggtaccacattcgctttatcactattaacttcataacttagtttctcttctagtccagaagtacaagtaagtgatggtggtgtttccggtggtgaagctagcaacactcgctctgagaaccgcgtgcaaaccaatcgccaacaggctcaagaaggaggccggttaccaccccaagttccgaaatttcatcatcagcattgcccaggccaatcatagattgacgacgagagtgcagagacgaatttacggtcatgccactgatgttgcaatccaccctctgaacgaggagaaggctgtgcaagctgctgctgatctgcttggagaactctttgtcttctcggttgcaggagctgccatcatctttgaggtgcaaagaagttcaagatcagaagcaagaaaagaagaattacgtagacaggagatacaggaaataaagactaagaatgaagaattggctagagaaattgaacttcttgcacaaaagcttgaagagctggaacaactttccaggggacgaggactacttggcactcttaacttcagacacactcgtgtctctgaagatagaaaatccaattgattgttgcaattgttaagcattgcacacagattttgattaacaagcaatacctcttggtgtggcaagaagcatgatattgacaatgtgcagatgggttactgtatattatatatggaggtacaatcagagctaaaaccaaattttaggtgtggtgaggggctttgaggattttttttttgagaggggctttgaggattaatcttgttcatacgaaataaaacaaaattgtacaacacatttatgaatgcgttctttttgaaaatttcctttccagggacaaattcagcctgctaactacagttttctagccttttggataatctacatttgtttcctcc

SEQ ID NO: 15626 - protein, 168 aa, Glycine max
MVVFPVVKLATLALRTACKPIANRLKKEAGYHPKFRNFIISIAQANHRLTTRVQRRIYGHATDVAIHPLNEEKAVQAAADLLGELFVFSVAGAAIIFEVQRSSRSEARKEELRRQEIQEIKTKNEELAREIELLAQKLEELEQLSRGRGLLGTLNFRHTRVSEDRKSN

SEQ ID NO: 15627 - DNA, 551 bp, Glycine max
acacaaacacaaaacccacaagaccagaaaaaaaaaaacagagagtaaacatgagatctctcttcttactagccttgttcctagttcttgcttttcaccatggtgaagcagccgtgacttgcaacaacgtggttggtgatctttacccttgcctctcctacgtgatgcaaggcggaaacgctccatcaactaactgctgcaacggtgtcagaacgctcaacagtcaggctcaaaccactgcggatcgtcagagtgtttgtcgttgcatcaaaaatgctattggaggagcctcttactcttcaagcaaccttaacaatgctctgtctttgcctgctaagtgtggtgttaatctccctttcagtatcagcccttccaccaactgcaacagtatccactgaaataagcagaagatcctgaaggaagctactactactactacactactacaagaacttaggacatggcctggtagtagtaactacgttgttcagtgatgtatcttcatctctatgttcttcaaggttctaataaaaattacaacatgctatgag

SEQ ID NO: 15628 - protein, 131 aa, Glycine max
TNTKPTRPEKKKQRVNMRSLFLLALFLVLAFHHGEAAVTCNNVVGDLYPCLSYVMQGGNAPSTNCCNGVRTLNSQAQTTADRQSVCRCIKNAIGGASYSSSNLNNALSLPAKCGVNLPFSISPSTNCNSIH

SEQ ID NO: 15629 - protein, 115 aa, Glycine max
MRSLFLLALFLVLAFHHGEAAVTCNNVVGDLYPCLSYVMQGGNAPSTNCCNGVRTLNSQAQTTADRQSVCRCIKNAIGGASYSSSNLNNALSLPAKCGVNLPFSISPSTNCNSIH

SEQ ID NO: 15630 - protein, 77 aa, Glycine max
MQGGNAPSTNCCNGVRTLNSQAQTTADRQSVCRCIKNAIGGASYSSSNLNNALSLPAKCGVNLPFSISPSTNCNSIH

SEQ ID NO: 15631 - DNA, 617 bp, Glycine max
acaaaatataaaagtgttgtgttatagaaattaatcaaagaccataagaagatgggcattccttcagaaattgcagcggctgcgattggtttgttgtgcttgtggagtgttgctgacagtgttcccaacaccaacatcactgtcattctgtgcaacgttggggcgtacacctcaggtgatccttttgctgtcagtttatcctatgttgttagagaattggagacagagactccaaccaggaaaaactacgattactacaacatttctccatatcctaatgcctttgcctatggacatgctgcttgcaaccttaatctgactgccactgactgcaaaacctgtcttggtgcttctaaaacagccatgttcaacgggtgtccgaaacgtgtaggagctcgttcggtgctgcatgattgtacaatcaggtatgagcagtacccatttgatgattgagatacagaattattggagctttggatttctgtttccaccgcaaagctttgtaagccataaatttgtttgtgtaccacaaatgtatgtatgggttacttataaagtcaaaaatactagtctagtacgacctattcgctcatcaagtctcattttgatttccattc

SEQ ID NO: 15632 - protein, 133 aa, Glycine max
MGIPSEIAAAAIGLLCLWSVADSVPNTNITVILCNVGAYTSGDPFAVSLSYVVRELETETPTRKNYDYYNISPYPNAFAYGHAACNLNLTATDCKTCLGASKTAMFNGCPKRVGARSVLHDCTIRYEQYPFDD

SEQ ID NO: 15633 - protein, 69 aa, Glycine max
MIVQSGMSSTHLMIEIQNYWSFGFLFPPQSFVSHKFVCVPQMYVWVTYKVKNTSLVRPIRSSSLILISI

SEQ ID NO: 15634 - DNA, 478 bp, Glycine max
acaaccgccgccgccgcagcaaacccttgcgcactcgccctccaaccctccgccgccgccgctccacagcctcaccgccgccgtcgacatgggtaaggtgcacggatcgctggcccgtgccgggaaggtgcgcggccagacgcccaaggtcgccaagcaggacaagaagaagcagccccgcggccgcgcccacaagaggatccagtacaaccgtcgcttcgtcaccgccgtcgtcggcttcggcaagaagcgcggccccaactcctccgagaagtaggcgcatggcaccaccgcgccatgaaaaaggctcttcctttgctctagttttcctctcgtttgttgttacgcaagaagatgatgatggaagagactttacttacattcgtactcaagtgttaaagtatgcaatgttttgcttagttgaagaatctgagatattggtggtatgagtatgcatgcatgttatccttagttgaag

SEQ ID NO: 15635 - protein, 148 aa, Glycine max
NRRRRSKPLRTRPPTLRRRRSTASPPPSTWVRCTDRWPVPGRCAARRPRSPSRTRRSSPAAAPTRGSSTTVASSPPSSASARSAAPTPPRSRRMAPPRHEKGSSFALVFLSFVVTQEDDDGRDFTYIRTQVLKYAMFCLVEESEILVV

SEQ ID NO: 15636 - protein, 91 aa, Glycine max
QPPPPQQTLAHSPSNPPPPPLHSLTAAVDMGKVHGSLARAGKVRGQTPKVAKQDKKKQPRGRAHKRIQYNRRFVTAVVGFGKKRGPNSSEK

SEQ ID NO: 15637 - DNA, 1185 bp, Glycine max
ttttccattgctcgacgtggcggagaaggttggggtgcttcctctctctccggttagggaaagaaacgcactttttggttttgggtttggatttcgatctcactgcattgccttctgctactgctaggtttgttctctccattcacttgcatgatggttgtgcagaactttgtagttgatttgaataaggcccttgttttccaggttgggcatcttggagaagcttatgaagagtgggttcaccagcccattgtcagcaaggaaggcccccgtttctttgaaaatgagattctggagttcttgacgcgcacagtctggtgggcaataccagtcatttggctgccagttgtatgctggtttatatataagtccatacgaatgggcctcagttgtcctcatttagctctattggtggttcttggcatttttgtttggacactgcttgaatactcattgcatcgttttcttttccacattaaaacaaagacctactgggggaataccttgcattatcttctccatggctgccaccataagcaccccatggatggcttaagactcgttttccctcctgctgcaacagctatattattgatgccgttctggaacttggtgaaactcatggcgaccacttcaactgctcctgctttgtttggaggtggtttattgggttatgtaatgtatgattgcacccattattacttgcaccatggtcagccaaggactgaagtgccccgaaatctcaagcacaaatcattgaaaaggaaaatagttgatggtttcaccagttcttagaaattgaagggcattaatctgagagtaagatacagtgaatgtgaagaagtaccacttgaatcatcactttcggatccaggataaaggctttgggatcacttcatcactatgggataaagtttttggaacacttcctcctaaaatggatgccaaaagtatgtaaattactgtcaagggtagcatatgttcgttggttaaaataatagcaagttcaggaattcctgcttttatttatctaatttatttgacctccccaatcattgatgttttctggggtgttagcgtgccatcattcgtcaattttgtggtgccaaagttcgacaattaaacattctgtaaaaattgatttcttgtatcagattgatttatgatggaaagctcaccttgtgc

SEQ ID NO: 15638 - protein, 214 aa, Glycine max
MMVVQNFVVDLNKALVFQVGHLGEAYEEWVHQPIVSKEGPRFFENEILEFLTRTVWWAIPVIWLPVVCWFIYKSIRMGLSCPHLALLVVLGIFVWTLLEYSLHRFLFHIKTKTYWGNTLHYLLHGCHHKHPMDGLRLVFPPAATAILLMPFWNLVKLMATTSTAPALFGGGLLGYVMYDCTHYYLHHGQPRTEVPRNLKHKSLKRKIVDGFTSS

SEQ ID NO: 15639 - protein, 213 aa, Glycine max
MVVQNFVVDLNKALVFQVGHLGEAYEEWVHQPIVSKEGPRFFENEILEFLTRTVWWAIPVIWLPVVCWFIYKSIRMGLSCPHLALLVVLGIFVWTLLEYSLHRFLFHIKTKTYWGNTLHYLLHGCHHKHPMDGLRLVFPPAATAILLMPFWNLVKLMATTSTAPALFGGGLLGYVMYDCTHYYLHHGQPRTEVPRNLKHKSLKRKIVDGFTSS

SEQ ID NO: 15640 - protein, 138 aa, Glycine max
MGLSCPHLALLVVLGIFVWTLLEYSLHRFLFHIKTKTYWGNTLHYLLHGCHHKHPMDGLRLVFPPAATAILLMPFWNLVKLMATTSTAPALFGGGLLGYVMYDCTHYYLHHGQPRTEVPRNLKHKSLKRKIVDGFTSS

SEQ ID NO: 15641 - DNA, 524 bp, Glycine max
atcatcatcaagttgttgtggtttttatctgttttcttaaagctaagtctgtttattacttgtgttataagtaacgagctatggcgtctcaacaggagaagaaacagctagacgagagggccaagaagggtgagaccgttgtgccaggtgggactggaggcaaaagctttgaagctcaacagcatctcgctgaagggaggagccgaggagggaatacgaggaaggagcagttaggaagtgaaggatatcagcagatgggacgccaaggaggtcatagcacccgtgacaagaccgatgaggaagacgccgaggatgagtccagtattaggacctagtctcaattaagatgtcgatagatgtgtaataatatcgttttaaatctttccatatagttgtgtgtttggtttcctgtcataagcccttgttgagttcataagatgatgatcaccattatatgttttcgtcttcttctatgtacgcttgtgtttcgtttgctatctagtaccgagtgtgttttgactttc

SEQ ID NO: 15642 - protein, 84 aa, Glycine max
MASQQEKKQLDERAKKGETVVPGGTGGKSFEAQQHLAEGRSRGGNTRKEQLGSEGYQQMGRQGGHSTRDKTDEEDAEDESSIRT

SEQ ID NO: 15643 - DNA, 745 bp, Glycine max
gagcccattggtcaggtcaggtcttcccacgcggaaggacgaggaaggttcacgaatcccctcctcacttcgcccctccccctctcctatttcttctctccgggccccgggccaaaattccatcctaagttccatcgaagagggcggcaaggggcgatccggatagcgcaagagcgaccatggcctacgtcgagagaggtgttgtgaaaggcaaacggacaatctggagactaagcataatccccgacttctttaaggctattgtgaacttcatcagaatgttcttcctcacaatgttttctatcgagaaaacagacagctataagaaaggatatggtagtggtaagaattgggatggtggacctggtgggggaggtcctggtgggggtccatatggtggtgggggcggcggtggaggtggccctcgcggtcctcgcacactatctgacctccgatcaaacgatcagagttccctccctgcttgtggatcctgctgcggatgacatcttaacaaaagaacaacatattataatgacagaaaaacttccgtatttcatttcagcagagcaaaatcattgtgatgccgtgaagagtctagcatgtccagtatatattctgtagcttgtttctgatgtgatttgcatactgtattcatcatcgctttgccatgctgaattgtcctggatggagtcaaaatcttatccttaatactggcttcctgttgtgcaatgtgaatttactatgt

SEQ ID NO: 15644 - protein, 107 aa, Glycine max
MAYVERGVVKGKRTIWRLSIIPDFFKAIVNFIRMFFLTMFSIEKTDSYKKGYGSGKNWDGGPGGGGPGGGPYGGGGGGGGGPRGPRTLSDLRSNDQSSLPACGSCCG

SEQ ID NO: 15645 - protein, 95 aa, Glycine max
MVVVRIGMVDLVGEVLVGVHMVVGAAVEVALAVLAHYLTSDQTIRVPSLLVDPAADDILTKEQHIIMTEKLPYFISAEQNHCDAVKSLACPVYIL

SEQ ID NO: 15646 - protein, 88 aa, Glycine max
MVDLVGEVLVGVHMVVGAAVEVALAVLAHYLTSDQTIRVPSLLVDPAADDILTKEQHIIMTEKLPYFISAEQNHCDAVKSLACPVYIL

SEQ ID NO: 15647 - DNA, 609 bp, Glycine max
atcgtcatcacacacacacacacacacacacacacactcttcacaagttcccactatttcctgtccctcttgagttgagtctctcccggccggcctttcccctcctgcctgatggcccagaaggtggtgctgaggattcccaccatgaccgacgacaagaccaagcagaaagccatggaggccgtcgccgacatctacggtatcgactcgatagccgcagacctcaaggacaacaagatgaccgtcatcggtgctatggacacggtggccatcgccaagaggctcaagaagctcggcaagatcgacatcgtctcggtcgggccggcaaaggaggagaagaagccggcgccggctgcggagaagaagggcgaggttaagaaggatgacaagaaagaggagaagaaagacgacaagaagtgaaagcaacccattgcagaaggagaagcccaacatcaccacgcaaacggcaacagcaacaaaaagtctttgacatctgaggctctgatggagtgctagacagctaattataatctccactgggaaatgagatcgctttgcgtactgtactggtatagtgcactacagacatcaagtcaaatcaaatatcag

SEQ ID NO: 15648 - protein, 124 aa, Glycine max
RHHTHTHTHTHTLHKFPLFPVPLELSLSRPAFPLLPDGPEGGAEDSHHDRRQDQAESHGGRRRHLRYRLDSRRPQGQQDDRHRCYGHGGHRQEAQEARQDRHRLGRAGKGGEEAGAGCGEEGRG

SEQ ID NO: 15649 - protein, 102 aa, Glycine max
MAQKVVLRIPTMTDDKTKQKAMEAVADIYGIDSIAADLKDNKMTVIGAMDTVAIAKRLKKLGKIDIVSVGPAKEEKKPAPAAEKKGEVKKDDKKEEKKDDKK

SEQ ID NO: 15650 - protein, 91 aa, Glycine max
MTDDKTKQKAMEAVADIYGIDSIAADLKDNKMTVIGAMDTVAIAKRLKKLGKIDIVSVGPAKEEKKPAPAAEKKGEVKKDDKKEEKKDDKK

SEQ ID NO: 15651 - DNA, 789 bp, Glycine max
atcaatcaattccgctcctcccccttggatccaaacccttcccatcactctcgcttgactccttggaagcagagagaggaggaggaggaggaggaggaggagaccatgtcgtcgtccggtggcaagctcttcaccctggaggaggtcgccaagcacagctccaaggacgactgctggctcgtcatcggcggcaaggtgtacaatgtgaccaagtttcttgatgaccaccctggaggcgacgacgtcttgctgtcttcaactgccaaggacgcgaccgacgacttcgaggacgtgggacacagcacaaccgcccgggcgatgatggacgagtactacgtcggcgagatcgacgcgaccacgatacccaccaaggtcaagtacacgccgcccaagcagccgcactacaaccaggacaagacccccgagttcgtcatcaagatcctccagttcttggtccccctcgcgatactgggcctggccgtcgccgtacggatctacaccaaggcagactctgtctagcaccgtcatcttataccagtcagtcagtcattcggaagtgtccaagagctgaataagttttagtggggatttgcatattttgtaccagcgtcaccgtcctgtcatggaatctgggaactgctctcgacccgtcgttgcgttatggttctactaagacgtccgctgttgaatcgtgactcgggaaaaacggatagatacttggctatattttccatatcgctggtgaatgttcagacatacatattcttaatttgatgtgattagttgtgt

SEQ ID NO: 15652 - protein, 172 aa, Glycine max
INQFRSSPLDPNPSHHSRLTPWKQREEEEEEEEETMSSSGGKLFTLEEVAKHSSKDDCWLVIGGKVYNVTKFLDDHPGGDDVLLSSTAKDATDDFEDVGHSTTARAMMDEYYVGEIDATTIPTKVKYTPPKQPHYNQDKTPEFVIKILQFLVPLAILGLAVAVRIYTKADSV

SEQ ID NO: 15653 - protein, 137 aa, Glycine max
MSSSGGKLFTLEEVAKHSSKDDCWLVIGGKVYNVTKFLDDHPGGDDVLLSSTAKDATDDFEDVGHSTTARAMMDEYYVGEIDATTIPTKVKYTPPKQPHYNQDKTPEFVIKILQFLVPLAILGLAVAVRIYTKADSV

SEQ ID NO: 15654 - DNA, 641 bp, Glycine max
gttttgtgagctgcggagtatcgatttggcatccagagaaaagcaaagactgcttctatggctgatccagaactagaagctattagacagaggaggatgcaagagctgatggctcaacatggcactcaggggaagcagggcagtcagcagaatccagatcaagagagagcacaagaagatgctaaaagggaagctgatgaacgtagacaaatgatgcttagtcaaatattgtcttcccaagcccgtgagagaagtaagtccccatctaaaatgctcttgagttcatctactttctcatttgcttgtattttttccctatagttgcacgaattgcactggtgaaacctgagaaagctagaggcgtagaggatgttattttgagggctgctcaaatgggacagattgttgagaaggtttctgaggaacggcttataacgctgctggaacaaataaacagccaaactagcaaacaaacaaaagtcacgatccagaggcgtcgtggggtgttcgacgattaggaaagatgaaaggagatgtttatgatgtgctttgtacatctctttggagatctccctgttaagttgttgagttcagttgtgaaatatgtttattgtgagtgaataatcttaataatcttccag

SEQ ID NO: 15655 - protein, 87 aa, Glycine max
MADPELEAIRQRRMQELMAQHGTQGKQGSQQNPDQERAQEDAKREADERRQMMLSQILSSQARERSKSPSKMLLSSSTFSFACIFSL

SEQ ID NO: 15656 - protein, 74 aa, Glycine max
MQELMAQHGTQGKQGSQQNPDQERAQEDAKREADERRQMMLSQILSSQARERSKSPSKMLLSSSTFSFACIFSL

SEQ ID NO: 15657 - protein, 70 aa, Glycine max
MAQHGTQGKQGSQQNPDQERAQEDAKREADERRQMMLSQILSSQARERSKSPSKMLLSSSTFSFACIFSL

SEQ ID NO: 15658 - DNA, 679 bp, Glycine max
acaaccaatcatacaaaaacacacacaacagataaaaagaagaaaatcttcggttgataaaaactatttaaatgaagaggaacggtgaaactaagcggcggaggaacgtggcggaagaggcggagcagggaggaggagatccggcgatgtgggaggatcttgatcggaatttcagacaagtgcaatctgttttggacagaaacagatcacttatccagcaagtcaacgacaatcaccagtcaagaatggcagataacatgtccaagaacgttgctttgatccaagaactcaatggaaacatctctaaggttgcttcgatgtattctgacctcaacaccaatttctcctcggcgtttcacggtggaaagaacggacgcgacggtggtggaactaccggaaccagagctaattaaccaaccctgatcaaattgatctttcttagttggaccggccggtttgaaaatttcgaatcagtcggtttaacatataattttttttttgttgtcacggaacatatgatctaaacctgttatataagttatgttattgcaatgattgtcgttagaataatccgtgggagaaaacccattgtttgggttattttaattatggttttgagtctttttcaacgtgtctctactctactgcaatttctctgataataacaataaatatttag

SEQ ID NO: 15659 - protein, 113 aa, Glycine max
MKRNGETKRRRNVAEEAEQGGGDPAMWEDLDRNFRQVQSVLDRNRSLIQQVNDNHQSRMADNMSKNVALIQELNGNISKVASMYSDLNTNFSSAFHGGKNGRDGGGTTGTRAN

SEQ ID NO: 15660 - protein, 88 aa, Glycine max
MWEDLDRNFRQVQSVLDRNRSLIQQVNDNHQSRMADNMSKNVALIQELNGNISKVASMYSDLNTNFSSAFHGGKNGRDGGGTTGTRAN

SEQ ID NO: 15661 - DNA, 1945 bp, Glycine max
atattttcgtttttgccgagatagggttttcggttttcttcactgctctctcaccaggggcgagttgtgaatggaagcacaaggcataaagtataaagcataaagcatagttagttgagtcaatggaaggtgttgatcaaagaaatagttctgcatttggtgttccagttccaagaccaccaaaccagaaatctcgtatgccaccatctcaccctagtatcaatgtttcaccttcagcaactccttattcccaataccctcagcgattgcgttctccgggttcctcccattcgaggtctttgtctcaacctcccattttctcgttggattcattgcccccattgagtccttcccctgctgctgttacctccatgtttgactcaatctcaacaactgatatgtctgtggaggaaagtaatgtttcctctcaggtgcccctcaatagagggcatgcccttcttcctcctaggaagggacacaggcgctctagtagtgattcccctttgggaatctctggttttatgcagtcttctccagttccctccggaggagagagctcggggttcgagaagccgattcagttggtcttgaaggcgtcctttagggacagcctggatgggggccatgctaatgagcctgttaatgggaggaaggaggaggctgcggatgatttgttcagggaatacatgaatttggacaactttgataatctgaactttcctggcatggaagataaggacttggatagcaggaccagtggttccaagacagttgagagcagcgataatgaagttgagagtcatgtcaatgggaaggcgagtggggctcagggggcaagttcaagctgctcggaggaaaggagggaaggagtcaagaggagttcaaatggggaggttgcaccgggttcccggcatcggaggagtttttcgttggatagttccatagggaactttaacattgaagatggattgcctaagcttcctccttcgaaaaatcaaatgggtcagcactcacctagcaattcgatggacggcaaaatgtcagaaacctccacggagtttggaaatggcgaatttagtgcagaggaggtaaagaaaataatggaaagtgataaactagctgaaattgcttcgactgatcccaaacgtgcaaaaaggattttggctaatcgtcaatcagctgctcgttcaaaggagaggaagatgcgatacattgctgaattggaacacaaagtgcaaactcttcagacagaaacaaccacattgtctactcagtttaccaaattacagagggataactctgaccttaaaagtgagaacaacgagtgcaaattaaggcttcaagccatggaacaacagtctctattgaaagatgctctgaacgagactttggatgctgaagtccggcgtttgaggcgtgctgttgcagaacttggcggtgaatccctcacaagttgcatggctcgacagcttgctattaaccaacaaatgttcgagttacagcatcagcagcccagccaacagagacattttctactgcaaaatcaccatactcaggaagagatagagtctcgatcacagcagattcaaggcaatgaattgcatccccaggcacagattcagtcacagcagattcaacgcaatgaattgcatccccagccttaaattgcagagaaatatgttgcctattaatggtgccaaatagtggaagcaaaatacttttggacgtggagctggtgaggtataagtataatctcaatcgtacataagcagtgatctagcattagtttgcttgaagtttcataagatcggttcatcatctttatttaatttattattttgactgttttacctgcatacaaactcggactatcctattcatgtagtaaaccttattgtcatgaatacaacccacctttctctattgagaggggtcatgttgttgc

SEQ ID NO: 15662 - protein, 513 aa, Glycine max
MEGVDQRNSSAFGVPVPRPPNQKSRMPPSHPSINVSPSATPYSQYPQRLRSPGSSHSRSLSQPPIFSLDSLPPLSPSPAAVTSMFDSISTTDMSVEESNVSSQVPLNRGHALLPPRKGHRRSSSDSPLGISGFMQSSPVPSGGESSGFEKPIQLVLKASFRDSLDGGHANEPVNGRKEEAADDLFREYMNLDNFDNLNFPGMEDKDLDSRTSGSKTVESSDNEVESHVNGKASGAQGASSSCSEERREGVKRSSNGEVAPGSRHRRSFSLDSSIGNFNIEDGLPKLPPSKNQMGQHSPSNSMDGKMSETSTEFGNGEFSAEEVKKIMESDKLAEIASTDPKRAKRILANRQSAARSKERKMRYIAELEHKVQTLQTETTTLSTQFTKLQRDNSDLKSENNECKLRLQAMEQQSLLKDALNETLDAEVRRLRRAVAELGGESLTSCMARQLAINQQMFELQHQQPSQQRHFLLQNHHTQEEIESRSQQIQGNELHPQAQIQSQQIQRNELHPQP

SEQ ID NO: 15663 - protein, 488 aa, Glycine max
MPPSHPSINVSPSATPYSQYPQRLRSPGSSHSRSLSQPPIFSLDSLPPLSPSPAAVTSMFDSISTTDMSVEESNVSSQVPLNRGHALLPPRKGHRRSSSDSPLGISGFMQSSPVPSGGESSGFEKPIQLVLKASFRDSLDGGHANEPVNGRKEEAADDLFREYMNLDNFDNLNFPGMEDKDLDSRTSGSKTVESSDNEVESHVNGKASGAQGASSSCSEERREGVKRSSNGEVAPGSRHRRSFSLDSSIGNFNIEDGLPKLPPSKNQMGQHSPSNSMDGKMSETSTEFGNGEFSAEEVKKIMESDKLAEIASTDPKRAKRILANRQSAARSKERKMRYIAELEHKVQTLQTETTTLSTQFTKLQRDNSDLKSENNECKLRLQAMEQQSLLKDALNETLDAEVRRLRRAVAELGGESLTSCMARQLAINQQMFELQHQQPSQQRHFLLQNHHTQEEIESRSQQIQGNELHPQAQIQSQQIQRNELHPQP

SEQ ID NO: 15664 - protein, 430 aa, Glycine max
MFDSISTTDMSVEESNVSSQVPLNRGHALLPPRKGHRRSSSDSPLGISGFMQSSPVPSGGESSGFEKPIQLVLKASFRDSLDGGHANEPVNGRKEEAADDLFREYMNLDNFDNLNFPGMEDKDLDSRTSGSKTVESSDNEVESHVNGKASGAQGASSSCSEERREGVKRSSNGEVAPGSRHRRSFSLDSSIGNFNIEDGLPKLPPSKNQMGQHSPSNSMDGKMSETSTEFGNGEFSAEEVKKIMESDKLAEIASTDPKRAKRILANRQSAARSKERKMRYIAELEHKVQTLQTETTTLSTQFTKLQRDNSDLKSENNECKLRLQAMEQQSLLKDALNETLDAEVRRLRRAVAELGGESLTSCMARQLAINQQMFELQHQQPSQQRHFLLQNHHTQEEIESRSQQIQGNELHPQAQIQSQQIQRNELHPQP

SEQ ID NO: 15665 - DNA, 563 bp, Glycine max
aataccactcctcgcgaatctgagattgtcggaagatacgatcgaattcggggtcagggtttttctctgccgacgaactgcttaataatctgatcaatgacgccgcctccaggactttactccggtcgcagcactcttgccctggtggctcgtgcttcggctttcgggctgggtctcatctacggcaacgtcaagctcaaggctttgaagataaagaagaactcacagattaaggctgaagccaaggcggaagccaaggctcatcactaaaccgaacatctttctctaccttcaaaataagattatgaagaatcccagtgaacgttccacaaatgtagctgtttcttcttcttgagctatatctcccttggtgacatttttttggttttttctatgttcattttggctatcgttgacgaagaagagcaactacttttgtctgcaaaagcaatcataataccattttgattaaacctgatgctatgaacacccatatgtttctactcataacaagattggttatatgatctgttgtgtgttgccactcaaaaaccaaggcattc

SEQ ID NO: 15666 - protein, 57 aa, Glycine max
MTPPPGLYSGRSTLALVARASAFGLGLIYGNVKLKALKIKKNSQIKAEAKAEAKAHH

SEQ ID NO: 15667 - protein, 30 aa, Glycine max
NTTPRESEIVGRYDRIRGQGFSLPTNCLII

SEQ ID NO: 15668 - DNA, 1262 bp, Glycine max
atatttatttctcctgctgcgacgactggtacatgatcagcagttcccccattttaagttagattattatcacacctcgtgaacacagattgcagttggtgcggaggatcgatctcgccatgaatttcaattgcactgctaacaaggagcaaaagaaaaccgtagaccaatctatcttattgtgctgcaagttctttgtctctgaatcacgcaacaatgccactctcaatgcaatagaacgagctgcaaggtcaaacccagaaactgtgattgtgaacatgtttcatgatcgagcttataacagggcaaggtacgaccttgtgtcgtatgttttgcatgactgcacaggaaatcccatatacagccccttgcatcaaactgtcatagccatggctgaggctacattcaatgccgtcaaccttgaattccatgaaggtgctcaccctcgcttgggcgcagtggacgacattgttttccatccacttggtcatgcgtcgctcgacgaggcagcgtggctcgccaaagcagtggcagcagacattggcaaccgattcagtgtgccagtgtttctgtacgctgcagcccacccaacagggaaggaacttgacgccataaggcgagagcttggatattacaggccaaattctaggggcagccaatgggccgggtgggcaatgcccgaaacgcttcctctaagcccagatgaagggcctaacgtcgtttcaagagctaaaggcatcacaatgattggtgcacgcccttgggtcacactctacaacgttccaattttgtgcactgatgtgtcagtagcaagaaggattgcaaggaaggtgagtgctcgtggcggtggcctccccactgtgcaaacgattgcgcttgtccatgaggactcaactgagatagcctgcatgcttttggactccaagcaggttggagcggatagggttcaaaatagggttgagatgctggccgcacaagagggactggacatagaacaaggttatttcactgacatttctccagaaatgatcgtagagaaatacatgaaattaatcaatagtgctaacaaatcgtgatcatgcatgtgtgtaactcattgaacttgttgatgagtaatcataaatgatcgaaggctgtaattttcagtaagtgtaaaacaaaggttatgaattgtgattccaaaatggttggctgggataacaaactaagggtaacaaatatatctatctgtatttatatatcaaaataataacctttcgccc

SEQ ID NO: 15669 - protein, 318 aa, Glycine max
MNFNCTANKEQKKTVDQSILLCCKFFVSESRNNATLNAIERAARSNPETVIVNMFHDRAYNRARYDLVSYVLHDCTGNPIYSPLHQTVIAMAEATFNAVNLEFHEGAHPRLGAVDDIVFHPLGHASLDEAAWLAKAVAADIGNRFSVPVFLYAAAHPTGKELDAIRRELGYYRPNSRGSQWAGWAMPETLPLSPDEGPNVVSRAKGITMIGARPWVTLYNVPILCTDVSVARRIARKVSARGGGLPTVQTIALVHEDSTEIACMLLDSKQVGADRVQNRVEMLAAQEGLDIEQGYFTDISPEMIVEKYMKLINSANKS

SEQ ID NO: 15670 - protein, 265 aa, Glycine max
MFHDRAYNRARYDLVSYVLHDCTGNPIYSPLHQTVIAMAEATFNAVNLEFHEGAHPRLGAVDDIVFHPLGHASLDEAAWLAKAVAADIGNRFSVPVFLYAAAHPTGKELDAIRRELGYYRPNSRGSQWAGWAMPETLPLSPDEGPNVVSRAKGITMIGARPWVTLYNVPILCTDVSVARRIARKVSARGGGLPTVQTIALVHEDSTEIACMLLDSKQVGADRVQNRVEMLAAQEGLDIEQGYFTDISPEMIVEKYMKLINSANKS

SEQ ID NO: 15671 - protein, 228 aa, Glycine max
MAEATFNAVNLEFHEGAHPRLGAVDDIVFHPLGHASLDEAAWLAKAVAADIGNRFSVPVFLYAAAHPTGKELDAIRRELGYYRPNSRGSQWAGWAMPETLPLSPDEGPNVVSRAKGITMIGARPWVTLYNVPILCTDVSVARRIARKVSARGGGLPTVQTIALVHEDSTEIACMLLDSKQVGADRVQNRVEMLAAQEGLDIEQGYFTDISPEMIVEKYMKLINSANKS

SEQ ID NO: 15672 - DNA, 1007 bp, Glycine max
aaatccgtcgagcagaaccaaatccgtcacgactccacgagcactcgagcagggcaacacagattcgcgcagcccacctcgtcgagcattccccatcagatctgatcgaatccggcggcggcggcgatggcggcggagaagccggccccggcgaaggtgctctactgcggcgtctgcggcctccccgcggagtactgcgaattcggccccgacttcgagcgctgcaagccgtggctccgcgcccacgcgcccagagtctaccccgacgagctcgtggcctcctcctccggtggcgatgataaggacgtgggcaaggtcggcgagcgcctccagggcgtcagcatctccaccgccgacggctccacaagcgcagggggtgcttcggcatccaagactgaagaggtgaaacgactgccgggtggtaagctcaagaaaaaggacaagcaagaggttattattgagaagattgtccgcaacaagcgcaagtgtgttactgtggtgaaaggcctggatttgtttggtgtaaagctgagtgatgcttcgaagaagcttggaaagaagtttgctactggagcttcggttgtcaagggcccaactgagaaggagcaaatcgatgtccaaggagacatatcatatgatgttgtggacttcattacagctacatggccagatgttcctgaatcggccgtatatttcattgaagatggaaggaaggttgctgctgcttgattgaatatggtttacaaggcaatacaccagtggagttacaaatatgatagaaatataaggcaagagatggccgttaaggcatgcctgtcacatgggttcttaatccttactcccgagatactactcgctccattttgacttgtgggtcagttcacaagtggtgttttaactaccgctggcacgtcgccttcgtgtatcatcttttatttgatagtcgagttcctcctgcaggcgagtatgacatccatatgtggtttatatatgtttaatgttttttc

SEQ ID NO: 15673 - protein, 200 aa, Glycine max
MAAEKPAPAKVLYCGVCGLPAEYCEFGPDFERCKPWLRAHAPRVYPDELVASSSGGDDKDVGKVGERLQGVSISTADGSTSAGGASASKTEEVKRLPGGKLKKKDKQEVIIEKIVRNKRKCVTVVKGLDLFGVKLSDASKKLGKKFATGASVVKGPTEKEQIDVQGDISYDVVDFITATWPDVPESAVYFIEDGRKVAAA

SEQ ID NO: 15674 - protein, 134 aa, Glycine max
NPSSRTKSVTTPRALEQGNTDSRSPPRRAFPIRSDRIRRRRRWRRRSRPRRRCSTAASAASPRSTANSAPTSSAASRGSAPTRPESTPTSSWPPPPVAMIRTWARSASASRASASPPPTAPQAQGVLRHPRLKR

SEQ ID NO: 15675 - DNA, 797 bp, Glycine max
acattttctttacactgaaccatcacttagagagtgcgcttcacacaagaaacaaaacaaaatggctaggcgatttgccattgttgcgatctgcatcgtcctcatcgccggcgtcggaggtcaagctccgtcgtcaccaccaaccaccacaccagcaccacccaccacaacaacccccccgccagcagccactcctcctcctgtctcagctcctccaccagtcacaacttctcctcctccagccaccaccgctcctcctcctgctactcctcctccagttgcttctcctcctccggccactcctcctccagtggcaactcctcctccagcaactccccctcccgtcgcttctcctccaccagcaactcctccacccgtcgcatctcctcctccagcaactcctcctccagctcctcttgcatctcctcccgctcaggttccagctcttgctcctacgacgccagaagctccctctacatctccgtcgtctagcccgcctctcccggcgactgatggccctggaccgagcgtcgaagggccaggaccttccacagattcgaatgaccagaatggagcaagcaagacagtttcaagcttggtacttggatctgttctcgtttggtttatgatctaagcgtgggagcctttcgctcggtgttccttgcatttgttttcatgttgatgtttgtttgttccattgttattactttcggaaccgtattcttttggattattatcttttggagaggatattattgaggagttgagatggagatatcaggatatatttcgtttgg

SEQ ID NO: 15676 - protein, 210 aa, Glycine max
HFLYTEPSLRECASHKKQNKMARRFAIVAICIVLIAGVGGQAPSSPPTTTPAPPTTTTPPPAATPPPVSAPPPVTTSPPPATTAPPPATPPPVASPPPATPPPVATPPPATPPPVASPPPATPPPVASPPPATPPPAPLASPPAQVPALAPTTPEAPSTSPSSSPPLPATDGPGPSVEGPGPSTDSNDQNGASKTVSSLVLGSVLVWFMI

SEQ ID NO: 15677 - protein, 208 aa, Glycine max
IFFTLNHHLESALHTRNKTKWLGDLPLLRSASSSSPASEVKLRRHHQPPHQHHPPQQPPRQQPLLLLSQLLHQSQLLLLQPPPLLLLLLLLQLLLLLRPLLLQWQLLLQQLPLPSLLLHQQLLHPSHLLLQQLLLQLLLHLLPLRFQLLLLRRQKLPLHLRRLARLSRRLMALDRASKGQDLPQIRMTRMEQARQFQAWYLDLFSFGL

SEQ ID NO: 15678 - protein, 190 aa, Glycine max
MARRFAIVAICIVLIAGVGGQAPSSPPTTTPAPPTTTTPPPAATPPPVSAPPPVTTSPPPATTAPPPATPPPVASPPPATPPPVATPPPATPPPVASPPPATPPPVASPPPATPPPAPLASPPAQVPALAPTTPEAPSTSPSSSPPLPATDGPGPSVEGPGPSTDSNDQNGASKTVSSLVLGSVLVWFMI

SEQ ID NO: 15679 - DNA, 1105 bp, Glycine max
atcgccgcctcatcgccgccaggagttcgagttccccccgaaccgtcgccatggctgccgcaccagtcatctccccgaaagaaaatctgcccccttcgctgacctccacctccgagccccctccactcttcgacggcaccaccaggttgtatgttgcatatcactgcccatatgcgcagcgcgcttggattgccaggaactacaagggtttgcaagacaagatcaagatagtcgggatcgatctcgcagacaggccggcttggtacaaggagaaggtttacccacagaacaaggtgccttcactggagcataacaacgaggtgaaaggagaaagcttggatttggtcaagtacattgacagcaatttcgatggcccagcattgctccccgatgattctgcaaagaagcagtttgccgaggagctgcttgtgtacatcgatgagttcaataaagcactatactcatccataacctccaagggagatgtggcagaggaaactgttgctgcgctggataaaatagaagcggccctgggaaagttcagtgatggccctttcttccttggccagttcagtttggtggacattgcatatgtgccatttatcgaaaggtttcagatattcttttctggtatcaaaaactatgatatcaccaaggacagacctaatattcagaaattcatcgaggaagtgaacaagatcgatgcgtacacgcaaacgaaactggacccacaatttctacttgaacacacaaagaagcggcttgggattgagtgaagatgtgaccaaggatgaccaagagaccagggaactactgcagcatggaagatgaagaggaagacactcaggagtgtgcttgcttgctactactactagatcatgaaaggcacgcgttgctgcgcccgtcttatggtaataataaattttaggcttgacacaattgtgcggaagcattgtatgtaaactttagatcttctagtattataaataattttgtgtaatttcatttttacctggaatttaaagcaatgtagtagtattaggcttatgccgttgtcattacaatacaacgattgttcaaagaccttggtgaacaacaacggttc

SEQ ID NO: 15680 - protein, 257 aa, Glycine max
RRLIAARSSSSPRTVAMAAAPVISPKENLPPSLTSTSEPPPLFDGTTRLYVAYHCPYAQRAWIARNYKGLQDKIKIVGIDLADRPAWYKEKVYPQNKVPSLEHNNEVKGESLDLVKYIDSNFDGPALLPDDSAKKQFAEELLVYIDEFNKALYSSITSKGDVAEETVAALDKIEAALGKFSDGPFFLGQFSLVDIAYVPFIERFQIFFSGIKNYDITKDRPNIQKFIEEVNKIDAYTQTKLDPQFLLEHTKKRLGIE

SEQ ID NO: 15681 - protein, 241 aa, Glycine max
MAAAPVISPKENLPPSLTSTSEPPPLFDGTTRLYVAYHCPYAQRAWIARNYKGLQDKIKIVGIDLADRPAWYKEKVYPQNKVPSLEHNNEVKGESLDLVKYIDSNFDGPALLPDDSAKKQFAEELLVYIDEFNKALYSSITSKGDVAEETVAALDKIEAALGKFSDGPFFLGQFSLVDIAYVPFIERFQIFFSGIKNYDITKDRPNIQKFIEEVNKIDAYTQTKLDPQFLLEHTKKRLGIE

SEQ ID NO: 15682 - DNA, 1324 bp, Glycine max
atcgaaagtcgaaacatcccctgtcactttgactcaactcacacaccaatctccatatccctaccaattttccctattcactcatcaattttctcgtatcagattttgtggtagtgtagtccaactgtccaacttagagcaggcagcatggaggatattctgttggataccaggtgggaagatgtaatctgccccatatgcttggaagtccctcataatagtgtgctccttcagtgttcatcttatgataaggggtgtcgttcttttgtatgtgacacaagtcagttgcactcaaattgcttggatcgttttaaaagcacacatagcatgccatcctcttcaacatatgattcaacctcccaaatgtctgatgcaaattccatggcaaatagtgagtcagtggtatctgattgtcaatacaagctgagttgtccgttgtgtagaggtgatgtttttgggtggattattgttgataaagctcgtgtgcatcttgatgagaagaagcgttgctgtgaagaggagcaatgtgcatttattggaagttactccgagctacaaaaacatgctcaactggaacaccctcatgcttgtccatcgaaaattgatcctgtccgacagcttgattggaaaaattttcagcagtcatctgagatcatagatgttttgagcactattcattcagaaattccacggggagtggtcttgggagattatgtgattgaatatggggatgatgacagtgcagatgagtttgaggacttccctggagatgaaggttctgtagcatctgtagagtatggcgagtataggctagatgagattgatgatgattttgttagtacaattggccacttgagaggtggaagtggttttcgcagatcgcggagacgtcattctcgctccaatgacaattagtatttgaactgaaggaagcagaatgagaggaagagatacactcaacatagaaaccagtgtgatcttgatgcagctggtgtgacaactcgcaaaggttacatttaggtcatctaatgcatttgtgataacttgagggatcaacattacaagattgatagttgaatgtggattatattccaagtttctgttatgcttaccattaactaccatttagtatgctagccattgggagcctgttaatttactcctgtgccaccaaagtgattccgctagctttatgctctgtagaacaatgaattacttcttttccttgtatatatagccgcttagttgtgatgtattataatgattctaaagtagggatgtttccatgtcactgaataaaacttttgtttttttttcctccccc

SEQ ID NO: 15683 - protein, 255 aa, Glycine max
MEDILLDTRWEDVICPICLEVPHNSVLLQCSSYDKGCRSFVCDTSQLHSNCLDRFKSTHSMPSSSTYDSTSQMSDANSMANSESVVSDCQYKLSCPLCRGDVFGWIIVDKARVHLDEKKRCCEEEQCAFIGSYSELQKHAQLEHPHACPSKIDPVRQLDWKNFQQSSEIIDVLSTIHSEIPRGVVLGDYVIEYGDDDSADEFEDFPGDEGSVASVEYGEYRLDEIDDDFVSTIGHLRGGSGFRRSRRRHSRSNDN

SEQ ID NO: 15684 - protein, 195 aa, Glycine max
MPSSSTYDSTSQMSDANSMANSESVVSDCQYKLSCPLCRGDVFGWIIVDKARVHLDEKKRCCEEEQCAFIGSYSELQKHAQLEHPHACPSKIDPVRQLDWKNFQQSSEIIDVLSTIHSEIPRGVVLGDYVIEYGDDDSADEFEDFPGDEGSVASVEYGEYRLDEIDDDFVSTIGHLRGGSGFRRSRRRHSRSNDN

SEQ ID NO: 15685 - protein, 183 aa, Glycine max
MSDANSMANSESVVSDCQYKLSCPLCRGDVFGWIIVDKARVHLDEKKRCCEEEQCAFIGSYSELQKHAQLEHPHACPSKIDPVRQLDWKNFQQSSEIIDVLSTIHSEIPRGVVLGDYVIEYGDDDSADEFEDFPGDEGSVASVEYGEYRLDEIDDDFVSTIGHLRGGSGFRRSRRRHSRSNDN

SEQ ID NO: 15686 - DNA, 1081 bp, Glycine max
attaagtgcttcccatttcagaaaagtttttcagtgttcctgtggaaaactggaaacatcactgggatataattacatagagatctccatccagggagagtccttcatgttacatcagataagaaaaatggttgggacagctgtggcagtaaaacgcaaggcactgccaaaagatattataaagctgtcactgacaaggttctcgcggattattctaccccttgcaccttcagaagctctgatattaaggggaaacagattctcaataagaacacgaccaggaaacataacaaggcctgagatgcagacaatagttaaatcagaagaaattaagaaggcagttgatgatttttacacatcagttatgctacctcaagtttcaaaattattggacccatcaagatctccttgggatgaatggattgagaagctggatgctcacacaagcataccaaatgatcagttggatgaggtcaggaaggcttggaatttgtttaaagaaaaatttgaaactacaactagcactcatccatgataaagtgaaggaaaaaagaaggaatgcattcatacctttgttctgattgtcctgcactgtgcaagtttgaagggtaaacagaatttggaatttattcagcctacctagtctacaatggacaatcatgcttgctcaatacttggtagttatggaagaatttggcttgaaagatgtgttttaattattaattaattggcttgaatggccagcaaacatgattcctcaagaattcaacaaattcaacatccaagcaggatagtacaacttcagaggctgacaaaatttcactagtcaacaatacctcagcttcagcttccacaagcagctacaatattgaataatatttccaaattgggttagaatgttagagatgggggtaggcttctgagttgctacatgcaatcatttaccctctgaaactgaaacggatgtatactttccatatcacactgtcattcttacattatgcttaaaatataccatagatatgtcatattgtcattcttaaaatattttattcttaaaatgtatgcatcttgttagtcc

SEQ ID NO: 15687 - protein, 177 aa, Glycine max
LSASHFRKVFQCSCGKLETSLGYNYIEISIQGESFMLHQIRKMVGTAVAVKRKALPKDIIKLSLTRFSRIILPLAPSEALILRGNRFSIRTRPGNITRPEMQTIVKSEEIKKAVDDFYTSVMLPQVSKLLDPSRSPWDEWIEKLDAHTSIPNDQLDEVRKAWNLFKEKFETTTSTHP

SEQ ID NO: 15688 - protein, 142 aa, Glycine max
MLHQIRKMVGTAVAVKRKALPKDIIKLSLTRFSRIILPLAPSEALILRGNRFSIRTRPGNITRPEMQTIVKSEEIKKAVDDFYTSVMLPQVSKLLDPSRSPWDEWIEKLDAHTSIPNDQLDEVRKAWNLFKEKFETTTSTHP

SEQ ID NO: 15689 - protein, 135 aa, Glycine max
MVGTAVAVKRKALPKDIIKLSLTRFSRIILPLAPSEALILRGNRFSIRTRPGNITRPEMQTIVKSEEIKKAVDDFYTSVMLPQVSKLLDPSRSPWDEWIEKLDAHTSIPNDQLDEVRKAWNLFKEKFETTTSTHP

SEQ ID NO: 15690 - DNA, 1362 bp, Glycine max
actacagtctccaatgatagtaactttttccctcaccttcttccaattcaaaccagtggcattttcgcaaatgtgagcggatccaggtccgtttctaccccaacttctgcttccacttccaccctcgtatataaacctttcactttccacttcccctgttcaaaaacactcagcaaaagaataaaagaaacccaaaatctctctctctctctcgttcgctttccgtatccatatatatcccaaaccctaccgttaggttccccaattcttcaacaccccgtggaccggtgctctgcttcttagtagttcgtacggtttttccgtcgattgcctccgaaacgatgtcgtatcgcccaagcgggaactccaggaccgaggtccgccggaaccggtacaaggtggcggtggacgcggaggaaggtcggagacggcgagaggacacgatggtggagatccgcaagaaccgcagagaagagagtttgcagaagaagaggcgcgaggggctccaacctcagcagatgcctgcgtccgttcactctagtttggttgagaagaagttggaacatctaccatcgatggttactggtgtttggactgatgataataacctgcagctcgaggcgacgacgcagtttcggaagctgctttcgattgaacgtagtccaccgattgaggaggttatacagactggtgtggtttctcgatttgttgagtttctcatgagggaagactttccgcagttgcagtttgaggcagcttgggctttgacaaatatagcttctggaacgtctgaaaacacaaaggttgtgattgatcacggggctgtcccaattttcgtgaagctacttgcttctcctagtgatgatgtccgcgaacaggcagtgtgggcattaggaaatgtcgctggggattcgcctagatgtcgtgatcttgttctaagtcatggggctttgcttcctttgttggcacaattaaatgaacatgcgaagctttctatgcttagaaatgctacctggacactttcaaacttctgcaggggcaagccacagcctccttttgatcaggttaaacctgcacttcctgctcttgcccgtcttatccattcgaacgatgaagaagttttgactgatgcatgttgggcactgtcatatctttctgatggtacaaatgataaaattcaagctgtaattgaagctggtgtttgtccccgacttgttgagctgctgctgcacccatccccttcagtgctaattcctgctcttcgaactgttggaaatattgtcactggagatgatatgcagacacaggttatcatcaatcaccaggctcttccttgccttctgaatctgttgaccaataatt

SEQ ID NO: 15691 - protein, 340 aa, Glycine max
MSYRPSGNSRTEVRRNRYKVAVDAEEGRRRREDTMVEIRKNRREESLQKKRREGLQPQQMPASVHSSLVEKKLEHLPSMVTGVWTDDNNLQLEATTQFRKLLSIERSPPIEEVIQTGVVSRFVEFLMREDFPQLQFEAAWALTNIASGTSENTKVVIDHGAVPIFVKLLASPSDDVREQAVWALGNVAGDSPRCRDLVLSHGALLPLLAQLNEHAKLSMLRNATWTLSNFCRGKPQPPFDQVKPALPALARLIHSNDEEVLTDACWALSYLSDGTNDKIQAVIEAGVCPRLVELLLHPSPSVLIPALRTVGNIVTGDDMQTQVIINHQALPCLLNLLTNN

SEQ ID NO: 15692 - protein, 306 aa, Glycine max
MVEIRKNRREESLQKKRREGLQPQQMPASVHSSLVEKKLEHLPSMVTGVWTDDNNLQLEATTQFRKLLSIERSPPIEEVIQTGVVSRFVEFLMREDFPQLQFEAAWALTNIASGTSENTKVVIDHGAVPIFVKLLASPSDDVREQAVWALGNVAGDSPRCRDLVLSHGALLPLLAQLNEHAKLSMLRNATWTLSNFCRGKPQPPFDQVKPALPALARLIHSNDEEVLTDACWALSYLSDGTNDKIQAVIEAGVCPRLVELLLHPSPSVLIPALRTVGNIVTGDDMQTQVIINHQALPCLLNLLTNN

SEQ ID NO: 15693 - protein, 281 aa, Glycine max
MPASVHSSLVEKKLEHLPSMVTGVWTDDNNLQLEATTQFRKLLSIERSPPIEEVIQTGVVSRFVEFLMREDFPQLQFEAAWALTNIASGTSENTKVVIDHGAVPIFVKLLASPSDDVREQAVWALGNVAGDSPRCRDLVLSHGALLPLLAQLNEHAKLSMLRNATWTLSNFCRGKPQPPFDQVKPALPALARLIHSNDEEVLTDACWALSYLSDGTNDKIQAVIEAGVCPRLVELLLHPSPSVLIPALRTVGNIVTGDDMQTQVIINHQALPCLLNLLTNN

SEQ ID NO: 15694 - DNA, 1359 bp, Glycine max
taagaaggaacctggttgtagttggattgaggttgaaaacatggtccatgtctttttggttgatgatgctgtgcaccctgaggtgcatgcagtgtacagatatctggagcaactggtacatgaaatgaggaaattgggttatgttcctgatacaaagtttgtattacatgatatggaatctgaacaaaaggaatatgctttgtctactcatagtgaaaaacttgctgttgtttatggaattatgaaactccctttgggagctacaattcgggttttcaaaaatttgaggatatgcggggactgccataatgcattcaagtatatttctaaagtagtggaccgagagataattgtgagagataggaagcggtttcaccattttagaaatggtgaatgttcttgtagcaactactggtaggaagaggttctgttatttgattatcatcaatgattaatgtcaacactcaacagcactctaaggaacttaaaatatatgaagtgtgacatgaagcctttgcaatttggaattcaaaactgagactgataatagccccaaactgatctccatgatcactggacaatggcaaagagttgaaagtattccatgatcttcagtttgttcttgcagtctaaaggatggaaatttgccttctactaatccacctctattgcacatggacgacagagttcattattgctatatcaagtcattaaccatgtgaatagaggccagtaacattattaagaaaaatcagtttaatattgctcatgatgtggctggctttgtcactaatgccatgtcatctaagctatcgttgttacttcagtttcaacttttgcttcaagcgtttgttagctttaacaattgcatcaggcactgtaattcaattcagtggtgctcagtttaaatgcccaggcagatgaacaatgatacacagagctattatgaaagtaaaagaaacaaatttctgtacgctgttattgacttatggtcagtggccatcaatgtgcaagagaactccaagcagaacactctcaagtctcaatcttaagtatcagagaagctctagttaggctctcttacgcattgcttgtgctaataaaaagtgagagtaatgaccatagaaatcatctccccaacatatggcaagttcaatatatagaacaacctgagaaaaaaaaaatagaagcattcttattagagatggagaactatttatactattgcagtattgttggagccgtggaggttcgtgaatcaaaaacggttgtgaaccttttacaaccgagaatcatcctgtcatcctgactgtacaatcgtgctctttttaagggtgctagctatggctttgagccttt

SEQ ID NO: 15695 - protein, 138 aa, Glycine max
KKEPGCSWIEVENMVHVFLVDDAVHPEVHAVYRYLEQLVHEMRKLGYVPDTKFVLHDMESEQKEYALSTHSEKLAVVYGIMKLPLGATIRVFKNLRICGDCHNAFKYISKVVDREIIVRDRKRFHHFRNGECSCSNYW

SEQ ID NO: 15696 - protein, 125 aa, Glycine max
MVHVFLVDDAVHPEVHAVYRYLEQLVHEMRKLGYVPDTKFVLHDMESEQKEYALSTHSEKLAVVYGIMKLPLGATIRVFKNLRICGDCHNAFKYISKVVDREIIVRDRKRFHHFRNGECSCSNYW

SEQ ID NO: 15697 - protein, 106 aa, Glycine max
MVSGHQCARELQAEHSQVSILSIREALVRLSYALLVLIKSESNDHRNHLPNIWQVQYIEQPEKKKIEAFLLEMENYLYYCSIVGAVEVRESKTVVNLLQPRIILSS

SEQ ID NO: 15698 - DNA, 555 bp, Glycine max
gaagatgaaaaaatgtccgtgctctgttttcactagcagcaaaggttgctccaactattatttttattgatgaggttgatagcatgcttggaaagcggactaaatatggagagcatgaggcaatgagaaagattaaaaatgaattcatggcccactgggatggaatattgacaaaacctggtgagcgaattctggttcttgctgcaaccaacaggccatttgaccttgatgaagcaattataagacggtttgagcgcaggatcatggttggtcttccatctgctgagaacagggaaatgatcttgaaaactctcctagctaaggaaaaatatgaacatatagactttaatgagctttcaaccattacagaaggatatactggaagtgatcttaagaatttgtgcactgctgctgcttatcgacctgttagagaggtacttcaacaggagaggttgaaggaaaaggaaaagaagaaaacagaagcagaagttcaaagatcagaagatgcttctgatgctaaaggagataaagaagatggagtgattacttcaaggt

SEQ ID NO: 15699 - protein, 157 aa, Glycine max
MLGKRTKYGEHEAMRKIKNEFMAHWDGILTKPGERILVLAATNRPFDLDEAIIRRFERRIMVGLPSAENREMILKTLLAKEKYEHIDFNELSTITEGYTGSDLKNLCTAAAYRPVREVLQQERLKEKEKKKTEAEVQRSEDASDAKGDKEDGVITSR

SEQ ID NO: 15700 - protein, 144 aa, Glycine max
MRKIKNEFMAHWDGILTKPGERILVLAATNRPFDLDEAIIRRFERRIMVGLPSAENREMILKTLLAKEKYEHIDFNELSTITEGYTGSDLKNLCTAAAYRPVREVLQQERLKEKEKKKTEAEVQRSEDASDAKGDKEDGVITSR

SEQ ID NO: 15701 - protein, 136 aa, Glycine max
MAHWDGILTKPGERILVLAATNRPFDLDEAIIRRFERRIMVGLPSAENREMILKTLLAKEKYEHIDFNELSTITEGYTGSDLKNLCTAAAYRPVREVLQQERLKEKEKKKTEAEVQRSEDASDAKGDKEDGVITSR

SEQ ID NO: 15702 - DNA, 612 bp, Glycine max
atctagttaagtgtctcggttcagtatatcatgtgaatatattaattgagaaagttgcattttggtatttattggattcgttaaatggatattgaatccacagtgtagagctgagacacatttttcagtgtatacttcttgttacaatttttttttggtcttgttttccttcttgttacgttgtgtatttatgattctgaattgcctgtttttttaaacatcgtcagaggggctttgatcaacaatggctatcattaacattctcaaaggctatatttcttggaaatggtcttgttgctattttgtctgggctgtttggaaatgtacttgttgatacattggctcttggacctgtggccccctttgatgctgcttcatgttttcttgctattggtatggccatcatactatcttcatggtcagagaatttcggggatccttcagagaacaaggacttgcttacccaatttaggggtgctgctgtggccattgcttctgatgaaaagatagccttgctgggtgccatacagtctctctttgaaggttcaatgtacacctttgtgtttctatggactcctgcattgagcccaaatgatgaagagattccccatg

SEQ ID NO: 15703 - protein, 74 aa, Glycine max
MVLLLFCLGCLEMYLLIHWLLDLWPPLMLLHVFLLLVWPSYYLHGQRISGILQRTRTCLPNLGVLLWPLLLMKR

SEQ ID NO: 15704 - protein, 72 aa, Glycine max
MAIILSSWSENFGDPSENKDLLTQFRGAAVAIASDEKIALLGAIQSLFEGSMYTFVFLWTPALSPNDEEIPH

SEQ ID NO: 15705 - protein, 62 aa, Glycine max
MYLLIHWLLDLWPPLMLLHVFLLLVWPSYYLHGQRISGILQRTRTCLPNLGVLLWPLLLMKR

SEQ ID NO: 15706 - DNA, 1277 bp, Glycine max
gaacgtggaaaaatcaatgaaagttgaagattcaaaggaacactaaaacgacttgatacacgactcaattaaaaattcaaaggaacattgagacgatcctagcgcagctccggccaaaagatccgttgatgtttgttctcaggttcacattgcctttttacattttcgctgcacttgttgttccaccaattctcttcataggaaaatctttgtaggcttgtgctggaaatgctctgtgacttgtgctaatagtatcaccaaaagaagtcaaagaatcagaaagcattaatctggatttgcagtttgcacatattggcagtagttttcttttttcatttttcaattgttaaactagatgtctagaagacccccactccctcgtctcctccttaacaatgtctcttgcatgagaaatgcccagcaagttctgcgccatgtgaatgtctctcttcatgatggaggggcacttgtgctaacaggtgcaaatggctcgggaaagacaactttcctgcgcatgttagctgggttttcccgcccttctgctggtgaaatcctttggaatggacatgacattcaacaatctacaatattccatcagtataaacttcagcttaactggctctctctcaaggatgccattgataataagatgtcagttcttaacaatgtacaatggtttgaacttcttgaaaacaaggaagggaaggctatggctgcactagagttgatgggactaggaagattagccaacgaaaaaccaaggatgctatctatgggccagcggaaaagactgcaacttgccagattgctggcacttgatcgccccatatggttgctagatgagccttcagttgcactagatgatgacggtgtgaagttacttgagtatattattgcagaacacaggaaatatggaggaattgtgattgtggcaactcatctacccattgagatagaagattccttagtcttgaggcttccaccaaggtttccaaggaggatgacccttgtggatatgcttgaccgggcagatatcagttaattcctattttcgttcacattctcttcaaaacaggataggtgttgtaatcagctttgtgcaaatgtcatttgtgacaattcagtcaggattcacaattgagttgtctttatattgcagtcgtagtgctggtcatgcttgtatacttgtctgatgcctttgttcttgtatctttcatttcataaaacatttttaagaggccctgaaaatcatatattctggggggacattcaggctt

SEQ ID NO: 15707 - protein, 228 aa, Glycine max
MSRRPPLPRLLLNNVSCMRNAQQVLRHVNVSLHDGGALVLTGANGSGKTTFLRMLAGFSRPSAGEILWNGHDIQQSTIFHQYKLQLNWLSLKDAIDNKMSVLNNVQWFELLENKEGKAMAALELMGLGRLANEKPRMLSMGQRKRLQLARLLALDRPIWLLDEPSVALDDDGVKLLEYIIAEHRKYGGIVIVATHLPIEIEDSLVLRLPPRFPRRMTLVDMLDRADIS

SEQ ID NO: 15708 - protein, 211 aa, Glycine max
MRNAQQVLRHVNVSLHDGGALVLTGANGSGKTTFLRMLAGFSRPSAGEILWNGHDIQQSTIFHQYKLQLNWLSLKDAIDNKMSVLNNVQWFELLENKEGKAMAALELMGLGRLANEKPRMLSMGQRKRLQLARLLALDRPIWLLDEPSVALDDDGVKLLEYIIAEHRKYGGIVIVATHLPIEIEDSLVLRLPPRFPRRMTLVDMLDRADIS

SEQ ID NO: 15709 - protein, 175 aa, Glycine max
MLAGFSRPSAGEILWNGHDIQQSTIFHQYKLQLNWLSLKDAIDNKMSVLNNVQWFELLENKEGKAMAALELMGLGRLANEKPRMLSMGQRKRLQLARLLALDRPIWLLDEPSVALDDDGVKLLEYIIAEHRKYGGIVIVATHLPIEIEDSLVLRLPPRFPRRMTLVDMLDRADIS

SEQ ID NO: 15710 - DNA, 1384 bp, Glycine max
cccccccccccttacaggagatagacttaaagaagcacagcatattaacaaatctctttcagctttgggagatgtcattgcttcccttgctcagaaaaactctcacgtaccttacagaaatagtaaactcacacaactactccaagattcacttggaggacaggctaagacactaatgtttgttcacataagtccagagagtgatgctattggagaaacaattagtaccttaaaatttgctgaaagagttgccacagttgaacttggtgctgctcgagtaaacaaagatagtgcagatgttaaagaactcaaagaacagattgccagcctcaaggcagcactggcaagaaaggaaggagaatcagaacattcttttttgggcagctctgaaaaacatagaacaaaggctagtgagctatcaccttatcatataaaccagcgaggtcctgacgctgtggatcagcttggatgccggcaaccaatggttgaggttggcaacatagaacttcggagtaataccacagtgaggctcaaaactcagagctttgattttgatgagatatcagcaaattcaccatcatggcccccagtgaacaatagtcttgcacaaaactatggggaggatgacaaagaatctggtggttctggagaatgggttgataaggtcatggtcaacaagcaagatgtaaacaaaactgagaacctcttgggatgttggcaagcagcaagcaatgggaacttatctgaggccttttatcagaaatacctcaaagattctcccaaaatgtactcagaacaatccgataatatgttcatgggagccaatcagtttaacattgccggttcagatgacatggatgagcttgatgctgcaaccagtgattcctcagaacctgacttactttggcaatttaatcattccaaacttagcagcgtgaccaatggaattggatcaaagactatgaggtctaaggcagcaaaaaacagccctgagttgagcaagagtgctgttcattcttctcctctaggtccttcaccttcattgaaaaactcaaatggtgtcccacatcgaacagggaggcatacagctccagttgacgtgaaacgtagaactgggagtagaaaataaacgtgtttttactgaaaaggtaaagagagtgattgtttatattatgattcttttataattttttagatcgacgagagagagagagagattgttataatttttttcttggtttgtattttgtaatcacacggataatggagcaatagcgcttgttgctttgtttgtatcatgacattcttttattttactccacactagatttttaggggatgtaaaaaaatgaaactcctaacactgcaatgattttttatttgt

SEQ ID NO: 15711 - protein, 375 aa, Glycine max
PPPLTGDRLKEAQHINKSLSALGDVIASLAQKNSHVPYRNSKLTQLLQDSLGGQAKTLMFVHISPESDAIGETISTLKFAERVATVELGAARVNKDSADVKELKEQIASLKAALARKEGESEHSFLGSSEKHRTKASELSPYHINQRGPDAVDQLGCRQPMVEVGNIELRSNTTVRLKTQSFDFDEISANSPSWPPVNNSLAQNYGEDDKESGGSGEWVDKVMVNKQDVNKTENLLGCWQAASNGNLSEAFYQKYLKDSPKMYSEQSDNMFMGANQFNIAGSDDMDELDAATSDSSEPDLLWQFNHSKLSSVTNGIGSKTMRSKAAKNSPELSKSAVHSSPLGPSPSLKNSNGVPHRTGRHTAPVDVKRRTGSRK

SEQ ID NO: 15712 - protein, 317 aa, Glycine max
MFVHISPESDAIGETISTLKFAERVATVELGAARVNKDSADVKELKEQIASLKAALARKEGESEHSFLGSSEKHRTKASELSPYHINQRGPDAVDQLGCRQPMVEVGNIELRSNTTVRLKTQSFDFDEISANSPSWPPVNNSLAQNYGEDDKESGGSGEWVDKVMVNKQDVNKTENLLGCWQAASNGNLSEAFYQKYLKDSPKMYSEQSDNMFMGANQFNIAGSDDMDELDAATSDSSEPDLLWQFNHSKLSSVTNGIGSKTMRSKAAKNSPELSKSAVHSSPLGPSPSLKNSNGVPHRTGRHTAPVDVKRRTGSRK

SEQ ID NO: 15713 - protein, 215 aa, Glycine max
MVEVGNIELRSNTTVRLKTQSFDFDEISANSPSWPPVNNSLAQNYGEDDKESGGSGEWVDKVMVNKQDVNKTENLLGCWQAASNGNLSEAFYQKYLKDSPKMYSEQSDNMFMGANQFNIAGSDDMDELDAATSDSSEPDLLWQFNHSKLSSVTNGIGSKTMRSKAAKNSPELSKSAVHSSPLGPSPSLKNSNGVPHRTGRHTAPVDVKRRTGSRK

SEQ ID NO: 15714 - DNA, 1314 bp, Glycine max
ttaattaatgaagctgatcagcaacccccgcataaaatggatgagaacatgtggaagaatcgagagtacattgaagaaacaatttttttacttcaaagttctaattggccagaggcgctgaagcagcagtccgcagctgactgtgttgaattttccattacgcttgggaaactgaaagataaacttcataatacattgaaggctttggaatctttccaaactaaaaatgctgaacatgtatttaacacagttatgacatatttgcctcaagattttcgaggaacactaattagacaacaacgggaacgctcagagaggaataagcaagcagaggttgacactttggtaaattctggtggtagcatacacgaccggtatgctttgctgtggaaacagcaaatggacaggagaaggcaattagctcagcttggttctgcaacaggagtctataaaacacttgtgaagtaccttgttggggttcctcaggtattacttgattttactcggcagataaatgatgacgatgggcccatggaggaacagcgtcatcgctatggaccaccattgtacagcctcacctcgatgattctttctattcgactcttcctttcattatcatgggcacgatatgatgctaacaagttaaaaatggaacaaattgctgtcctggaacaagctgttgatgtctataccatggagttggaaaggtttttgacatttatcagtgaggtctttgcaaatgcacctttttttatttcagcagaggttgctggtgcattggaagcaaggaaaaatgatgactacaaagagataaatgttccagccgggaaaacttacgaggttttactctctgttgatgctgtaaactcatacattgcttgggatttttcattggtgcaaggcactataaatatggatattggatttagtttggagtttctaagtcctacgggggaaaaaactctgatgttaccttaccgccgttacgagtctgaccaagggaacttctgcacgttaatggctggaagctataaactgatctgggacaacacatattcaacctttttcaaaaaggtgctacggtacaagatagattgtatacctcccgtcacagattcagtgcagtctgactgaagcaagaatgctggagaaggccttgtgcttgagacaggatagctgatgattcatttgctagtcattttaatctttttagaaacaaatgttccaattactcatgtcaagattgatacacatttaattgtgaagaggaaatgaacgggaaaaattaatcttttgtataaaaattttattgct

SEQ ID NO: 15715 - protein, 377 aa, Glycine max
LINEADQQPPHKMDENMWKNREYIEETIFLLQSSNWPEALKQQSAADCVEFSITLGKLKDKLHNTLKALESFQTKNAEHVFNTVMTYLPQDFRGTLIRQQRERSERNKQAEVDTLVNSGGSIHDRYALLWKQQMDRRRQLAQLGSATGVYKTLVKYLVGVPQVLLDFTRQINDDDGPMEEQRHRYGPPLYSLTSMILSIRLFLSLSWARYDANKLKMEQIAVLEQAVDVYTMELERFLTFISEVFANAPFFISAEVAGALEARKNDDYKEINVPAGKTYEVLLSVDAVNSYIAWDFSLVQGTINMDIGFSLEFLSPTGEKTLMLPYRRYESDQGNFCTLMAGSYKLIWDNTYSTFFKKVLRYKIDCIPPVTDSVQSD

SEQ ID NO: 15716 - protein, 365 aa, Glycine max
MDENMWKNREYIEETIFLLQSSNWPEALKQQSAADCVEFSITLGKLKDKLHNTLKALESFQTKNAEHVFNTVMTYLPQDFRGTLIRQQRERSERNKQAEVDTLVNSGGSIHDRYALLWKQQMDRRRQLAQLGSATGVYKTLVKYLVGVPQVLLDFTRQINDDDGPMEEQRHRYGPPLYSLTSMILSIRLFLSLSWARYDANKLKMEQIAVLEQAVDVYTMELERFLTFISEVFANAPFFISAEVAGALEARKNDDYKEINVPAGKTYEVLLSVDAVNSYIAWDFSLVQGTINMDIGFSLEFLSPTGEKTLMLPYRRYESDQGNFCTLMAGSYKLIWDNTYSTFFKKVLRYKIDCIPPVTDSVQSD

SEQ ID NO: 15717 - protein, 361 aa, Glycine max
MWKNREYIEETIFLLQSSNWPEALKQQSAADCVEFSITLGKLKDKLHNTLKALESFQTKNAEHVFNTVMTYLPQDFRGTLIRQQRERSERNKQAEVDTLVNSGGSIHDRYALLWKQQMDRRRQLAQLGSATGVYKTLVKYLVGVPQVLLDFTRQINDDDGPMEEQRHRYGPPLYSLTSMILSIRLFLSLSWARYDANKLKMEQIAVLEQAVDVYTMELERFLTFISEVFANAPFFISAEVAGALEARKNDDYKEINVPAGKTYEVLLSVDAVNSYIAWDFSLVQGTINMDIGFSLEFLSPTGEKTLMLPYRRYESDQGNFCTLMAGSYKLIWDNTYSTFFKKVLRYKIDCIPPVTDSVQSD

SEQ ID NO: 15718 - DNA, 1057 bp, Glycine max
cccccccccctacaaccaaatggttgtttatattgaagcctgtgaatctggatctatgtttaacaagatccttcctgccaatatcagcatttatgccactactgcttctaatcctgatgaaagctcatgggctacctattgctctcctgatgacaaggtcaatggcaaagaaattggctcatgcttgggagacttgtactctgtgaatttcttggagaatttggaatctgccaaccctgctaaggagactttgttgaagcaatatcagattattaagaagaagactacagcttctgaagttatgcaatatggtgagcttaagattgataaggaaatcattggattattcgaaggaaataacactaaagaagaagctctggttgctgaaaaggaagaagattttgcaaagtacacttctttggtcgactcaagatatgtcaagttaaattatttgaagagaaagcatgaaaaactcggcactgaacaaactgcttatggtcttgctgaagaattggactccatgaagaaatttgatagcagctttggaagcttgagctctgctcttaatttgaatgttgatgctaaagttgatgacattgatttcgagtgcttgaagactagagtcgctatgtatgaaggtgtctgtggaaagttcagtgattatggcttgaagtacgtcagatatttgcacttctcttgtgtccaaggtgttgatatttacgatttcgaaagtgctttaatgagagcttgctaatgtatggtcgattgatgaaatagttattgagagaaaataggtagtgtcatgcattcattgatactttataaaatttcaggatagtatcttgaaattactttaatacttatactttgaactatattacatactttcgtaacatataatgactttataactatgcatgaagtgaaaattacattttaataaaaatacttgatatatctaaaaaaaaaaaaaaaaaaataaaaaaaaaaaaaaaaaagaattcctgcagcccgggggatccactagttctagagcggccgccaccgcggggagctc

SEQ ID NO: 15719 - protein, 250 aa, Glycine max
PPPYNQMVVYIEACESGSMFNKILPANISIYATTASNPDESSWATYCSPDDKVNGKEIGSCLGDLYSVNFLENLESANPAKETLLKQYQIIKKKTTASEVMQYGELKIDKEIIGLFEGNNTKEEALVAEKEEDFAKYTSLVDSRYVKLNYLKRKHEKLGTEQTAYGLAEELDSMKKFDSSFGSLSSALNLNVDAKVDDIDFECLKTRVAMYEGVCGKFSDYGLKYVRYLHFSCVQGVDIYDFESALMRAC

SEQ ID NO: 15720 - protein, 244 aa, Glycine max
MVVYIEACESGSMFNKILPANISIYATTASNPDESSWATYCSPDDKVNGKEIGSCLGDLYSVNFLENLESANPAKETLLKQYQIIKKKTTASEVMQYGELKIDKEIIGLFEGNNTKEEALVAEKEEDFAKYTSLVDSRYVKLNYLKRKHEKLGTEQTAYGLAEELDSMKKFDSSFGSLSSALNLNVDAKVDDIDFECLKTRVAMYEGVCGKFSDYGLKYVRYLHFSCVQGVDIYDFESALMRAC

SEQ ID NO: 15721 - protein, 232 aa, Glycine max
MFNKILPANISIYATTASNPDESSWATYCSPDDKVNGKEIGSCLGDLYSVNFLENLESANPAKETLLKQYQIIKKKTTASEVMQYGELKIDKEIIGLFEGNNTKEEALVAEKEEDFAKYTSLVDSRYVKLNYLKRKHEKLGTEQTAYGLAEELDSMKKFDSSFGSLSSALNLNVDAKVDDIDFECLKTRVAMYEGVCGKFSDYGLKYVRYLHFSCVQGVDIYDFESALMRAC

SEQ ID NO: 15722 - DNA, 1164 bp, Glycine max
atcatgcgttctcagcttgtgaaatcgaatatcaaaacccctccaaggccaaaacggcgtcgtcaaccactcaaatcatggcctgttactttctccccctttgctcgcgctctcgctctctctcgcatcacctctctctctccaccaaaccctaccccaaccctctctgctaagaaaccgcaaccctctcatggatctgtccatgcagatttatcccaaccggaacactccgagtcttccgacgaggacttcgatggagttgtccaagcagatttttcatttttcgatcccaaacctaatgattttcacggagccaagaccttgctgcaaacctacctcgacgaccaggaatgggatttgagtgcctttgtagacttgattttggcacagaccaccgtaggctctgttgttaagatagaggacgacgaggatgaagggctcttcgctcttgttactgctcttaatttatatagatacagggagcataagtgtattgcgacagttaaggattttctcctccataaagtgcgccaagagaagagtgtccatgaccagttgaaattgctgttgggggagcaagcgcatgatgttggtctcctggtatcgcagcgcatggtgaaccttcctccccagcttctgccacctctttatgatgccctttttgatgaagtgtcctgggccacggaagatgagccgacggaggagctccagaattccttcaagtttaagcattatataatacttaccaaaatttacgtgctcaagaatgtagaacagaaaagaaaacagagcaatggtagtgatgaggcaataatatacataaagcttgaggatgaaatttttcacaagttaagctcgtggtccttctgttttccattgcaaactcagcagcttgcacctcatgagctgaggaattacaggtcaacgggattaatcgtggctgttgaagctgacaaaattccaacatttcgtcaagaattagcttctctaataaatgaaacctgaaggcatcgacaaggctactggataatttattatatgatagaatcttaatactttcatgagacatgcatttttacgcagattgaattctttttgcaagggtttgagctgccaaattttgaaattttgttttttaattttctatgatcccttttgttctgc

SEQ ID NO: 15723 - protein, 334 aa, Glycine max
IMRSQLVKSNIKTPPRPKRRRQPLKSWPVTFSPFARALALSRITSLSPPNPTPTLSAKKPQPSHGSVHADLSQPEHSESSDEDFDGVVQADFSFFDPKPNDFHGAKTLLQTYLDDQEWDLSAFVDLILAQTTVGSVVKIEDDEDEGLFALVTALNLYRYREHKCIATVKDFLLHKVRQEKSVHDQLKLLLGEQAHDVGLLVSQRMVNLPPQLLPPLYDALFDEVSWATEDEPTEELQNSFKFKHYIILTKIYVLKNVEQKRKQSNGSDEAIIYIKLEDEIFHKLSSWSFCFPLQTQQLAPHELRNYRSTGLIVAVEADKIPTFRQELASLINET

SEQ ID NO: 15724 - protein, 333 aa, Glycine max
MRSQLVKSNIKTPPRPKRRRQPLKSWPVTFSPFARALALSRITSLSPPNPTPTLSAKKPQPSHGSVHADLSQPEHSESSDEDFDGVVQADFSFFDPKPNDFHGAKTLLQTYLDDQEWDLSAFVDLILAQTTVGSVVKIEDDEDEGLFALVTALNLYRYREHKCIATVKDFLLHKVRQEKSVHDQLKLLLGEQAHDVGLLVSQRMVNLPPQLLPPLYDALFDEVSWATEDEPTEELQNSFKFKHYIILTKIYVLKNVEQKRKQSNGSDEAIIYIKLEDEIFHKLSSWSFCFPLQTQQLAPHELRNYRSTGLIVAVEADKIPTFRQELASLINET

SEQ ID NO: 15725 - DNA, 1355 bp, Glycine max
aaagggctactggctcattggctgagaaaacgaaagcaaagaatgggatccccagctccagctaatggggagttattatctggaaaggatatttcttctaggagtcttgcccattctagaattgaggttgatggtagttctgagaatgatgctatggtttatcctccgtttgaattctcagttacttcccctccttccattattactgagggcactcatggaggtccgtggagaaaaaaaattactgatttaaatggaaccaaggatgagaaagacttcccctggtggtgcctggactgtgttttgaataatcggttacctcccagagaaaatactaaatgcagtttctatttgcaaccatgtgaaggctcttcagtccagatcctcacacaagggaagctaagtgccccacgtatattaagagttcacaaagttattaattatgtaatagagaagatggtgcttgacaaacctttggatagtttaagtggtgatggtagttttgcccctggacttactggatcacagtcacaagcttcaagcagttggggatggatcttttcgatctggatttaagccttggcaaaagcttagaccttctattgaaatattgtgcaacaaccaggtgctgtctcctgaaatgagcttagccactgtgcgagcttatatatggaagaaatcagatgacttggttttaaattaccaactacttcaaagcaggtgactacaaattgcatatgcatcagaggttttcttgtgattatgtaaaatacttctgagcgccgattcttcttgtgttgcctgcattgattggtggaattataggaatttgtaaattctgagccgtcatttattaccaaatttagtgacattctccaaacctgcttggatagttttttctttagtggagagctgttactgtaaattttgaactgtatctagctggcatgcatacttctgcggacatggcggaatcgtctgcatctggcatgatgatgaaggttcttaattgactgtgttgagaattagtgggaatcatactggcatagtggggtgtttttcaggaatcaggtagttgatttagagatgacaacaataacattgtaaatttgaattgtgcgttaaatatctggccatagaaattatgttgtccaggtgcatatttacatcataaaattttgttaattgttaattgctaataatattaatctcatttgttcaaattcgtcattggatatccagtgctagttctcagctagcactgtgtttgggtcctgtgatgcctgtgtatgcatatttgactttattcaatatgcaattctgaaaggcaacgttaaaaggaattagcattactc

SEQ ID NO: 15726 - protein, 191 aa, Glycine max
KGLLAHWLRKRKQRMGSPAPANGELLSGKDISSRSLAHSRIEVDGSSENDAMVYPPFEFSVTSPPSIITEGTHGGPWRKKITDLNGTKDEKDFPWWCLDCVLNNRLPPRENTKCSFYLQPCEGSSVQILTQGKLSAPRILRVHKVINYVIEKMVLDKPLDSLSGDGSFAPGLTGSQSQASSSWGWIFSIWI

SEQ ID NO: 15727 - protein, 177 aa, Glycine max
MGSPAPANGELLSGKDISSRSLAHSRIEVDGSSENDAMVYPPFEFSVTSPPSIITEGTHGGPWRKKITDLNGTKDEKDFPWWCLDCVLNNRLPPRENTKCSFYLQPCEGSSVQILTQGKLSAPRILRVHKVINYVIEKMVLDKPLDSLSGDGSFAPGLTGSQSQASSSWGWIFSIWI

SEQ ID NO: 15728 - protein, 140 aa, Glycine max
MVYPPFEFSVTSPPSIITEGTHGGPWRKKITDLNGTKDEKDFPWWCLDCVLNNRLPPRENTKCSFYLQPCEGSSVQILTQGKLSAPRILRVHKVINYVIEKMVLDKPLDSLSGDGSFAPGLTGSQSQASSSWGWIFSIWI

SEQ ID NO: 15729 - DNA, 1621 bp, Glycine max
atataaatcgaaccacctacttggtgtcttgcaattcccaatggcctccattttcaagctctcaacgccatctccagctgcttccttatcagaagcgcttcgccccagagattctcgcttcctctccttcaatccttcttccaacgctattaattacaaaattaacctctccgcttccctccgatccattcactccctccctcttaaaacctccttgcggatcaaatgctcccaaacagatgggaatggaagtcctgcaaagaggacagtgcttcatgatctttatgagaaagaagggcagagtccatggtatgataatctctgcagacctgttacagaccttcttcctcttatagcaagtggtgtcagaggcgtcactagcaaccctgcgatttttcagaaagctatctcatcatcgaatgcttacaatgatcagttcagggaacttgtgcaagcagggaaagacattgaaagtgcatattgggaacttgtagtgaaggatatccaagatgcttgcaaattatttgaaccaatctatgatcaaacagatggtggtgatggctatgtttctgttgaagtatctcccaggctcgctgatgacactgagggaaccatagaagctgcaaaatggcttcataaagtggttgatcgccccaatgtgtatattaagattcctgctacagaggcatgtgtgccttcaattaaggaagttattgctaatgggataagtgtgaatgtgacgctgatattctctcttgcaagatatgaagctgtaatagatgcttacttggatggtcttgaggcatctgggttaaatgacctctctagagttacaagtgttgcctctttctttgtcagtagagtggacactctcattgacaaggcccttgagaaaattggcaccccagaggctcttaatctacgtgggaaggcagcagtagcccaagcagcattggcttaccagctctaccaaaggaaattttctggtccaaggtgggaagctctagttaaaaagggggccaagaagcaaaggctcctttgggcctcaaccagtgtaaagaaccctgcctattctgacaccttatatgttgctcctcttattggacccgacactgtatcaaccatgccagaccaagcccttcaagcatttattgatcatggtaccgtatccaggacaatagactcaaatgcatctgaagctgaaggaatatacaatgctctccagaaattgggtattgactggagctttgttggttcccagcttgaacttgaaggagtggactcgtttaagaagagctttgacagcctcctggattctctgcaagagaaggcaaactctcttaagttggtcagccactgaagtttgaacgtcatggttagtaatgcagtgctgtgtatgatggcatctatggattaataaaaggcagcggctgtgcattttgtgctgctgcaaatgtgcttcatggagtcatttatttagacgatagtgatacaatgtaaatgggaaaaattgtccgcttcaagtcaagcgttttgttttttccccactatacaatggttgtgcgtttatgtttaaaagtcttacattttagttcgaatttttaattaaaattttgttgtg

SEQ ID NO: 15730 - protein, 452 aa, Glycine max
YKSNHLLGVLQFPMASIFKLSTPSPAASLSEALRPRDSRFLSFNPSSNAINYKINLSASLRSIHSLPLKTSLRIKCSQTDGNGSPAKRTVLHDLYEKEGQSPWYDNLCRPVTDLLPLIASGVRGVTSNPAIFQKAISSSNAYNDQFRELVQAGKDIESAYWELVVKDIQDACKLFEPIYDQTDGGDGYVSVEVSPRLADDTEGTIEAAKWLHKVVDRPNVYIKIPATEACVPSIKEVIANGISVNVTLIFSLARYEAVIDAYLDGLEASGLNDLSRVTSVASFFVSRVDTLIDKALEKIGTPEALNLRGKAAVAQAALAYQLYQRKFSGPRWEALVKKGAKKQRLLWASTSVKNPAYSDTLYVAPLIGPDTVSTMPDQALQAFIDHGTVSRTIDSNASEAEGIYNALQKLGIDWSFVGSQLELEGVDSFKKSFDSLLDSLQEKANSLKLVSH

SEQ ID NO: 15731 - protein, 439 aa, Glycine max
MASIFKLSTPSPAASLSEALRPRDSRFLSFNPSSNAINYKINLSASLRSIHSLPLKTSLRIKCSQTDGNGSPAKRTVLHDLYEKEGQSPWYDNLCRPVTDLLPLIASGVRGVTSNPAIFQKAISSSNAYNDQFRELVQAGKDIESAYWELVVKDIQDACKLFEPIYDQTDGGDGYVSVEVSPRLADDTEGTIEAAKWLHKVVDRPNVYIKIPATEACVPSIKEVIANGISVNVTLIFSLARYEAVIDAYLDGLEASGLNDLSRVTSVASFFVSRVDTLIDKALEKIGTPEALNLRGKAAVAQAALAYQLYQRKFSGPRWEALVKKGAKKQRLLWASTSVKNPAYSDTLYVAPLIGPDTVSTMPDQALQAFIDHGTVSRTIDSNASEAEGIYNALQKLGIDWSFVGSQLELEGVDSFKKSFDSLLDSLQEKANSLKLVSH

SEQ ID NO: 15732 - DNA, 1394 bp, Glycine max
  misc_feature (809)..(809): n is a, c, g, or t
ataaaataaaatcattataattgttatgcactttgtatcagcctaccatcatgtaggaatcctttgtcatctgaatataccatcatattgcatgattgtgaaaaggtggtcttaaccattatgggatttagggttgaaaattgttatacacttggtatcagcctaccataaagtttgttgaaaaaaatcagataaacaagacttttttatcctatttatagcatcttagaagaaacttcataaccaagacgttatctcttttttttctttcttctgaattacttttccttctataatttattattatatcactcttctggtgtgtacttacaggaggtgctgctccctggtggtcatggtcttatggtccgtggttacttgcctgttataaataccctagccaagggacttgatattctcttggggcacagggtcacaaaagtagttaggcgatataatggagtaaaggtaacagtggaaagtgggaaaacgttttttgctgatgctgctgttattgctgtcccacttggggtgctcaaggcaaagaaaatattgtttaagccaaagcttccagactggaaggaagctgccattgcggatcttgggattggacttgagaataaaatcattttacactttgaaaatgtgttttgccctaatgtggagttcttgggagtagttgcagatacatcttatggatgtagctacttccttaatctccacaaggccgccggtcatgctgttctggtttacatgccttctgggcagcttgccaaagacgttgaaaagatgtctgatgaagcagccgncaacttcgctttcatgcagctcaagaagattcttccagatgcttcttcaccgattcagtatcttgtgtctcggtggggatcagatataaattcactaggttcatatagctacgatgcagttgggaaaccccatgaactatatgagaggctacgggtcccagtagataacttgttctttgcaggggaagcaacgagtatgagctatccaggatctgtccatggggcattctccactggaatgatggccgctgaagattgccggatgcgtgtgctcgagcgatatggagaggttgatttattccagccagtgatgggagaagaggcttccttgtctatcccacttcagatatctcgtctgtaatcatctttgggtcacaactagtggacagaaacagaatctatgcttgttcttttgttatcaacctataggctatatatagcaaatgttttggcaatagtcttcaagactatgtgtccacttgtgaaatcacattttgtgttgcatttccgtagtcagtgttactggtaatatgaatattgcgtacctaaggccttgtcacttctatcagtctatatataataaaa

SEQ ID NO: 15733 - protein, 268 aa, Glycine max
  misc_feature (149)..(149): Xaa can be any naturally occurring amino acid
MVRGYLPVINTLAKGLDILLGHRVTKVVRRYNGVKVTVESGKTFFADAAVIAVPLGVLKAKKILFKPKLPDWKEAAIADLGIGLENKIILHFENVFCPNVEFLGVVADTSYGCSYFLNLHKAAGHAVLVYMPSGQLAKDVEKMSDEAAXNFAFMQLKKILPDASSPIQYLVSRWGSDINSLGSYSYDAVGKPHELYERLRVPVDNLFFAGEATSMSYPGSVHGAFSTGMMAAEDCRMRVLERYGEVDLFQPVMGEEASLSIPLQISRL

SEQ ID NO: 15734 - protein, 138 aa, Glycine max
  misc_feature (19)..(19): Xaa can be any naturally occurring amino acid
MPSGQLAKDVEKMSDEAAXNFAFMQLKKILPDASSPIQYLVSRWGSDINSLGSYSYDAVGKPHELYERLRVPVDNLFFAGEATSMSYPGSVHGAFSTGMMAAEDCRMRVLERYGEVDLFQPVMGEEASLSIPLQISRL

SEQ ID NO: 15735 - DNA, 1068 bp, Glycine max
aatgattcagataaattgtctcccagatttttaggctattttctttttcgttctagtgagcagaagcaatcactggataaaagcacctcattcaaagaacaaagtgctcatgttacctctgttaagaatattttagaaaaccatgctagttacctgatgtctgggaaagagctctccaagcttgttgcatttgtaaaaggaactcagtttgatttagtggagtatctacaacgtgaaagatatggaagtgctcggttggagaattttgcttctgggcttgaactaataagccaaaagcttcaaatgggaacattacagagccgtttggatgctgactttctcctatctcatatgtgctctgttaagtttaaggaatggatagttgtcctggctactctcttaagacgttctgaggttctttttgacttattccgtcatgatgttcgtctgtggaaagcatacagcaccaccctggagtcacacccagcatttacagaatatcaagatttgctggaagacctggaagagagcctttcatcagttgcaaatgtggaaggaaaatgaaagtgaatatagattttcacatctggactgtggttacaaatttgtttcctgatgaaaaaaatctgatctggtggtttttgccttgcccacatatctgtctcatcgatatcatgtcacacgtaagaactatgcatcctttccattggatttgattgcggggaccagaataaacatatttgattgtggggaccagaataaacatatttgattgtggggaccagaatactatgttcatttgctgggttaaccatgatcttggtaacaaaacattttgtggtgctaatccgatgaatcaagaatagtaaatgtagatagaggttagaagtttctatagggaggcttgtgcatgtctgagaatttcattattcttttaacttttaattcacattttgtaacatgtgttttttgtaaaagcataaacagatccatctgtatatattagttatatgctgttgatcagcataacattcaaagttgaatttatgtaccttgtttttctccctt

SEQ ID NO: 15736 - protein, 187 aa, Glycine max
NDSDKLSPRFLGYFLFRSSEQKQSLDKSTSFKEQSAHVTSVKNILENHASYLMSGKELSKLVAFVKGTQFDLVEYLQRERYGSARLENFASGLELISQKLQMGTLQSRLDADFLLSHMCSVKFKEWIVVLATLLRRSEVLFDLFRHDVRLWKAYSTTLESHPAFTEYQDLLEDLEESLSSVANVEGK

SEQ ID NO: 15737 - protein, 135 aa, Glycine max
MSGKELSKLVAFVKGTQFDLVEYLQRERYGSARLENFASGLELISQKLQMGTLQSRLDADFLLSHMCSVKFKEWIVVLATLLRRSEVLFDLFRHDVRLWKAYSTTLESHPAFTEYQDLLEDLEESLSSVANVEGK

SEQ ID NO: 15738 - DNA, 1497 bp, Glycine max
atttcttatagaaaagccaaactcgcttgaactttagacactattctgattctgtccatccatccttcagattctgtgaagaacaatgttaatggcaactctgtattaaaattcttcattttctaaattctactgtctctgttactttttaattccaaccctatcctcttctctaatgctctttctttgtaactaacatagtggcttgcaagcagttcgtcctcctccattaacgtccacttccgacccaccacctctttttgatggcaccaccaggttgtacatcagttattcctgtccctatgcacaacgagtatggataactaggaactacaaggggcttcaagacaagatcaaattggtccctattgatcttcaagacaggccagcttggtataaggagaaagtctaccctgaaaataaggtgccatccttggagcacaatggcaaggtattgggagaaagtcttgatttgatcaaatatgtagatgtcaactttgaagggacacctttggttcccagtgatcctgccaagaaagagtttggtgagcacttgatatcccatgttgatacattcaacaaagacctgaactcttcattgaaaggagatcctgtacagcaagccagtccttcttttgaatacttggagaatgctcttggtaaatttgatgatgggccattcttgcttggtcaattcagtttggtggatattgcctatattccatttattgaaagatatcaaattgtctttgccgagctgttcaaacaagacatcgcagaaggaaggcctaaacttgcagcatggattgaggaggtgaacaagattgatgcttatacacagacaaaaaacgatcctcaagaaatcgctgataaatacaagaaacgtttactgtctcaacagtgatccttggattgttgcaggcttcctctaagatatatagactgtggcaacaaaacgtcctttgcattcatgggatgcatctcttcagtcaaataattatgttcacttttcagcttgcttttttggatgacattataatgtttatgtactagcttgtgatcgctgatcattatggtatagttatcctaccagtactatgttagtatttagctttgatatctctcaagtgtccctgacctcatacatgtcagcaaaggtttattgcatggaaattatacatggttgtgaaaaaaacgttgtgccggaaaaaaaaaaaaaaaaaaaaaaaaaaaaaaaaaaaaaaaaaaaaaaaaaaaaaaaaaaaaaaaaaaaaaaaaaaaaaaaaaaaaaaaaaaaaaaatttccccccccccgggaaacccccaagttttaaaggggcccccaccgggggggagttccagtttttgttccctttaaaggggggtaaatttcgagtttggggaaatcatggccaaaaatttttcctggggaaaaatttaacccccttaaaattccccaaaaaaaaaaaccccaaactaaaaggggaaaagcctggg

SEQ ID NO: 15739 - protein, 106 aa, Glycine max
MVVKKTLCRKKKKKKKKKKKKKKKKKKKKKKKKKKKKKKKNFPPPGKPPSFKGAPTGGEFQFLFPLKGGKFRVWGNHGQKFFLGKNLTPLKFPKKKNPKLKGEKPG

SEQ ID NO: 15740 - protein, 78 aa, Glycine max
MLVFSFDISQVSLTSYMSAKVYCMEIIHGCEKNVVPEKKKKKKKKKKKKKKKKKKKKKKKKKKKKKKKFPPPRETPKF

SEQ ID NO: 15741 - protein, 62 aa, Glycine max
MSAKVYCMEIIHGCEKNVVPEKKKKKKKKKKKKKKKKKKKKKKKKKKKKKKKFPPPRETPKF

SEQ ID NO: 15742 - DNA, 989 bp, Glycine max
gctctcgaattttctcatctgtcatttcttccatcacgtgttccacacctactcttctcatccagctgtctaaactaataattagtattagatgcatacattggtggacacatgaaacaaaaatattaaatatttatgatatatagttgtacatatcattacccttatccctagtaggtaagaagcttgcttattaattggtccatttgtaaactaaactaaagtaacgagacgaatgaatgttgtttaattaggttattcaattatggcattggcattcacctgttggagtcagaaaaggttccggtgaaaaaaagagagatcaacccaaaagaaaatcatatatcgtttcaatgctcagacatgaaagttataatgcagaaactggatgcaatgaagattgagtatgtgacagcagttgtggaagaaggtggaattaaagttgatcagctgttctttcatgacccagatggatatatgatagaaatatgcaactgccaaaatcttcctgtgcttccaatttcttcctgccctctaaagcagctcggaggagaagctacattcaagattaattgctttgcagaagaatctatgtctatgctgatgatggacaatttcgtgatggatatgttgaagatttcaatataattaaagctttttgtaaaaaaaaatatttgtaaaagcctttttgtccgacgagagaagaggggaaataaaaagtgtaagagtaaattatatcacttccaattagagcaaaatctttgtttatcaaaaaaaaaaaaaaaaaaaaaaaaaaaaaaaaaaaaaaaaaaaaaaaaaaaaaaaaaaaaaaaaaaaaaaaattcccggcaccccggggaaccccctaggaaagggggaaacaagccccggaaaggaaaccaggttggccatcgggagccaaaaaacagggttcagggggggggatcaatttaccttccccgacggggaattcagaataaagcgccgcc

SEQ ID NO: 15743 - protein, 94 aa, Glycine max
MKVIMQKLDAMKIEYVTAVVEEGGIKVDQLFFHDPDGYMIEICNCQNLPVLPISSCPLKQLGGEATFKINCFAEESMSMLMMDNFVMDMLKISI

SEQ ID NO: 15744 - protein, 90 aa, Glycine max
MQKLDAMKIEYVTAVVEEGGIKVDQLFFHDPDGYMIEICNCQNLPVLPISSCPLKQLGGEATFKINCFAEESMSMLMMDNFVMDMLKISI

SEQ ID NO: 15745 - protein, 84 aa, Glycine max
MKIEYVTAVVEEGGIKVDQLFFHDPDGYMIEICNCQNLPVLPISSCPLKQLGGEATFKINCFAEESMSMLMMDNFVMDMLKISI

SEQ ID NO: 15746 - DNA, 1302 bp, Glycine max
cccccccccacatacacatggaggaagcaatgaggcgtctcaacggggtagctccgattatcggacccgactcgaaaggcgacggtggactcatcgccaataacccgaaacggacctcggccgtgaacaagagggctttaagagaagacggcggcggtggtggcggcggcggagcgatgaggtaccgcggcgtgaggcgcaggccgtgggggcgttacgcggcggagataagggaccctcaatcgaaggagcggcgatggctgggaaccttcgacacggcggaggaagccgcttgcgcctacgactgcgctgctagagccatgaggggtctcaaagctcgcaccaacttcgtttacccaacttctccgcaaccttcttccgccaccaccgaacacttgttccctaacttcaacaacaacaacaactttcacaaacactcactcttcaatcaccaccgtaaccgccacataaccggttccaacacttgttttgaccaacctcactccgttgacttttcagcccctcgaaacccttcttctctcaacatgcttctctttcgtgaccttattcactctaacccttctttgctttcttcttcttccactcagaacttccacgaccagttttacaacaagagtacttctactttttcatcgttacctgtttctccttctcttgctccccctagttattcgatgaataattcttgtggaggaggctctttgtctgttaagatgaacacgtttcccacttgtggaactaattttgctgaaaaaggtgatgatggtgatggttttttctctcgtgagtcttcggattcggggttgttggaggagatagttaacaagttcttgcctagaacgaagcctagtaaatgcgagactacttttgcaaatcctcaggaggagtcgcttcttctccctccgcttgtttctgaatcaacgcttgtttccaccgggcaacaatactatgatgatgacatgaaaaaagggtttccaaagaacgggggtctaggtgttttttattctgatcaaggttttcccatgcagcaattcgacacctctaatgggtttaatagcatggctatggagaatgatcaaaacattattaataatgcagagaactgtgtcgttgaagatgtttttcagtaccaagagcttcttaatgctttcgcaatcagaatgcaaaatgcttaattagttaacatttccagtgtctgcatctcaatgctagttgtgtatgtagtcatgttgaatctgtcacttctcaatgttggtctggcctttcaattagaaacttatt

SEQ ID NO: 15747 - protein, 397 aa, Glycine max
PPHIHMEEAMRRLNGVAPIIGPDSKGDGGLIANNPKRTSAVNKRALREDGGGGGGGGAMRYRGVRRRPWGRYAAEIRDPQSKERRWLGTFDTAEEAACAYDCAARAMRGLKARTNFVYPTSPQPSSATTEHLFPNFNNNNNFHKHSLFNHHRNRHITGSNTCFDQPHSVDFSAPRNPSSLNMLLFRDLIHSNPSLLSSSSTQNFHDQFYNKSTSTFSSLPVSPSLAPPSYSMNNSCGGGSLSVKMNTFPTCGTNFAEKGDDGDGFFSRESSDSGLLEEIVNKFLPRTKPSKCETTFANPQEESLLLPPLVSESTLVSTGQQYYDDDMKKGFPKNGGLGVFYSDQGFPMQQFDTSNGFNSMAMENDQNIINNAENCVVEDVFQYQELLNAFAIRMQNA

SEQ ID NO: 15748 - protein, 392 aa, Glycine max
MEEAMRRLNGVAPIIGPDSKGDGGLIANNPKRTSAVNKRALREDGGGGGGGGAMRYRGVRRRPWGRYAAEIRDPQSKERRWLGTFDTAEEAACAYDCAARAMRGLKARTNFVYPTSPQPSSATTEHLFPNFNNNNNFHKHSLFNHHRNRHITGSNTCFDQPHSVDFSAPRNPSSLNMLLFRDLIHSNPSLLSSSSTQNFHDQFYNKSTSTFSSLPVSPSLAPPSYSMNNSCGGGSLSVKMNTFPTCGTNFAEKGDDGDGFFSRESSDSGLLEEIVNKFLPRTKPSKCETTFANPQEESLLLPPLVSESTLVSTGQQYYDDDMKKGFPKNGGLGVFYSDQGFPMQQFDTSNGFNSMAMENDQNIINNAENCVVEDVFQYQELLNAFAIRMQNA

SEQ ID NO: 15749 - protein, 388 aa, Glycine max
MRRLNGVAPIIGPDSKGDGGLIANNPKRTSAVNKRALREDGGGGGGGGAMRYRGVRRRPWGRYAAEIRDPQSKERRWLGTFDTAEEAACAYDCAARAMRGLKARTNFVYPTSPQPSSATTEHLFPNFNNNNNFHKHSLFNHHRNRHITGSNTCFDQPHSVDFSAPRNPSSLNMLLFRDLIHSNPSLLSSSSTQNFHDQFYNKSTSTFSSLPVSPSLAPPSYSMNNSCGGGSLSVKMNTFPTCGTNFAEKGDDGDGFFSRESSDSGLLEEIVNKFLPRTKPSKCETTFANPQEESLLLPPLVSESTLVSTGQQYYDDDMKKGFPKNGGLGVFYSDQGFPMQQFDTSNGFNSMAMENDQNIINNAENCVVEDVFQYQELLNAFAIRMQNA

SEQ ID NO: 15750 - DNA, 1263 bp, Glycine max
accgggccccccctcgagtcagctacgtaggccccccccccttttaagtaaacctcattagactagtatttggtaaatcaaaattttcctaatctcttgtctgtaattgatttggccagcaacaacacctgaacattgatataaatgctttggtaacaaagttggaaaagctggagaaggaagtgatcttccagaaggggaacaaatttgatccatccaagaaattgaatgtgatgaagatagaaatggccaaacttgagtggtacaagaagtattccaaaaataataagattggctactatgacagcttcaagaggggtatctcaacaagcgacctagatgttgttcagtgccagaaaaccctcagaaattactggattgacatggttgcagaggcagagctgaaacctcagacagaaggtgcagcttttcgtactcgctggctttttggcggaactaattacaggagaatgtttgaacccctagatattgctgagtactacgcgaatggtggtaaagactatgaggctaagggaagatctagacattatatagtgttgcaggagtggctggaagaggataagaaagaaaaaagcaattcaaacagtacaaacaaaaaggatgtggaatctattttaacttttgactcttgcttttgggcacatgttgaagaagctatcctttcatgcaaagtgttgaaggatgaacaatctagtgtgacagagaaggaagaggaaactgggaagttgcttgaattcgagaagtatgtttatgggttgctcacgaaatatgaagtgtcatcagagattttcctaaggcaaagcagctacatgatttggtggaatcagtataaggcaattaagggaacttcttataattcagcactcgcagacttcatgagcaatcccgatcattataatgtgctgtatattaagggaacttataatttcccccctcaggcttagtgattagtgaacgtccgtgtggttgaacagtgtaaaataaattgtggttttatctcactgtgcaccttttaataagctttttttatattttcccttgttgatttttgttaaggatcttggttttaccctcccttgtgttgtggtattggaaactcatgcaattgtcttgacttgtgatattggaaactcttgcaattgtcttaccttgcaaaccttcactcattattcttgaaaatttaagttgagagcaatggatgcaggctagtttgtattaatgtaatctgaaaggctcgctgtg

SEQ ID NO: 15751 - protein, 243 aa, Glycine max
MKIEMAKLEWYKKYSKNNKIGYYDSFKRGISTSDLDVVQCQKTLRNYWIDMVAEAELKPQTEGAAFRTRWLFGGTNYRRMFEPLDIAEYYANGGKDYEAKGRSRHYIVLQEWLEEDKKEKSNSNSTNKKDVESILTFDSCFWAHVEEAILSCKVLKDEQSSVTEKEEETGKLLEFEKYVYGLLTKYEVSSEIFLRQSSYMIWWNQYKAIKGTSYNSALADFMSNPDHYNVLYIKGTYNFPPQA

SEQ ID NO: 15752 - protein, 239 aa, Glycine max
MAKLEWYKKYSKNNKIGYYDSFKRGISTSDLDVVQCQKTLRNYWIDMVAEAELKPQTEGAAFRTRWLFGGTNYRRMFEPLDIAEYYANGGKDYEAKGRSRHYIVLQEWLEEDKKEKSNSNSTNKKDVESILTFDSCFWAHVEEAILSCKVLKDEQSSVTEKEEETGKLLEFEKYVYGLLTKYEVSSEIFLRQSSYMIWWNQYKAIKGTSYNSALADFMSNPDHYNVLYIKGTYNFPPQA

SEQ ID NO: 15753 - protein, 193 aa, Glycine max
MVAEAELKPQTEGAAFRTRWLFGGTNYRRMFEPLDIAEYYANGGKDYEAKGRSRHYIVLQEWLEEDKKEKSNSNSTNKKDVESILTFDSCFWAHVEEAILSCKVLKDEQSSVTEKEEETGKLLEFEKYVYGLLTKYEVSSEIFLRQSSYMIWWNQYKAIKGTSYNSALADFMSNPDHYNVLYIKGTYNFPPQA

SEQ ID NO: 15754 - DNA, 637 bp, Glycine max
gagttggacggttttgcagaaattgacgtttcaaatttcaattgaagtagcacgcacgtttcatcatccactcgcaatcgcgatcacccgttgccgatcccgaagcagagaaaacctaagccaacatgagtggcgacgccccaacccaaacccaaacccaagccaccgacaccaaaccagaagaaacccacacccacacccaaaccatcactaccaaaccggaagaatctcattctcaatctcagtctcagcctcagcctcacactgccgattatgctccataccctaaactggaccccaccgatgttgcgccaccactcaacactgaatctcgcgctcccatttccgaagatgctgccactactatgcccaaagactccaatccctatgtcactcctgcgccagttcctgcttcttctaccaagactactttagattccgtgaaagacgttctcgggaaatgggggaagaaagccgccgaggccaccaagaaggccgaggatctcgccggcaacatgtggcagcacttgaaaacgggaccgagttttgcggatgctgctgtggggaggattgctcaggggactaaagtacttgcagaaggagggtatgagaagatctttaggcaaacatttgagac

SEQ ID NO: 15755 - protein, 170 aa, Glycine max
MSGDAPTQTQTQATDTKPEETHTHTQTITTKPEESHSQSQSQPQPHTADYAPYPKLDPTDVAPPLNTESRAPISEDAATTMPKDSNPYVTPAPVPASSTKTTLDSVKDVLGKWGKKAAEATKKAEDLAGNMWQHLKTGPSFADAAVGRIAQGTKVLAEGGYEKIFRQTFE

SEQ ID NO: 15756 - protein, 95 aa, Glycine max
SWTVLQKLTFQISIEVARTFHHPLAIAITRCRSRSRENLSQHEWRRPNPNPNPSHRHQTRRNPHPHPNHHYQTGRISFSISVSASASHCRLCSIP

SEQ ID NO: 15757 - protein, 90 aa, Glycine max
MPKDSNPYVTPAPVPASSTKTTLDSVKDVLGKWGKKAAEATKKAEDLAGNMWQHLKTGPSFADAAVGRIAQGTKVLAEGGYEKIFRQTFE

SEQ ID NO: 15758 - DNA, 1332 bp, Glycine max
gagctcctcgtgcagaacctgcaccgcttgaacgattccgatcccgacgagaacgccgccgtgtacggctccctcgccacggtggagaatatgatcgaggtgaagcccgcggtggcggagctggtttgcgagaagacgaagttgctgaagtggcttctcgggaagataaaagtgagggagtttgacagtaataagcagtatgcttccgagattttggcgattttgctgcagagtagtactgtgaatcagaagaagctgggacagatgaatggggttgatgtggtgcttcaggctgtggctatgtataagtctaaggatccgaagagttccgatgaggaggagatgttggagaatttgtttgattgcttgtgttgtttgttaatgccgttggagaataaggaacggtttgtaaaggctgaaggggttgagttaatgataattattatgaagcagaagaaattggcttatgggtcggccattagggcgcttgattttgctatgacgaagtacccgccggcttgtgagcgttttgtggatgttttggggttgaagaccgcgtttgcagctttcatgggtaagattcctttaagtaagaagaacaagaaagaaaggtaccaagaggatttggaggagcgcattgtgtcactgattgcgtcattatttggtggaatcttgaggggttctaggagagaaagattattaagtaaatttgttgaaaatgagtgtgagaagatagacaggctaatggaactatacatcagatattcagatagagtcaaagcagaaactgaacggttgaatcaagttgagcttgatgacttggagatggatgaagatgaaaaatacaaccgtaaactagaatctggactatatactcttcagttgattgctgtcattttgggtcatctttggtgctcagagcatccacaaatgagagggagaattgaactacttctcaagcagaacaaacttagtaagaagcatatcaaggatatacttcaggagtatcatgacaatattggtgaccttgatggaccggaagagaaggagagagcacagacaaaaattcagaagttcataacggccttataattagtgtaagacacaaacttcaatggaggtgactcaagtaattcattttgcttgtaaaagagaatagattagtcagggtaatggagaaggaacaccgatctgcaaatgtcgttgagatcatagccatgtagtgtttatttcacacaacttcttaatgtagttatattggatattatttttttcccttggtggggtgtcatgaatgttgttcctctataaagcaatttcagtccaataggg

SEQ ID NO: 15759 - protein, 363 aa, Glycine max
ELLVQNLHRLNDSDPDENAAVYGSLATVENMIEVKPAVAELVCEKTKLLKWLLGKIKVREFDSNKQYASEILAILLQSSTVNQKKLGQMNGVDVVLQAVAMYKSKDPKSSDEEEMLENLFDCLCCLLMPLENKERFVKAEGVELMIIIMKQKKLAYGSAIRALDFAMTKYPPACERFVDVLGLKTAFAAFMGKIPLSKKNKKERYQEDLEERIVSLIASLFGGILRGSRRERLLSKFVENECEKIDRLMELYIRYSDRVKAETERLNQVELDDLEMDEDEKYNRKLESGLYTLQLIAVILGHLWCSEHPQMRGRIELLLKQNKLSKKHIKDILQEYHDNIGDLDGPEEKERAQTKIQKFITAL

SEQ ID NO: 15760 - protein, 333 aa, Glycine max
MIEVKPAVAELVCEKTKLLKWLLGKIKVREFDSNKQYASEILAILLQSSTVNQKKLGQMNGVDVVLQAVAMYKSKDPKSSDEEEMLENLFDCLCCLLMPLENKERFVKAEGVELMIIIMKQKKLAYGSAIRALDFAMTKYPPACERFVDVLGLKTAFAAFMGKIPLSKKNKKERYQEDLEERIVSLIASLFGGILRGSRRERLLSKFVENECEKIDRLMELYIRYSDRVKAETERLNQVELDDLEMDEDEKYNRKLESGLYTLQLIAVILGHLWCSEHPQMRGRIELLLKQNKLSKKHIKDILQEYHDNIGDLDGPEEKERAQTKIQKFITAL

SEQ ID NO: 15761 - protein, 275 aa, Glycine max
MNGVDVVLQAVAMYKSKDPKSSDEEEMLENLFDCLCCLLMPLENKERFVKAEGVELMIIIMKQKKLAYGSAIRALDFAMTKYPPACERFVDVLGLKTAFAAFMGKIPLSKKNKKERYQEDLEERIVSLIASLFGGILRGSRRERLLSKFVENECEKIDRLMELYIRYSDRVKAETERLNQVELDDLEMDEDEKYNRKLESGLYTLQLIAVILGHLWCSEHPQMRGRIELLLKQNKLSKKHIKDILQEYHDNIGDLDGPEEKERAQTKIQKFITAL

SEQ ID NO: 15762 - DNA, 1360 bp, Glycine max
aaacacccaaaaataacgagcgagttttgcgtcttaatggaggagagaaagaagcacccttcttttccctccaactatctcactctcgctcaactccaagaacgatggctcaagcagcaaaaccaaatcaaccaaccacaaccacaaccacaaccacagccacaagaacaacacaaccaccaccaccgccaacaaccacaccaagagctggtactcgttcccagaaacggaaacgcttataggtctcgttctcagtttcagtatgttgcgaagaatcggaacgattccgaaactcgccgccgcgcaaccaaggttgcggtggcctccgatgacaactgcaaatcggaggccgtcgccggaatcggtgacgaaaccgccgatctgaatggaaaatccagtgaatcgaagaagaatcagaataataggaggaatgggaaaggaacatggaaaactaagacggagaagagaggagcgcgtggagatggctctggaacaggagcacaggggaaagaagaggcagagaagaaagccacaatcgagaagaagaatgagttggagaagaacggtggttcggcatcggtggatgaggttggacagcgagttagggttttatcgattaactcaggggatgaaaagaagaagaagaagaagaagaacggtggttcggttacggcagaggaggttgttgaacagagcgtgaggattttatcgattaactcggggaacggtaaacagaacaacgggagattagggaaaatgaacaacggttttggaacagcggcacatgggaaaaaagaggctgagaaaaccacaatcgaaaacgagttgaaggagaagaagaacggtggttccgtaacggtggaggaagtggaacagagagttagggtttcatcgaagaacgaggaggaggagaagaagaacggtggttccgtaacggtggaggaaatggaaaagagagttggggtttcttcatcgaataactcagggaatggtaaacagaacggaagattggggaaaatgagcaacagttttcgtcactctgaatctcagaggaagtattacggtggtgaagcaagttatggctatggctatggtaatcgtggtaacggtcactactctaaggttggggtgcagaaaacaacagagaagaagatggtttgggttaagaaggatgagatagttggtggaaattgagaccttagctagatttgtgctcttgtcgataattgaatagaaatagaatcaatcatagggtagcactatcatcaatgctcactctaacgtttgtttgcctcacccatacactcattgatggagattacaatctgtggttatcaaatatcatcatgatttgaatttt

SEQ ID NO: 15763 - protein, 397 aa, Glycine max
KHPKITSEFCVLMEERKKHPSFPSNYLTLAQLQERWLKQQNQINQPQPQPQPQPQEQHNHHHRQQPHQELVLVPRNGNAYRSRSQFQYVAKNRNDSETRRRATKVAVASDDNCKSEAVAGIGDETADLNGKSSESKKNQNNRRNGKGTWKTKTEKRGARGDGSGTGAQGKEEAEKKATIEKKNELEKNGGSASVDEVGQRVRVLSINSGDEKKKKKKKNGGSVTAEEVVEQSVRILSINSGNGKQNNGRLGKMNNGFGTAAHGKKEAEKTTIENELKEKKNGGSVTVEEVEQRVRVSSKNEEEEKKNGGSVTVEEMEKRVGVSSSNNSGNGKQNGRLGKMSNSFRHSESQRKYYGGEASYGYGYGNRGNGHYSKVGVQKTTEKKMVWVKKDEIVGGN

SEQ ID NO: 15764 - protein, 385 aa, Glycine max
MEERKKHPSFPSNYLTLAQLQERWLKQQNQINQPQPQPQPQPQEQHNHHHRQQPHQELVLVPRNGNAYRSRSQFQYVAKNRNDSETRRRATKVAVASDDNCKSEAVAGIGDETADLNGKSSESKKNQNNRRNGKGTWKTKTEKRGARGDGSGTGAQGKEEAEKKATIEKKNELEKNGGSASVDEVGQRVRVLSINSGDEKKKKKKKNGGSVTAEEVVEQSVRILSINSGNGKQNNGRLGKMNNGFGTAAHGKKEAEKTTIENELKEKKNGGSVTVEEVEQRVRVSSKNEEEEKKNGGSVTVEEMEKRVGVSSSNNSGNGKQNGRLGKMSNSFRHSESQRKYYGGEASYGYGYGNRGNGHYSKVGVQKTTEKKMVWVKKDEIVGGN

SEQ ID NO: 15765 - DNA, 828 bp, Glycine max
gacatcaaggtttgtgaagcatctaagtgagatacacagtagttaggtagcaagcataagtgtctaaccttagaaacatatctgctacatatcgtgtgcattttggaattgtgccactaaaattctattcatctatggctgcctcatcttatgctatgcaatcaatccttgcaaaccctatgatccgcatttccagcgggtctagggagaaccattttggtgttcctgcttatcacatgagaaggaatgttggcctgagagttaggtccatggctgaggaagagcaaccaagtcagcctgcgaccccagttacaccaccaccagcagaacccaaaccacagccagtctctactccttcaccaaaggtgagcaccaagttttctgatgtgttggcgttcagtgggccagcacctgagaggatcaatggaaggttggccatgattgggtttgtgggtgcaatggcagtggaagtagccaaagggcaaggtgtgtttgaacaaatatccaatggtggtatcccatggttcttgggaacaagtgtggtccttacccttgcttccttgattccactcttccaagggatcagcgtggagtctaagtccaaagggttcatgtcctcagatgcagaactgtggaatgggagatttgctatgttgggtttggttgctctggcttttactgagtatgttaagggtggtaccttggtgtaattcagtcatgaatgcacaccaaaatggtcttaagtcattcgtggttagaaagaccaatctctttttgtacttggtgcctttatttaatcagcatataaaattatcatttttttttttc

SEQ ID NO: 15766 - protein, 191 aa, Glycine max
MAASSYAMQSILANPMIRISSGSRENHFGVPAYHMRRNVGLRVRSMAEEEQPSQPATPVTPPPAEPKPQPVSTPSPKVSTKFSDVLAFSGPAPERINGRLAMIGFVGAMAVEVAKGQGVFEQISNGGIPWFLGTSVVLTLASLIPLFQGISVESKSKGFMSSDAELWNGRFAMLGLVALAFTEYVKGGTLV

SEQ ID NO: 15767 - protein, 184 aa, Glycine max
MQSILANPMIRISSGSRENHFGVPAYHMRRNVGLRVRSMAEEEQPSQPATPVTPPPAEPKPQPVSTPSPKVSTKFSDVLAFSGPAPERINGRLAMIGFVGAMAVEVAKGQGVFEQISNGGIPWFLGTSVVLTLASLIPLFQGISVESKSKGFMSSDAELWNGRFAMLGLVALAFTEYVKGGTLV

SEQ ID NO: 15768 - protein, 176 aa, Glycine max
MIRISSGSRENHFGVPAYHMRRNVGLRVRSMAEEEQPSQPATPVTPPPAEPKPQPVSTPSPKVSTKFSDVLAFSGPAPERINGRLAMIGFVGAMAVEVAKGQGVFEQISNGGIPWFLGTSVVLTLASLIPLFQGISVESKSKGFMSSDAELWNGRFAMLGLVALAFTEYVKGGTLV

SEQ ID NO: 15769 - DNA, 1454 bp, Glycine max
aatgattttcgaaaactctcttgagcatgggttccttccagctctttgggacttcttgacaatgcagttgcagcttgcatcactattttacacattctctttgggaactcgcacacatttctttggtcggactatacttcatggtggtgccaagtaccgagcaacaggtcgtggtttcgttgtggcacacaagagttttgctgagaactatcgactatatgctcgaagccattttgcgaagggtattgaacttgggattattttaattgtgtatgctgctcatagtcctttggctagggatacttttgtgtacatagctatgacaatctcaagttggtttcttgtagtttcatggataatgtctccttttgtcttcaatccctctgggtttgattggttgaagactgtatatgactttgaagattttataaattggatatggtatcctggtggtcccttcaaaaaggcagaacatagctgggaaacatggtggtatgaggagcaagaccatttaaaaacaaccggtatatgggggaagctgttggaaatcattttaaaccttcgattcttcttctttcagtatggcattgtttatcagctgggtattgcaggtggaaataatagtatagctgtttacttgctgtcttggatagtcatggttgtgattgttgccatttatatcatcatggcatatgcccgggataaatttgctacaaaggagcacttatattatcgattagttcagcttcttgtgattgtaatcacagttcttgtacttttcctcctactggagttcgcccatttaaaatttattgatcttctgtcaagcttcttggcattcgttccaacaggatggggaatgatttcaatcgccctggtgcttaggccttttctgcagacaactaaagtgtgggaaactgttgtttccttggctcgtctatatgatttgctgtttggggttattgttatggctccaatggcaattgtatcatggttacctggatttcaatcaatgcaaactaggattctctttaatgaagctttcagcaggggtctccagatatctcgaatagttagtggcaagaagtctgtttaagatggtaattggaggtagtagtatcaacttgatagtggatcagtacaagttaccagtttctaacacaaggttgaggaccactaatggattcaaagctcgttaaattgccatggcaaatggatgcctacaattaaatccatgttattcaatgtgaaaacgtaaaggtttagctttctctcagtgacactggtggctcaaattttggttgtgaatctctagtttagtattggaggattatcagcagatgttttgcctgtgtctgtcattgacaattgacttaatgtacatcctctgttcatatgtagtgcaacctactctaaccaacacgacattgccactgatgttaaacacaataaag

SEQ ID NO: 15770 - protein, 364 aa, Glycine max
MIFENSLEHGFLPALWDFLTMQLQLASLFYTFSLGTRTHFFGRTILHGGAKYRATGRGFVVAHKSFAENYRLYARSHFAKGIELGIILIVYAAHSPLARDTFVYIAMTISSWFLVVSWIMSPFVFNPSGFDWLKTVYDFEDFINWIWYPGGPFKKAEHSWETWWYEEQDHLKTTGIWGKLLEIILNLRFFFFQYGIVYQLGIAGGNNSIAVYLLSWIVMVVIVAIYIIMAYARDKFATKEHLYYRLVQLLVIVITVLVLFLLLEFAHLKFIDLLSSFLAFVPTGWGMISIALVLRPFLQTTKVWETVVSLARLYDLLFGVIVMAPMAIVSWLPGFQSMQTRILFNEAFSRGLQISRIVSGKKSV

SEQ ID NO: 15771 - protein, 344 aa, Glycine max
MQLQLASLFYTFSLGTRTHFFGRTILHGGAKYRATGRGFVVAHKSFAENYRLYARSHFAKGIELGIILIVYAAHSPLARDTFVYIAMTISSWFLVVSWIMSPFVFNPSGFDWLKTVYDFEDFINWIWYPGGPFKKAEHSWETWWYEEQDHLKTTGIWGKLLEIILNLRFFFFQYGIVYQLGIAGGNNSIAVYLLSWIVMVVIVAIYIIMAYARDKFATKEHLYYRLVQLLVIVITVLVLFLLLEFAHLKFIDLLSSFLAFVPTGWGMISIALVLRPFLQTTKVWETVVSLARLYDLLFGVIVMAPMAIVSWLPGFQSMQTRILFNEAFSRGLQISRIVSGKKSV

SEQ ID NO: 15772 - protein, 258 aa, Glycine max
MTISSWFLVVSWIMSPFVFNPSGFDWLKTVYDFEDFINWIWYPGGPFKKAEHSWETWWYEEQDHLKTTGIWGKLLEIILNLRFFFFQYGIVYQLGIAGGNNSIAVYLLSWIVMVVIVAIYIIMAYARDKFATKEHLYYRLVQLLVIVITVLVLFLLLEFAHLKFIDLLSSFLAFVPTGWGMISIALVLRPFLQTTKVWETVVSLARLYDLLFGVIVMAPMAIVSWLPGFQSMQTRILFNEAFSRGLQISRIVSGKKSV

SEQ ID NO: 15773 - DNA, 1116 bp, Glycine max
gaagataaagaaaagagaaatggcaacagaaacaaaagtggcagtattaggtggcatcaccgaagtgcagggagctgccaacagcgtcgagatcaacaatctcgctcgctttgctgtagaggaacaaaacaaaagagagaattcagttctggagtttgtgagggtgattagtgcaaagcagcaagtggttgctggagtgaattactacataacattggaagcaaaagatggtgagattaaaaatgagtataaagcgaaggtttgggagagggaatcccaagagttgctagaattcaagccaacattaggtgcaggaggcatcatcgatgtgcctggagctgccaacagcatcgagatcgaccatctcgctcgctttgctgtagaggaacaaaacaaaagagagaattcggttctggagttggtgagggtgattagtgcaaagaaacaagtggttgctggaatgaattactacataacattggaagcaaaagatggtgtgattaaaaaggagtatgaagcgaagatttgggtgaggggatggttgaactccaaagagttgctagaattcaagccagtcaatgtttctagcacacaaatgggtggcattaccgatgtgactgcgaatagcctcgagatcgacattctcgctcgttttgctgttgatcaacacaacaaaaaagagaatgcaaatctggagtttgtgggggtgattagggcaaagcagcaggtggtggaagggttcatatactacatcactttggaagcaaaagatggtgaaaccaaaaatgtgtatgaaacgaaggtgtgggtgagatcatggttgaactccaaggaggtcctcgaattcaagcccatcagtattaatcctctttcggtgtcggtctagtctttataaggttacagaaataaatggtcgcaagctgaaagttgtactaaaatttattttttataaaaaaatcgaaggtagtattaaatatgttatatgtatgtattgtgcggaataaatgcagccacgtactatatataatggtacatacggtgtagggctgtacaagttgggcatcctatttcaatattaacgaccactaataaatattaccattggagttattacgt

SEQ ID NO: 15774 - protein, 294 aa, Glycine max
KIKKREMATETKVAVLGGITEVQGAANSVEINNLARFAVEEQNKRENSVLEFVRVISAKQQVVAGVNYYITLEAKDGEIKNEYKAKVWERESQELLEFKPTLGAGGIIDVPGAANSIEIDHLARFAVEEQNKRENSVLELVRVISAKKQVVAGMNYYITLEAKDGVIKKEYEAKIWVRGWLNSKELLEFKPVNVSSTQMGGITDVTANSLEIDILARFAVDQHNKKENANLEFVGVIRAKQQVVEGFIYYITLEAKDGETKNVYETKVWVRSWLNSKEVLEFKPISINPLSVSV

SEQ ID NO: 15775 - protein, 288 aa, Glycine max
MATETKVAVLGGITEVQGAANSVEINNLARFAVEEQNKRENSVLEFVRVISAKQQVVAGVNYYITLEAKDGEIKNEYKAKVWERESQELLEFKPTLGAGGIIDVPGAANSIEIDHLARFAVEEQNKRENSVLELVRVISAKKQVVAGMNYYITLEAKDGVIKKEYEAKIWVRGWLNSKELLEFKPVNVSSTQMGGITDVTANSLEIDILARFAVDQHNKKENANLEFVGVIRAKQQVVEGFIYYITLEAKDGETKNVYETKVWVRSWLNSKEVLEFKPISINPLSVSV

SEQ ID NO: 15776 - DNA, 882 bp, Glycine max
aactgttggaatgtatagcatttatgcatgaattgcgcctcatacacactgatttaaagcctgagaacattctccttgtttctccggagtacattaaagtgcctgattacaaagtctcatcccaatccccaaaggaggggtcctattacaagcagttgcccaagtctagtgctatcaaggtgattgatttcggtagcactacttatgatcaacatgatcagagttatgtggtatcgacgaggcactatcgggctccagaagttatattgggacatggatggagttacccatgtgatatctggagtgttggttgtattcttgttgagctttgcacgggtgaggcgttattccagactcacgaaaacttggaacatctggctatgatggagagagttcttggacctttgccgtaccatatgcttaagagggcagatcggcactctgacaaatacatcagaaaaggacgcctgaattggcctgagggttgcacctcgcgggagagcatgaaagctgtgatgaaattgtccaggcttcagaatctggtgatgcaaaatgtggaccaggctgcgggagatttcattggtcttttgcaagggctcctgaagtatgacccagcaagccgtttaacagcacgagaagcactgaggcatcctttcttcaccgaagggtttgggcgaagaagatgatacgtccttgaagcagaccttgtttgtcctctgtctctgaccaaactgtatataaagctgaaatggagttgtttcaatcttgtttgaaacgtcgtgtaactatagttgtatcacaagggaagtcagacggatactttttactaatcctgacttgtttgagttttgcaagccaattcaatgaaagtttgggttgttc

SEQ ID NO: 15777 - protein, 227 aa, Glycine max
LLECIAFMHELRLIHTDLKPENILLVSPEYIKVPDYKVSSQSPKEGSYYKQLPKSSAIKVIDFGSTTYDQHDQSYVVSTRHYRAPEVILGHGWSYPCDIWSVGCILVELCTGEALFQTHENLEHLAMMERVLGPLPYHMLKRADRHSDKYIRKGRLNWPEGCTSRESMKAVMKLSRLQNLVMQNVDQAAGDFIGLLQGLLKYDPASRLTAREALRHPFFTEGFGRRR

SEQ ID NO: 15778 - protein, 220 aa, Glycine max
MHELRLIHTDLKPENILLVSPEYIKVPDYKVSSQSPKEGSYYKQLPKSSAIKVIDFGSTTYDQHDQSYVVSTRHYRAPEVILGHGWSYPCDIWSVGCILVELCTGEALFQTHENLEHLAMMERVLGPLPYHMLKRADRHSDKYIRKGRLNWPEGCTSRESMKAVMKLSRLQNLVMQNVDQAAGDFIGLLQGLLKYDPASRLTAREALRHPFFTEGFGRRR

SEQ ID NO: 15779 - DNA, 607 bp, Glycine max
ctatttacatcaattgatgccgcctatcattacttgcattgttgcaaaaaggataggaaacagactctctgatgagcactgggagcttaggaacttcagtgctaatcttgttacttcaatatgccaaagatttgggcatatttatcacaatctgcagccacgtgtgatgaagacatttcttcattctttcttggaccctacaaaagctttgcctcaacactatggtgcaattaaagggatagaagctcttggatcaagactgattcgcttgcttatacttccaaatctcgagccatatttgcatcttcttgagccagaaatgcaacctgagaagcaagaaaacgaaatgaagaggcatgaagcttggcaagtttatggggctttgttgggtgcagcaggacaatgcgtgcatgaaaaggtcaaaacgtttggcaatttgttctctcctccaactcaggttacttcaagaggcagtggaaaatctgtgattgcgatgccaggcaaacgaaaagccagcaccgttaatctgatgcagcagcagcagctacctccaatgaagaaacttgtaacagacggcactggaggcgcggtaccaatgaactccatg

SEQ ID NO: 15780 - protein, 202 aa, Glycine max
YLHQLMPPIITCIVAKRIGNRLSDEHWELRNFSANLVTSICQRFGHIYHNLQPRVMKTFLHSFLDPTKALPQHYGAIKGIEALGSRLIRLLILPNLEPYLHLLEPEMQPEKQENEMKRHEAWQVYGALLGAAGQCVHEKVKTFGNLFSPPTQVTSRGSGKSVIAMPGKRKASTVNLMQQQQLPPMKKLVTDGTGGAVPMNSM

SEQ ID NO: 15781 - protein, 197 aa, Glycine max
MPPIITCIVAKRIGNRLSDEHWELRNFSANLVTSICQRFGHIYHNLQPRVMKTFLHSFLDPTKALPQHYGAIKGIEALGSRLIRLLILPNLEPYLHLLEPEMQPEKQENEMKRHEAWQVYGALLGAAGQCVHEKVKTFGNLFSPPTQVTSRGSGKSVIAMPGKRKASTVNLMQQQQLPPMKKLVTDGTGGAVPMNSM

SEQ ID NO: 15782 - protein, 147 aa, Glycine max
MKTFLHSFLDPTKALPQHYGAIKGIEALGSRLIRLLILPNLEPYLHLLEPEMQPEKQENEMKRHEAWQVYGALLGAAGQCVHEKVKTFGNLFSPPTQVTSRGSGKSVIAMPGKRKASTVNLMQQQQLPPMKKLVTDGTGGAVPMNSM

SEQ ID NO: 15783 - DNA, 571 bp, Glycine max
  misc_feature (101)..(101): n is a, c, g, or t
tgcagaactcagaagtcaatttgaagggttgcaaaagcatatggatggattgacaaatgatgtggatagatccaatgaaatggtgttaatgttgcaagatnaattagaagagaaggatcaggagatccaaagactgaaagatgagttgcaaccaaaaagcctcgtcgtggaggacgggaaaacagatccagcatctaataggaatgatgatgatgaaacgatacctactgaagccgctaattaatgtgggcttttggtttacctttggaagttgaatcaaaagttacaaattcttatttttcacaagatgagaatgtgtcagttcagcctaacgttaagccaaacacaattgtataactttagacttaaagaagtttgagtaaatactcaagttagtcctgagaatcactgggaatgttttgatccctaaaaggaaaatgatcatttcatccctcaagagtgtaaattgatgaaattttggggatcgaattaggtaaagtgaatttttttttttaccgtcaattattcctttacaattcactatagttatatttaaattcaaaatatcatt

SEQ ID NO: 15784 - protein, 80 aa, Glycine max
  misc_feature (34)..(34): Xaa can be any naturally occurring amino acid
AELRSQFEGLQKHMDGLTNDVDRSNEMVLMLQDXLEEKDQEIQRLKDELQPKSLVVEDGKTDPASNRNDDDETIPTEAAN

SEQ ID NO: 15785 - protein, 67 aa, Glycine max
  misc_feature (21)..(21): Xaa can be any naturally occurring amino acid
MDGLTNDVDRSNEMVLMLQDXLEEKDQEIQRLKDELQPKSLVVEDGKTDPASNRNDDDETIPTEAAN

SEQ ID NO: 15786 - protein, 54 aa, Glycine max
  misc_feature (8)..(8): Xaa can be any naturally occurring amino acid
MVLMLQDXLEEKDQEIQRLKDELQPKSLVVEDGKTDPASNRNDDDETIPTEAAN

SEQ ID NO: 15787 - DNA, 767 bp, Glycine max
aatcggaggaaagggatactacttctgttgatacttcgaggtaaagaaacgccgctattgatagcgtgcagacattgacaattctcaatcttccacatggggatgtggatcctgaaaatcaagcttgtgataggaatgaaggctgtaagcaaaacagacttggcttatccagagtcaatcataagaaagaaactctcgaattttcttctagtaaatcatgtgtgccaatattgccatgggtcaatggagatgggatcatcaacaacattgtttacagggtactcagacgtcgtgttcttggaatagtgatgcaaaaccctgggatattggaggatggtattctacatcatatgcacgtgttgaatccacagaactgtagaactctcttggaattgatggttctggataaacacctaattgtgaagaagatgcatcaaaatatgttagatgggggaccctccttacttccggaacttatcggaagcaaatccagtcaaccgaagttgatatgccgagagcatttcttcgccaatcccatgagtacttccttgttgtagggaatctgtggtattgacattagacattagtacttgttatataaaaaacatatttataggaaattttggatactggtttaagttatatttggaagaattgtaacttaggcaatcctagtaaatatgtttcaggctaggaacttaggattttggatatttgacaagtttggttgctacaatcctacttgagtatagcaggttggtacaccc

SEQ ID NO: 15788 - protein, 82 aa, Glycine max
MQNPGILEDGILHHMHVLNPQNCRTLLELMVLDKHLIVKKMHQNMLDGGPSLLPELIGSKSSQPKLICREHFFANPMSTSLL

SEQ ID NO: 15789 - protein, 69 aa, Glycine max
MGMWILKIKLVIGMKAVSKTDLAYPESIIRKKLSNFLLVNHVCQYCHGSMEMGSSTTLFTGYSDVVFLE

SEQ ID NO: 15790 - protein, 68 aa, Glycine max
MHVLNPQNCRTLLELMVLDKHLIVKKMHQNMLDGGPSLLPELIGSKSSQPKLICREHFFANPMSTSLL

SEQ ID NO: 15791 - DNA, 1389 bp, Glycine max
gaaacattttcagacagaggcatgtgggaatctgttgtgttgacggtagctgccaccgccggcaacaacatcggaaagatccttcagaagaagggcactatcattcttccacctctctctttcaaactcaaggtcataaggtcttatgctttaaacaaaacctgggtggtaggttttctaatggatatattaggggcattattgatgttaagggcattgtctctggctccagtgtctgtcatccaaccagtttctggctgtggactagcaattctttcaatcttttctcatttttatctcaaggaagtcatgaatgctgttgattgggttggcattacattagcaggttttggcacaataggagttggtgctggaggtgaggagcaagaggtggttgctctatctatttttcacattccagggctggcatttgttgttttcatcttgtttgtagatacttcttagtggatggcttcgaatatgcaagtgccaacgaagagaacaagagatggtggaatatgatgttgttgaggaagtcatttatggcttggaatctggaattttgtttggtatgtcatctgtaatatcgaagatgggatttctattcctagagcaaggttttcccaagctgttggttcctatgtgcatcatgattagtgtgtgttgtagtggcactggcttttactaccagacacgcggtctaaagcatggaagggctattgtagtttccacatgtgccgctgtggcatcaattttgactggtgttcttgctgggatgcttgctttgggtgaacgacttccttcggaaccaaaagctcgcttggcacttcttcttggatggctacttattatagttggtgtgattttacttgttggttcaacacggctagtgagattcctttcttgttcttcacagcgaaaaagaagcaatgtggataagaattttgaccttagaagagccacttcttcccgtgtgagggaaacaagtccaagtgctgtcattcaagcagcaacattaaatcatttactatcatcatcttccaaagaaaaagcttgagctggcatgagctggatcatgttccttcatccttcccaggatttttaagcattattaagttgctttctaatccatctgccaaggccagggagtattctgtatagcatagaggctgcttcatcagagggcatggcattttggtgatcattcattgcttctggctcacattttggatgaaatatttgttaacttctgatgcaacttgtaaaaactattcatgaacttacactactagtgagtgtacccgtgcactgcacgggttgataaagaaataaattttttgttaaaatgaattaatttgtataaaaaaatagacctttaatatccacatt

SEQ ID NO: 15792 - protein, 182 aa, Glycine max
MVEYDVVEEVIYGLESGILFGMSSVISKMGFLFLEQGFPKLLVPMCIMISVCCSGTGFYYQTRGLKHGRAIVVSTCAAVASILTGVLAGMLALGERLPSEPKARLALLLGWLLIIVGVILLVGSTRLVRFLSCSSQRKRSNVDKNFDLRRATSSRVRETSPSAVIQAATLNHLLSSSSKEKA

SEQ ID NO: 15793 - protein, 161 aa, Glycine max
MSSVISKMGFLFLEQGFPKLLVPMCIMISVCCSGTGFYYQTRGLKHGRAIVVSTCAAVASILTGVLAGMLALGERLPSEPKARLALLLGWLLIIVGVILLVGSTRLVRFLSCSSQRKRSNVDKNFDLRRATSSRVRETSPSAVIQAATLNHLLSSSSKEKA

SEQ ID NO: 15794 - protein, 154 aa, Glycine max
ETFSDRGMWESVVLTVAATAGNNIGKILQKKGTIILPPLSFKLKVIRSYALNKTWVVGFLMDILGALLMLRALSLAPVSVIQPVSGCGLAILSIFSHFYLKEVMNAVDWVGITLAGFGTIGVGAGGEEQEVVALSIFHIPGLAFVVFILFVDTS

SEQ ID NO: 15795 - DNA, 1019 bp, Glycine max
tagacaacacaaatgcagaagaagccaggaagcaatcagaaagcatattaaatgtcaaatatggaatttctggcgatagaacaattggagctcaccctcctgtcatgaatgaatctactggagttgatggtgccagacaagagttaatcttcaggagtgcaattactttgcaaaggcctgtgcttgatccatgcctagctgttggttttcttcctctcccttcagatggcctaagagtaggacaactagttaagatgcaatggagagtggaaaggttaaaggatttagatgaggaaggagtttctaaacagaatgatgagatgctatacgaggtaaatgcaaattctggaaattggatgatagccgggaggaaaagaggatatgcatctctgtccacaaaacaaggggcaagaatagttatctcggtactatgcatgccactggtggctggttatgttcaccctcccgtacttgggctgccagatgttgatgaggcaaatataagctgcaaacctgctgggccacatctggtttgtgttttgccaccgcctctcagctcctccttctgcattccagttaattcatgagttttcactgtgactgtgtcttcacccaatcttgattgagtttgtgttccataggctattaagatgtttgagaatttttttggtttaagtaggaaagtgtaacgttgtgccttttaatttctttgcattaaaaatctccgtagttggatttgtgtcgcttgtagttgtagccttcatgcattgctcaaagtatcagcagcaggaaccttggcgcatgtacagtggaattttgtgctcttccttgtacattagacagatacacggaccataacattcttttgtctcaaaattacaaaagttggtaggaaccaccatatacaatttcattattttgctcccaaaaaatcgaattacagataccaatcgttgtaaacaatttcgaatctaccgtggtaaattggtaattatatttgggatgctacattccatttg

SEQ ID NO: 15796 - protein, 194 aa, Glycine max
DNTNAEEARKQSESILNVKYGISGDRTIGAHPPVMNESTGVDGARQELIFRSAITLQRPVLDPCLAVGFLPLPSDGLRVGQLVKMQWRVERLKDLDEEGVSKQNDEMLYEVNANSGNWMIAGRKRGYASLSTKQGARIVISVLCMPLVAGYVHPPVLGLPDVDEANISCKPAGPHLVCVLPPPLSSSFCIPVNS

SEQ ID NO: 15797 - protein, 160 aa, Glycine max
MNESTGVDGARQELIFRSAITLQRPVLDPCLAVGFLPLPSDGLRVGQLVKMQWRVERLKDLDEEGVSKQNDEMLYEVNANSGNWMIAGRKRGYASLSTKQGARIVISVLCMPLVAGYVHPPVLGLPDVDEANISCKPAGPHLVCVLPPPLSSSFCIPVNS

SEQ ID NO: 15798 - protein, 110 aa, Glycine max
MQWRVERLKDLDEEGVSKQNDEMLYEVNANSGNWMIAGRKRGYASLSTKQGARIVISVLCMPLVAGYVHPPVLGLPDVDEANISCKPAGPHLVCVLPPPLSSSFCIPVNS

SEQ ID NO: 15799 - DNA, 1141 bp, Glycine max
attctaaacgggtctgacaatgaggtactcataatcaaaagtctgacacatagagaaatcaatgcagttataaagactatacccaatccagtctatctcttccaaggaattgtactacgtcgaggtgccaaaggaactggaatgaaatctattgagttagcactctccatgtgtgatattattgatatatatggcttcactgttgatccaggatacactgaatggacaagatacttctctcagcctaggaagggacacaacccacttcaaggaagagcatactaccaactcctagaatgtcttggggtaattagaattcactctcccatgaggtctaagaggatggaagactggtcagatatacctagtagacaaatgataagccaagcacatgcagcagctttgcgcttaaaaaggagtcaagctggtcagggtggtgacttagggcagtttggcaattgtaaggtgtggggcaatgtcaatccagacaaaagtggacctgtctcgggatcaccagacatgagtgatgtcaggagatattcaaattatagtaaatgggaagtcatgccttttgagagtttgaggaaagaagcacgggatcattataaccagatgcaaggggtctctgtatataaaatggatggcaataagttggatgatctagtctgtgtgagacattccttaaaatccgaggtgtaaatgggtgcctttgctgtctatattgtttttctctgatcacaccctactgtattctaaatggaatctgggatgaagatactttccgagggcttcatggctcctcatccatcgttctgtctcatcacttattgcagagcacaacacgaatctcaactccaaggaaaatgaggtagtcaatatgcgtaatttcatcgatccatatgattcatattttaaagtgattcatggtaaggggtctagaaatcttaatacaggaattctgaccagagatttgttgtaccatttttttcaggtttacaatggatagtgcttagtccatagtataatagatatctgtcttttatttatattgtactaattagccgaaggagtatctgcagaaagtcgtagctgttttgtgaagtgatttttcacatgaatttcaatggtatttttagtcgct

SEQ ID NO: 15800 - protein, 232 aa, Glycine max
ILNGSDNEVLIIKSLTHREINAVIKTIPNPVYLFQGIVLRRGAKGTGMKSIELALSMCDIIDIYGFTVDPGYTEWTRYFSQPRKGHNPLQGRAYYQLLECLGVIRIHSPMRSKRMEDWSDIPSRQMISQAHAAALRLKRSQAGQGGDLGQFGNCKVWGNVNPDKSGPVSGSPDMSDVRRYSNYSKWEVMPFESLRKEARDHYNQMQGVSVYKMDGNKLDDLVCVRHSLKSEV

SEQ ID NO: 15801 - protein, 185 aa, Glycine max
MKSIELALSMCDIIDIYGFTVDPGYTEWTRYFSQPRKGHNPLQGRAYYQLLECLGVIRIHSPMRSKRMEDWSDIPSRQMISQAHAAALRLKRSQAGQGGDLGQFGNCKVWGNVNPDKSGPVSGSPDMSDVRRYSNYSKWEVMPFESLRKEARDHYNQMQGVSVYKMDGNKLDDLVCVRHSLKSEV

SEQ ID NO: 15802 - protein, 176 aa, Glycine max
MCDIIDIYGFTVDPGYTEWTRYFSQPRKGHNPLQGRAYYQLLECLGVIRIHSPMRSKRMEDWSDIPSRQMISQAHAAALRLKRSQAGQGGDLGQFGNCKVWGNVNPDKSGPVSGSPDMSDVRRYSNYSKWEVMPFESLRKEARDHYNQMQGVSVYKMDGNKLDDLVCVRHSLKSEV

SEQ ID NO: 15803 - DNA, 1041 bp, Glycine max
attaattgcatcaaacggttcaaaggaagagggggaagtttgtagtgctgctgaagttgaagaagcaaaggcagtcctcaggcttgttccaatatgggctacatgtttaatttttgctattgtgtttgctcagtcttctactttctttacaaaacaaggtgttacgatggacagggaaattttgcctgggttttatgtaccccctgcttctcttcaatccattatcagcctctccattgttctttttattcctatctatgaccgcattattgttcccgtagctagagcttttactggcaaaccctctggcatcacaatgctgcagagaattggaactggaatgcttctttctgcaatttctatggtaattgcagcttttgtggagatgaaaagactcaaagtggctcgtgactgtgggctaattgacatgcctaatgtgacaattccaatgagcatctggtggttagttcctcaatatgccttgtttggaattgctgatgtctttgcaatggtgggtctgcaagagtttttctatgatcaagtcccacagggaattaagaagtgtgggtctttctctctatctaagtatttttggggtcgggagctttctgagtggctttctcatctctgctattgaaaatgtcacgggtaaagataatcgtcatagctggttttctagtaatctcaatcgtgcgcatcttgattatttctatgcccttctagctgctctcagtgcagtggagttatctgtcttctggttcttttccaaatcttatgtttacaagacaagaagcacatagaagaagctggaattctgtagtaaaaaaatgcatgcaagggatgtcctaatattaaacgagtttcctatattattagtgaattctaagacgagatgcaaaggatccaaattaccttgcaaactcaaatggaatcatatataaataattgattcattcgatctattttgtaatattgccgatgtaatttttttagctttgttaacttttgacaattttattctaacaataataattgctacag

SEQ ID NO: 15804 - protein, 211 aa, Glycine max
LIASNGSKEEGEVCSAAEVEEAKAVLRLVPIWATCLIFAIVFAQSSTFFTKQGVTMDREILPGFYVPPASLQSIISLSIVLFIPIYDRIIVPVARAFTGKPSGITMLQRIGTGMLLSAISMVIAAFVEMKRLKVARDCGLIDMPNVTIPMSIWWLVPQYALFGIADVFAMVGLQEFFYDQVPQGIKKCGSFSLSKYFWGRELSEWLSHLCY

SEQ ID NO: 15805 - protein, 156 aa, Glycine max
MDREILPGFYVPPASLQSIISLSIVLFIPIYDRIIVPVARAFTGKPSGITMLQRIGTGMLLSAISMVIAAFVEMKRLKVARDCGLIDMPNVTIPMSIWWLVPQYALFGIADVFAMVGLQEFFYDQVPQGIKKCGSFSLSKYFWGRELSEWLSHLCY

SEQ ID NO: 15806 - protein, 107 aa, Glycine max
MPCLELLMSLQWWVCKSFSMIKSHRELRSVGLSLYLSIFGVGSFLSGFLISAIENVTGKDNRHSWFSSNLNRAHLDYFYALLAALSAVELSVFWFFSKSYVYKTRST

SEQ ID NO: 15807 - DNA, 1339 bp, Glycine max
  misc_feature (855)..(855): n is a, c, g, or t
  misc_feature (866)..(866): n is a, c, g, or t
  misc_feature (924)..(924): n is a, c, g, or t
  misc_feature (1046)..(1046): n is a, c, g, or t
  misc_feature (1058)..(1058): n is a, c, g, or t
  misc_feature (1084)..(1084): n is a, c, g, or t
  misc_feature (1301)..(1301): n is a, c, g, or t
  misc_feature (1315)..(1315): n is a, c, g, or t
aatgtttcaagaggataatataagacctgaacagaagattgttattgattcaattttgaaagttagcaatgcactatcacgattgattaatgatgtgatggagattgcggcaaatgacaatggaagcttccagttagagatgaaacctttccatctacattcaatgatgagggaagcttcttgcactgccaagtgtttgtgtatatataaaggctttggtcttgaagttgatgttgacaagtctttgcctgatctggtcattggtgatgaggcaaggactttccaagtaattttacatatgattggctatttattgaacatatatgataaagggaatctcatttttcaagtttatcttaaaagtgatagtggagatagagatgacagaagttttggattatggagatcgagcatgcaaaatgagtatgtacatattaaatttaattttcagataaatggtataagttcccagtcagatgaatcagtttcaacaagaaattatactggtagaaggcactacaacaatgaacctaaggaaggcctgagcttcagcatgtgcaaaacgctggtgcagatgatgcaaggtaatatttggatatcaactaactctctgggtttggcacaaggaatgacgcttcttctcaagtttcagataggatcatcccatggaagattcactcttgctcctacagatttttcaaactctcagtttagagggcttaaggttgtgttggctgatgatgatgatgtaaacaggactgtgaccaagaagctgcttgagaaactggggtgtcaagtaactgctgtttcatcaggattcgaatgtcttggtgctataagtggctctggtaactnattcaaaattnttctgttggatcttcacatgcctgaaatggatggttttgaagttgcaagaaggattcngaaattccaaagccataattggcccttgatcatagcttttactgcaagtgcagaagaacacatcaaggagagatgtctacaggtgggaatgaatggattgattcgaaaacctatcctccttngtgagatagcanatgaacttggaacagtcttgcaacgngcaggtgaaaaattgtgacaacaattttaaatatctcaaattttttaggttcctcaaaattcattactttgacattttgaaagagaacctgaaattcttaacaaactaaatatactagatactaggttctaggttcattttgctaaccattttttctgtgtgatctttttactgtacaatgaattatggatttctacaaggtgtatagaacggcttnccaccatcaaatanaaaagtatgaaatgcaaaattctg

SEQ ID NO: 15808 - protein, 366 aa, Glycine max
  misc_feature (285)..(285): Xaa can be any naturally occurring amino acid
  misc_feature (289)..(289): Xaa can be any naturally occurring amino acid
  misc_feature (308)..(308): Xaa can be any naturally occurring amino acid
  misc_feature (349)..(349): Xaa can be any naturally occurring amino acid
  misc_feature (353)..(353): Xaa can be any naturally occurring amino acid
  misc_feature (361)..(361): Xaa can be any naturally occurring amino acid
MFQEDNIRPEQKIVIDSILKVSNALSRLINDVMEIAANDNGSFQLEMKPFHLHSMMREASCTAKCLCIYKGFGLEVDVDKSLPDLVIGDEARTFQVILHMIGYLLNIYDKGNLIFQVYLKSDSGDRDDRSFGLWRSSMQNEYVHIKFNFQINGISSQSDESVSTRNYTGRRHYNNEPKEGLSFSMCKTLVQMMQGNIWISTNSLGLAQGMTLLLKFQIGSSHGRFTLAPTDFSNSQFRGLKVVLADDDDVNRTVTKKLLEKLGCQVTAVSSGFECLGAISGSGNXFKIXLLDLHMPEMDGFEVARRIXKFQSHNWPLIIAFTASAEEHIKERCLQVGMNGLIRKPILLXEIAXELGTVLQXAGEKL

SEQ ID NO: 15809 - protein, 334 aa, Glycine max
  misc_feature (253)..(253): Xaa can be any naturally occurring amino acid
  misc_feature (257)..(257): Xaa can be any naturally occurring amino acid
  misc_feature (276)..(276): Xaa can be any naturally occurring amino acid
  misc_feature (317)..(317): Xaa can be any naturally occurring amino acid
  misc_feature (321)..(321): Xaa can be any naturally occurring amino acid
  misc_feature (329)..(329): Xaa can be any naturally occurring amino acid
MEIAANDNGSFQLEMKPFHLHSMMREASCTAKCLCIYKGFGLEVDVDKSLPDLVIGDEARTFQVILHMIGYLLNIYDKGNLIFQVYLKSDSGDRDDRSFGLWRSSMQNEYVHIKFNFQINGISSQSDESVSTRNYTGRRHYNNEPKEGLSFSMCKTLVQMMQGNIWISTNSLGLAQGMTLLLKFQIGSSHGRFTLAPTDFSNSQFRGLKVVLADDDDVNRTVTKKLLEKLGCQVTAVSSGFECLGAISGSGNXFKIXLLDLHMPEMDGFEVARRIXKFQSHNWPLIIAFTASAEEHIKERCLQVGMNGLIRKPILLXEIAXELGTVLQXAGEKL

SEQ ID NO: 15810 - protein, 320 aa, Glycine max
  misc_feature (239)..(239): Xaa can be any naturally occurring amino acid
  misc_feature (243)..(243): Xaa can be any naturally occurring amino acid
  misc_feature (262)..(262): Xaa can be any naturally occurring amino acid
  misc_feature (303)..(303): Xaa can be any naturally occurring amino acid
  misc_feature (307)..(307): Xaa can be any naturally occurring amino acid
  misc_feature (315)..(315): Xaa can be any naturally occurring amino acid
MKPFHLHSMMREASCTAKCLCIYKGFGLEVDVDKSLPDLVIGDEARTFQVILHMIGYLLNIYDKGNLIFQVYLKSDSGDRDDRSFGLWRSSMQNEYVHIKFNFQINGISSQSDESVSTRNYTGRRHYNNEPKEGLSFSMCKTLVQMMQGNIWISTNSLGLAQGMTLLLKFQIGSSHGRFTLAPTDFSNSQFRGLKVVLADDDDVNRTVTKKLLEKLGCQVTAVSSGFECLGAISGSGNXFKIXLLDLHMPEMDGFEVARRIXKFQSHNWPLIIAFTASAEEHIKERCLQVGMNGLIRKPILLXEIAXELGTVLQXAGEKL

SEQ ID NO: 15811 - DNA, 829 bp, Glycine max
  misc_feature (769)..(769): n is a, c, g, or t
  misc_feature (785)..(785): n is a, c, g, or t
  misc_feature (806)..(806): n is a, c, g, or t
  misc_feature (816)..(816): n is a, c, g, or t
  misc_feature (818)..(818): n is a, c, g, or t
gaaaagcggcattgagtgagagtgttccctctcctctcttctgctcaaacaatgtcgcaaacaacgctgcacgctttcgtcgccaaaaaccttggatgtggaatggcagaaggcaagtgtctcccatgttcaggtgtttctggaagaactgctgctgtatattcctactcttctctaggtcatcgcaaaattcattcccatgtccaagttaaaggactaaagtgtggctttaggggtgcatcttttgtatgtgaagcaaagaggaacccagatttctcaaggcaaaacaagcatgggtcctccagaagcagaaatcggaatagtgatgggagagacagctttgagagctttgacgacgatatgttttctttaaaaaatggaccacctgtgtctctttcaacctcaggaaaattccaggccacttcagcccctggtcctagggagaaggagattgttgagctatttatgaaggtccaggctcggttgcgtgagagggctgcctcccaagaagaaaagaaagttgaagcctcccgagcacaaagcaaagagaacagtactgtggattcccttctcaaactactgaagaaacattcagttgagcaagtgaagagaagtagtggaggcagaggaaaagattttagttcagaccagttgcaagaaagtaaccaatacaatggaggacggaactctaaaatttctgatttagatagttctccaaaggatgagccccaagaggacattgtcttctcttcctcggtagccaggcctnggtcaaatttccaaanaaggtctcccgttcctcgttnaaaataccancntgtctctaacg

SEQ ID NO: 15812 - protein, 259 aa, Glycine max
  misc_feature (240)..(240): Xaa can be any naturally occurring amino acid
  misc_feature (245)..(245): Xaa can be any naturally occurring amino acid
  misc_feature (252)..(252): Xaa can be any naturally occurring amino acid
  misc_feature (255)..(256): Xaa can be any naturally occurring amino acid
MSQTTLHAFVAKNLGCGMAEGKCLPCSGVSGRTAAVYSYSSLGHRKIHSHVQVKGLKCGFRGASFVCEAKRNPDFSRQNKHGSSRSRNRNSDGRDSFESFDDDMFSLKNGPPVSLSTSGKFQATSAPGPREKEIVELFMKVQARLRERAASQEEKKVEASRAQSKENSTVDSLLKLLKKHSVEQVKRSSGGRGKDFSSDQLQESNQYNGGRNSKISDLDSSPKDEPQEDIVFSSSVARPXSNFQXRSPVPRXKYXXVSN

SEQ ID NO: 15813 - protein, 242 aa, Glycine max
  misc_feature (223)..(223): Xaa can be any naturally occurring amino acid
  misc_feature (228)..(228): Xaa can be any naturally occurring amino acid
  misc_feature (235)..(235): Xaa can be any naturally occurring amino acid
  misc_feature (238)..(239): Xaa can be any naturally occurring amino acid
MAEGKCLPCSGVSGRTAAVYSYSSLGHRKIHSHVQVKGLKCGFRGASFVCEAKRNPDFSRQNKHGSSRSRNRNSDGRDSFESFDDDMFSLKNGPPVSLSTSGKFQATSAPGPREKEIVELFMKVQARLRERAASQEEKKVEASRAQSKENSTVDSLLKLLKKHSVEQVKRSSGGRGKDFSSDQLQESNQYNGGRNSKISDLDSSPKDEPQEDIVFSSSVARPXSNFQXRSPVPRXKYXXVSN

SEQ ID NO: 15814 - protein, 156 aa, Glycine max
  misc_feature (137)..(137): Xaa can be any naturally occurring amino acid
  misc_feature (142)..(142): Xaa can be any naturally occurring amino acid
  misc_feature (149)..(149): Xaa can be any naturally occurring amino acid
  misc_feature (152)..(153): Xaa can be any naturally occurring amino acid
MFSLKNGPPVSLSTSGKFQATSAPGPREKEIVELFMKVQARLRERAASQEEKKVEASRAQSKENSTVDSLLKLLKKHSVEQVKRSSGGRGKDFSSDQLQESNQYNGGRNSKISDLDSSPKDEPQEDIVFSSSVARPXSNFQXRSPVPRXKYXXVSN

SEQ ID NO: 15815 - DNA, 1291 bp, Glycine max
gattttcttaagcaaactgtgccgtatttcaaggacaatcccgaattaggtcttgtccaagctagatgggcttttgtgaacaaggatgagaacttgttgacacgtctccagaacattaacttatgcttccattttgaagtagaacagcaggtcaatggggcatttctcaacttttttggatttaatggaactgctggtgtttggagaatcaaggccctggaagagtccggtggctggcttgagaggacaaccgtagaagatatggatattgccgtccgagctcatctcaatggctggaaatttatctttgtaaatgatgtaaaggtactttgtgaagttccagagtcctatgaagcttataggaagcagcagcaccggtggcactcgggtccaatgcaacttttcagattgtgtcttccagcaattttgagatctaagatatcaccatggaagaaagggaatttaatactgctattctttctgttgagaaaactcattcttcccttttactccttcaccttattttgcataattcttcctttaactatgtttgtcccagaggccgagcttcctctatgggtgatctgctatatacctgtatttatgtcattcctcaacattcttcctgccccgaaatattttccttttctagttccataccttctttttgaaaacaccatgtctgtcaccaaattcaatgccatgatctctggactcttccaattaggtagttcttatgaatggattgtcacaaagaaggctggcaggtcatcagagtctgatttggtggcggctgcagaaagggaagtcaagtcaataatggaacaacaaaagatccatagaggagcttctgacagtgtacttgttgagtctaaccaatgtaaggaacataaagaaacaaatggaacacctgttaagaaagctaacaaaatatataagaaagagttgactttggcattgctccttctcacagcttctgtcaggagtttgttgtctgcacaaggagttcacttttactatcttcttttccaaggagtgactttcctccttgttggtcttgatctgattgggcagcagatgagctagttttgatccaacacaagaaaaaggagaataaatggaaagaaaataagcttcattttcttgctgcaaaacaagcaatgttgtaaaagaaaggggttctcttttattcatatcaattctgtttcacaccattcatcccaaatataaaatatagggacctggtcattatattgaattcttgtttatagataagactggaaaatttttc

SEQ ID NO: 15816 - protein, 361 aa, Glycine max
DFLKQTVPYFKDNPELGLVQARWAFVNKDENLLTRLQNINLCFHFEVEQQVNGAFLNFFGFNGTAGVWRIKALEESGGWLERTTVEDMDIAVRAHLNGWKFIFVNDVKVLCEVPESYEAYRKQQHRWHSGPMQLFRLCLPAILRSKISPWKKGNLILLFFLLRKLILPFYSFTLFCIILPLTMFVPEAELPLWVICYIPVFMSFLNILPAPKYFPFLVPYLLFENTMSVTKFNAMISGLFQLGSSYEWIVTKKAGRSSESDLVAAAEREVKSIMEQQKIHRGASDSVLVESNQCKEHKETNGTPVKKANKIYKKELTLALLLLTASVRSLLSAQGVHFYYLLFQGVTFLLVGLDLIGQQMS

SEQ ID NO: 15817 - protein, 274 aa, Glycine max
MDIAVRAHLNGWKFIFVNDVKVLCEVPESYEAYRKQQHRWHSGPMQLFRLCLPAILRSKISPWKKGNLILLFFLLRKLILPFYSFTLFCIILPLTMFVPEAELPLWVICYIPVFMSFLNILPAPKYFPFLVPYLLFENTMSVTKFNAMISGLFQLGSSYEWIVTKKAGRSSESDLVAAAEREVKSIMEQQKIHRGASDSVLVESNQCKEHKETNGTPVKKANKIYKKELTLALLLLTASVRSLLSAQGVHFYYLLFQGVTFLLVGLDLIGQQMS

SEQ ID NO: 15818 - protein, 230 aa, Glycine max
MQLFRLCLPAILRSKISPWKKGNLILLFFLLRKLILPFYSFTLFCIILPLTMFVPEAELPLWVICYIPVFMSFLNILPAPKYFPFLVPYLLFENTMSVTKFNAMISGLFQLGSSYEWIVTKKAGRSSESDLVAAAEREVKSIMEQQKIHRGASDSVLVESNQCKEHKETNGTPVKKANKIYKKELTLALLLLTASVRSLLSAQGVHFYYLLFQGVTFLLVGLDLIGQQMS

SEQ ID NO: 15819 - DNA, 625 bp, Glycine max
ttattgtattttgcagccaaatctggtattgatccttccgattgtgttgagcttgcaaaacatgtgaaattgagctgcccaaacctagtgttctctggcctaatgacgataggaatgccagactataccttaactccacagaactttcagacactatcaaattgcagaactgaagtatgcaaggcacttgaaatgcccgaggaggaatgtgaactgtcaatgggcatgtctggtgattttgagttagcggtatggaatagtttactaaagttatttagcagttcaaattttcttgatagttacgttgcatgattgcacctgcaattatctcagttctggatgctttttagctcatcagggaatgaattgacgattatcataggaatggggttctttgatacttgatgtgatgatgatagtgtatgaagattcctaacaaacaacacactaacatattctttattattgaatagaattcagacaggtcccactaaataaatgaaaatcattaaattatacagggggtaagacccacatcatttagtgaacctctcatgaatgccacccaacaatagagtaatagatagcttgttgttagcattttttatggtttgtagatattgtt

SEQ ID NO: 15820 - protein, 103 aa, Glycine max
LLYFAAKSGIDPSDCVELAKHVKLSCPNLVFSGLMTIGMPDYTLTPQNFQTLSNCRTEVCKALEMPEEECELSMGMSGDFELAVWNSLLKLFSSSNFLDSYVA

SEQ ID NO: 15821 - protein, 69 aa, Glycine max
MTIGMPDYTLTPQNFQTLSNCRTEVCKALEMPEEECELSMGMSGDFELAVWNSLLKLFSSSNFLDSYVA

SEQ ID NO: 15822 - protein, 65 aa, Glycine max
MPDYTLTPQNFQTLSNCRTEVCKALEMPEEECELSMGMSGDFELAVWNSLLKLFSSSNFLDSYVA

SEQ ID NO: 15823 - DNA, 878 bp, Glycine max
aagcttcgtggtttatatgcacgtgcaaaggagctctctgagaatgaaatcagtgcctcaaatgctttgattggattattagatggtttgttgcaatctggagcttcaactgcacaaaagaaaaagatagaagttggtgagcagaaaaagaagaggatcaagtctgatacagattctgcacgattttctgctgcatctatgaggaatcaacttgaccaagctgcaagccttaaaggagagcaggttgctgctagggtaaaatcagatgacgaaaaagacgagtggtttgtcgtgaaggtcatacatttcgataaggagacaaaagagtatgaagtacttgacgaagaaccaggtgatgacgaagagagcactcaaaagaagtacaagttgcctatgtcttacattattccatttccgaagaaaggggatccttcgagtgccccagattttgggcagggtcgacaagttttagctgtttatcctggcacaacagcattatacagagctaccgtagcttctcatcgtaagaggaagtctgatgattatattctggagttcgatgacgatgaggaggacggtgctctgccgcagagagccgtgccgttctacagggtggttgccctgccggagggccacaggcagtagtgacatttgacgcagttctgcattcctagtgtaacatatagcgcaaggtagggtgtcttcagtgtgacaatgtggtggtcatatctacgcgaaacgagagagaaaacaaggacgtgcatgtagcacttacatgtggggtccttgtataaaagacgatgatgtttttttttttcaatctgctagagcacgtctatgtaattgcaatccagttttaatctcttatattatacttt

SEQ ID NO: 15824 - protein, 214 aa, Glycine max
KLRGLYARAKELSENEISASNALIGLLDGLLQSGASTAQKKKIEVGEQKKKRIKSDTDSARFSAASMRNQLDQAASLKGEQVAARVKSDDEKDEWFVVKVIHFDKETKEYEVLDEEPGDDEESTQKKYKLPMSYIIPFPKKGDPSSAPDFGQGRQVLAVYPGTTALYRATVASHRKRKSDDYILEFDDDEEDGALPQRAVPFYRVVALPEGHRQ

SEQ ID NO: 15825 - protein, 148 aa, Glycine max
MRNQLDQAASLKGEQVAARVKSDDEKDEWFVVKVIHFDKETKEYEVLDEEPGDDEESTQKKYKLPMSYIIPFPKKGDPSSAPDFGQGRQVLAVYPGTTALYRATVASHRKRKSDDYILEFDDDEEDGALPQRAVPFYRVVALPEGHRQ

SEQ ID NO: 15826 - DNA, 1109 bp, Glycine max
gttctaggggaacctgacagaggcagttaacgaacaaacagatgggttgggccatagcactacacggcggcgccggcgacatcccgctttcccttccaccggagcgccgccagcctcgcgaggaggccctccgccactgcctccaaatcggcgtggaagctctcaaggccaaactgcctcctctcgacgtggttgaacttgtctttcgggagttggagaacattccgcagtttaacgcgggaaggggatctgtgctgacttgcagaggcaccgtggaaatggaagcttccataatggacggcaccactatgaattgcggagctgtttccggcctcactaccgtcgtcaacgccatctctcttgctcgattggtcatggaaaacacgcctcacatctatctcgctttcgatggagcagaggaatttgcaagacaacaaggcgttgagactgtggattcaagccattttattacaaaagaaaatattgaaaggctaaagcaggcaaaagaagctaacagggttcagattgattatacgcaacctatccaaaatgatactaagaaagagaccgcattggctaatggtgatagccaaattggaactgttgggtgtgtggctgtagatagtcttgggaatttggcttctgcaacatctactggtggattagtgaacaaaatggtgggtcgaattggtgacacaccagtcattggtgctggtacctatgcggatgcacgttgtgcggtttcagcgacaggcaaaggtgaagcaataatacgtgggacagtggcaagagatgtggctgctctgatggagtttaagggtctttctctcgtggaagctgctaattgtgttgtacatgagcgcacaccaaaaggcactgttggtttggttgctgtgtctgccaaaggagaagttgcaatgccttttaatacaacaggcatgttcagagcgtgtgctactgaagatggatattctgagattgcaatttggcctgctgccaaaatagagtagtctttaggctttactgatttccaagcttaatgtattctgacatttgatgatgcttcacgcatgcttatatcacagggaaatctatttgcttttcaaggt

SEQ ID NO: 15827 - protein, 322 aa, Glycine max
MGWAIALHGGAGDIPLSLPPERRQPREEALRHCLQIGVEALKAKLPPLDVVELVFRELENIPQFNAGRGSVLTCRGTVEMEASIMDGTTMNCGAVSGLTTVVNAISLARLVMENTPHIYLAFDGAEEFARQQGVETVDSSHFITKENIERLKQAKEANRVQIDYTQPIQNDTKKETALANGDSQIGTVGCVAVDSLGNLASATSTGGLVNKMVGRIGDTPVIGAGTYADARCAVSATGKGEAIIRGTVARDVAALMEFKGLSLVEAANCVVHERTPKGTVGLVAVSAKGEVAMPFNTTGMFRACATEDGYSEIAIWPAAKIE

SEQ ID NO: 15828 - protein, 243 aa, Glycine max
MEASIMDGTTMNCGAVSGLTTVVNAISLARLVMENTPHIYLAFDGAEEFARQQGVETVDSSHFITKENIERLKQAKEANRVQIDYTQPIQNDTKKETALANGDSQIGTVGCVAVDSLGNLASATSTGGLVNKMVGRIGDTPVIGAGTYADARCAVSATGKGEAIIRGTVARDVAALMEFKGLSLVEAANCVVHERTPKGTVGLVAVSAKGEVAMPFNTTGMFRACATEDGYSEIAIWPAAKIE

SEQ ID NO: 15829 - protein, 238 aa, Glycine max
MDGTTMNCGAVSGLTTVVNAISLARLVMENTPHIYLAFDGAEEFARQQGVETVDSSHFITKENIERLKQAKEANRVQIDYTQPIQNDTKKETALANGDSQIGTVGCVAVDSLGNLASATSTGGLVNKMVGRIGDTPVIGAGTYADARCAVSATGKGEAIIRGTVARDVAALMEFKGLSLVEAANCVVHERTPKGTVGLVAVSAKGEVAMPFNTTGMFRACATEDGYSEIAIWPAAKIE

SEQ ID NO: 15830 - DNA, 579 bp, Glycine max
aacatggactcttgaagaaaggcagagttattgccattgcctctgcctcttgcaacaccaaactgatacacacttaataatattatagtaaaaattagccaccaaagtacactaaccccttttttcatacaactcaatagctggattggagcaaggtgaaagtaaaatcatttgcaaccaatgccgttgaacatatttcaggacaaagatggattgccacggattatattgactgagccaaagggttcatcagctgaggttcttctttatggagggcagattatttcttggaagaatcatcgaaaggaagaacttctttttatgagcagtaaggctaacaagaaacagcataaagcaatcagaggaggaatatcagcttgcctagcacggtttggtgatctcagttcacttgaacaacatggatttgcaagaaacaggatgtggtcattggatagggacccttcacctcttcctcccttagacaatcagtcatctgtggatctaatattgaagtcaacagaagttgacttaaagacaccctgtagttttgagttccggcttcgcatctctctcaatgct

SEQ ID NO: 15831 - protein, 133 aa, Glycine max
MPLNIFQDKDGLPRIILTEPKGSSAEVLLYGGQIISWKNHRKEELLFMSSKANKKQHKAIRGGISACLARFGDLSSLEQHGFARNRMWSLDRDPSPLPPLDNQSSVDLILKSTEVDLKTPCSFEFRLRISLNA

SEQ ID NO: 15832 - protein, 86 aa, Glycine max
MSSKANKKQHKAIRGGISACLARFGDLSSLEQHGFARNRMWSLDRDPSPLPPLDNQSSVDLILKSTEVDLKTPCSFEFRLRISLNA

SEQ ID NO: 15833 - DNA, 1299 bp, Glycine max
agatgaagtaggcgaaggctgaaggaaacctctggaattttctttggccaacggcgattccactaataaatatacgtttgttgtgtttccgaggcctgtgaatcggaattggggtttcttcaatcggaatcgcgaacaacatggaagtgagaattgggcaaagggtgtctcgcggaatgctccctctcctcgctctccacaccgtcagcgagtattaccgctccgaccacaaacctccgttcaccgccgccctcatcgccgccaacaccctcatctacctccgcccctccttcctcgatcccctcattccccccattgaacaagtctggttcaacccccacctcatcctcaagaacaaggacttgaaacgcttcttgttgtcgccgttttaccatatcggagaaccgcacctggtttacaacatgctatcccttctctggaaggggtttcagttggaaacctcaatgggaagcgtcgatttcgcttccatagtcgcttccttgctcgttctctcccagggcgtaaccctaatgttatccaaatcactgcttctgttcttcgactacgagagatcctactacagcgaatactccgtcggattctccggcgtcctcttcgccatgaaagtcgttctcaactcccaatcggagaactacacctccgtctacggaattatcgttccgtcccgttacgctgcgtgggctgaattggttctcgctcagcttctcgtgccgggcgtgtcgtttctcggccatctcggtggcattctggcggggcttctttatctgaagctgaggagtacttattcgggttctaaccctataaaagttctcatcagagggattgttgatgctgtgaagtggccttttaagttcttgcggcggaggcggggacggatcaccggaaggggaacagttggaagtaacagggcgtggagatgccagacgtgtacctatgacaacaacaatggttccctgagagtgtgtgagatttgtgggacgattagggttgtcaatggagtgtcctcttttcagaggagctcccgttctgatgggcttcctttggatgagttgcgccgccggagaatcgacaggtttggaggcaggtgatcgtggttagttttgagttcgctgcagcttctggtaaataatactattggatattgagattcaacacatgttagacttttttgtttcgacatatatatgttagttgtagaagtatgacgactgagcaatgaatgttttcatgctatgctagattgtttggcattttcaagaaaaaaaaaatgaaatttgg

SEQ ID NO: 15834 - protein, 322 aa, Glycine max
MEVRIGQRVSRGMLPLLALHTVSEYYRSDHKPPFTAALIAANTLIYLRPSFLDPLIPPIEQVWFNPHLILKNKDLKRFLLSPFYHIGEPHLVYNMLSLLWKGFQLETSMGSVDFASIVASLLVLSQGVTLMLSKSLLLFFDYERSYYSEYSVGFSGVLFAMKVVLNSQSENYTSVYGIIVPSRYAAWAELVLAQLLVPGVSFLGHLGGILAGLLYLKLRSTYSGSNPIKVLIRGIVDAVKWPFKFLRRRRGRITGRGTVGSNRAWRCQTCTYDNNNGSLRVCEICGTIRVVNGVSSFQRSSRSDGLPLDELRRRRIDRFGGR

SEQ ID NO: 15835 - protein, 310 aa, Glycine max
MLPLLALHTVSEYYRSDHKPPFTAALIAANTLIYLRPSFLDPLIPPIEQVWFNPHLILKNKDLKRFLLSPFYHIGEPHLVYNMLSLLWKGFQLETSMGSVDFASIVASLLVLSQGVTLMLSKSLLLFFDYERSYYSEYSVGFSGVLFAMKVVLNSQSENYTSVYGIIVPSRYAAWAELVLAQLLVPGVSFLGHLGGILAGLLYLKLRSTYSGSNPIKVLIRGIVDAVKWPFKFLRRRRGRITGRGTVGSNRAWRCQTCTYDNNNGSLRVCEICGTIRVVNGVSSFQRSSRSDGLPLDELRRRRIDRFGGR

SEQ ID NO: 15836 - protein, 228 aa, Glycine max
MLSLLWKGFQLETSMGSVDFASIVASLLVLSQGVTLMLSKSLLLFFDYERSYYSEYSVGFSGVLFAMKVVLNSQSENYTSVYGIIVPSRYAAWAELVLAQLLVPGVSFLGHLGGILAGLLYLKLRSTYSGSNPIKVLIRGIVDAVKWPFKFLRRRRGRITGRGTVGSNRAWRCQTCTYDNNNGSLRVCEICGTIRVVNGVSSFQRSSRSDGLPLDELRRRRIDRFGGR

SEQ ID NO: 15837 - DNA, 689 bp, Glycine max
atctttttcttcttactctagactcttccttttctcttctctgtctaaggggtgccctgagatcacattgaacaatggtgaaggctgtggccgttcttggcagcagtgagggtgtcactggaactattcacttcgttcaggagggaagtggtccaaccaccgtaactggatctcttgctggtcttaagcctggtctccatggtttccatgtccatgccttgggggacactaccaatggttgcctctcaactggatcacatttcaatcctaataacaaggagcatggtgcccctgaggatgagaatcgtcatgctggtgatcttgggaatgttaatgtcggtgatgatggtactgtcagcttcactattactgacagccagattcctctcactggaccaaacaacatcataggaagggcggttgttgtccatgctgatcctgatgatcttgggaaaggtggtcatgagcttagcaaaactactggaaatgctggtggcagagtagcttgtggtatcattggtctgcaaggataaactaatcacatgaagttggaaacgtgctttagatttgtggaataaagtagcacccatttaaacccgtttggttaggtccggtctgtactgctgaattctgtgttttgcttgtattgtatcgacacttgatgcttaatcaaattgttacattgcttg

SEQ ID NO: 15838 - protein, 152 aa, Glycine max
MVKAVAVLGSSEGVTGTIHFVQEGSGPTTVTGSLAGLKPGLHGFHVHALGDTTNGCLSTGSHFNPNNKEHGAPEDENRHAGDLGNVNVGDDGTVSFTITDSQIPLTGPNNIIGRAVVVHADPDDLGKGGHELSKTTGNAGGRVACGIIGLQG

SEQ ID NO: 15839 - DNA, 1302 bp, Glycine max
  misc_feature (378)..(378): n is a, c, g, or t
cttatgttgtggtcaaggtactacgataaaattagtggatacagtacccgcattcaaaatcctctaagaaatgggacagcaaaccctctatgcacacggaaaagtcaagcatgtaggagccatgagggcggtttcgcggagcttcttggttacatgtccacgctcggtatcaaagtttatgaagacgacaacaatggaacacagtgctgtgagatcatatgtaggaacaactgttcctgcgacgcgtttgctcccttaaatcacattaacaatactagtactggatgtcagatatggctcaaaggaaccaaatttgttagagcttctggaaatatagctctgccaatcaacgtttctgttgcattgctggaacacaangtaaacagctggtggatttggctcatcgttggggtgggagcagcttttgtaatacctgtgatattctatttatcgcgtgccttcctgagaaaatacaaagcaaaagtggagagaaaaaagatgcagaagaagttattacatgacattggaggtaatgcaatgcttgcaatggtgtacggcaaaaccataaaaagtaataacaagggaaagactaacaatgaagttgaactatttgcttttgataccatcgttgttgccacaaacaatttctcagctgcaaataagttaggagagggtggttttggtcctgtttataagggaaatctaagtgatcagcaagaagtagcaataaagcgactttctaaaaagttcgggacaggggctaatagagtttacgaatgaagccaaactcatggccaaactccagcacactaatctggtaaagcttttagggttctgcatccagagagatgaaagaatattggtctatgagtacatgtctaacaagagcttagacttctacctatttgattcggctagaaaggatttgctagactgggaaaaacggttgaacatcattggaggaattgctcaaggacttctataccttcataagtattcaagactaaaggtgatacatcgggacctaaaggcaagcaatatattgcttgatcacgagatgaatgctaaaatatctgactttggcatggctcgaatatttggagtaagagtatcagaagaaaacacaaatagagttgttggtacatatggatatatggctccagagtatgcaatgaaaggtgttgtgtccatcaaaacagatgtgttcagctttggtgtgttgctactagagatacttagtagcaaaaagaataatagtcgctatcattcggatcacccactcaacctcataggatacgtaag

SEQ ID NO: 15840 - protein, 259 aa, Glycine max
  misc_feature (126)..(126): Xaa can be any naturally occurring amino acid
LMLWSRYYDKISGYSTRIQNPLRNGTANPLCTRKSQACRSHEGGFAELLGYMSTLGIKVYEDDNNGTQCCEIICRNNCSCDAFAPLNHINNTSTGCQIWLKGTKFVRASGNIALPINVSVALLEHXVNSWWIWLIVGVGAAFVIPVIFYLSRAFLRKYKAKVERKKMQKKLLHDIGGNAMLAMVYGKTIKSNNKGKTNNEVELFAFDTIVVATNNFSAANKLGEGGFGPVYKGNLSDQQEVAIKRLSKKFGTGANRVYE

SEQ ID NO: 15841 - protein, 258 aa, Glycine max
  misc_feature (125)..(125): Xaa can be any naturally occurring amino acid
MLWSRYYDKISGYSTRIQNPLRNGTANPLCTRKSQACRSHEGGFAELLGYMSTLGIKVYEDDNNGTQCCEIICRNNCSCDAFAPLNHINNTSTGCQIWLKGTKFVRASGNIALPINVSVALLEHXVNSWWIWLIVGVGAAFVIPVIFYLSRAFLRKYKAKVERKKMQKKLLHDIGGNAMLAMVYGKTIKSNNKGKTNNEVELFAFDTIVVATNNFSAANKLGEGGFGPVYKGNLSDQQEVAIKRLSKKFGTGANRVYE

SEQ ID NO: 15842 - protein, 208 aa, Glycine max
  misc_feature (75)..(75): Xaa can be any naturally occurring amino acid
MSTLGIKVYEDDNNGTQCCEIICRNNCSCDAFAPLNHINNTSTGCQIWLKGTKFVRASGNIALPINVSVALLEHXVNSWWIWLIVGVGAAFVIPVIFYLSRAFLRKYKAKVERKKMQKKLLHDIGGNAMLAMVYGKTIKSNNKGKTNNEVELFAFDTIVVATNNFSAANKLGEGGFGPVYKGNLSDQQEVAIKRLSKKFGTGANRVYE

SEQ ID NO: 15843 - DNA, 1515 bp, Glycine max
  misc_feature (984)..(984): n is a, c, g, or t
tgtgctcccaccaaaaaggattcataagaataatggttatcttgtagtttcatgcaatggaggactcaaccaaatgcgagcagcaatatgtgacatggttgctattgcaagacatttaaatgttactctcatagttccagagctggataaaacttctttctgggctgatccaagtgagtttcaagacatatttgatgtagataatttcattggatccttaagagatgaagttagaatattaaagcaactaccacctaggcccaagagaagagttgaacgaggattattctactcattgcctccagttagctggtccaatatttcttactatgaaaagcagatcctgcctctgttactgaaacacaaggttgtgcacctgaatagaacagatgctcgacttgcgaataatggactgcctctggagattcaaaagctgcgatgccgagtgaattttaatgctctgaggtttacttcccagatagagcaacttggtaggaggataatcagaattttgagggaaaagggacccttccttgtacttcatcttagatatgagatggacatgttggccttctctggctgtactcatggatgtgacggcagggaggtggaggaactcacaagaatgaggtatgcttatccctggtggaaggaaaaagtcattaattctgagcttaagagacaagatggcttatgccctttgacacctgaggaaactacactaatattgacagctctaggcatagatcaaaatatccaaatttatattgctgctggagaaatatatggcggacagagaaggatggcaagtttgcaagcagcttttcctaatttggtgaggaaggaaactctgttggaaccttcggatttgatgtattttcaaaaccactcatcacaaatggctgcactggattaccttgtgtctctagagagtgatatattcattccaacatatgatggcaacatggctaaagttgtggaagnccatcgaagatttttaggcttcaaaaggactatattgcttgatagaaagcatttggtgcacctcatagaccaatacaccaaagggtcattaagctgggatgagttttccattatggtgaagaaatctcatgccaataggatgggaaaccccaagagaagagtaatcatcccaggcagacccaaagaagaagactatttttatgcgaatcctcaagagtgtttgcaatttcaagatgaaccattcagcaacacatgatcttaattatctcatctaacacgtgcctccttgatacagtttcctccatcagaaggcaatgccaattggtatttacttcagggggagggccctcatcctgtacatgaattaggttctcaatgaaagcaagaaattgtgtggctattcctcactagaatcattaagataaattggataaatttcatgtgttgaggaacaggttcttgtgtaaagcaacagcaaagtgagttatatcttccatagttaaagaagagcaaaagatatattattactaa

SEQ ID NO: 15844 - protein, 412 aa, Glycine max
  misc_feature (328)..(328): Xaa can be any naturally occurring amino acid
VLPPKRIHKNNGYLVVSCNGGLNQMRAAICDMVAIARHLNVTLIVPELDKTSFWADPSEFQDIFDVDNFIGSLRDEVRILKQLPPRPKRRVERGLFYSLPPVSWSNISYYEKQILPLLLKHKVVHLNRTDARLANNGLPLEIQKLRCRVNFNALRFTSQIEQLGRRIIRILREKGPFLVLHLRYEMDMLAFSGCTHGCDGREVEELTRMRYAYPWWKEKVINSELKRQDGLCPLTPEETTLILTALGIDQNIQIYIAAGEIYGGQRRMASLQAAFPNLVRKETLLEPSDLMYFQNHSSQMAALDYLVSLESDIFIPTYDGNMAKVVEXHRRFLGFKRTILLDRKHLVHLIDQYTKGSLSWDEFSIMVKKSHANRMGNPKRRVIIPGRPKEEDYFYANPQECLQFQDEPFSNT

SEQ ID NO: 15845 - protein, 388 aa, Glycine max
  misc_feature (304)..(304): Xaa can be any naturally occurring amino acid
MRAAICDMVAIARHLNVTLIVPELDKTSFWADPSEFQDIFDVDNFIGSLRDEVRILKQLPPRPKRRVERGLFYSLPPVSWSNISYYEKQILPLLLKHKVVHLNRTDARLANNGLPLEIQKLRCRVNFNALRFTSQIEQLGRRIIRILREKGPFLVLHLRYEMDMLAFSGCTHGCDGREVEELTRMRYAYPWWKEKVINSELKRQDGLCPLTPEETTLILTALGIDQNIQIYIAAGEIYGGQRRMASLQAAFPNLVRKETLLEPSDLMYFQNHSSQMAALDYLVSLESDIFIPTYDGNMAKVVEXHRRFLGFKRTILLDRKHLVHLIDQYTKGSLSWDEFSIMVKKSHANRMGNPKRRVIIPGRPKEEDYFYANPQECLQFQDEPFSNT

SEQ ID NO: 15846 - protein, 381 aa, Glycine max
  misc_feature (297)..(297): Xaa can be any naturally occurring amino acid
MVAIARHLNVTLIVPELDKTSFWADPSEFQDIFDVDNFIGSLRDEVRILKQLPPRPKRRVERGLFYSLPPVSWSNISYYEKQILPLLLKHKVVHLNRTDARLANNGLPLEIQKLRCRVNFNALRFTSQIEQLGRRIIRILREKGPFLVLHLRYEMDMLAFSGCTHGCDGREVEELTRMRYAYPWWKEKVINSELKRQDGLCPLTPEETTLILTALGIDQNIQIYIAAGEIYGGQRRMASLQAAFPNLVRKETLLEPSDLMYFQNHSSQMAALDYLVSLESDIFIPTYDGNMAKVVEXHRRFLGFKRTILLDRKHLVHLIDQYTKGSLSWDEFSIMVKKSHANRMGNPKRRVIIPGRPKEEDYFYANPQECLQFQDEPFSNT

SEQ ID NO: 15847 - DNA, 1440 bp, Glycine max
aattgattgatactgcaatctcaacctgcctgaaagaaagcaagcctgtgtacataagcataagttgtaacttgcctggcattcctcaccccacattcagtcgcgagccggttccattttctctgtctccaagattgagtaacaagatggggttggaggctgcagtggaagcagcagcagagttcctaaacaaggcagtgaagcctgtaatggttggaggtcctaaactaagggtggctaatgcatgtgatgcatttgttgagcttgctgatgcatgtggctatccatttgctgtgatgccatcagccaagggactagtcccggagcacaaaccccacttcattggcacattctggggtgctgtgagcaccgcattctgtgctgaaatcgtcgaatctgctgatgcatacttgtttgctggccccattttcaatgactacagctctgttgggtactcactcctcctcaagaaggagaaggccatcatcgtgcagccggagcgcgttgtgatctccaatggacccgcattcgggtgtgtcctcatgaaggacttcctcagggaactcgcaaagcgtctcaagcacaacaacactgcttatgaaaattactcaaggatttttgtccctgagggaaagcctgtgaaagctgaacccagagagcctttgagggttaatgttctgtttaagcatatacaagatatgctgtctggcgaaaccgcggtgattgctgagacaggggactcttggtttaactgccagaagctgaagttgccaaaggggtgtgggtatgagttccaaatgcaatatggttcaattggttggtctgttggtgctacacttggttatgctcaggcggttcctgagaagcgagtgatttcttgcattggtgatggaagctttcaggtgacagctcaggatgtgtccacaatgctgcgaaatgagcagaagaccatcatcttcctgataaacaatggtggatacaccattgaagttgaaattcatgatgggccatacaatgtgattaagaactggaactacactggcttggttgatgcaatccacaatggtgaaggaaaatgctggaccactaaggttacatgtgaagaggagcttgttgaggcaattcagacagcaacaggtgacaagaaagattgcttgtgcttcattgaagtgattgttcacaaggatgacacaagcaaagaattgcttgaatggggctcaagggtttgtgctgctaacggtcgtcctcccaatcctcagtgaatttcaaacacttaattgagccattacaaatttgctggagtttctccctatttcaaacacttactcttgctgatagaaaaaagaaaatagaacaatttaatttcatgttttatttaacaaagacaataactaccatgagatttacttatatttatttttaaataaaattgagtttttt

SEQ ID NO: 15848 - protein, 419 aa, Glycine max
LIDTAISTCLKESKPVYISISCNLPGIPHPTFSREPVPFSLSPRLSNKMGLEAAVEAAAEFLNKAVKPVMVGGPKLRVANACDAFVELADACGYPFAVMPSAKGLVPEHKPHFIGTFWGAVSTAFCAEIVESADAYLFAGPIFNDYSSVGYSLLLKKEKAIIVQPERVVISNGPAFGCVLMKDFLRELAKRLKHNNTAYENYSRIFVPEGKPVKAEPREPLRVNVLFKHIQDMLSGETAVIAETGDSWFNCQKLKLPKGCGYEFQMQYGSIGWSVGATLGYAQAVPEKRVISCIGDGSFQVTAQDVSTMLRNEQKTIIFLINNGGYTIEVEIHDGPYNVIKNWNYTGLVDAIHNGEGKCWTTKVTCEEELVEAIQTATGDKKDCLCFIEVIVHKDDTSKELLEWGSRVCAANGRPPNPQ

SEQ ID NO: 15849 - protein, 371 aa, Glycine max
MGLEAAVEAAAEFLNKAVKPVMVGGPKLRVANACDAFVELADACGYPFAVMPSAKGLVPEHKPHFIGTFWGAVSTAFCAEIVESADAYLFAGPIFNDYSSVGYSLLLKKEKAIIVQPERVVISNGPAFGCVLMKDFLRELAKRLKHNNTAYENYSRIFVPEGKPVKAEPREPLRVNVLFKHIQDMLSGETAVIAETGDSWFNCQKLKLPKGCGYEFQMQYGSIGWSVGATLGYAQAVPEKRVISCIGDGSFQVTAQDVSTMLRNEQKTIIFLINNGGYTIEVEIHDGPYNVIKNWNYTGLVDAIHNGEGKCWTTKVTCEEELVEAIQTATGDKKDCLCFIEVIVHKDDTSKELLEWGSRVCAANGRPPNPQ

SEQ ID NO: 15850 - protein, 350 aa, Glycine max
MVGGPKLRVANACDAFVELADACGYPFAVMPSAKGLVPEHKPHFIGTFWGAVSTAFCAEIVESADAYLFAGPIFNDYSSVGYSLLLKKEKAIIVQPERVVISNGPAFGCVLMKDFLRELAKRLKHNNTAYENYSRIFVPEGKPVKAEPREPLRVNVLFKHIQDMLSGETAVIAETGDSWFNCQKLKLPKGCGYEFQMQYGSIGWSVGATLGYAQAVPEKRVISCIGDGSFQVTAQDVSTMLRNEQKTIIFLINNGGYTIEVEIHDGPYNVIKNWNYTGLVDAIHNGEGKCWTTKVTCEEELVEAIQTATGDKKDCLCFIEVIVHKDDTSKELLEWGSRVCAANGRPPNPQ

SEQ ID NO: 15851 - DNA, 707 bp, Glycine max
atgagtcctccaagggataactgggaagatggaaatccaggctctggggagccagtccacagtatcagcctggaagccctccttcacggccatatgaagccccaactcctggtgctggttgggctagcactcccggtggaaattatagtgaagctggaacaccgcgggacagttctgcctatgccaatgctccaagcccatatttaccatcaacacctggtggacagcctatgacaccaagttcagcattttatcttcctggcacccctggaggccagcctatgactccaggcccaggtggtatggacatgatgtctccagttttaggtggggaaaacgaagggccatggtttatcccagatatattggtcaacgtacacagggctggagaggaatctattggagttataagagaggctctcccggatggctcttacagggtaggtcttggatcaagtggtaatggtgaaacgattacagcccttcctaatgaaatggaggctgtggtaccaagaaaatcagacaaaataaagattatgggtggggcattgcgtggtgcaaccggcaagttgattggtgtagatggtacggatggaattgtaaaggtagatgacacattggatgtgaagattttagacttagttattttggcaaaattggctcaaccatgatataaaaagcttatgtagagaaattactttaatgcc

SEQ ID NO: 15852 - protein, 146 aa, Glycine max
MTPSSAFYLPGTPGGQPMTPGPGGMDMMSPVLGGENEGPWFIPDILVNVHRAGEESIGVIREALPDGSYRVGLGSSGNGETITALPNEMEAVVPRKSDKIKIMGGALRGATGKLIGVDGTDGIVKVDDTLDVKILDLVILAKLAQP

SEQ ID NO: 15853 - protein, 129 aa, Glycine max
MTPGPGGMDMMSPVLGGENEGPWFIPDILVNVHRAGEESIGVIREALPDGSYRVGLGSSGNGETITALPNEMEAVVPRKSDKIKIMGGALRGATGKLIGVDGTDGIVKVDDTLDVKILDLVILAKLAQP

SEQ ID NO: 15854 - protein, 122 aa, Glycine max
MDMMSPVLGGENEGPWFIPDILVNVHRAGEESIGVIREALPDGSYRVGLGSSGNGETITALPNEMEAVVPRKSDKIKIMGGALRGATGKLIGVDGTDGIVKVDDTLDVKILDLVILAKLAQP

SEQ ID NO: 15855 - DNA, 1535 bp, Glycine max
accgggccccccctcgagtcagctacctaggccccccccggaaaagcaagcacatcttctcacccaccactgaaatgtccaatggcaggaaccttctataggagtccagcacctggtgaacctgcatttgtcaaggtgggagataaagtgaagaaaggccaggttatttgcattatcgaggctatgaaactgatgaatgaaattgaggtatgtgtattttttttcctgtctgtttgttcttgtgtattattacatttatttttctccttttacttatcttgtttgcgttcccatatacttgggatatttgtcccattgtatagattatcctcccatatggtactatacagaaatctttaatacaaggatctggcagttaaaaatctaaaagcacagaactggtaaagctgttaaaagactgtttctgtttctgtattgctatatgtttcggctgcatttgcacgctaagtacaaagtttacgcggggagtggtatgaagggattaggaagtaagtaaattatgtggtagtggagaacatgggaatacttttgtgttaggagatgaataaaatgaaggagagacattcagagtgagttatgtggtatattttatcaatatctgggaggaaacaggaccctctaacagcctgttggactcaaatttttctactgtagtataaaggttctccttctgaaccaatttctattaggctaaaaccaaatcgactaattgcttggttacctttcattgcttggtggcaggctgatcagtcaggaacaatagctgaggtattagctgaggatgggaaaccagtcagtgtagacatgcctctttttgtaatagttccatgagtaccggaagggaccttacttcaaagttgatatgaaatctccctagcttgttggatagcagcatggtatttgatgtcagattttctgttcagaaatttcttgagtgataatgtttgtctcattttaagaaatccttgtcttctttagcccccacccctcctcttaatttatcgagatattttggacataaaagtccccagcatatcagaatgaatattggacatttcagttctaagcagatttgacatttgtagtagtatttatgttttctgtttatgttttctgattgccccctctttcttgtatgaacatgcttgctggatgttacattatcacagtaatatattatatacatctcttgtggccaaaataaaaaaaaaaaaaaaaaaaaaaaaaaaaaaaaaaaaataaaaaaaaaaaaaaaaaaaaaaaagaaaaaaaaaaaaaaaaaaaacggaaaaaaaaaaaaaaaaaaattccctgaaccccggggaaccccctatttttaaagggcccccccccgggggggaccccccctttttgtccccttaaaggggggtaattttcaggttgggggaaacctgggcaaaacctgttcccggggaaaaatggatatcccctccaaattccaaaaaaaaaaaaacccgaaaaaaaaaggggaaacccctggggggccaaagggg

SEQ ID NO: 15856 - protein, 92 aa, Glycine max
MAGTFYRSPAPGEPAFVKVGDKVKKGQVICIIEAMKLMNEIEVCVFFFLSVCSCVLLHLFFSFYLSCLRSHILGIFVPLYRLSSHMVLYRNL

SEQ ID NO: 15857 - protein, 63 aa, Glycine max
MKLRYVYFFSCLFVLVYYYIYFSPFTYLVCVPIYLGYLSHCIDYPPIWYYTEIFNTRIWQLKI

SEQ ID NO: 15858 - protein, 58 aa, Glycine max
MKLMNEIEVCVFFFLSVCSCVLLHLFFSFYLSCLRSHILGIFVPLYRLSSHMVLYRNL

SEQ ID NO: 15859 - DNA, 1399 bp, Glycine max
aaaccaaaccacacaaataaacgaccaacacacattatatctctttgttaccttcgcacgaacgagagaagagaagcaaacgatggctacttttctttccaaccaatctctgttgggttcttgtccttgttctactcccttctcttcaaagccctttcaaaccctaaaaccccaaatcttatcttttccatctcgcgggtttccgcgccccctaatttcctcagtcaatcgaagaacccaattgaagtcttcccaagatttccctccaactacaaatgatgaaacagaggagacccagaatgatgtaagagggacaaatgatgatgaagataaaaaacaagtacctagtttaatgatcctccttgaagcatacaaggaagccttttttaatggcgaccaaaataccgtagctcagattgaagaggggatatattcaatagcaaataggaaaaataaattgattcagaaattatcaagtttatcggcagacaaagctgcttccaagaagagttatcttcgtttacaagctgattttgataattttaggaaaaggactgacaaagagagacttaacatccaatccgatgcccagcaacaagtcattgaaaagcttttgttgatggtcgacaattttgagagaacccaacagcaaattaaagcagcaacagagaaagagaagaaaattggtgttagctatcaaggtatttacaaacaatttgtagaggttctgaggaatcataatgtttcagtggtagcaacagtgggcaagccgtttaatcccttgcaacatgaagccgttgcacgtgaggagtccacagagttcaaaaaagggattataattaaagaatcccgacgtggtttcttgctcagagatcgagttctaaggccagcccttgtcaaggtttccttaggtcctggaaataagaaatctcccgtgtctcctgacaagtctgtggagcaaccttcaacagctgctggaatagatgaaagatagtctcttgaacttgttcattaaaaatccagttccacctgcatacctgatatcttgtcattggtcaacttgaaattcttctagtttggtattttggcctgaggtgagtatagtctcttgtagtatggacctcaccaattttaacttgtgtcccgccgcactacaattttttgcttcatcatgacaaagggaattacttttgttcatgagagaatggtgatttcttttgcaatccatttttttttttaccaaagcttagaatgttcattctcggactttgttggcattattgttccttgtctcaatgcttaacaaagggaaatactagagaaagctcgactgcaaaaattacccatgtcattctacaatattgtatgtgttatatatatgccatatcttacgacttgt

SEQ ID NO: 15860 - protein, 330 aa, Glycine max
NQTTQINDQHTLYLFVTFARTREEKQTMATFLSNQSLLGSCPCSTPFSSKPFQTLKPQILSFPSRGFPRPLISSVNRRTQLKSSQDFPPTTNDETEETQNDVRGTNDDEDKKQVPSLMILLEAYKEAFFNGDQNTVAQIEEGIYSIANRKNKLIQKLSSLSADKAASKKSYLRLQADFDNFRKRTDKERLNIQSDAQQQVIEKLLLMVDNFERTQQQIKAATEKEKKIGVSYQGIYKQFVEVLRNHNVSVVATVGKPFNPLQHEAVAREESTEFKKGIIIKESRRGFLLRDRVLRPALVKVSLGPGNKKSPVSPDKSVEQPSTAAGIDER

SEQ ID NO: 15861 - protein, 303 aa, Glycine max
MATFLSNQSLLGSCPCSTPFSSKPFQTLKPQILSFPSRGFPRPLISSVNRRTQLKSSQDFPPTTNDETEETQNDVRGTNDDEDKKQVPSLMILLEAYKEAFFNGDQNTVAQIEEGIYSIANRKNKLIQKLSSLSADKAASKKSYLRLQADFDNFRKRTDKERLNIQSDAQQQVIEKLLLMVDNFERTQQQIKAATEKEKKIGVSYQGIYKQFVEVLRNHNVSVVATVGKPFNPLQHEAVAREESTEFKKGIIIKESRRGFLLRDRVLRPALVKVSLGPGNKKSPVSPDKSVEQPSTAAGIDER

SEQ ID NO: 15862 - protein, 213 aa, Glycine max
MILLEAYKEAFFNGDQNTVAQIEEGIYSIANRKNKLIQKLSSLSADKAASKKSYLRLQADFDNFRKRTDKERLNIQSDAQQQVIEKLLLMVDNFERTQQQIKAATEKEKKIGVSYQGIYKQFVEVLRNHNVSVVATVGKPFNPLQHEAVAREESTEFKKGIIIKESRRGFLLRDRVLRPALVKVSLGPGNKKSPVSPDKSVEQPSTAAGIDER

SEQ ID NO: 15863 - DNA, 1056 bp, Glycine max
tggaatttgcattgatcttgtagattcttagacaaagcagcatttatcacatcaaagaatttcaaacaaatggaagagagtaaatgcagtccatggtatctatccactgtgacacaagtagaagaagtgaaatgcatcctaagactactcccaatttggctatgcaccatattatactctgtcgtttttgctcaaatggcatcactttttgtggagcaaggcgatgccatggacactagaatatcatctttccacattcctccagcaagcatgtccacctttgacattctaagtgtagcaattgtcatcttcatttataggcgagttctcgaccctcttgtggccagaacaatgaaatcaaaaggactcactgaacttcaaaggatgggaattggtctagtcctagcaattatggccatggtttcagcaggattggtggagcactttaggctaaagaatgcaatagaagactgcaatgaatgtaaagggtctagttcactttccatattttggcaagtgccacaatatgtgtttgtgggggcatcagaagttttcatgtatgtgggttaattagagttcttcaatgcacaaacacctgatggattaaagagttttggtagtgcactttgcatgacttcaatatcacttggaaactacgttagtagcttgcttgttgcaattgtgatgaagatttctgccacagatgagatgccaggatggatcccaggaaacttgaacaaagggcatttggatatgttttacttcctcttagcagcactcaccgcagctgatcttgtaatatatgtactgatggctaggtggtataaatatatcaaatttcaaggaaacaatgagaatgacaccaacaaagaagaccctgaagtaggagtgtagagaaattacaattttcagggtatagtgggctctttgttgtgatactagagaaattcaattttgcatttcgcctagtggagcaaagatactacgaattgattgtgttggtgtattataaataaaattgctctatataatagaaaatatatttgtgcatggtgc

SEQ ID NO: 15864 - protein, 166 aa, Glycine max
MEESKCSPWYLSTVTQVEEVKCILRLLPIWLCTILYSVVFAQMASLFVEQGDAMDTRISSFHIPPASMSTFDILSVAIVIFIYRRVLDPLVARTMKSKGLTELQRMGIGLVLAIMAMVSAGLVEHFRLKNAIEDCNECKGSSSLSIFWQVPQYVFVGASEVFMYVG

SEQ ID NO: 15865 - protein, 124 aa, Glycine max
MASLFVEQGDAMDTRISSFHIPPASMSTFDILSVAIVIFIYRRVLDPLVARTMKSKGLTELQRMGIGLVLAIMAMVSAGLVEHFRLKNAIEDCNECKGSSSLSIFWQVPQYVFVGASEVFMYVG

SEQ ID NO: 15866 - protein, 113 aa, Glycine max
MDTRISSFHIPPASMSTFDILSVAIVIFIYRRVLDPLVARTMKSKGLTELQRMGIGLVLAIMAMVSAGLVEHFRLKNAIEDCNECKGSSSLSIFWQVPQYVFVGASEVFMYVG

SEQ ID NO: 15867 - DNA, 1462 bp, Glycine max
aaacaaaatcgtgaatcgtataactcactgcaagggtggccatctggcacatcatctcatcatccaaaacagaaacaaaaggagaggcaacgaaataaacaaaaaaaatatataaatataaagctggacccaacaaaatggcagagcgtgtgtcattgcctttaccatctcagtctcaactctctccaacaaccacaatggctctcttgggcgccgcctcctcctccgctcgcatcattccctccgtctcactctcttcctcttctcgctccttcttctcactctcatcctcttcttccaaactccaatgcttgcgctcctctcctcgtatttcgcacctctttctcaatcagcgaagagcggaggttcgcgtttcgagtggaggatacggaactgtgtcggcaccgaagtcagttgcgtctgatcctgatcagttgaagagcgccagagaagatatcaaggagcttctcaactccaagttctgccatcctattctcattcgtttgggatggcatgatgctggtacttataataagaatattgaggagtggccacagagaggtggagctaatggtagcttaagatttgaaattgagctgaaacatggagccaatgctggacttgtaaatgcattgaaacttcttcagccgatcaaagacaaatattctggtgtgacatatgcagacttatttcagttggctggtgctacagctgtggaggaagctggaggcccaaaaatccctatgaaatatggaagagtggatgtatctggacctgaacaatgccctgaagaagggagacttccagatgctggtcccccttcacctgctgatcatttgcgtcaagttttctaccgtatgggtttgaatgacaaggaaattgttgcgttatctggtgcacacacattggggcggtctagaccagatcgcagtggttggggaaagcctgaaactaaatatacgaaagatggaccaggagcacccggaggacaatcctggacagtgcaatggttgaaatttgacaactcttacttcaaggacatcaaagaaaaaaaggatgaagatctattggtattgccaactgatgctgctctttttgaagacccatccttcaaggtatatgctgagaaatatgctgaagatcaggaagcattctttaaagattatgctgaagcccatgcaaaacttagcaaccttggagccaaatttgatcctccagaggggcagagaagtttgtagcagccaagtactccactggaaagagagaactgtctgacggtatgaagcagaagatacgggctgaatatgaggcgattggtggaagcccagataagcctctacagtcaaactattttctaaatatcataattattattgctgttttggcatttttgacatcactgcttggaaactagttggattttgttcttctgatttttactataattgcattggcattttgc

SEQ ID NO: 15868 - protein, 366 aa, Glycine max
MAERVSLPLPSQSQLSPTTTMALLGAASSSARIIPSVSLSSSSRSFFSLSSSSSKLQCLRSSPRISHLFLNQRRAEVRVSSGGYGTVSAPKSVASDPDQLKSAREDIKELLNSKFCHPILIRLGWHDAGTYNKNIEEWPQRGGANGSLRFEIELKHGANAGLVNALKLLQPIKDKYSGVTYADLFQLAGATAVEEAGGPKIPMKYGRVDVSGPEQCPEEGRLPDAGPPSPADHLRQVFYRMGLNDKEIVALSGAHTLGRSRPDRSGWGKPETKYTKDGPGAPGGQSWTVQWLKFDNSYFKDIKEKKDEDLLVLPTDAALFEDPSFKVYAEKYAEDQEAFFKDYAEAHAKLSNLGAKFDPPEGQRSL

SEQ ID NO: 15869 - protein, 346 aa, Glycine max
MALLGAASSSARIIPSVSLSSSSRSFFSLSSSSSKLQCLRSSPRISHLFLNQRRAEVRVSSGGYGTVSAPKSVASDPDQLKSAREDIKELLNSKFCHPILIRLGWHDAGTYNKNIEEWPQRGGANGSLRFEIELKHGANAGLVNALKLLQPIKDKYSGVTYADLFQLAGATAVEEAGGPKIPMKYGRVDVSGPEQCPEEGRLPDAGPPSPADHLRQVFYRMGLNDKEIVALSGAHTLGRSRPDRSGWGKPETKYTKDGPGAPGGQSWTVQWLKFDNSYFKDIKEKKDEDLLVLPTDAALFEDPSFKVYAEKYAEDQEAFFKDYAEAHAKLSNLGAKFDPPEGQRSL

SEQ ID NO: 15870 - DNA, 619 bp, Glycine max
acttcactcaattaactcttccgttccttctttctttatcatcaccagtgttccatatttcagagaaaatggctttatcatctccctctctagtgttcaccgtacagaggtgtcaaccggagctggtggctcctgctaaacccactcctcgcgaagttaaactcctctccgacatagatgaccaacagggcttgcgtttccaaattccattcatactattctatggtaatgaaccatcaatggcagggaaagaccctgctaaggtcattagagaggcacttgcgcaaactcttgttttttactacccttttgcgggtaggattagggagggacttggtagaaaattggtggtggattgtactggagagggtctcatgttcattgaggctgatgcagatgcaacacttgatcaattgggtgacacacttcaacctccattcccatgcttcgaacaactcctttatgatgttccaggctcggagggagttattgactgtcccctaatgctctttcaggtgacacgtttcaagtgtggtggttttgccctagccgttcgcttgaaacacactatgagcgacggagccggcatagcactattcatgaacacattagctgaaat

SEQ ID NO: 15871 - protein, 205 aa, Glycine max
FTQLTLPFLLSLSSPVFHISEKMALSSPSLVFTVQRCQPELVAPAKPTPREVKLLSDIDDQQGLRFQIPFILFYGNEPSMAGKDPAKVIREALAQTLVFYYPFAGRIREGLGRKLVVDCTGEGLMFIEADADATLDQLGDTLQPPFPCFEQLLYDVPGSEGVIDCPLMLFQVTRFKCGGFALAVRLKHTMSDGAGIALFMNTLAE

SEQ ID NO: 15872 - protein, 183 aa, Glycine max
MALSSPSLVFTVQRCQPELVAPAKPTPREVKLLSDIDDQQGLRFQIPFILFYGNEPSMAGKDPAKVIREALAQTLVFYYPFAGRIREGLGRKLVVDCTGEGLMFIEADADATLDQLGDTLQPPFPCFEQLLYDVPGSEGVIDCPLMLFQVTRFKCGGFALAVRLKHTMSDGAGIALFMNTLAE

SEQ ID NO: 15873 - protein, 126 aa, Glycine max
MAGKDPAKVIREALAQTLVFYYPFAGRIREGLGRKLVVDCTGEGLMFIEADADATLDQLGDTLQPPFPCFEQLLYDVPGSEGVIDCPLMLFQVTRFKCGGFALAVRLKHTMSDGAGIALFMNTLAE

SEQ ID NO: 15874 - DNA, 894 bp, Glycine max
  misc_feature (166)..(166): n is a, c, g, or t
  misc_feature (215)..(215): n is a, c, g, or t
  misc_feature (324)..(324): n is a, c, g, or t
tttctacaacagcagcttgacaccctgttgccatcatcacgtacaagtagaagcacattggcgccaattccacctccacaagcttccccgctactccactctcctccaatctcctcttcttcaagctcaatcacacttcttcttcttcttccaaacgaacctcaancttccatggcttcaagcgcttttcacccgtcatggagtggcaggattgnacggttaagatggagattgatgtgcccatctctgtagcctacacttgttattctgatcgcgaagccatcccaaactggatgccctttatttcttctgttaagatattgncagacaaacctgacctgtcacgggggtccttgaagtataaagcatttggtcgtgatattgaattctcttggcttgctcgtaatatgcaggaaaagatccccaccctaatactatacttgttgttctcaataaattctctttacttacaattgttatttgttattcatgttatatcaccttcttgcagcccattccaaatcagaaaattcactggcgatctatggaaggtcttccaaacagaggtgctgtgcgattctatccaaaaggtccttcatcatgtgtagtagaactgacagtctcatatgaggttcctcaacttttagctccagtggcatcggcactgcagcctttccttgaaggtttacttcaacgtggtttggaaagatttgctacattcgccaaaagctacacctaaatttttattatgattgtcctgatttttatagcagggctacatttctaaaagtgaacatacctgattattttcatggcgatctcattctgtctgaacattgattgaattactgttatcatgccaatttttggttgcatgaatggttatcccatttg

SEQ ID NO: 15875 - protein, 136 aa, Glycine max
  misc_feature (6)..(6): Xaa can be any naturally occurring amino acid
  misc_feature (43)..(43): Xaa can be any naturally occurring amino acid
MEWQDXTVKMEIDVPISVAYTCYSDREAIPNWMPFISSVKILXDKPDLSRGSLKYKAFGRDIEFSWLARNMQEKIPTLILYLLFSINSLYLQLLFVIHVISPSCSPFQIRKFTGDLWKVFQTEVLCDSIQKVLHHV

SEQ ID NO: 15876 - protein, 127 aa, Glycine max
  misc_feature (34)..(34): Xaa can be any naturally occurring amino acid
MEIDVPISVAYTCYSDREAIPNWMPFISSVKILXDKPDLSRGSLKYKAFGRDIEFSWLARNMQEKIPTLILYLLFSINSLYLQLLFVIHVISPSCSPFQIRKFTGDLWKVFQTEVLCDSIQKVLHHV

SEQ ID NO: 15877 - protein, 104 aa, Glycine max
  misc_feature (11)..(11): Xaa can be any naturally occurring amino acid
MPFISSVKILXDKPDLSRGSLKYKAFGRDIEFSWLARNMQEKIPTLILYLLFSINSLYLQLLFVIHVISPSCSPFQIRKFTGDLWKVFQTEVLCDSIQKVLHHV

SEQ ID NO: 15878 - DNA, 1402 bp, Glycine max
gatagattatttctcttctcttccctttcttaggttaaaagttggaactgagtgattacccaactaatgttatgatcagttggaagcgttggcaagaaagaatatgtaatagtggtgttgtttgttcattttggtcaaagaaatagtatctgggtacccaggatattgtagttgtaagatgggttatctcaattcagttttgtcatcttcaagccaggttcatgttgcagatgatgcaattgtgagcggcgggggtctaagtcacaatggaaaattcagctacgggtatgctagctctcctggcaagagatcttcaatggaagatttttatgagacaagaattgatggtgttgaaggtgaaattgttggccttttcggagtttttgatggtcatggtggtgctcgtgctgctgagtatgtcaagaaaaacctgtttagtaatttgatcagtcacccaaaattcatttctgacaccaaatcagcaataactgatgcatacaatcatactgacactgagttgctgaaatcagaaaatagccataacagagatgcaggatcaactgcttccactgctattttagttggtgaccgcttgcttgttgcaaatgttggggattccagagctgttatatgcaggggtggtaatgccattgctgtttctcgagatcacaaaccagaccaaactgatgagaggcaaaggattgaagaagcaggaggctttgttatgtgggcaggaacttggagagttggaggtgttcttgctgtttctcgtgcatttggtgatagactcctgaagcagtatgttgttgctgatccagaaattcaggaagaaaaagttgacagctcccttgagtttcttattctggccagtgacgggctatgggatgttgtctctaatgaggaagctgttgctatgataaagccaattgaggatgcagaggaggcagcaaagaggctgatgcaagaagcatatcagagaggtagtgctgacaatatcacatgtgttgttgttcgtttcttgatgaaccaaggtggatccaaagagttagtagcttatcctcataatagtagctctgcgggtaagaatccttcagtagaaggtttgtgtgatatataggtataggtgagttgtggatccaaaagatgctgagacttggtaaaaatcggtttatagttgggttcctgataagcaatctagtagttgtgttgtactacgtcatgcaagaatttatggtcctcttgcataaaactattcattatttgttagctaggaaatgtatgtaaggagtgtgaccagagttctcattgcacctgctctgcatgtaaacatggttcttttattagtccatttaatttccttagggttattagtttattcagtactatttgtctattgtgaatt

SEQ ID NO: 15879 - protein, 312 aa, Glycine max
MGYLNSVLSSSSQVHVADDAIVSGGGLSHNGKFSYGYASSPGKRSSMEDFYETRIDGVEGEIVGLFGVFDGHGGARAAEYVKKNLFSNLISHPKFISDTKSAITDAYNHTDTELLKSENSHNRDAGSTASTAILVGDRLLVANVGDSRAVICRGGNAIAVSRDHKPDQTDERQRIEEAGGFVMWAGTWRVGGVLAVSRAFGDRLLKQYVVADPEIQEEKVDSSLEFLILASDGLWDVVSNEEAVAMIKPIEDAEEAAKRLMQEAYQRGSADNITCVVVRFLMNQGGSKELVAYPHNSSSAGKNPSVEGLCDI

SEQ ID NO: 15880 - protein, 266 aa, Glycine max
MEDFYETRIDGVEGEIVGLFGVFDGHGGARAAEYVKKNLFSNLISHPKFISDTKSAITDAYNHTDTELLKSENSHNRDAGSTASTAILVGDRLLVANVGDSRAVICRGGNAIAVSRDHKPDQTDERQRIEEAGGFVMWAGTWRVGGVLAVSRAFGDRLLKQYVVADPEIQEEKVDSSLEFLILASDGLWDVVSNEEAVAMIKPIEDAEEAAKRLMQEAYQRGSADNITCVVVRFLMNQGGSKELVAYPHNSSSAGKNPSVEGLCDI

SEQ ID NO: 15881 - DNA, 714 bp, Glycine max
agcgataaccataataagatctcatctctgcattgatgatgactcgaacactgacgaagaatgctatgggcccaatgaagcacttcctgaagttgaagcaagagtcttaggaaaggaagtgttaatcaaaatttactgtggtaaacaaaagggaattctgcttaaaataatgtctcagctcgaacgtcttcatctctacatatccactagcaatgtcttgccctttgggaatacccttgacatcaccattactgctcaggtaattaattttacaaccacaaatatcaatttattaaagaaaataaagttttctatccaaatttaatcatgttaactaatgtccatagaatactcatgaaagaactaataaaagaaaattttaattgaaaatcacaatagaagtacactaataacattttttttaacaaaagacattctttagcatttgccattggattattatcacccttcaactagataagtttgttgttcaaacttgtgtattttgttactactatataccttgcagatgggtgacaaatacaacttggtagtgaacgatctagtgaaagaactgagacaagtggctatgatgaagtcatgtgatgtgcaacaatgatgcgagctaattacgaacaagtccagtaattttagtttaaggacttgagaatgagtcataaatcatttcttttcaatagcctgttttgttttcgt

SEQ ID NO: 15882 - protein, 107 aa, Glycine max
AITIIRSHLCIDDDSNTDEECYGPNEALPEVEARVLGKEVLIKIYCGKQKGILLKIMSQLERLHLYISTSNVLPFGNTLDITITAQVINFTTTNINLLKKIKFSIQI

SEQ ID NO: 15883 - protein, 51 aa, Glycine max
MSQLERLHLYISTSNVLPFGNTLDITITAQVINFTTTNINLLKKIKFSIQI

SEQ ID NO: 15884 - DNA, 1106 bp, Glycine max
ggagagagagaaaaaaaaaaaaaagtctctgtttcttcacttgctcacaagccgcaactgctactgtgtacccaatctgagcccaacgagatgggggggcagaatctttccccaaaggaaaggagtagagattggattggagttcttatgaacagcagctttggttattgtacttatcaccatgatcttcgatctaatgagatgaatgtgttctgcgtggactgtgcacttaggatgtgtaggcactgtaaggaagctcattccctacatagaaggtttcagatttacaaatattcctaccaggatgtcttccgccatgccgagctgcagaagtattttgattgctccaaaattcagacttacatatccaataatgaaaggattgtgcatctcaaacctcggccttcaatcaccaaatctaagtctgctgatctaagtcccgactctaaatacaaagagaccggcatagcaacaagaccaaagtcagggggcacgtgtgaagaatgtggaaaacacttacaagatgagcgtaatcgcttctgctccattacatgcaagatctcagtgcatccagtggagacccaataccaaggtcaaaatcaatgttcaccaaaccaccaaagtgctagaggcatcatcaatccaaaacctgaaggcattgactttacaatgaatgataaccataattcagaaccggagtcatctatctctgaagctgagccatatgggtgggttgaagttgtgaatttcagaaagcgtccaaggaaaagtatccctcagaggcctgtctttgttttcacgtcttagaataagatacactactctaatggttttcttcattttttttttttgactttacatttcttgaacatttgagggaagctcaaccccgttatgccccatattgggatttaggtatatataacttgggagtttgagattcagttgctattagcaaagtaactagccgagcttgtatagcacaaggacaaaggtaatgctactaacacacttccgacactactactacttaatatctgtatagttttcagcatcttactgtactcccttcgccccacatctaatatctattaatgtttgaggtt

SEQ ID NO: 15885 - protein, 268 aa, Glycine max
GEREKKKKVSVSSLAHKPQLLLCTQSEPNEMGGQNLSPKERSRDWIGVLMNSSFGYCTYHHDLRSNEMNVFCVDCALRMCRHCKEAHSLHRRFQIYKYSYQDVFRHAELQKYFDCSKIQTYISNNERIVHLKPRPSITKSKSADLSPDSKYKETGIATRPKSGGTCEECGKHLQDERNRFCSITCKISVHPVETQYQGQNQCSPNHQSARGIINPKPEGIDFTMNDNHNSEPESSISEAEPYGWVEVVNFRKRPRKSIPQRPVFVFTS

SEQ ID NO: 15886 - protein, 238 aa, Glycine max
MGGQNLSPKERSRDWIGVLMNSSFGYCTYHHDLRSNEMNVFCVDCALRMCRHCKEAHSLHRRFQIYKYSYQDVFRHAELQKYFDCSKIQTYISNNERIVHLKPRPSITKSKSADLSPDSKYKETGIATRPKSGGTCEECGKHLQDERNRFCSITCKISVHPVETQYQGQNQCSPNHQSARGIINPKPEGIDFTMNDNHNSEPESSISEAEPYGWVEVVNFRKRPRKSIPQRPVFVFTS

SEQ ID NO: 15887 - protein, 219 aa, Glycine max
MNSSFGYCTYHHDLRSNEMNVFCVDCALRMCRHCKEAHSLHRRFQIYKYSYQDVFRHAELQKYFDCSKIQTYISNNERIVHLKPRPSITKSKSADLSPDSKYKETGIATRPKSGGTCEECGKHLQDERNRFCSITCKISVHPVETQYQGQNQCSPNHQSARGIINPKPEGIDFTMNDNHNSEPESSISEAEPYGWVEVVNFRKRPRKSIPQRPVFVFTS

SEQ ID NO: 15888 - DNA, 1368 bp, Glycine max
ctctttcgttatctggtcatggttgtttgcgacttctgggagctcagtctcgctcagagtcagagaaaaacacccaaatcaaatattatcatggagcccagcttggatttgagactgggctttgtccccaaacccctttccctgtttttcggcgacgtttctgggaacagagacaagtgcgacaaagtggtcacactcgatggcttcgtgcagagattggaggaagagttgacaaaggtcgaggctttcaaacgcgagcttcctctctgcattctcctcctaaacgatgctatagcgagattgaaggaggaaaaagtgaagtgttcgggaatgcaagatccgcctcttaaaaccagttcaggaggaaatgaaaatgaaaactctgagaagaagaattggatgagttcagcacagctttggagcactcagaaatccaaatcgaggaatgaggaagatgataggtctgtgccagcgaactcaattaatgggaattcgtgtgtccccgagaaggagggctcgcaagttccgagctttggtttgatggctcgtgcttctgaactgagtcatagcaattccaagagtgttggtggagatactagttctggctcctctttgctccgtgttgaggtacagagtcagccacagccgccgcagcatatgcagcagaatccgaggaaacaacggcggtgctggtcgccggagcttcaccggcgctttgtggacgcccttcaacaacttggtggagcacaagtggccactcctaaacagattagagaactgatgcaggtggaaggccttacaaatgatgaagtgaaaagtcatttgcaaaagtacaggcttcatgttaggagattcccagttttttcaattggccaggttgataatggctcatggatgacacaggatgaatgtggggataaatcaaagggaaacatgtcacagtctggttctccacagggtcctctcacacctctgctcctaggaggagcaggatccgctaagggtctctcaagccctggacggaacagtgtggatgcagaagatgagcaatcatcagattgccggaattggaaaggagggctccaccaccagcagcttgaaactgataatcacagcctctaaaattttgcagataaatgataatacaatacataaaatgatgaggagttgaaggcccagaatttgacaacataagaataatagagatctaacacataaaagaactatagggatcaagtttatgctaccagtattttaaactgtttggtagagagcaactgaggttttgcagatttttcaaggtttcttcttttctatttttaaactcagtatagttgtatggagcttaaattttactgggcaattttc

SEQ ID NO: 15889 - protein, 373 aa, Glycine max
LFRYLVMVVCDFWELSLAQSQRKTPKSNIIMEPSLDLRLGFVPKPLSLFFGDVSGNRDKCDKVVTLDGFVQRLEEELTKVEAFKRELPLCILLLNDAIARLKEEKVKCSGMQDPPLKTSSGGNENENSEKKNWMSSAQLWSTQKSKSRNEEDDRSVPANSINGNSCVPEKEGSQVPSFGLMARASELSHSNSKSVGGDTSSGSSLLRVEVQSQPQPPQHMQQNPRKQRRCWSPELHRRFVDALQQLGGAQVATPKQIRELMQVEGLTNDEVKSHLQKYRLHVRRFPVFSIGQVDNGSWMTQDECGDKSKGNMSQSGSPQGPLTPLLLGGAGSAKGLSSPGRNSVDAEDEQSSDCRNWKGGLHHQQLETDNHSL

SEQ ID NO: 15890 - protein, 367 aa, Glycine max
MVVCDFWELSLAQSQRKTPKSNIIMEPSLDLRLGFVPKPLSLFFGDVSGNRDKCDKVVTLDGFVQRLEEELTKVEAFKRELPLCILLLNDAIARLKEEKVKCSGMQDPPLKTSSGGNENENSEKKNWMSSAQLWSTQKSKSRNEEDDRSVPANSINGNSCVPEKEGSQVPSFGLMARASELSHSNSKSVGGDTSSGSSLLRVEVQSQPQPPQHMQQNPRKQRRCWSPELHRRFVDALQQLGGAQVATPKQIRELMQVEGLTNDEVKSHLQKYRLHVRRFPVFSIGQVDNGSWMTQDECGDKSKGNMSQSGSPQGPLTPLLLGGAGSAKGLSSPGRNSVDAEDEQSSDCRNWKGGLHHQQLETDNHSL

SEQ ID NO: 15891 - protein, 343 aa, Glycine max
MEPSLDLRLGFVPKPLSLFFGDVSGNRDKCDKVVTLDGFVQRLEEELTKVEAFKRELPLCILLLNDAIARLKEEKVKCSGMQDPPLKTSSGGNENENSEKKNWMSSAQLWSTQKSKSRNEEDDRSVPANSINGNSCVPEKEGSQVPSFGLMARASELSHSNSKSVGGDTSSGSSLLRVEVQSQPQPPQHMQQNPRKQRRCWSPELHRRFVDALQQLGGAQVATPKQIRELMQVEGLTNDEVKSHLQKYRLHVRRFPVFSIGQVDNGSWMTQDECGDKSKGNMSQSGSPQGPLTPLLLGGAGSAKGLSSPGRNSVDAEDEQSSDCRNWKGGLHHQQLETDNHSL

SEQ ID NO: 15892 - DNA, 1187 bp, Glycine max
tcgagtcagctacgtaggccccccccctcaaagttcaacaatgaatgatggaggatggattgctcgaattgcagcattgcttgtgggtgaggatccaacacagtcttatgcgctcgtatgcggtaactgccgcatgcataatggtaagttggctgcctttaatgttctaggtttgtgtgttcatacacttgcactcacatgtgtgtgggttgcacatacaaagtactccctccctccgtccctaattataaaattattttaaaaaaattgtttgtacctttttataagatctttttttaatttttagatgcattaattattttttttctacatatccttatttaattattttctctccaaacattaatgaaagtaattaaggggatagagatataagaaaaagataattttagaatgatagtacaaataattgataaatttaatgtaattaactatttttcttaagggatatgaattagttgaaagaatcttataattagagacggaaggagtaatagctaattttcatttctgaatacagtttaaattgtgtttttatctacttgtttcccttcaggtcttgctcggaaggaggatttcccatttattacttattactgcccacattgtcacgccctgaacaaaccaaagcaatcggatgagcgtacatctggtttaaattcccaaaacactcagtctcctaaagcagatgacagggaagaagttaaaaatgctagtgattctgaatccgagagtgtaataagaagcgataatcccgtaaatactagccctgagattgaggaagtttctgaaccggctatttcagtggagaaaaactagttaaaagacagtagcctcttttggggatggactgtttagatgacatgtcttgccccttgtttcaggtcacagacgaccaactataaggaaaccaactttgtagttagagtccttattgctgttgtaacaggaagagttttgatatattattttggaacttgcgatttataaattataacacataaattacatggcttgcttatgaattaaggcaattttgggatttccatataatttttcctttttttgttgtcgggatagtcttagttcaaaaatgagatttggttttaaaaaaaaaaaaaaaaaaaaaaaaaaaaaaaaagaattcctgcagcccgggggatcca

SEQ ID NO: 15893 - protein, 86 aa, Glycine max
RVSYVGPPPQSSTMNDGGWIARIAALLVGEDPTQSYALVCGNCRMHNGKLAAFNVLGLCVHTLALTCVWVAHTKYSLPPSLIIKLF

SEQ ID NO: 15894 - protein, 73 aa, Glycine max
MNDGGWIARIAALLVGEDPTQSYALVCGNCRMHNGKLAAFNVLGLCVHTLALTCVWVAHTKYSLPPSLIIKLF

SEQ ID NO: 15895 - protein, 43 aa, Glycine max
MTCLAPCFRSQTTNYKETNFVVRVLIAVVTGRVLIYYFGTCDL

SEQ ID NO: 15896 - DNA, 1062 bp, Glycine max
cattggattctcatttatatgggagacagccagaaccattagaatggtctgcccggcaaaaattgctgttggagctgctcgagggttgcgatatcttcatgaagagtgcagagtgggttgcattatccatcgtgacatgcggcctaacaacattcttatcactcatgattttgaaccactggttggtgattttggactggcaaggtggcagcctgatggtgacacaggagtggaaactagagtaattggaacgtttgggtacttggctccagaatatgctcaaagcggccaaataactgaaaaggctgatgtttattctttcggtgtggtattggtggaacttgttacaggacgaaaggctgtggatctcaatcgaccgaagggacaacagtgtctaactgagtgggctcggccactattagaagaatatgccattgaggaactgattgatccaaggttgggaagtcactattccgagcatgaggtctattgcatgctgcatgctgcctcattatgcataagacgagatccttattctagaccacgcatgtcacaggttctgcgaatactggagggagacacggtcgtggacccaaattacatttcaactcccagttatgatttgggaaaacggagtggttgattttgttttttggccagaaacataagcaaagaaagcgccattacaacagtggtccccctttggtaagagtcactggaagcgttcagtgggaacctctgagtacaaaagccttttcctattgggaaagcaacaagtctaagtggacagacaacatgtgatgagataataactgttaaaacggttcagatgaaaattgcaatattgttatgctaaatatctttcttgccttagtattttgtaatttgtagttttctttctatttctctgcaatttaatctaattttgcatatgtgtatagcgcactatgaaagtaggataagtaatatatagaagcttttgaaattctttagggaaaaattacgtaatcctgtgtctaaatgactatgctaagcccatcaatggatcaaaaagctttttgt

SEQ ID NO: 15897 - protein, 213 aa, Glycine max
IGFSFIWETARTIRMVCPAKIAVGAARGLRYLHEECRVGCIIHRDMRPNNILITHDFEPLVGDFGLARWQPDGDTGVETRVIGTFGYLAPEYAQSGQITEKADVYSFGVVLVELVTGRKAVDLNRPKGQQCLTEWARPLLEEYAIEELIDPRLGSHYSEHEVYCMLHAASLCIRRDPYSRPRMSQVLRILEGDTVVDPNYISTPSYDLGKRSG

SEQ ID NO: 15898 - protein, 199 aa, Glycine max
MVCPAKIAVGAARGLRYLHEECRVGCIIHRDMRPNNILITHDFEPLVGDFGLARWQPDGDTGVETRVIGTFGYLAPEYAQSGQITEKADVYSFGVVLVELVTGRKAVDLNRPKGQQCLTEWARPLLEEYAIEELIDPRLGSHYSEHEVYCMLHAASLCIRRDPYSRPRMSQVLRILEGDTVVDPNYISTPSYDLGKRSG

SEQ ID NO: 15899 - protein, 168 aa, Glycine max
MRPNNILITHDFEPLVGDFGLARWQPDGDTGVETRVIGTFGYLAPEYAQSGQITEKADVYSFGVVLVELVTGRKAVDLNRPKGQQCLTEWARPLLEEYAIEELIDPRLGSHYSEHEVYCMLHAASLCIRRDPYSRPRMSQVLRILEGDTVVDPNYISTPSYDLGKRSG

SEQ ID NO: 15900 - DNA, 645 bp, Glycine max
atcctaatcgaaaaaggctgtgctgtgcctgtgtcttccgctgactccaccttgtattgtatcttcttccagcactgcgttacgttgcgtttggaaactctgattagagccttcgagttggatctcaaattttgatttcaactgaataagcctaaactgcaacatcaccccaaatttctatcctgcaacacaattcaataaaaccacagcgtggcgtggttgtagtgcaagagaaggtattgcagattgatttggttgtcggaagatgcatcctcctttaacattgcacaaacacccaatgtgtgctgaaattattgaacagtttcaaaagtgtcatatagaacatcctattgcaaaattctttggtgaatgtactgatttgaaaataaaattggatcgttgtttcagagaagagaaagctttgaagcggaaggctaactttgaagagagcaaaaagttgaaggaacagttgcgagctttgaggaaagaaaatgctacaagcagtggtcaatagaagaatcttttgaaatgttgaaaatacaaaattgttttgcaaattacaatccgtaattttgtacaatggctggatacgatatgtatcttgcagcctcaaaaaagagggttattacacataatattgtttgg

SEQ ID NO: 15901 - protein, 82 aa, Glycine max
MHPPLTLHKHPMCAEIIEQFQKCHIEHPIAKFFGECTDLKIKLDRCFREEKALKRKANFEESKKLKEQLRALRKENATSSGQ

SEQ ID NO: 15902 - protein, 71 aa, Glycine max
MCAEIIEQFQKCHIEHPIAKFFGECTDLKIKLDRCFREEKALKRKANFEESKKLKEQLRALRKENATSSGQ

SEQ ID NO: 15903 - protein, 44 aa, Glycine max
ILIEKGCAVPVSSADSTLYCIFFQHCVTLRLETLIRAFELDLKF

SEQ ID NO: 15904 - DNA, 585 bp, Glycine max
ccttcactctcttctccgatctcaaaatgcccgccgtttatggagctcgcttgaccaccttcgaagactccgagaaggagagtgaatacggttacgttcgcaaggtatcaggaccagtcgtcgttgcagatggcatggctggggctgctatgtatgaactcgtgcgtgttggtcatgataatctcattggtgaaattattcgtctcgaagggaattctgctaccatccaagtttatgaggaaactgctggcttgatggttaatgatccggtgttacggactcacaagcctttatccgtggagttgggacctggaatactggggaatattttcgatggaattcagaggcctttgaaaactattgctaaacgatctggtgatgtctatattcctcgtggtgtctctgttccagcactcgacaaagatacactttgggaatttcaacctaagaaaattggtgaaggcgaccttttaactggtggagatatggtagctttgtttagtttaattaattaacctaattaatgaaattcgaagtttatctctatgaacaatgtagacttggtccacattttgtggctggtgt

SEQ ID NO: 15905 - protein, 170 aa, Glycine max
FTLFSDLKMPAVYGARLTTFEDSEKESEYGYVRKVSGPVVVADGMAGAAMYELVRVGHDNLIGEIIRLEGNSATIQVYEETAGLMVNDPVLRTHKPLSVELGPGILGNIFDGIQRPLKTIAKRSGDVYIPRGVSVPALDKDTLWEFQPKKIGEGDLLTGGDMVALFSLIN

SEQ ID NO: 15906 - protein, 162 aa, Glycine max
MPAVYGARLTTFEDSEKESEYGYVRKVSGPVVVADGMAGAAMYELVRVGHDNLIGEIIRLEGNSATIQVYEETAGLMVNDPVLRTHKPLSVELGPGILGNIFDGIQRPLKTIAKRSGDVYIPRGVSVPALDKDTLWEFQPKKIGEGDLLTGGDMVALFSLIN

SEQ ID NO: 15907 - protein, 126 aa, Glycine max
MAGAAMYELVRVGHDNLIGEIIRLEGNSATIQVYEETAGLMVNDPVLRTHKPLSVELGPGILGNIFDGIQRPLKTIAKRSGDVYIPRGVSVPALDKDTLWEFQPKKIGEGDLLTGGDMVALFSLIN

SEQ ID NO: 15908 - DNA, 442 bp, Glycine max
gaaagtctgaaaactgaaaagtaaaggcgaaagactttaggtttggaattgggaattagggttgttcgcgtcacgaagatgatcgaggtggtgttgaacgatcgattggggaagaaggtgcgcgtgaagtgcaacgacgatgacaccatcggcgacctgaagaagctggtggcggctcagacgggcacaagagccgacaagatccgcatccagaagtggtacaccatatacaaggatcacatcactctcaaggattacgagatccacgacggcatgggtctcgaactctactacaactaaacacaaggtctatacccatctcaattcttctttttatagatactagctagggttttgttttttagggttcccgaattttgatttgtttttcggcaataatcaatggtttgtaacgattatgcttcttttaattcttcgagtc

SEQ ID NO: 15909 - protein, 73 aa, Glycine max
MIEVVLNDRLGKKVRVKCNDDDTIGDLKKLVAAQTGTRADKIRIQKWYTIYKDHITLKDYEIHDGMGLELYYN

SEQ ID NO: 15910 - DNA, 656 bp, Glycine max
ttcattcccttacccgagaaaatgaggtggagctcactctttgtgccctcttttctactccatattcttcttctatcttgcatttttttcacaccaactgattcctctgatggggatggggatggggatttggtagaccaaatatgcaaaaaaacacccttttatgacctttgcagctccatcttacactcaaatcccttagcccccaaaagtgatccaaagggtatggccctcataatggtcaatggaattctgacaaatgctactgacacactcagttacattgaagagcttatcaagcagacctcagatgaacaattagagcaacagttggctttctgtgctgagtcatacatcccagttgtgaagtacattctcccacaagcagctgatgccataaaccaaggtcgatttgggtttgccagttactgcatagttgatgctcagaaggaagtaaatgcttgcgacaagaaattctcgggctcaactcaagcacccttaagtgatagaaatgacattatgcagaagctggtggatgtggctgctgccataattaaactattattaaatggctgatttatttttctcttcctcctttccagcctcatttcttgtagaatatagcaattattagtgcccttatcttatccaataaa

SEQ ID NO: 15911 - protein, 191 aa, Glycine max
FIPLPEKMRWSSLFVPSFLLHILLLSCIFFTPTDSSDGDGDGDLVDQICKKTPFYDLCSSILHSNPLAPKSDPKGMALIMVNGILTNATDTLSYIEELIKQTSDEQLEQQLAFCAESYIPVVKYILPQAADAINQGRFGFASYCIVDAQKEVNACDKKFSGSTQAPLSDRNDIMQKLVDVAAAIIKLLLNG

SEQ ID NO: 15912 - protein, 184 aa, Glycine max
MRWSSLFVPSFLLHILLLSCIFFTPTDSSDGDGDGDLVDQICKKTPFYDLCSSILHSNPLAPKSDPKGMALIMVNGILTNATDTLSYIEELIKQTSDEQLEQQLAFCAESYIPVVKYILPQAADAINQGRFGFASYCIVDAQKEVNACDKKFSGSTQAPLSDRNDIMQKLVDVAAAIIKLLLNG

SEQ ID NO: 15913 - protein, 116 aa, Glycine max
MALIMVNGILTNATDTLSYIEELIKQTSDEQLEQQLAFCAESYIPVVKYILPQAADAINQGRFGFASYCIVDAQKEVNACDKKFSGSTQAPLSDRNDIMQKLVDVAAAIIKLLLNG

SEQ ID NO: 15914 - DNA, 741 bp, Glycine max
attgaaaaggaagaagcgcatctggtttggtcccatatgatggccagattcatctcgaagaagaccaagacctagctactccgtcattccgaatcggctaagggcgtgatagtgggtggagatcgacggagtgaggctgttggaggatcacgtccaccgtcttatggtgaagaaggccacacccgattggcttcccttcctccccggttcctccttctgggtcccacctcctccttcccctctccttcacacattctccatcccctctcatcccttcttccttcaacaagacgacgaatctgggaatgctattgccaccccacgagggacagaggttactgtgcaactcaaggttatgtcacccactcaaaaccttgctctctctgaagatgaggaaggatgatcatcatgctaagtgtttgtggttgcaaccttaactcaatgagagggaactaaactatttgaagatcaagaagcttgcttgcatagaagacagtgcatgaaaatgagaattcctgcacaggttaaccattggttgcttttggattagccattctcacgttttttggtctcaaatgttatttgtatataatttggttggtgaccaagcacttcaaaaataaccaatgtgtgtagaataatattgtccatgttggtatgttgaaccttttacattgggtgatgtatcatgtatatatttgtgtaactaataaagcaaaaagcttctttgagcattcctcc

SEQ ID NO: 15915 - protein, 79 aa, Glycine max
MVKKATPDWLPFLPGSSFWVPPPPSPLLHTFSIPSHPFFLQQDDESGNAIATPRGTEVTVQLKVMSPTQNLALSEDEEG

SEQ ID NO: 15916 - protein, 43 aa, Glycine max
MLLPPHEGQRLLCNSRLCHPLKTLLSLKMRKDDHHAKCLWLQP

SEQ ID NO: 15917 - DNA, 549 bp, Glycine max
ataatcccctgatttacattatgtgtgccttgctaacccaactcaaaaactgaaacctgctggaaattgagtggaaactgagattctgagaggaatcagctgtttttattttttttgaattttatttttatttacttatttttcccttttttccgtatacttgaacagcatcaaagcccaactcgtttgagtttggtgtgtttgatcaataaaatcacaatacaaaatcgtcttgtgttttcttttctttttggacctgaaagtgttggaaacaacaaaaccaccgcacagggatcgtgttgagtttgagaatggagaagacagcagttaaagttcgatgccagaggattgggtgcgacgccatgttctccgaggacgacaaccccgacggttgctgtcgataccatgattcgggacctatatttcatgacgggacaaaagaatggagttgttgcaagaaaagaagtcatgattttagcttgtttcgatgaagcagtgctcctccatattttgtttaccctacatattatatgctcttttactttgttc

SEQ ID NO: 15918 - protein, 59 aa, Glycine max
MEKTAVKVRCQRIGCDAMFSEDDNPDGCCRYHDSGPIFHDGTKEWSCCKKRSHDFSLFR

SEQ ID NO: 15919 - protein, 48 aa, Glycine max
MIRDLYFMTGQKNGVVARKEVMILACFDEAVLLHILFTLHIICSFTLF

SEQ ID NO: 15920 - protein, 42 aa, Glycine max
MFSEDDNPDGCCRYHDSGPIFHDGTKEWSCCKKRSHDFSLFR

SEQ ID NO: 15921 - DNA, 1039 bp, Glycine max
agcattaccggattacccggtcactagtcccttcccacgacaacacccacagtcctatttccacacccatcgaaatcgttaaagcagcacagtcactctctaaatcgttcaacctcacacccactcctccgatattcttttctgctttaatcttcgctctgttttcgggggtcagatcttaatgccgaaggcttcgtattctgtttgaattttgttatctattgggagtggagtagtatttgagatcgagcgtaaaatatataaaaataataaaagaagcaaaggcgatgtttttgtttgattggttttatgggattctggcatcgcttgggttgtggcagaaggaggccaagatcttattcttaggtctcgataatgccggaaagaccaccttgcttcacatgctcaaagacgagagactagttcagcatcagcctacacagtatccaacatcagaggagttgagtattgggaggatcaagtttaaagcttttgatctcgggggtcaccagattgcacgaagagtctggaaagattactatgctaaggtagatgcagtggtctacttggtagattcatatgacaaggaacgatttgccgagtctaaaaaagagttagatgctctgctctctgatgagtctttgactactgtccctttccttatccttggaaacaagatagatattccatatgctgcctcagaagaagagttgcgttaccatttgggcctgaccaatttcactacgggcaagggaaatgtaaatttgtcagattctaatgtccgtcctatggaggttttcatgtgcagtattgtgaagaaaatgggttacggagatggtttcaaatggctctctcagtacatcaaataaatagtccatgtagtaagagatggcttggtatcctgtttctagacgcttattcctatagttatgctatagaaatgttgttagtacaaattgctgttaaacattttttttagtacaaaaaattgtttaaagaatattttattaaaagaaaatgacacttatccctttctttc

SEQ ID NO: 15922 - protein, 193 aa, Glycine max
MFLFDWFYGILASLGLWQKEAKILFLGLDNAGKTTLLHMLKDERLVQHQPTQYPTSEELSIGRIKFKAFDLGGHQIARRVWKDYYAKVDAVVYLVDSYDKERFAESKKELDALLSDESLTTVPFLILGNKIDIPYAASEEELRYHLGLTNFTTGKGNVNLSDSNVRPMEVFMCSIVKKMGYGDGFKWLSQYIK

SEQ ID NO: 15923 - protein, 155 aa, Glycine max
MLKDERLVQHQPTQYPTSEELSIGRIKFKAFDLGGHQIARRVWKDYYAKVDAVVYLVDSYDKERFAESKKELDALLSDESLTTVPFLILGNKIDIPYAASEEELRYHLGLTNFTTGKGNVNLSDSNVRPMEVFMCSIVKKMGYGDGFKWLSQYIK

SEQ ID NO: 15924 - DNA, 659 bp, Glycine max
tttatcatgtccagcatttggatgggtcgcgtttactacgtctttgggtttctcttcgttgttttgatccttcttgtggtggtttgtgccgaggtatctctagttctgacttacatgcacctgtgtgtggaggattggaaatggtggtggaaatcgttctttgcctccggttctgtcgccatatacatctttttgtactctgttaactatcttgtgtttgacctcaagagtttgagcggtcctgtgtctgcaactctttacttaggctactcactcttcatggttctagcaatcatgctttctacaggtacaattgggttcctctcttcattctggttcgtgcattacttgttctcttctgtcaagttggattgaagacttgatgcgcccacaaattaccgctactgagaacagattttatcaagagggccctttgaaatgttccattttatatgttactgtatttcagttcattttgttagggagcttagtaaatttagtgcagctattttattctgttttgcttaactcattgctagatataaaaaaattcattgcatgatgtagttagtaattgataaattccttggcattctgaagcatgtaatgttattgttggtagttggtgtttggaaatgtaattcagatctttatggcct

SEQ ID NO: 15925 - protein, 124 aa, Glycine max
FIMSSIWMGRVYYVFGFLFVVLILLVVVCAEVSLVLTYMHLCVEDWKWWWKSFFASGSVAIYIFLYSVNYLVFDLKSLSGPVSATLYLGYSLFMVLAIMLSTGTIGFLSSFWFVHYLFSSVKLD

SEQ ID NO: 15926 - protein, 122 aa, Glycine max
MSSIWMGRVYYVFGFLFVVLILLVVVCAEVSLVLTYMHLCVEDWKWWWKSFFASGSVAIYIFLYSVNYLVFDLKSLSGPVSATLYLGYSLFMVLAIMLSTGTIGFLSSFWFVHYLFSSVKLD

SEQ ID NO: 15927 - protein, 117 aa, Glycine max
MGRVYYVFGFLFVVLILLVVVCAEVSLVLTYMHLCVEDWKWWWKSFFASGSVAIYIFLYSVNYLVFDLKSLSGPVSATLYLGYSLFMVLAIMLSTGTIGFLSSFWFVHYLFSSVKLD

SEQ ID NO: 15928 - DNA, 648 bp, Glycine max
acgttctattattatatctttcccttcagtttgtgttgagaggaaaagtgtgagaacgaaaatggagcattgtaactgctacatgttcacgctgagccttcttcttcttcttcttcttactccgccttctctctccgacgatctcggattcgattttccggcgaagaagctgataagagaccttaacctttttccttctgaagatgtcaacatcgttcctcgccactccaattctcacgccaacaaaatcgtcgagaaaccgcttaggttcccaaacttagtgccttcagactccggcatttccctcgacgacttggctcaccgcgctggctattatcttattcctcattctcatgctgccaagatgttctactttttctttgaatcaaggaacagcaagaaggatcctgttgtgatttggttgactgggggaccaggttgcagcagtgaattggctgtgttttatgagaatggccctttcaagattgctaacaacatgtccctagtgtggaatgaatatggctgggacaaggtttctaaccttctgtatgttgaccaaccaactggaactggctttagttacagtactgataagcgtgacattcgtcatgatgaagaaagtgtgagcaatgacctctatgactttct

SEQ ID NO: 15929 - protein, 215 aa, Glycine max
RSIIISFPSVCVERKSVRTKMEHCNCYMFTLSLLLLLLLTPPSLSDDLGFDFPAKKLIRDLNLFPSEDVNIVPRHSNSHANKIVEKPLRFPNLVPSDSGISLDDLAHRAGYYLIPHSHAAKMFYFFFESRNSKKDPVVIWLTGGPGCSSELAVFYENGPFKIANNMSLVWNEYGWDKVSNLLYVDQPTGTGFSYSTDKRDIRHDEESVSNDLYDF

SEQ ID NO: 15930 - protein, 195 aa, Glycine max
MEHCNCYMFTLSLLLLLLLTPPSLSDDLGFDFPAKKLIRDLNLFPSEDVNIVPRHSNSHANKIVEKPLRFPNLVPSDSGISLDDLAHRAGYYLIPHSHAAKMFYFFFESRNSKKDPVVIWLTGGPGCSSELAVFYENGPFKIANNMSLVWNEYGWDKVSNLLYVDQPTGTGFSYSTDKRDIRHDEESVSNDLYDF

SEQ ID NO: 15931 - protein, 188 aa, Glycine max
MFTLSLLLLLLLTPPSLSDDLGFDFPAKKLIRDLNLFPSEDVNIVPRHSNSHANKIVEKPLRFPNLVPSDSGISLDDLAHRAGYYLIPHSHAAKMFYFFFESRNSKKDPVVIWLTGGPGCSSELAVFYENGPFKIANNMSLVWNEYGWDKVSNLLYVDQPTGTGFSYSTDKRDIRHDEESVSNDLYDF

SEQ ID NO: 15932 - DNA, 914 bp, Glycine max
tcactttacactgcatcaaccaaacaaacaaataaagcaaaaggcctttttattccaaagcaaggaaggaagaaataaaccgaatgagagcattaacctcttcttcttccactttcattccaaagcgttattccttcttcttcttcctctccattctcttcgctcttcgatcctcgtccgggggctgctccgaataccaccaccaccacgcgccgatggccacgataggaggcttacgcgactcccaaggctctcagaacagcgtccaaaccgaggccctcgctcggttcgccgtcgatgaacacaacaagaagcagaattcacttctggagttttctagggtggtgaggacacaggaacaggttgttgcgggaaccctgcatcaccttactctcgaggctattgaggcaggtgagaagaagctctatgaagccaaggtgtgggtgaaaccatggttgaatttcaaagaactccaagagttcaagcctgctggtgatgtaccatcatttacctctgctgatcttggtgtcaaaaaggatggtcaccaacctggatggcaatctgtgccaacacatgaccctcaagttcaggatgcagcaaatcatgcgatcaagactatccagcaaaggtctaattcactagtaccctatgagcttcatgaggttgctgatgcaaaggctgaggtcattgatgactttgccaagtttaatctgcttctcaaagtcaagaggggacagaaggaagagaagttcaaggtagaggtacacaagaataaccaaggtgggttccatctaaatcagatggaacaagatcattcctaattctgatcggaagtttggccacgctagcagtataggcctgggtggcacctaaaatataccttttttttctgtggggtgtagaatcttattatc

SEQ ID NO: 15933 - protein, 245 aa, Glycine max
MRALTSSSSTFIPKRYSFFFFLSILFALRSSSGGCSEYHHHHAPMATIGGLRDSQGSQNSVQTEALARFAVDEHNKKQNSLLEFSRVVRTQEQVVAGTLHHLTLEAIEAGEKKLYEAKVWVKPWLNFKELQEFKPAGDVPSFTSADLGVKKDGHQPGWQSVPTHDPQVQDAANHAIKTIQQRSNSLVPYELHEVADAKAEVIDDFAKFNLLLKVKRGQKEEKFKVEVHKNNQGGFHLNQMEQDHS

SEQ ID NO: 15934 - protein, 201 aa, Glycine max
MATIGGLRDSQGSQNSVQTEALARFAVDEHNKKQNSLLEFSRVVRTQEQVVAGTLHHLTLEAIEAGEKKLYEAKVWVKPWLNFKELQEFKPAGDVPSFTSADLGVKKDGHQPGWQSVPTHDPQVQDAANHAIKTIQQRSNSLVPYELHEVADAKAEVIDDFAKFNLLLKVKRGQKEEKFKVEVHKNNQGGFHLNQMEQDHS

SEQ ID NO: 15935 - DNA, 908 bp, Glycine max
agaaaatttgaacatatgttccttttttgttacaacgttgttgtttccaacggtacaacggtagatgatgggaacgctatctacgcaatttcgttccatcaaacgcccaaatccaaaccctaaactatccaaatcgtcatctcctacaaaatcagaaattaaattcatcgctaaaccaaaaccaaaatcagagtcagagtcagagtcatggtctgtttatctcatcctctccaccaaccatcctatcaaaacctacgttggaattacaaacaatttccctcgccgtttgaagcagcataacggtgaacttaaaggtggtgcaaaggcatcccgtgctggaagaccttggatttgtgcatgcataatttgtggttttacagaccgaagtgaagctagtgtatttgaatcaaaatggaaaactttctcaaggagagctccccgcaaaaatcaaaatgacaatctctccaagcaaagtgaagattcatcattaccactgctgcgacacagacaagcggctctgaatagagtgaaaggttcactcgactgcgctcacttagaaattatttggcatttggatccattgtgatccaactgccacaatgtatgtgttttgattatgtaattgtaataagttcaaatagcaaaacataggccataagagaaatattaagaacacattttgtgttattagttaaaatttattgaaaattataaaattataagtggatttcattaagtaaaaagtgagatcctccaaattttataattttttataataaagaatattaaaaagagtgcgtagctagcatttttctatatttgatagtactagcaaattgtaccagacattgattggttcttgtagtaaggtctttgtatagtatataagtgacgaaaggttataattt

SEQ ID NO: 15936 - protein, 173 aa, Glycine max
MMGTLSTQFRSIKRPNPNPKLSKSSSPTKSEIKFIAKPKPKSESESESWSVYLILSTNHPIKTYVGITNNFPRRLKQHNGELKGGAKASRAGRPWICACIICGFTDRSEASVFESKWKTFSRRAPRKNQNDNLSKQSEDSSLPLLRHRQAALNRVKGSLDCAHLEIIWHLDPL

SEQ ID NO: 15937 - protein, 172 aa, Glycine max
MGTLSTQFRSIKRPNPNPKLSKSSSPTKSEIKFIAKPKPKSESESESWSVYLILSTNHPIKTYVGITNNFPRRLKQHNGELKGGAKASRAGRPWICACIICGFTDRSEASVFESKWKTFSRRAPRKNQNDNLSKQSEDSSLPLLRHRQAALNRVKGSLDCAHLEIIWHLDPL

SEQ ID NO: 15938 - DNA, 1850 bp, Glycine max
  misc_feature (1836)..(1836): n is a, c, g, or t
atcgaaaagtattacaattagtctcagtccccaacgactggttctgttttctctctgctgcttcgattcattcacacaaccatgactagccttactaatggcgatgctggctccctcaacaaggtccccacgatcaagttcaccaagctcttcattaatggagacttcgttgactctctgtcaggaaagacatttgagacaatagatccaagaacaggagatgttatagcgaggataagcgagggagataaagaagacattgacattgctgttaaagcagcacgtcatgcatttgacaacggtccatggcctcgccttcccggctctgagagagcaagaatattgctgaaatgggcagaaataattgaggaaaacgcagaagaacttgcagcactagatgcgattgatgcggggaagttgtaccatatgtgtaggaatgtggaagttccagcagcggcaaacactcttcgttactatgctggtgcagccgataagattcatggagaggtgttgaaaatgtctcgagagttccatgcctatacattacttgaaccacttggtgttgtgggacacattactccctggaatttccccaataccatgttctacatcaaagtcgctccttctttagctgctggctgcaccatggtcctcaagcctgctgagcaaacacccctctctgctttgttttctgctcatcttgctaaattggctggaatcccagatggagtgatcaatgtagtgcctggatttggcccaactgctggtgctgcattaagctcacacatggatgttgataaggtcagctttaccggttcaacacaaacaggccgtgtgataatgcaggctgcagcaaagagtaacttgaaacaagtttcacttgaattaggaggcaagtcacccctcataatttttgatgatgcagatatagacaaagctactgagctagctctactaggcatcctatataacaagggagaagtttgtgttgcaagttcccgtgtgtttgttcaagaagggatctatgatgaatttgagaaaaaactggtggagaaggcaaaagcttgggtcgttggggatccctttgatcctaaagttcaacaaggccctcaggttgacaaggaacaatttgaaaaagttctttcatatattgagcatggaaagaaagaaggagctacccttttgaccgggggtaaaacagtggggaacaagggctactttattgagccgacaattttctccaatataagggaggatatgcttatagcacaggatgaaatatttggcccagtgatggcactgaagaagtttaagaccactgaggaagcaattaagagtgctaacaataccaagtatggcctagcagcaggcatagtgaccaagaatttggatacagcaaacacagtgtcaaggtctattcgggcaggcactatatggatcaactgctattttgcctttggcgatgatgttccctttggaggatataagatgagtggatttggaaaagatcatggattggaagcccttcacaagtacctacaagttaaatctgttgttactcccctttacaattctccctggctttgaatgtctactgcatggatcttggaaaatggtccattctggccatttcctatcaatttgcatctgccatgaggcatggaaattcagttcttgaacagtggtgtctattatattgtcaacaagctggccttttcctacttttcagtcatgctttaatagaaaatgtatggaagaaaaatagtaattttatttttgtttggtttgtaattaaaaggaaatatcaacacaatttaacttattgcttcaacaganatatatgaattgtt

SEQ ID NO: 15939 - protein, 501 aa, Glycine max
MTSLTNGDAGSLNKVPTIKFTKLFINGDFVDSLSGKTFETIDPRTGDVIARISEGDKEDIDIAVKAARHAFDNGPWPRLPGSERARILLKWAEIIEENAEELAALDAIDAGKLYHMCRNVEVPAAANTLRYYAGAADKIHGEVLKMSREFHAYTLLEPLGVVGHITPWNFPNTMFYIKVAPSLAAGCTMVLKPAEQTPLSALFSAHLAKLAGIPDGVINVVPGFGPTAGAALSSHMDVDKVSFTGSTQTGRVIMQAAAKSNLKQVSLELGGKSPLIIFDDADIDKATELALLGILYNKGEVCVASSRVFVQEGIYDEFEKKLVEKAKAWVVGDPFDPKVQQGPQVDKEQFEKVLSYIEHGKKEGATLLTGGKTVGNKGYFIEPTIFSNIREDMLIAQDEIFGPVMALKKFKTTEEAIKSANNTKYGLAAGIVTKNLDTANTVSRSIRAGTIWINCYFAFGDDVPFGGYKMSGFGKDHGLEALHKYLQVKSVVTPLYNSPWL

SEQ ID NO: 15940 - protein, 386 aa, Glycine max
MCRNVEVPAAANTLRYYAGAADKIHGEVLKMSREFHAYTLLEPLGVVGHITPWNFPNTMFYIKVAPSLAAGCTMVLKPAEQTPLSALFSAHLAKLAGIPDGVINVVPGFGPTAGAALSSHMDVDKVSFTGSTQTGRVIMQAAAKSNLKQVSLELGGKSPLIIFDDADIDKATELALLGILYNKGEVCVASSRVFVQEGIYDEFEKKLVEKAKAWVVGDPFDPKVQQGPQVDKEQFEKVLSYIEHGKKEGATLLTGGKTVGNKGYFIEPTIFSNIREDMLIAQDEIFGPVMALKKFKTTEEAIKSANNTKYGLAAGIVTKNLDTANTVSRSIRAGTIWINCYFAFGDDVPFGGYKMSGFGKDHGLEALHKYLQVKSVVTPLYNSPWL

SEQ ID NO: 15941 - protein, 356 aa, Glycine max
MSREFHAYTLLEPLGVVGHITPWNFPNTMFYIKVAPSLAAGCTMVLKPAEQTPLSALFSAHLAKLAGIPDGVINVVPGFGPTAGAALSSHMDVDKVSFTGSTQTGRVIMQAAAKSNLKQVSLELGGKSPLIIFDDADIDKATELALLGILYNKGEVCVASSRVFVQEGIYDEFEKKLVEKAKAWVVGDPFDPKVQQGPQVDKEQFEKVLSYIEHGKKEGATLLTGGKTVGNKGYFIEPTIFSNIREDMLIAQDEIFGPVMALKKFKTTEEAIKSANNTKYGLAAGIVTKNLDTANTVSRSIRAGTIWINCYFAFGDDVPFGGYKMSGFGKDHGLEALHKYLQVKSVVTPLYNSPWL

SEQ ID NO: 15942 - DNA, 444 bp, Glycine max
cattacctagaacatcctaatcgaaaaacttgtcggcattggccagaacatagcacttatcgatgctcctaagaagaaagatcttgttaaagccatggaggatgttaatgttaagaacaagtggaagaagagttcataggggcagaaaattcattttcagaaagagaagggcctccctcaatgattttgataggttcaagataatgttggccaagatcaagaggggagcggttgtaaggcaagaacttgctaagctgaagaagagcgcttagacaacttcacattatagtcttcaaatttgttatgaatttgcatcccttggatgttatgagatttcttgtatcattgaaccacttggttaaatgttagggatttatgtcagtactccaagtttccaatactttgcatttgcttgcagatttttataatattatttttaagatt

SEQ ID NO: 15943 - protein, 69 aa, Glycine max
MLLRRKILLKPWRMLMLRTSGRRVHRGRKFIFRKRRASLNDFDRFKIMLAKIKRGAVVRQELAKLKKSA

SEQ ID NO: 15944 - protein, 56 aa, Glycine max
MLMLRTSGRRVHRGRKFIFRKRRASLNDFDRFKIMLAKIKRGAVVRQELAKLKKSA

SEQ ID NO: 15945 - protein, 54 aa, Glycine max
MLRTSGRRVHRGRKFIFRKRRASLNDFDRFKIMLAKIKRGAVVRQELAKLKKSA

SEQ ID NO: 15946 - DNA, 1530 bp, Glycine max
aacctttctttcatttcggtttccccattcaacgattctcgctgtgtatcgataattcactaacgatctttcaaggaaatactcgttgcaatcggtgattctgcagttgttattgaaaccacaatgcggggctatgacgacgaaggagatggttacgacgattattatgaggatgagggacaagaaaatgagtatgaagaggggggtgaggaagagtatgaagaagaggaagaggtgcccaggaagccttcaaaggaagaaatggagtaccttgagttgaggcagaagttgaaagaatccattagaaagcagatgaagaaggatagtagtgctaatggtacttggcgccgggattcaaccgaccgaaacaagaataagcttccttatgataattatggctccttttttggtccatctcaaccagttattgcacagagagtaatccaggagagcaagtcattgctagaaaatcagcatttggcatcttggttttctaacccacaacacattaagaagaaccagaataaagtacctagtggaggatcaaagtcttcatctcataatctggcacccaaagtcagcgagagcttccagctccttcaaaagcccccccaccacagaatatgcctataagaaattctgagggacgaccagctcaagttccagcaaggagtaaactgcctttgagcaatggtggcaagcatgttcgtgccagtcatgaggaacggaatgtaggttctgctgccggccgtttgcctcctaaatcaggatccagttacaagaccagtaaacctagtatggcatcagcagattctagaaagcagcttggtaacaacagtgataatggaccaggctggccagttgggccaaaaggcttgccttcaaagatttctgttggtaccactgggaataagtcttcagcacctggtataaaaaactctgtgaatggtatgcggaaatcactcccttcaaagaatcatccatccattccaaaacagagtgtagatcaaagaatttcgaagcagagtgttgaacaaagaattccaaagcagagtgtggaacaaagaagagacatacgagaactaaatagacctaaaatgacaccaaaacaaccagtggcatcatcaaaaccacagataaataagccacttaaacaaaattcagttcatactgcttcgcaagatcgtcgtcccaagcataaggttgctaaacgaccctttgatgatgatgaggacgaagtggatttcaggaacgtgatcagaaatatctttaattacaaccccaataaatttgttgatgacgatgacgatgacaatatggaggcaggctttgatgaaatcttgagggaagaaaagcggaggtttgtttctcagattaaaattaaatgtcatttacttgttaaataagttgaactcaagagctacttgtcatttacttgtgaaatcttgacgatgacgatgacaaattgtcttgcttttacttgttaaataagttgaactcaagagctaatgcaaagtccttcttttcctc

SEQ ID NO: 15947 - protein, 260 aa, Glycine max
MPIRNSEGRPAQVPARSKLPLSNGGKHVRASHEERNVGSAAGRLPPKSGSSYKTSKPSMASADSRKQLGNNSDNGPGWPVGPKGLPSKISVGTTGNKSSAPGIKNSVNGMRKSLPSKNHPSIPKQSVDQRISKQSVEQRIPKQSVEQRRDIRELNRPKMTPKQPVASSKPQINKPLKQNSVHTASQDRRPKHKVAKRPFDDDEDEVDFRNVIRNIFNYNPNKFVDDDDDDNMEAGFDEILREEKRRFVSQIKIKCHLLVK

SEQ ID NO: 15948 - protein, 202 aa, Glycine max
MASADSRKQLGNNSDNGPGWPVGPKGLPSKISVGTTGNKSSAPGIKNSVNGMRKSLPSKNHPSIPKQSVDQRISKQSVEQRIPKQSVEQRRDIRELNRPKMTPKQPVASSKPQINKPLKQNSVHTASQDRRPKHKVAKRPFDDDEDEVDFRNVIRNIFNYNPNKFVDDDDDDNMEAGFDEILREEKRRFVSQIKIKCHLLVK

SEQ ID NO: 15949 - protein, 169 aa, Glycine max
MRGYDDEGDGYDDYYEDEGQENEYEEGGEEEYEEEEEVPRKPSKEEMEYLELRQKLKESIRKQMKKDSSANGTWRRDSTDRNKNKLPYDNYGSFFGPSQPVIAQRVIQESKSLLENQHLASWFSNPQHIKKNQNKVPSGGSKSSSHNLAPKVSESFQLLQKPPHHRICL

SEQ ID NO: 15950 - DNA, 1245 bp, Glycine max
atatatatatattccttcttccttacacattaaaagtcaccctcaccgcaattaatagcacatccaccacttacttctattacaataacacaatattctcatcggtaacatccatcaccagaaccatggtccaagagaagaagctcgtggacgaagtgtcgggttggctgagactctacgaagacggttcagtagaccggacttggaccggttcgccagaagttaaattcttggttgaaccggttcctcctcatgaagaatttatcgatggagttgccactcgcgatatcatggctggtgacaatttccgtgtccggctttacctgccggaaaatatctccaatgaggagaagctacccattttcctccacttccatggtgggggattttgcataagcgaaccggactggttcatgtactaccaattttacactcgattcgctcgggtggctcgagtaatcgttgtctctcccttccttcgtcgtgccccggaaaaccgtctccctgcagcgattgatgacggcttctttgcactcctctggctagattccgtagccagaagaaatgcagaggagccgtggctcaaaaaacatggcaattttggccgtgtttttcttataggagatagctcaggtggaaatattgtgcatgaagttgctgtccgtgccggggaggctaagttggacctgctccatctcgccggaggaatcccgatacatccggggttcatgcggtcgaaacggagtaggtcagagttggagaaaccacaatctccattcttgacgttggacatggtggacaagttcatgagcttggcattgccattgggttctaacaaggaccaccccattgcatgccccatgggaggcggcgctccgccgcttagcgggctgaaactgccgccgattctgctgtgcctggcggagacggacttgatctttgacacagagatggagtacaacgaagccatgaagaaggccaacaaagatgtggagttgtttgttaacaaaggagcgactcatagtttctatctcaacaaaattgcggtggatatggacccaaatactggtgctcaaacggaggctcttattgcaaggatcaaagagttcattgagcagcactaaattattttgtgtttcttttatttttcttttttgaaaaattgaaaaataaaacttgaagtgtgcacttgacaaagtgagttactttaatgaatgaaataactaataagtaatatgttgtgtg

SEQ ID NO: 15951 - protein, 373 aa, Glycine max
IYIFLLPYTLKVTLTAINSTSTTYFYYNNTIFSSVTSITRTMVQEKKLVDEVSGWLRLYEDGSVDRTWTGSPEVKFLVEPVPPHEEFIDGVATRDIMAGDNFRVRLYLPENISNEEKLPIFLHFHGGGFCISEPDWFMYYQFYTRFARVARVIVVSPFLRRAPENRLPAAIDDGFFALLWLDSVARRNAEEPWLKKHGNFGRVFLIGDSSGGNIVHEVAVRAGEAKLDLLHLAGGIPIHPGFMRSKRSRSELEKPQSPFLTLDMVDKFMSLALPLGSNKDHPIACPMGGGAPPLSGLKLPPILLCLAETDLIFDTEMEYNEAMKKANKDVELFVNKGATHSFYLNKIAVDMDPNTGAQTEALIARIKEFIEQH

SEQ ID NO: 15952 - protein, 332 aa, Glycine max
MVQEKKLVDEVSGWLRLYEDGSVDRTWTGSPEVKFLVEPVPPHEEFIDGVATRDIMAGDNFRVRLYLPENISNEEKLPIFLHFHGGGFCISEPDWFMYYQFYTRFARVARVIVVSPFLRRAPENRLPAAIDDGFFALLWLDSVARRNAEEPWLKKHGNFGRVFLIGDSSGGNIVHEVAVRAGEAKLDLLHLAGGIPIHPGFMRSKRSRSELEKPQSPFLTLDMVDKFMSLALPLGSNKDHPIACPMGGGAPPLSGLKLPPILLCLAETDLIFDTEMEYNEAMKKANKDVELFVNKGATHSFYLNKIAVDMDPNTGAQTEALIARIKEFIEQH

SEQ ID NO: 15953 - protein, 277 aa, Glycine max
MAGDNFRVRLYLPENISNEEKLPIFLHFHGGGFCISEPDWFMYYQFYTRFARVARVIVVSPFLRRAPENRLPAAIDDGFFALLWLDSVARRNAEEPWLKKHGNFGRVFLIGDSSGGNIVHEVAVRAGEAKLDLLHLAGGIPIHPGFMRSKRSRSELEKPQSPFLTLDMVDKFMSLALPLGSNKDHPIACPMGGGAPPLSGLKLPPILLCLAETDLIFDTEMEYNEAMKKANKDVELFVNKGATHSFYLNKIAVDMDPNTGAQTEALIARIKEFIEQH

SEQ ID NO: 15954 - DNA, 1360 bp, Glycine max
ataaaccctgcaccttccaacaatcacttctctcctccttccttctcacttctcacttctcaccaattacgttaccttgcactattattctatacaactgtaaacatccttaattgcaaaccctctctctctctccttaaataattctcataaaaaaataaaataaaaattaaaactaacaaagaaaccattttgcacaaacccaattgagagtttgagacccagatgatgatgatgaacaatactattattccatggtcaaccattggcgttgtgattgcatggtacacttccaacataggggttcttcttctgaacaagtacttgctaagcaactacggctttaggttccccgtgttcctcaccacgtgtcacatgctggtgtgctcgctcttcagctacgttattgtttccgttacggaagctgttccgctgcagcgcgtgcggtccaggagccagttttggaggatcgtggcgctcggcgtcgttttctgcttctccgtcgtttgcgggaacgtgtcgctcaggtacattccggtgtcgtttaatcaggccatcggcgccaccacgccgttcttcaccgccgttttcgcttatgctgtcagcgccaagagggaggcttgggttacgtacgccacgctcttgcccgttgttgcgggcgtcgtcatagctagtgggggtgaaccaagttttcatctgtttggatttataatctgtgtttcatcgactggtgccagagcatttaaatcagtgcttcaagatattttgttgtcctcagagggagaaaagttgaattctatgaacctgctgctttatatggctccaatagcagtgatggtcttacttcctacaatattgttgatggagggaaatgtgattcagatcactatggatcttgccagaaaggatataagaattttttggtatctgcttctcagttcttctcttgcatattttgtgaacctcactaattttttggtgaccaaacatacaagtgcacttacccttcaggttttaggaaatgcaaagggggcagttgctgtggtggtctcaattttgatattcaaaaaccccatttcaatgataggaatgcttggctatgcactcactatcattggagttatcttgtacagtgaaaccaagaagaggtatagcaaaaattagtaaaattaacaagattaccaatcaaagcagggtgtgatttaccacaagcgagagggccaacaagttatacttatgcatacaaaattatgagcttgcagcaaccacttttgttacacgtgaacaagaatatttcccccctaactatttcattcattgcaagcgttttgggagtagtcacactccccataaacccttt

SEQ ID NO: 15955 - protein, 312 aa, Glycine max
MMMMNNTIIPWSTIGVVIAWYTSNIGVLLLNKYLLSNYGFRFPVFLTTCHMLVCSLFSYVIVSVTEAVPLQRVRSRSQFWRIVALGVVFCFSVVCGNVSLRYIPVSFNQAIGATTPFFTAVFAYAVSAKREAWVTYATLLPVVAGVVIASGGEPSFHLFGFIICVSSTGARAFKSVLQDILLSSEGEKLNSMNLLLYMAPIAVMVLLPTILLMEGNVIQITMDLARKDIRIFWYLLLSSSLAYFVNLTNFLVTKHTSALTLQVLGNAKGAVAVVVSILIFKNPISMIGMLGYALTIIGVILYSETKKRYSKN

SEQ ID NO: 15956 - protein, 311 aa, Glycine max
MMMNNTIIPWSTIGVVIAWYTSNIGVLLLNKYLLSNYGFRFPVFLTTCHMLVCSLFSYVIVSVTEAVPLQRVRSRSQFWRIVALGVVFCFSVVCGNVSLRYIPVSFNQAIGATTPFFTAVFAYAVSAKREAWVTYATLLPVVAGVVIASGGEPSFHLFGFIICVSSTGARAFKSVLQDILLSSEGEKLNSMNLLLYMAPIAVMVLLPTILLMEGNVIQITMDLARKDIRIFWYLLLSSSLAYFVNLTNFLVTKHTSALTLQVLGNAKGAVAVVVSILIFKNPISMIGMLGYALTIIGVILYSETKKRYSKN

SEQ ID NO: 15957 - protein, 310 aa, Glycine max
MMNNTIIPWSTIGVVIAWYTSNIGVLLLNKYLLSNYGFRFPVFLTTCHMLVCSLFSYVIVSVTEAVPLQRVRSRSQFWRIVALGVVFCFSVVCGNVSLRYIPVSFNQAIGATTPFFTAVFAYAVSAKREAWVTYATLLPVVAGVVIASGGEPSFHLFGFIICVSSTGARAFKSVLQDILLSSEGEKLNSMNLLLYMAPIAVMVLLPTILLMEGNVIQITMDLARKDIRIFWYLLLSSSLAYFVNLTNFLVTKHTSALTLQVLGNAKGAVAVVVSILIFKNPISMIGMLGYALTIIGVILYSETKKRYSKN

SEQ ID NO: 15958 - DNA, 586 bp, Glycine max
acatcctaatcgaaaaactttacaaccttttaagcaactccttttgctttattgatgtattcttcattttaagcaccatcatcttcctattttgttttccaatattgctgtttgttgtggtaaatttttctgtagttcatcatcatgctagaaggcaaggctgtgattggtgagactgacatgcttcagaccatgcagcaagatgctatggatttagcatccaaagcactcgatttctttgatgtcactgaagccattaagattgctcgatttataaagaaggagtttgataggatgcatggacctggttggcagtgtattgtaggcactgattttggttcgtttgtgactcactgttgtggctgtttcatctatttctgcttaggcaacttggcaattttgctattcagaggctcggctgctccagaggcacatgaaaatcggttctcagcactagatgcagccaaagcataatttcattgcctaattaattttccctctcttttgacttttctatatatatttttgttcattccatgtaatgtaatgataatgtagaaagaaatggaaggttttagagaaaagc

SEQ ID NO: 15959 - protein, 109 aa, Glycine max
MLEGKAVIGETDMLQTMQQDAMDLASKALDFFDVTEAIKIARFIKKEFDRMHGPGWQCIVGTDFGSFVTHCCGCFIYFCLGNLAILLFRGSAAPEAHENRFSALDAAKA

SEQ ID NO: 15960 - protein, 97 aa, Glycine max
MLQTMQQDAMDLASKALDFFDVTEAIKIARFIKKEFDRMHGPGWQCIVGTDFGSFVTHCCGCFIYFCLGNLAILLFRGSAAPEAHENRFSALDAAKA

SEQ ID NO: 15961 - protein, 93 aa, Glycine max
MQQDAMDLASKALDFFDVTEAIKIARFIKKEFDRMHGPGWQCIVGTDFGSFVTHCCGCFIYFCLGNLAILLFRGSAAPEAHENRFSALDAAKA

SEQ ID NO: 15962 - DNA, 527 bp, Glycine max
attggaatggaatttccactttgagttcgaactaaacaattcaattcaatctgcctcgatcatggagaggaaaacatttgggtttttgttcttgctcctccttgtcttagcttctgatgtgacggtgaagagagcagaggcgaaagattgcttgacaaggaggcacgggttccagggtagatgcttattcgacaggcaatgtgcacatgtgtgcaggagcgatggtttcatcggtggtcagtgccgaggcccccttcgcaaatgcttttgcagcaggccatgttggtcgaaattactactgccaaagaggccatgaaataaacaaacaaacaaataaataaatagctctaaccgacacatatgtacgtagtgtcggggttctagctagctaggtaggtacgtgtgtcttttgttatcgatcctagtttggtggagcaagtgtggcatcatgatctagttatatatatatgtcgtgatcatcttgctctgttcagcaataaattataatggaaattaataaattagtc

SEQ ID NO: 15963 - protein, 104 aa, Glycine max
LEWNFHFEFELNNSIQSASIMERKTFGFLFLLLLVLASDVTVKRAEAKDCLTRRHGFQGRCLFDRQCAHVCRSDGFIGGQCRGPLRKCFCSRPCWSKLLLPKRP

SEQ ID NO: 15964 - protein, 84 aa, Glycine max
MERKTFGFLFLLLLVLASDVTVKRAEAKDCLTRRHGFQGRCLFDRQCAHVCRSDGFIGGQCRGPLRKCFCSRPCWSKLLLPKRP

SEQ ID NO: 15965 - DNA, 771 bp, Glycine max
agagcagccacacacacagaaaaggctaccaagagagaggtgggctcctgcgactacaacatggtatcagacctaggcggcgacgatggggcctgacgggagtagggcggcgacggcggacctaggaggcggactgggctcacctccgcgcgggctcctacctcttcccctcattcccttcttgttccctctcgcggctgtgcgctggctggcctctcgcagctgcaggggagctgcgccagtagctgcgtgcgagtgaggaagacaagggggcggcgcgagctgaggagatgcgcatacgggaggggctgttgaggggactgacaggaggtgtgctgctggaactgctgctgtgtgcagcggctaaatcagaaggagaagtggggcagtgttgtgctgctgattgaaagggaactggagactgctgattctgcagaggactgtgtgcggctgtgcttgctgctattgttggctgtgtaggctgtgtccgcagatgagtgagccaacaggccttgctgaggctttcgagaagctagctaagatcctcgaggagtcgaaatctggggccatcgttcctcgacaggaagtggctcagaagatcgaactgtcgcccatggacatgaagttagagggggctaccaattatctgagctggtcccgaagggcgttgctagctgtggaacagaaggagcttgatgggcacttgttgggtgctgttgctgaaccaggagacaagactaccgtggagggaaatgagatggtatgctggtt

SEQ ID NO: 15966 - protein, 92 aa, Glycine max
MSEPTGLAEAFEKLAKILEESKSGAIVPRQEVAQKIELSPMDMKLEGATNYLSWSRRALLAVEQKELDGHLLGAVAEPGDKTTVEGNEMVCW

SEQ ID NO: 15967 - protein, 57 aa, Glycine max
MGPDGSRAATADLGGGLGSPPRGLLPLPLIPFLFPLAAVRWLASRSCRGAAPVAACE

SEQ ID NO: 15968 - protein, 52 aa, Glycine max
MDMKLEGATNYLSWSRRALLAVEQKELDGHLLGAVAEPGDKTTVEGNEMVCW

SEQ ID NO: 15969 - DNA, 1123 bp, Glycine max
attattactacccactcatctagagagagaagaagaaacccagatatggaaggcaaggaagaagatgttagagtcggagccaacaagtttcctgagagacagccgatcggaacatctgctcagagcgacaaggactacaaggagccacctcctgctcccttgttcgagcccggcgagcttgcttcgtggtccttctggagagcagggatcgccgagttcatcgccacgtttctgttcctttacatcactgttttgaccgtcatgggtgtcaagaggtcgccgaacatgtgtgcttctgtcggaatccaaggcatcgcttgggctttcggtggtatgatcttcgctctcgtctactgcaccgctggtatctccggtggacacatcaaccccagcagtcacgttcggtctgttcttggcgcggaagctttcgcttacacgagctgtgtactacatagtgatgcagtgcttaggagctatctgtggagctggtgtggtgaaggggttccaaccaaagcagtaccaagctctaggaggtggagccaacactgtagctcctggttacaccaaaggaagtggtctcggagctgagattattggaacctttgtccttgtttacaccgtcttctccgctactgatgctaagagaaacgctcgtgactctcatgttcccattcttgcaccgcttcctattggattcgctgtgttcttggtccacttggcaaccatccccatcactggaactggaatcaacccagcaagaagtcttggagctgcaatcatcttcaacaaggacaacgcttgggacgaccattgggtcttctgggttggaccattcatcggtgctgcactcgctgctctataccacgtgatcgtcatcagagccatcccattcaagtccagaagctgattgagttactctttataaacttggctttttgttctcttagtttggttttccttttgtgaatgtactactactactacttgtgtgaaacatcgtgtgtttgtgttggttcctcttcttttgcctaatgcagactctatttataaaacagagtcagagataattgcgatccctcttctacaatttctatcaaacattcagggcagacatttttcttct

SEQ ID NO: 15970 - protein, 195 aa, Glycine max
IITTHSSRERRRNPDMEGKEEDVRVGANKFPERQPIGTSAQSDKDYKEPPPAPLFEPGELASWSFWRAGIAEFIATFLFLYITVLTVMGVKRSPNMCASVGIQGIAWAFGGMIFALVYCTAGISGGHINPSSHVRSVLGAEAFAYTSCVLHSDAVLRSYLWSWCGEGVPTKAVPSSRRWSQHCSSWLHQRKWSRS

SEQ ID NO: 15971 - protein, 180 aa, Glycine max
MEGKEEDVRVGANKFPERQPIGTSAQSDKDYKEPPPAPLFEPGELASWSFWRAGIAEFIATFLFLYITVLTVMGVKRSPNMCASVGIQGIAWAFGGMIFALVYCTAGISGGHINPSSHVRSVLGAEAFAYTSCVLHSDAVLRSYLWSWCGEGVPTKAVPSSRRWSQHCSSWLHQRKWSRS

SEQ ID NO: 15972 - protein, 149 aa, Glycine max
MQCLGAICGAGVVKGFQPKQYQALGGGANTVAPGYTKGSGLGAEIIGTFVLVYTVFSATDAKRNARDSHVPILAPLPIGFAVFLVHLATIPITGTGINPARSLGAAIIFNKDNAWDDHWVFWVGPFIGAALAALYHVIVIRAIPFKSRS

SEQ ID NO: 15973 - DNA, 1106 bp, Glycine max
acatcctaatcgaaaaaaaaatcagaaggcatcatggcagccaaagcaaaaggaaggggttggcttacaataaagaatgggagaaaaggaaagaagcacgttgccaaccccatcttagtagattcacatacttcagcagcaaaagcctcttcttcttcttcttcttcttcttcactctcttcacaaatgaaaatactttgctctcttcctccaactctctcatactttcacttttctttgttcatgcaagatccaaagaacgattcaaacacaaggaagccatggtaccaaagagcaattgaggtgactagcctatggaaaagtgtatcaaaatccacagaaattccaacacctaattcttcaactttatggaagagatcatcatcaatgccaaaatcccctcaagtccctactacaccaagtcctaacaacaagaacaagctaagaaaatgtgcctctctaaaggttgcatcatccttcacaagggtttgtctttgtgctccaatctattcctacaacgagattttaagagctgaggtgccacctagaagaagcaatagttatccaagatcaaagccattgcatgcttcacatgagagaactcctagtgctagacttagcactgagggaaggagggtatttaggggcaaatcattgactgatgatgttctaataaggaggtttgtgattgaggaagaggcaatgatgcaaattagaagaagaaatcaaatggaagttattaggaagaggagtatgatgaggagaaaaaagcttgggcctagtcctcttagtagaatggttatggcaaatgatattggacaattttaatttgattggtccaatttggttagtgtccagtcccattggtgaattttgattctccatattaatgcctcacctttcccttttttttttctttggccttaatttcattcactgaactttttcacctcgtgtgacaagtttctactactgggattatcttataattgcaacatatctttagttttagaagacccaattttaagtgggtttgatttaatgatattgctatgtatagctccgatcagaatcacaacttttaatttcatttctatattcattcc

SEQ ID NO: 15974 - protein, 264 aa, Glycine max
MAAKAKGRGWLTIKNGRKGKKHVANPILVDSHTSAAKASSSSSSSSSLSSQMKILCSLPPTLSYFHFSLFMQDPKNDSNTRKPWYQRAIEVTSLWKSVSKSTEIPTPNSSTLWKRSSSMPKSPQVPTTPSPNNKNKLRKCASLKVASSFTRVCLCAPIYSYNEILRAEVPPRRSNSYPRSKPLHASHERTPSARLSTEGRRVFRGKSLTDDVLIRRFVIEEEAMMQIRRRNQMEVIRKRSMMRRKKLGPSPLSRMVMANDIGQF

SEQ ID NO: 15975 - protein, 213 aa, Glycine max
MKILCSLPPTLSYFHFSLFMQDPKNDSNTRKPWYQRAIEVTSLWKSVSKSTEIPTPNSSTLWKRSSSMPKSPQVPTTPSPNNKNKLRKCASLKVASSFTRVCLCAPIYSYNEILRAEVPPRRSNSYPRSKPLHASHERTPSARLSTEGRRVFRGKSLTDDVLIRRFVIEEEAMMQIRRRNQMEVIRKRSMMRRKKLGPSPLSRMVMANDIGQF

SEQ ID NO: 15976 - protein, 194 aa, Glycine max
MQDPKNDSNTRKPWYQRAIEVTSLWKSVSKSTEIPTPNSSTLWKRSSSMPKSPQVPTTPSPNNKNKLRKCASLKVASSFTRVCLCAPIYSYNEILRAEVPPRRSNSYPRSKPLHASHERTPSARLSTEGRRVFRGKSLTDDVLIRRFVIEEEAMMQIRRRNQMEVIRKRSMMRRKKLGPSPLSRMVMANDIGQF

SEQ ID NO: 15977 - DNA, 833 bp, Glycine max
actccaactccaactcctgctcggctcctctccttccatctctcgccgccggccaccgggaaccctcccgtccgtcgtcgcaatggccgccaccaacggcgccggtgccgaccccgtgcacgagcctccccacaagatcaccaagatcgcgccgctgctcaaggtcaagaagctctccgacaaggccatcctgccgtcccgcggctccgccctcgccgccggctacgacctctccagtgcggtggagacggtcgtgccggcgaggggaaaggcgctggtggccaccgacctaagcatcgccatcccggagggcacctacgcgcgcatcgcgccgaggtcgggcctggcgctgaagcacgccatcgacgtgggcgccggggtgatcgacgccgactaccgcggccctgtgggcgtcgtgctcttcaaccactcggaggcggacttcgccgtgaagcctggcgaccgcgttgcgcagatgatcgtccaggtgatcgcgacgccggaggtcgccgaggtggaggacctcgacgccaccctccgcggggagggcgggttcgggtccaccggcgtctgagctccccgccttggtagataaacctagataactggtttgttgtttaggatggtggtggaaccctaccctaggggaaggtacccaccttattgatggtcgtgtccgtccgatgttaaatggaatctcgtgatctctcccagtttagacttttggagagaagttcatgctgcaaatccatgagcgctgcaagtgttaagattgttctgaacgtgtcagtcgtgtcgtgtgtattgcagaccttcttaacgtggaatgttgc

SEQ ID NO: 15978 - protein, 196 aa, Glycine max
TPTPTPARLLSFHLSPPATGNPPVRRRNGRHQRRRCRPRARASPQDHQDRAAAQGQEALRQGHPAVPRLRPRRRLRPLQCGGDGRAGEGKGAGGHRPKHRHPGGHLRAHRAEVGPGAEARHRRGRRGDRRRLPRPCGRRALQPLGGGLRREAWRPRCADDRPGDRDAGGRRGGGPRRHPPRGGRVRVHRRLSSPPW

SEQ ID NO: 15979 - protein, 190 aa, Glycine max
LQLQLLLGSSPSISRRRPPGTLPSVVAMAATNGAGADPVHEPPHKITKIAPLLKVKKLSDKAILPSRGSALAAGYDLSSAVETVVPARGKALVATDLSIAIPEGTYARIAPRSGLALKHAIDVGAGVIDADYRGPVGVVLFNHSEADFAVKPGDRVAQMIVQVIATPEVAEVEDLDATLRGEGGFGSTGV

SEQ ID NO: 15980 - protein, 163 aa, Glycine max
MAATNGAGADPVHEPPHKITKIAPLLKVKKLSDKAILPSRGSALAAGYDLSSAVETVVPARGKALVATDLSIAIPEGTYARIAPRSGLALKHAIDVGAGVIDADYRGPVGVVLFNHSEADFAVKPGDRVAQMIVQVIATPEVAEVEDLDATLRGEGGFGSTGV

SEQ ID NO: 15981 - DNA, 1121 bp, Glycine max
aagcgaaagcaaaaccgcaggactagcaggagagacagagatcgcccgaaccctaaccctaccagcacctcccgtcgccggctgagatggcgatggacgcggagcggcggcaggcggagctgatcgagcagttttcggcgcaggcggcggcgctctcctcggctcctcagctggcggcgctcgtgctcgaggccacctcccacccggcgctctttgccttctccgagctcctcacccttccagccctctccaagctaacgggcacgcagtacgcctcgtcgctggacctgctccgcctcttcgcctacggcaccctcaaggactacaagagtaattctagcgccctccctgcattgttgcctgatcaagcccggaagctgaagcaactcagtgtgctaactttggctgagtcaaccaaggtacttccatatgatcagctcatgcaagagctagacgtttccaatgtgagagaacttgaagatttcctcatcaatgagtgcatgtactcaggtattgtcagaggcaagttggaccaactgcggcggtgctttgaagtacaatttgcagctggaagggacctcacacatgatcagctaaccaacatgattgagaccttgtctgactggttgggaacatcagataatttattacaccaaattcaggagaaaatcaagtgggcggatacaacaagtgaatcgaacaagaagcaccagaaagaatttgaagacagagtggaagaagccaagaagtcagtcaaggcagacaatgacttacgggggcatgacgactttctctctgaatctggaggaataatggattttgaggaggaccgcatccgaccaaaaaggaggcgacaaccaatgtcatagtttgactgaagtatcacacctatggtccctgctcgcagaagtgacgaatgctgttcttgagacattttgtcaccggagtttaggagcgtcaattagggtgctttccatgaagcgagtctgttgagaaaacgcttgtttttggtatgagatgttacaaggagatgatttactgccgcatttattaagtagcacaaagggcatatgggtgacttagcactgtaaagattatggttctgaaaaggttggtgaccc

SEQ ID NO: 15982 - protein, 260 aa, Glycine max
MAMDAERRQAELIEQFSAQAAALSSAPQLAALVLEATSHPALFAFSELLTLPALSKLTGTQYASSLDLLRLFAYGTLKDYKSNSSALPALLPDQARKLKQLSVLTLAESTKVLPYDQLMQELDVSNVRELEDFLINECMYSGIVRGKLDQLRRCFEVQFAAGRDLTHDQLTNMIETLSDWLGTSDNLLHQIQEKIKWADTTSESNKKHQKEFEDRVEEAKKSVKADNDLRGHDDFLSESGGIMDFEEDRIRPKRRRQPMS

SEQ ID NO: 15983 - protein, 258 aa, Glycine max
MDAERRQAELIEQFSAQAAALSSAPQLAALVLEATSHPALFAFSELLTLPALSKLTGTQYASSLDLLRLFAYGTLKDYKSNSSALPALLPDQARKLKQLSVLTLAESTKVLPYDQLMQELDVSNVRELEDFLINECMYSGIVRGKLDQLRRCFEVQFAAGRDLTHDQLTNMIETLSDWLGTSDNLLHQIQEKIKWADTTSESNKKHQKEFEDRVEEAKKSVKADNDLRGHDDFLSESGGIMDFEEDRIRPKRRRQPMS

SEQ ID NO: 15984 - protein, 142 aa, Glycine max
MQELDVSNVRELEDFLINECMYSGIVRGKLDQLRRCFEVQFAAGRDLTHDQLTNMIETLSDWLGTSDNLLHQIQEKIKWADTTSESNKKHQKEFEDRVEEAKKSVKADNDLRGHDDFLSESGGIMDFEEDRIRPKRRRQPMS

SEQ ID NO: 15985 - DNA, 1239 bp, Glycine max
aaaacaaaaacccctcgtccgctccaaaaccctaaaacctgaaagcatacgctacttctgcttcgttgcgatgttggaaatcaaaaccgccaagacccgcaagggcaagcgggagctagagaaacgcgctcccaagctcgtggaatcggggaagaagacgctgatcctgcacggaacgaagaccagcggcgtgctgaacgccgtgctggcgcagatttatcacctgaagaaggactgtgccgtcaagtacagccgcaggaacgagaacgtcaagcccttcgaggccggcggcgagacttcgcttgagttcttctctctcaaaaccgattgcagtatctttgtgtatggatctcactcgaagaagcggcctgataaccttgttattgggagaacttatgatcatcatatctatgatttagtggaggttggagttgaaaattttaaacccatggagtcttttagttatgataagaagttggctcctaaggaagggtcaaagccttttattgtttttattggagaaggatttgaggctgtggaagagctaaagcatttgaaggaagttttgctcgatcttcttcgcggtgaggttgtggagaatctaaatcttgctggagtggatcgtgcatatgtatgtgctgccctttctccgaatcgtgtgttttttacacactgtgcattgcggctgaaaaagtcaggcaccgttgtgccaaggatggaattggaagaagttggcccgtccatggattttgttcttcgtaggcatcgtcctcctaatgaaagtttgaggaaggaagcactgaaaacgtcgagggagaagccgaagaaaaaggagaagaatgttaaaaaggatgaattacagggaaagattggaagtatttatatcccagatcagaaggttggagaaactcctttaccttacaaagcaaaaggagtgaagagggagcgccgagaatcgaagcggaaaaatgagagtgatggaagtgcttcaaaacggaagaaggaagattcttaatacttacaaattacacttgttgtctttccctggcatctgattataatagaatgatcaattgtagatcatatgatattaaactgcatgttgtttaggtgtcatgaatattcatgattttcccctataagggggggttttgccatcattttattcagcgtatttttttccccttcatattttgccaagttgaaatgcagtcctttgaaccatgagtcttagctttt

SEQ ID NO: 15986 - protein, 337 aa, Glycine max
KQKPLVRSKTLKPESIRYFCFVAMLEIKTAKTRKGKRELEKRAPKLVESGKKTLILHGTKTSGVLNAVLAQIYHLKKDCAVKYSRRNENVKPFEAGGETSLEFFSLKTDCSIFVYGSHSKKRPDNLVIGRTYDHHIYDLVEVGVENFKPMESFSYDKKLAPKEGSKPFIVFIGEGFEAVEELKHLKEVLLDLLRGEVVENLNLAGVDRAYVCAALSPNRVFFTHCALRLKKSGTVVPRMELEEVGPSMDFVLRRHRPPNESLRKEALKTSREKPKKKEKNVKKDELQGKIGSIYIPDQKVGETPLPYKAKGVKRERRESKRKNESDGSASKRKKEDS

SEQ ID NO: 15987 - protein, 314 aa, Glycine max
MLEIKTAKTRKGKRELEKRAPKLVESGKKTLILHGTKTSGVLNAVLAQIYHLKKDCAVKYSRRNENVKPFEAGGETSLEFFSLKTDCSIFVYGSHSKKRPDNLVIGRTYDHHIYDLVEVGVENFKPMESFSYDKKLAPKEGSKPFIVFIGEGFEAVEELKHLKEVLLDLLRGEVVENLNLAGVDRAYVCAALSPNRVFFTHCALRLKKSGTVVPRMELEEVGPSMDFVLRRHRPPNESLRKEALKTSREKPKKKEKNVKKDELQGKIGSIYIPDQKVGETPLPYKAKGVKRERRESKRKNESDGSASKRKKEDS

SEQ ID NO: 15988 - protein, 188 aa, Glycine max
MESFSYDKKLAPKEGSKPFIVFIGEGFEAVEELKHLKEVLLDLLRGEVVENLNLAGVDRAYVCAALSPNRVFFTHCALRLKKSGTVVPRMELEEVGPSMDFVLRRHRPPNESLRKEALKTSREKPKKKEKNVKKDELQGKIGSIYIPDQKVGETPLPYKAKGVKRERRESKRKNESDGSASKRKKEDS

SEQ ID NO: 15989 - DNA, 883 bp, Glycine max
gtatttcttcatttcgcggtgagttagaactgataatcaagagagtgactactggtcggcgacagcgaactacttccgtgtaatggcgacctccgtcgcagtcgccggcgctttgacggcgcatgatcgccggattctgacagcggtgaacgtcggagcgtcgagcctgtcgttggccggttccagcttcattgtagtgtgctacctcctcttcaaggagctccgcaagttctccttcaagctcgtcttctacctcgctctctctgatatgctttgcagtttcttcggcataataggggacccgtccaaaggtttcttttgttatgctcagggctatagcacacatttcttttgtgtggcatcttttctatggactacaacaattgcttttacccttcaccgcactgttgtaaaacataaaacagatgttgaagatttggaggccatgtttcacttgtatgtctggggtacttccctggttatgacagttatgcgctcctttggtaatgaccataaacattttggtgcatggtgttggacacaaacaggtcgcacagggaaggcagttcattttgtaacattttacatgccactctggggtgcaattctgtataatggatttacatacttacaagtaatacgcatgctgaataatgcaacccgtatggcggttggtatgtcaggccaaacttttgtgtcagatacaagagataacatgagggctttgaatcgctggggatactatccactaattctgataggatcatggacttttggcaccattaaccgtattcatgatttttttgaacccaaccataagatcttttggctcacatttcttgatgttggaacggctgctcttatgggcctctttaactcaatt

SEQ ID NO: 15990 - protein, 267 aa, Glycine max
MATSVAVAGALTAHDRRILTAVNVGASSLSLAGSSFIVVCYLLFKELRKFSFKLVFYLALSDMLCSFFGIIGDPSKGFFCYAQGYSTHFFCVASFLWTTTIAFTLHRTVVKHKTDVEDLEAMFHLYVWGTSLVMTVMRSFGNDHKHFGAWCWTQTGRTGKAVHFVTFYMPLWGAILYNGFTYLQVIRMLNNATRMAVGMSGQTFVSDTRDNMRALNRWGYYPLILIGSWTFGTINRIHDFFEPNHKIFWLTFLDVGTAALMGLFNSI

SEQ ID NO: 15991 - protein, 205 aa, Glycine max
MLCSFFGIIGDPSKGFFCYAQGYSTHFFCVASFLWTTTIAFTLHRTVVKHKTDVEDLEAMFHLYVWGTSLVMTVMRSFGNDHKHFGAWCWTQTGRTGKAVHFVTFYMPLWGAILYNGFTYLQVIRMLNNATRMAVGMSGQTFVSDTRDNMRALNRWGYYPLILIGSWTFGTINRIHDFFEPNHKIFWLTFLDVGTAALMGLFNSI

SEQ ID NO: 15992 - protein, 146 aa, Glycine max
MFHLYVWGTSLVMTVMRSFGNDHKHFGAWCWTQTGRTGKAVHFVTFYMPLWGAILYNGFTYLQVIRMLNNATRMAVGMSGQTFVSDTRDNMRALNRWGYYPLILIGSWTFGTINRIHDFFEPNHKIFWLTFLDVGTAALMGLFNSI

SEQ ID NO: 15993 - DNA, 762 bp, Glycine max
atcctgcggcgcatcggcacattcggttgagtggcagacatgtcttcgttttggggtgcggaggtgaagccagagaagccctacacgcacacccacagcccgcgccgcggccgcctgcgcctcacccaggcgactctgggggccgaggttggcaaggtggagaaggggaagacgaacttggtgcagctgcagtgcaccgttaagaacaaggagcccgtgtatctctgcgccctgattccggggcagtcggtgacttgccacctggacctcgagttcgaggagaagttcgtgacgttctcggtgcttgggtcgaggagcgttcacttggctggatactatattggtgatgtgtacgaggacattggtgacagtgatactggtagtgagtcacttcaaggctccgatgatgatttcttggcatctgatgatgatgatgtggtcattccagtatcccatggccagatgaacacagacagcgaagatgattcagactatgatgaggactacgattcagaggatgatgaggatttgatgtacaaccaaggtagaggcaagagttcagttgtcattgaggagattcaagaggatgagaagcctgttgatgataattctcgacttcagcttgctgttaggaccctacctgctgaatccgtggaaagtgaagatgaagacggctttcctgtttctgaatcaaagaagagttctaaaggtagttccaagaaggataagaatctaaataatgggactagtactgaagacagg

SEQ ID NO: 15994 - protein, 241 aa, Glycine max
MSSFWGAEVKPEKPYTHTHSPRRGRLRLTQATLGAEVGKVEKGKTNLVQLQCTVKNKEPVYLCALIPGQSVTCHLDLEFEEKFVTFSVLGSRSVHLAGYYIGDVYEDIGDSDTGSESLQGSDDDFLASDDDDVVIPVSHGQMNTDSEDDSDYDEDYDSEDDEDLMYNQGRGKSSVVIEEIQEDEKPVDDNSRLQLAVRTLPAESVESEDEDGFPVSESKKSSKGSSKKDKNLNNGTSTEDR

SEQ ID NO: 15995 - DNA, 960 bp, Glycine max
acatcctaatcgaaaaatcccacatcccatcccatccgcagcggctttattacctaccgagaagaagagagaaaaaaaggttcgagtgcgttcgagagtgaggagtgagaagagatggctccggtgaagctgtacggcgcgaccctgtcgtggaacgtcaccaggtgcgtggcggcgctggaggaagccggcgtcgagtacgagctcgtccccatcaacttcggcaccggcgagcacaagggccccgaccacctcgccaggaacccctttggccaggtgccagctttgcaggatggtgacttgtacgtcttcgaatcacgtgctatttgcaagtatgcgtgccgcaagagcaagccagagctgttgaaggagggcgacatcaaggagtcagctatggtggatgtgtggctcgaggtggaggcccatcagtacaccgccgcgctgagccccattctcttcgagtgccttatccatcctatgcttgggggagccactgaccagacggtcatcgatgctaaccttgttaagatcaagaacgtgctggcggtgtacgaggcgcacctgagcaagtccaagtacctggctggagacttcctcagtcttgcggaccttaaccatgtgtctgtcaccctgtgcttggcggctacaccctacgcgtctctgttcgacgcgtacccgcatgtgaaggcctggtggactgacctgctggcgaggccgtccgtccagaaggtcgctgcgctgatgaagccatgatcttagtttctggcgctcgttcgtcgcgaaataagccgaagtgtgtttcccccgatgtgtgcctgtccgagtgtgtgttcttgtgatgtctcctcgtgttgaatgttcaggcttgtgcttgcgatcctgtctagatcttgtactgaaatgagcattcctatgctctggtttaataataaattgtgcccagagattatctcagcttcg

SEQ ID NO: 15996 - protein, 212 aa, Glycine max
MAPVKLYGATLSWNVTRCVAALEEAGVEYELVPINFGTGEHKGPDHLARNPFGQVPALQDGDLYVFESRAICKYACRKSKPELLKEGDIKESAMVDVWLEVEAHQYTAALSPILFECLIHPMLGGATDQTVIDANLVKIKNVLAVYEAHLSKSKYLAGDFLSLADLNHVSVTLCLAATPYASLFDAYPHVKAWWTDLLARPSVQKVAALMKP

SEQ ID NO: 15997 - protein, 119 aa, Glycine max
MVDVWLEVEAHQYTAALSPILFECLIHPMLGGATDQTVIDANLVKIKNVLAVYEAHLSKSKYLAGDFLSLADLNHVSVTLCLAATPYASLFDAYPHVKAWWTDLLARPSVQKVAALMKP

SEQ ID NO: 15998 - DNA, 647 bp, Glycine max
atgaagaagttgttctaccatggtgtgcgatgtgctatccggaaccagggaggttgcaggaattgtgtcttcatgtggagacttctgctcactcactcaaaacagtgtgatcacggggactgctcagttcccagatgcagagatctgaaggtattcatgggcaaggccaaaatggttactgctggaccctgttgtgccatggaatgctagcggatcagaaattaaccccctaggttttctcgagcagaagatttgttgatgaaaatgcaataaatttgttgttggctaaccggattgcaagttgcgaaataaataaaacggcgacctggtggcgacggcagcagcagcagagttatttgtttcgccggttttcctgaaacttgtgggaagaaggcggaggcttacatagacagacatcctgacaaatgtagtggtgtaggtgcaatacctgtatatgtttcctgcaggccatagatgatggatcgacaggatataggattattttgtttcttatttattttacccccctctcccccttgaccccattgagttgaacaaggccgcagttttgctcagccctgttaatccaggtccagttaatgtgtatattaactaaaaaaaaaaaaaaaaaagcttatcgataccgt

SEQ ID NO: 15999 - protein, 69 aa, Glycine max
MKKLFYHGVRCAIRNQGGCRNCVFMWRLLLTHSKQCDHGDCSVPRCRDLKVFMGKAKMVTAGPCCAMEC

SEQ ID NO: 16000 - protein, 45 aa, Glycine max
MWRLLLTHSKQCDHGDCSVPRCRDLKVFMGKAKMVTAGPCCAMEC

SEQ ID NO: 16001 - protein, 42 aa, Glycine max
MVCDVLSGTREVAGIVSSCGDFCSLTQNSVITGTAQFPDAEI

SEQ ID NO: 16002 - DNA, 1345 bp, Glycine max
gttttttccgtccccttccttcgagcgtcgtctgcgagagactgcaagtgactgcctccgtgtgcgggtggtgtctgggagcggggatggcgacgcacttcgtgctcaacaccggcgccaagatcccctccgtggggctcggcacctggcagtccgaccccggcatcgtcggcgaggccgtctacgccgccgtcaaggcggggtaccggcacatcgactgcgccagggcctacaacaacgagaaggaggtgggtttggctctgaagaagctgtttgaagagagtgtagtcaagcgtgaggatctgtttatcacctctaagctatggtgtggtcatcatgccccagaagatgtgcctgaggcacttggggattctctcgatgacttgcagcttgactacttggatctttaccttatccattggccatttagagtcaggaagggaacaagcattggcaaccctgaaaacttcttaccacctgacatcccagctacatggggagcaatggagaagttacatgatgctggcaaagctcgtgcaattggtgtgagtaacttcgcgtcgaagaaattgggtgacttgcttgctgtagctcgcatacctccggctgttgaccaggtggagtgccatcctggttggcagcaatctaaactccataccttttgtcagtcggccggtgttcacctctctgcgtactcaccactaggttcgcctggttcaacatggatgaatggtaatgtcctcaaagaacccgtcgtcctctcaattgcagagaagcttggcaaaactcctgcacaagtggcgttgcgctggaacattcagatgggtcacagtgtactgccaaagagcgtgagtgaagaacggataaagcagaaccttgctgtttatgactggtctattccagaagacttgcttgcaaagttctctgagattaagcaggccaggcttctcatgggcaacttcatcgtcaacaaagacagcgtttacaagacccacgatgagctctgggacggcgaaatctaggacggctcctgtcgtggctgggagcagggcgccttactagtgtcagtcacttgttatgtatcgtcaaactgtaagcttaagagatgtatggtggtttagccccactgtgggaggaactcttcagtagactgcatggatttgcccctttaggtatggattttctgctaaacccgcgtgttgccaatggaggcatgaacttatcctagcttgttcctgcgactgggatcacctgttctgtaccgattgttggtttgctggtgtaattgtgttcctccaaagaagttgctccacacatgataataaagctggggccgtttgtttgc

SEQ ID NO: 16003 - protein, 339 aa, Glycine max
FFRPLPSSVVCERLQVTASVCGWCLGAGMATHFVLNTGAKIPSVGLGTWQSDPGIVGEAVYAAVKAGYRHIDCARAYNNEKEVGLALKKLFEESVVKREDLFITSKLWCGHHAPEDVPEALGDSLDDLQLDYLDLYLIHWPFRVRKGTSIGNPENFLPPDIPATWGAMEKLHDAGKARAIGVSNFASKKLGDLLAVARIPPAVDQVECHPGWQQSKLHTFCQSAGVHLSAYSPLGSPGSTWMNGNVLKEPVVLSIAEKLGKTPAQVALRWNIQMGHSVLPKSVSEERIKQNLAVYDWSIPEDLLAKFSEIKQARLLMGNFIVNKDSVYKTHDELWDGEI

SEQ ID NO: 16004 - protein, 311 aa, Glycine max
MATHFVLNTGAKIPSVGLGTWQSDPGIVGEAVYAAVKAGYRHIDCARAYNNEKEVGLALKKLFEESVVKREDLFITSKLWCGHHAPEDVPEALGDSLDDLQLDYLDLYLIHWPFRVRKGTSIGNPENFLPPDIPATWGAMEKLHDAGKARAIGVSNFASKKLGDLLAVARIPPAVDQVECHPGWQQSKLHTFCQSAGVHLSAYSPLGSPGSTWMNGNVLKEPVVLSIAEKLGKTPAQVALRWNIQMGHSVLPKSVSEERIKQNLAVYDWSIPEDLLAKFSEIKQARLLMGNFIVNKDSVYKTHDELWDGEI

SEQ ID NO: 16005 - protein, 172 aa, Glycine max
MEKLHDAGKARAIGVSNFASKKLGDLLAVARIPPAVDQVECHPGWQQSKLHTFCQSAGVHLSAYSPLGSPGSTWMNGNVLKEPVVLSIAEKLGKTPAQVALRWNIQMGHSVLPKSVSEERIKQNLAVYDWSIPEDLLAKFSEIKQARLLMGNFIVNKDSVYKTHDELWDGEI

SEQ ID NO: 16006 - DNA, 982 bp, Glycine max
atttttctatttccgtctctcgcttgtgctgccttcgtttgcgtttttatcacagaggaattaacatatatatagcaagcatggcagtcacactctacgaccttagctcttcctctgggttgaagaaacttgatgagtaccttctcccacgcagttacatcaccgggtaccaagctacaaaggatgatcttactgtttatgcagctttgccaactgctccatcagatgaatatggaaatgtttccaggtggtacaagcacattgatgctttgttgagaatctctggtgttactggcgagggatctggtgttattgttgagggatctctagttgcagagcctgttgcaactccccctgctgcagacacaaaggctgctgttgctgaggatgacgatgatgatgatgtggatttgttcggtgaagagacagaagaagagaagaaggcagcagaggaacgggcagctgcagtgaaggcatctacaaaaaaaaaagagtctgggaaatcatctgttctgttggatgtgaaaccatgggacgatgaaactgacatgaagaagctcgaagaagcagtgagatctgttcagatggaagggttgctttggggtgcatccaaacttgtacctgttgggtacggtatcaagaaactgcaaattatgcttactattgtggatgacctagtttctgttgatactcttattgaggaacatctcacagttgagcccatcaatgaatatgtccagagttgtgacattgtggccttcaataaaatataaactacaattgtgggacttggagatcatggcaacgggaggaattgcaagttttaaaaactatgatattgggaaactaccctgaattgagaatttttgtctttagaaacccgcttgttatttgtttttatatatcagtctttgtgatgtcatcggctatttggataataatcatctttcctttgttgtgtcatccgtattatttggatagt

SEQ ID NO: 16007 - protein, 256 aa, Glycine max
FSISVSRLCCLRLRFYHRGINIYIASMAVTLYDLSSSSGLKKLDEYLLPRSYITGYQATKDDLTVYAALPTAPSDEYGNVSRWYKHIDALLRISGVTGEGSGVIVEGSLVAEPVATPPAADTKAAVAEDDDDDDVDLFGEETEEEKKAAEERAAAVKASTKKKESGKSSVLLDVKPWDDETDMKKLEEAVRSVQMEGLLWGASKLVPVGYGIKKLQIMLTIVDDLVSVDTLIEEHLTVEPINEYVQSCDIVAFNKI

SEQ ID NO: 16008 - protein, 230 aa, Glycine max
MAVTLYDLSSSSGLKKLDEYLLPRSYITGYQATKDDLTVYAALPTAPSDEYGNVSRWYKHIDALLRISGVTGEGSGVIVEGSLVAEPVATPPAADTKAAVAEDDDDDDVDLFGEETEEEKKAAEERAAAVKASTKKKESGKSSVLLDVKPWDDETDMKKLEEAVRSVQMEGLLWGASKLVPVGYGIKKLQIMLTIVDDLVSVDTLIEEHLTVEPINEYVQSCDIVAFNKI

SEQ ID NO: 16009 - DNA, 591 bp, Glycine max
caaggtatgtccataggtatggatgaagcattcacaatgttttgtgagggatgctcaccttatggtcctttctgggaccgctatcttgagtactggaaagaaagcttggccaggccagatgaagttatgtttttgaggtatgaggagattgtgtctgatacaccgaaggttatcaggaagctagcaagcttcctcagagtcccgtttacccaggaggaagatagcaatggagtggtggagcaagttgaggatttatgcggcttcacatcactgagcaacatcgcggccaatcgaccaagtcgtgttcaacatgagcatgcaggagataagctcgttgttgatcccacttcactatttaggaaagggaaggttggggattgggtgaaccacatgagcaaggacatgggagacagaatggaccaacttgtggctgagaaattcaaaggttcaggtctcatattctaacgtgtgtgcttgttgtatcgtctatgtatgattgatccctatgaatttaccgcatgtgtctcctttatttttcgtactgtatcgagtaagctttatttatttaaataaaacatatttactatttcg

SEQ ID NO: 16010 - protein, 154 aa, Glycine max
QGMSIGMDEAFTMFCEGCSPYGPFWDRYLEYWKESLARPDEVMFLRYEEIVSDTPKVIRKLASFLRVPFTQEEDSNGVVEQVEDLCGFTSLSNIAANRPSRVQHEHAGDKLVVDPTSLFRKGKVGDWVNHMSKDMGDRMDQLVAEKFKGSGLIF

SEQ ID NO: 16011 - protein, 152 aa, Glycine max
MSIGMDEAFTMFCEGCSPYGPFWDRYLEYWKESLARPDEVMFLRYEEIVSDTPKVIRKLASFLRVPFTQEEDSNGVVEQVEDLCGFTSLSNIAANRPSRVQHEHAGDKLVVDPTSLFRKGKVGDWVNHMSKDMGDRMDQLVAEKFKGSGLIF

SEQ ID NO: 16012 - protein, 148 aa, Glycine max
MDEAFTMFCEGCSPYGPFWDRYLEYWKESLARPDEVMFLRYEEIVSDTPKVIRKLASFLRVPFTQEEDSNGVVEQVEDLCGFTSLSNIAANRPSRVQHEHAGDKLVVDPTSLFRKGKVGDWVNHMSKDMGDRMDQLVAEKFKGSGLIF

SEQ ID NO: 16013 - DNA, 666 bp, Glycine max
ttactgtggatatggtgattcatgtaagtttatgcatgattgaggggactacaagtctgggtggcagatggagaaggaatgggaagaagctgagaaagcaaggaagatgagattggctgcaggagaggatgcagatgaggagggtgctaatttgactgatgaagatgatgaggattctttaccatttgcctgtttcatttgtagaaacacttttgtggatcctgtagtaaccaagtgcaagcactacttctgcgagcattgtgcattgaagcatcatgcaaagaataagaagtgttttgtctgcaaccagccaactcttggcatttttaacgttgctcatgagatacgcaggaagatggccgaggataaatcataaaaatgtctctctaggatccatggatctctttacttcatggaagttatcttttctcccccatgttagtttcatgttaaagattgatgctatgtaatgagttgaaaacataccagaagtttgcacagtggaattagttgattcattttgttgtatttctttgccttatagattccagaatatctaatggtgagagacatttatgatatacccgtttgtatatagggtcatactgtggttctttttacagtagtttgttaccaaataaattttgaatagagcgacctttactc

SEQ ID NO: 16014 - protein, 102 aa, Glycine max
MEKEWEEAEKARKMRLAAGEDADEEGANLTDEDDEDSLPFACFICRNTFVDPVVTKCKHYFCEHCALKHHAKNKKCFVCNQPTLGIFNVAHEIRRKMAEDKS

SEQ ID NO: 16015 - protein, 89 aa, Glycine max
MRLAAGEDADEEGANLTDEDDEDSLPFACFICRNTFVDPVVTKCKHYFCEHCALKHHAKNKKCFVCNQPTLGIFNVAHEIRRKMAEDKS

SEQ ID NO: 16016 - protein, 64 aa, Glycine max
MQRIRSVLSATSQLLAFLTLLMRYAGRWPRINHKNVSLGSMDLFTSWKLSFLPHVSFMLKIDAM

SEQ ID NO: 16017 - DNA, 1035 bp, Glycine max
ccagtcatcctcagttacttcaccacggtgctaactacctagcgctgcaccaaccaaccagtagtcaattaagcagcgcttgaccatggcgcccaagcagctccccgctgtcctcctcgccgcctgcgccaccgtcctggccctcgccgcgccattgctcgccggcgaccccgacatgctccaggacttctgcgtcgccgactacaaatccctcgacggcccattgcggttgaacgggttcccgtgcaagaggccggagaacgtgacggcggacgacttcttctcctccgcgctggcactcccgggcaacaccggcaaccccgtcgggtctgcggtcacggcggcgaacgtggagaagctcccggggctcaacacgctgggcgtctccatgtcccgcgtggactacgcgccctggggcgtgaacccgccgcacacccacccacgtgccaccgagatcatctacgtgcttgagggctccctcgacgtcggcttcgtcaccactgccggcaagctcttcgcccgcaccgtctgcaagggcgagctcttcgtctttccccgcggcctcgtccactaccagaagaacaacggcggcgcgccggccatggcgatctcggcattcaacagtcagcttccgggcacgcagtccctcgccgtggcgatgttcggtgcctcaccaccggtgcccaccgacgtgctggccagggcgctccagatcgacggcggcctggtggagaccatcaagtccaagttcccgccaaagtaactagccttgcatttgcatgcatgaggttggttgggtctgttctacgtgcgtacgtgctgctaataatgacgacgaccaagtgcagtttcaattcatttgcttgacaatatcttttgtaccatactctgatcgattcctttgtgtcggtgcatgtttagtgaagggtgtcgcctgttttactgttaattgttgctttttgttcacgaatgagctaccggtgattaatttgtatgtgtccattattgctgaaaatgaatgtgccttattgcttt

SEQ ID NO: 16018 - protein, 225 aa, Glycine max
MAPKQLPAVLLAACATVLALAAPLLAGDPDMLQDFCVADYKSLDGPLRLNGFPCKRPENVTADDFFSSALALPGNTGNPVGSAVTAANVEKLPGLNTLGVSMSRVDYAPWGVNPPHTHPRATEIIYVLEGSLDVGFVTTAGKLFARTVCKGELFVFPRGLVHYQKNNGGAPAMAISAFNSQLPGTQSLAVAMFGASPPVPTDVLARALQIDGGLVETIKSKFPPK

SEQ ID NO: 16019 - protein, 195 aa, Glycine max
MLQDFCVADYKSLDGPLRLNGFPCKRPENVTADDFFSSALALPGNTGNPVGSAVTAANVEKLPGLNTLGVSMSRVDYAPWGVNPPHTHPRATEIIYVLEGSLDVGFVTTAGKLFARTVCKGELFVFPRGLVHYQKNNGGAPAMAISAFNSQLPGTQSLAVAMFGASPPVPTDVLARALQIDGGLVETIKSKFPPK

SEQ ID NO: 16020 - protein, 124 aa, Glycine max
MSRVDYAPWGVNPPHTHPRATEIIYVLEGSLDVGFVTTAGKLFARTVCKGELFVFPRGLVHYQKNNGGAPAMAISAFNSQLPGTQSLAVAMFGASPPVPTDVLARALQIDGGLVETIKSKFPPK

SEQ ID NO: 16021 - DNA, 1124 bp, Glycine max
agggagtaaaaagataaaagataaatatactccagatccgccaccgccgcgtgctatttcttccatccgcctccgtgttgcagcgggacatcggcggccattatttgatccgcggcaggcgcgtcccagccctgcgccgtcttctagtctagaatggcgggcgtcgggtcggcggtgcggcggctctacctctccgtctacaactgggtcgtcttcgtcggatgggcgcaggtgctctactacgcggtgacggcgctgctggccggcggccatgagggcgtctacgccgccgtcgagcgcccgctgcagctcgcgcagaccgccgccgtcatggagattcttcatgggctcgtagggttggtgaggtctccggtcactgcaactcttccacaaataggatcgaggttgtttcttacatggggcatcctgtggagctttcctgagacacaatctcatattcttgtaacttctttggtcataagctggtccatcaccgagatcattagatattctttcttcggcttgaaggagatgcttggatttgcaccttcttggcttttatggcttaggtatagcacatttctgatattgtatcctatcggtatccttagcgaagttggtctaatctacattgctctgccttatatgaaggtatctgaaaaatactttgttaaaatgcctaacaaatggaatttctccttcgactacttctacacatgtgttatcgccattggtgtctatgttccaggtgggccgcacatgttcacgtacatgcttgcccagaggaagaaggccctgtcaaaggcaaagactgcatgaagttgatgtgagccttatagttggagcatgcaatgcaaaccctgcagtctcatgttgtacgaatagtcggtgtgagttgtcattgttagacatgaattacccggcatgtgttgtaacgatgatgattgttggatttctcatggttgaattaatcattgatcaacctctgcattgagacaatgattatgaccatcagataaaaacaatattcatctttggaagtgctcatccattatgagccaatgacaagatctcatcttaacaaggaaaactttgtggagcaaatggtacactggttattccag

SEQ ID NO: 16022 - protein, 221 aa, Glycine max
MAGVGSAVRRLYLSVYNWVVFVGWAQVLYYAVTALLAGGHEGVYAAVERPLQLAQTAAVMEILHGLVGLVRSPVTATLPQIGSRLFLTWGILWSFPETQSHILVTSLVISWSITEIIRYSFFGLKEMLGFAPSWLLWLRYSTFLILYPIGILSEVGLIYIALPYMKVSEKYFVKMPNKWNFSFDYFYTCVIAIGVYVPGGPHMFTYMLAQRKKALSKAKTA

SEQ ID NO: 16023 - protein, 162 aa, Glycine max
MEILHGLVGLVRSPVTATLPQIGSRLFLTWGILWSFPETQSHILVTSLVISWSITEIIRYSFFGLKEMLGFAPSWLLWLRYSTFLILYPIGILSEVGLIYIALPYMKVSEKYFVKMPNKWNFSFDYFYTCVIAIGVYVPGGPHMFTYMLAQRKKALSKAKTA

SEQ ID NO: 16024 - DNA, 649 bp, Glycine max
cacacttctagcaccccaatacaatgactttgcacctacctctctccctatttaaaacttcaatacacttcattgtgagtgtattttaatcttctttatcttcattcattggttctctctaaccaaccctctcttttcctaaatcctaattaaacacccctcaaccaaaaaaagcatgaagaagctcaatctaatactcagtaagtgcaagaacttgtcaaagcatctaggaagatcttcatcatttaatagcctaaggtccaagtttgctaaggaagacttatgggaaggaaatggcatgcaagaaggtgaacattgtgaaactgtatttgttggcagcacaaggaaacggtacgtgataagctccaagtatttgaaccatcctctcctcaaagctctcatcaacaattccaagcaaaagggcagtgatgaaagtgttttggtggtcaactgtgaggtggttctctttgatcatctactgtggatgctagaaaatgcagatcctaagtttggttctgactctttggaggaattggctgaactctatgtgttttaagagctttcaaagtgctaattgcatgcagatgcctaatgtatgaaaatatgtatgttgggttgtgcttgcatttttcagaatgttattgttaag

SEQ ID NO: 16025 - protein, 126 aa, Glycine max
MKKLNLILSKCKNLSKHLGRSSSFNSLRSKFAKEDLWEGNGMQEGEHCETVFVGSTRKRYVISSKYLNHPLLKALINNSKQKGSDESVLVVNCEVVLFDHLLWMLENADPKFGSDSLEELAELYVF

SEQ ID NO: 16026 - protein, 85 aa, Glycine max
MQEGEHCETVFVGSTRKRYVISSKYLNHPLLKALINNSKQKGSDESVLVVNCEVVLFDHLLWMLENADPKFGSDSLEELAELYVF

SEQ ID NO: 16027 - DNA, 849 bp, Glycine max
acccacactgatagcaacaaacatccacctaaaatgaagctgcacgtagccttcttcctcctggtagccatggccgcgacggcccgggccgtgacgttcgacgcgtcgaacacggcgtcgggcaccaccggcggcaagcgcttcgacaacgccgtcggcctcgcgtactcaaagcaggtcctctccgacgcctccaccttcatctggagcaccttcaaccagcgcgccgctgccgaccgcaagcccgtcgacgcggtcaccctcgtcgtggaggacatcgacggcgtcgccttcaccagcggcaacggcatccacctcagcgctagctacgtcggcggctacacctccggcgacgtcaagaaggaggtgaccggcgtgctgtaccacgaggcgacgcacgtgtggcagtggaacgggcagggcgcggcgaacggcggcctcatcgaggggatcgccgactacgtgcggctcaaggccgggctcgcgcctgggcactggaggccgcgggggagcggcagccggtgggatgaggggtacgacatcacggcgaggttcctcgactactgcgactcgctcaagcctgggttcgtcgcgcagctcaacgccaagatgaagagcgggtacagcgacgacttcttcgcgcagattctcggcaagaacgtgcagcagctgtggcaggactacaaagccaagttcggaggctgaatgggcttttgccttttagtcatctctcttgcacggtgtgatggcatagcaccctatacatattgaaataatcaacaagacatgtgctttacgttgtaatgaaatttaaataaaggattttgctaattcgaattgacgcgattg

SEQ ID NO: 16028 - protein, 234 aa, Glycine max
THTDSNKHPPKMKLHVAFFLLVAMAATARAVTFDASNTASGTTGGKRFDNAVGLAYSKQVLSDASTFIWSTFNQRAAADRKPVDAVTLVVEDIDGVAFTSGNGIHLSASYVGGYTSGDVKKEVTGVLYHEATHVWQWNGQGAANGGLIEGIADYVRLKAGLAPGHWRPRGSGSRWDEGYDITARFLDYCDSLKPGFVAQLNAKMKSGYSDDFFAQILGKNVQQLWQDYKAKFGG

SEQ ID NO: 16029 - protein, 223 aa, Glycine max
MKLHVAFFLLVAMAATARAVTFDASNTASGTTGGKRFDNAVGLAYSKQVLSDASTFIWSTFNQRAAADRKPVDAVTLVVEDIDGVAFTSGNGIHLSASYVGGYTSGDVKKEVTGVLYHEATHVWQWNGQGAANGGLIEGIADYVRLKAGLAPGHWRPRGSGSRWDEGYDITARFLDYCDSLKPGFVAQLNAKMKSGYSDDFFAQILGKNVQQLWQDYKAKFGG

SEQ ID NO: 16030 - protein, 211 aa, Glycine max
MAATARAVTFDASNTASGTTGGKRFDNAVGLAYSKQVLSDASTFIWSTFNQRAAADRKPVDAVTLVVEDIDGVAFTSGNGIHLSASYVGGYTSGDVKKEVTGVLYHEATHVWQWNGQGAANGGLIEGIADYVRLKAGLAPGHWRPRGSGSRWDEGYDITARFLDYCDSLKPGFVAQLNAKMKSGYSDDFFAQILGKNVQQLWQDYKAKFGG

SEQ ID NO: 16031 - DNA, 944 bp, Glycine max
acagattggcagattcccttttcgccttcccctgagcccgatcgagcaagccaatggagaagcaagccgacaaggccgcggcgccggtcgacgacggcatccacgaggagtcgccggcctccgcccagaacgggaggcccggatccgagccggcggccgcacccgaggtggaggtgcagctcttccggcggggccgggggccggtggccgtgttccggtcacccctgggcgggtacacgcaggaccagctggaggtgggggacatcctggagaagcacggcctcaagtgcgtcttcgccttcgacgccgcctcccgcgcacgcggcgtcgccatccgattcaacccccgcaacggccgctccctcctcccctacgccgccgactccaccatcttcctcgacggcgagcccaaggatcctttgctgaagcccatcaccaaggtgatgctcactgtctgcgccatgacagtggtagctgcggtgatactgaaggaggcgaagatgcccgagtggcttaagggaaccaagctaggcaacctgaaattcccaccgtgggtgctggcttgcatggtcattgtgttcatgaggctccggaagagaaccagggatgtcatgaagaagattggctggtcctcctgagaaggttactaatggcaagcacacttttggcccctccttccagtttgccgtcaatgttggagatgtactgggcagtgacatactacatgtaaatgttcagaacaaatgcatcttatagatcacttatatttgaccttatgtttagcatatacacgacgcggtttgccagtgtggcatttttgcttgtagcaagtgtgcatgaataaatgtagccgaacaaactggtgtgcactctgtttctgtgaagattttgttcactgacccttgatggtgctttaacgagaaatttaactgctaaattatttc

SEQ ID NO: 16032 - protein, 194 aa, Glycine max
MEKQADKAAAPVDDGIHEESPASAQNGRPGSEPAAAPEVEVQLFRRGRGPVAVFRSPLGGYTQDQLEVGDILEKHGLKCVFAFDAASRARGVAIRFNPRNGRSLLPYAADSTIFLDGEPKDPLLKPITKVMLTVCAMTVVAAVILKEAKMPEWLKGTKLGNLKFPPWVLACMVIVFMRLRKRTRDVMKKIGWSS

SEQ ID NO: 16033 - protein, 171 aa, Glycine max
QIGRFPFRLPLSPIEQANGEASRQGRGAGRRRHPRGVAGLRPEREARIRAGGRTRGGGAALPAGPGAGGRVPVTPGRVHAGPAGGGGHPGEARPQVRLRLRRRLPRTRRRHPIQPPQRPLPPPLRRRLHHLPRRRAQGSFAEAHHQGDAHCLRHDSGSCGDTEGGEDARVA

SEQ ID NO: 16034 - protein, 141 aa, Glycine max
TDWQIPFSPSPEPDRASQWRSKPTRPRRRSTTASTRSRRPPPRTGGPDPSRRPHPRWRCSSSGGAGGRWPCSGHPWAGTRRTSWRWGTSWRSTASSASSPSTPPPAHAASPSDSTPATAAPSSPTPPTPPSSSTASPRILC

SEQ ID NO: 16035 - DNA, 795 bp, Glycine max
  misc_feature (133)..(133): n is a, c, g, or t
acctggacatccagacccgcgcgcccgtcccctctaacaacagatcaaccgatccttgaaaagtccaccctccaccacgggcaacaccatgtcgagcaccggcgcgtcgggcccggacgccgacgcggcggcnggcgaggggctggagctggcgcagttcggggcgggctgcttctggagcgtggagctggcgtaccagcggctccccggcgtggcgcgcaccgaggtgggctactcgcaggggcacctcgacgggcccacctaccgcgacgtgtgcggcggcggcaccggccacgccgaggtggtgcgcgtgcactacgaccccaaggagtgcccctacgccgtgcttctcgacgtcttctgggccaagcacaaccccaccacgctcaacaagcagggcaacgacgtcgggacgcagtaccggtcgggcatctactactacacggcggagcaggagcggcaggcgcgggagtcgctggcggagaagcagcgggagtggaaggagaagatcgtgacggaggtcctcccggcgaggaggttctacgcggccgaggactaccaccagcagtacctcgagaagggcggccagtccgccaagaagcgctgctccgaccccatccgctgctacggctgaaaccactgcccccgtccccgaccgcctaagctattggtgctgcattgccagtagcatcataaaggacaccgtctacctgactgttgttgttgttacaataaacaaacccattcgtgcagcgttttaaggtgaggtctggcactttgtttgctcgatgatct

SEQ ID NO: 16036 - protein, 220 aa, Glycine max
  misc_feature (45)..(45): Xaa can be any naturally occurring amino acid
TWTSRPARPSPLTTDQPILEKSTLHHGQHHVEHRRVGPGRRRGGXRGAGAGAVRGGLLLERGAGVPAAPRRGAHRGGLLAGAPRRAHLPRRVRRRHRPRRGGARALRPQGVPLRRASRRLLGQAQPHHAQQAGQRRRDAVPVGHLLLHGGAGAAGAGVAGGEAAGVEGEDRDGGPPGEEVLRGRGLPPAVPREGRPVRQEALLRPHPLLRLKPLPPSPTA

SEQ ID NO: 16037 - protein, 181 aa, Glycine max
  misc_feature (15)..(15): Xaa can be any naturally occurring amino acid
MSSTGASGPDADAAXGEGLELAQFGAGCFWSVELAYQRLPGVARTEVGYSQGHLDGPTYRDVCGGGTGHAEVVRVHYDPKECPYAVLLDVFWAKHNPTTLNKQGNDVGTQYRSGIYYYTAEQERQARESLAEKQREWKEKIVTEVLPARRFYAAEDYHQQYLEKGGQSAKKRCSDPIRCYG

SEQ ID NO: 16038 - DNA, 954 bp, Glycine max
ataccgggttgggtctcgtagtcgttggatgagagcttgggacagtggaggagcatgacggtgatggagctcaaggcgctaccgctcggtttcaggttccaccccaccgacgaggagctcgtcaggcactacctcaaggggaagatcacggggcagatcaagaacgaggtcgaggtgatcccggagatcgacgtctgcaagtgcgagccgtgggacctcccagataaagctttgatccgctcggaggatccagagtggttcttctttgcaccaaaggaccgcaagtatcccaatggaagcaggtcaaacagggcgacggaggctgggtactggaaggccaccgggaaggacagggtcatcaagtccaagggcgagaagaagaagcagcatatgattggcatgaagaagacccttgtgttccaccgaggacgtgccccgaaaggggagcgcactggttggattatgcacgagtaccgcaccaccgagccagagtttgagtctggcgagcagggtggttatgttctctaccgcctatttcaaaagcaattggagaaaactgagcgctccattccagaggaaatggatagaagtggctactctcccactccatctcgttcaactcctgacaacatggaagcaaacgaggaagctatcacactcataaataaggaatttcctgaatctggtctgcatggatgtccaattgagttgccaggtaccattgatactccgggcacaccagttacaaggtggcttgcagaccgaaatggcaattcggggatagatgaagcaaatgttttaggcatgccttttcatggtaatgtcgatgaaagtccgaaggctgatatgccggttggctctttggctcacctaattgattcacagacgaaaaatctcgggtctcatgaatttgcaaccgtttccgcccccatgttatcgcttgatgatgtggat

SEQ ID NO: 16039 - protein, 300 aa, Glycine max
MTVMELKALPLGFRFHPTDEELVRHYLKGKITGQIKNEVEVIPEIDVCKCEPWDLPDKALIRSEDPEWFFFAPKDRKYPNGSRSNRATEAGYWKATGKDRVIKSKGEKKKQHMIGMKKTLVFHRGRAPKGERTGWIMHEYRTTEPEFESGEQGGYVLYRLFQKQLEKTERSIPEEMDRSGYSPTPSRSTPDNMEANEEAITLINKEFPESGLHGCPIELPGTIDTPGTPVTRWLADRNGNSGIDEANVLGMPFHGNVDESPKADMPVGSLAHLIDSQTKNLGSHEFATVSAPMLSLDDVD

SEQ ID NO: 16040 - protein, 297 aa, Glycine max
MELKALPLGFRFHPTDEELVRHYLKGKITGQIKNEVEVIPEIDVCKCEPWDLPDKALIRSEDPEWFFFAPKDRKYPNGSRSNRATEAGYWKATGKDRVIKSKGEKKKQHMIGMKKTLVFHRGRAPKGERTGWIMHEYRTTEPEFESGEQGGYVLYRLFQKQLEKTERSIPEEMDRSGYSPTPSRSTPDNMEANEEAITLINKEFPESGLHGCPIELPGTIDTPGTPVTRWLADRNGNSGIDEANVLGMPFHGNVDESPKADMPVGSLAHLIDSQTKNLGSHEFATVSAPMLSLDDVD

SEQ ID NO: 16041 - protein, 188 aa, Glycine max
MIGMKKTLVFHRGRAPKGERTGWIMHEYRTTEPEFESGEQGGYVLYRLFQKQLEKTERSIPEEMDRSGYSPTPSRSTPDNMEANEEAITLINKEFPESGLHGCPIELPGTIDTPGTPVTRWLADRNGNSGIDEANVLGMPFHGNVDESPKADMPVGSLAHLIDSQTKNLGSHEFATVSAPMLSLDDVD

SEQ ID NO: 16042 - DNA, 1050 bp, Glycine max
atctatctggagtctacctaatcccctccccggcactccccgcctgacaaccgcggccatggcgtgcgccttctccgcctccaccgtgtccacggcggccgcgctcgtcgcgtccccgaagccagccggggcgccgcagtgcctgtcgtttccccgcgccatcgcaggcgccgccgccaggccttcccgcctcgccgccgccagctcgaggacggccagggcccgcagcttcgtcgcccgcgcctcagcggagtacgacctgccgctggtggggaacaaagcaccggacttcgccgcggaggccgtgttcgaccaggagttcatcaacgtcaagctatctgattacattgggaagaagtatgtgattcttttcttctaccctctggacttcaccttcgtctgcccaactgagattacggctttcagcgacagacatgaggagttcgagaagataaacactgaaattcttggtgtttcagttgatagtgtgttttcccatcttgcatgggtgcagacagagaggaaatctggtggacttggtgatctgaaatatccgctggtttctgacgtcaccaaatcaatctcaaagtcttttggtgtattgatccctgatcagggaattgctctgagaggattattcatcattgacaaggagggtgtgattcagcattccactattaacaaccttggtattggccgtagtgtggatgagaccttgagaacccttcaggctctgcaatacgtccaagaaaacccagacgaggtctgcccggcgggatggaaacctggggaaaagtcgatgaagcctgaccccaagggcagcaaggagtacttcgctgctatctagatgtgtccttgtcctttgcactcgctgtcagttttgtcatggccgtttcttggttacatgtgtttttgtgacccgagttgtagttatcatgcgtacaattgactctgtaatttctgcaataagggtttgtctgtgtgtggattttccctgctccaatttggaaagaacaatacaagattggaaataaaatcttatcttatgtc

SEQ ID NO: 16043 - protein, 281 aa, Glycine max
SIWSLPNPLPGTPRLTTAAMACAFSASTVSTAAALVASPKPAGAPQCLSFPRAIAGAAARPSRLAAASSRTARARSFVARASAEYDLPLVGNKAPDFAAEAVFDQEFINVKLSDYIGKKYVILFFYPLDFTFVCPTEITAFSDRHEEFEKINTEILGVSVDSVFSHLAWVQTERKSGGLGDLKYPLVSDVTKSISKSFGVLIPDQGIALRGLFIIDKEGVIQHSTINNLGIGRSVDETLRTLQALQYVQENPDEVCPAGWKPGEKSMKPDPKGSKEYFAAI

SEQ ID NO: 16044 - protein, 262 aa, Glycine max
MACAFSASTVSTAAALVASPKPAGAPQCLSFPRAIAGAAARPSRLAAASSRTARARSFVARASAEYDLPLVGNKAPDFAAEAVFDQEFINVKLSDYIGKKYVILFFYPLDFTFVCPTEITAFSDRHEEFEKINTEILGVSVDSVFSHLAWVQTERKSGGLGDLKYPLVSDVTKSISKSFGVLIPDQGIALRGLFIIDKEGVIQHSTINNLGIGRSVDETLRTLQALQYVQENPDEVCPAGWKPGEKSMKPDPKGSKEYFAAI

SEQ ID NO: 16045 - DNA, 917 bp, Glycine max
gcagttcccaaggcagagagagacgaaacagttagagagaagttgagagagagagagagagagtgcttccatggaatccgaacccacggttggtgtctctgcatcagcaccaccaccaccagccaccgatgatctccaatcgagcaacgcatcgtctccagccgacgccgccgcgcgtttgatccacgccgtggagcagcgccaacagcatcttctcgacaagacggtgcctcacgttctctaccgatggatcgcctgcctcgtcgtcgtgttgatctacttcgttcgcgtctacttggtggaaggcttctacatcatcacctacgcaatcggaatctaccttctcaacctcatcatcgctttcctctcccctcaagaagatcccgaggcttcgctcagcggcgggacgcttcctactcgtagatccgatgagtatcgaccgttcgttcgccgtctccccgagttcaaattctggttatcgatcattagggcatttgtcatcggttttatgatgacgttctttgaggtctttgacgtacctgttttctggccaatacttcttttctactgggtgatgctttttatcctcaccatgaggaaacagatacaacatatgatcaaatacagatatgttcctttctctttcggcaaacagaaatatggaaagaaacctgctccagcagagagcagtgaatgatcaaatcaaccgttctgttcagcaggtcttttcttttcttttgattgcctgaaactttgttagggatgaaatagaagaaacaatcaagcaggtagactctcgtagcctgtctcagacaagttttttttactcttttatcatcctgactatgtactggtttcacccgaagacaatgtatcttattattccagttttttgtcagtgagaataatgttttttt

SEQ ID NO: 16046 - protein, 208 aa, Glycine max
MESEPTVGVSASAPPPPATDDLQSSNASSPADAAARLIHAVEQRQQHLLDKTVPHVLYRWIACLVVVLIYFVRVYLVEGFYIITYAIGIYLLNLIIAFLSPQEDPEASLSGGTLPTRRSDEYRPFVRRLPEFKFWLSIIRAFVIGFMMTFFEVFDVPVFWPILLFYWVMLFILTMRKQIQHMIKYRYVPFSFGKQKYGKKPAPAESSE

SEQ ID NO: 16047 - DNA, 1170 bp, Glycine max
aaagcatacatagctcagcctcccagcccgacctgctcagtgcgctggtacactacccccacaagctcgaagaagcggtggtgctttgacatggctcctctttcgtccaaggccgttgcactcgttgcactgtcctccctcctcgtcacctacgcctctgccggcgccgggaacttcaacgactccgccttcaccgccgaccccaactgggaggacgccagggccacctggtacggcgcgcccaccggcgccggccccgacgacgacggcggtgcgtgcgggttcaagaacaccaaccagtaccccttctcctccatgacatcctgcggcaacgagcccatcttcaaggacggcaaggggtgcggctcctgctaccagatacggtgcaccaacgaccagtcctgctccggcaacccggaggacggtggtcatcaccgacatgaactactacccggttgccaagtaccacttcgacctgagcggcaccgcgttcggcgccatggccaagcccggcctcagcgagaagctccgccactcgggcatcatcgacatccagttcaagagagtgccgtgcgagttccccggtctcaaggtgaccttccacgtggagcaggggtcgaacccggtgtacttcgcggtgctggtggagtacgaggacggcgacggcgacgtggtgcaggtggacctcatggaggccaactccgggacgtggacgccgatgcgcgagtcgtggggatccatctggcggctggactccggccaccgcctccaggcgcccttctccatgcgcatcaccaacgagtccggcaagacgctggtggccgacaaggtcatcccggccaactgggcgcccagcaccttctaccgctccatcgtccagtacagctgaagctgctcatcatctggaatcatggcatgcattggcttgatttggtatctgtactatcatggatcgttttgcatgggtacgtactaccgaggaggtttttgattaaggttaaggttgggtcgtcgatcgggtgtcatgtaggcgtcgtcgtgcatgtgtgtgtcgaatacgtcggtgggatatggaggaggggcacttttgcatgtgcactcccgcgcccactgtcactgtaccagtgtgtaagcagaccataagttattactgtttgtgtgcactcctgc

SEQ ID NO: 16048 - protein, 380 aa, Glycine max
KAYIAQPPSPTCSVRWYTTPTSSKKRWCFDMAPLSSKAVALVALSSLLVTYASAGAGNFNDSAFTADPNWEDARATWYGAPTGAGPDDDGGACGFKNTNQYPFSSMTSCGNEPIFKDGKGCGSCYQIRCTNDQSCSGNPEDGGHHRHELLPGCQVPLRPERHRVRRHGQARPQREAPPLGHHRHPVQESAVRVPRSQGDLPRGAGVEPGVLRGAGGVRGRRRRRGAGGPHGGQLRDVDADARVVGIHLAAGLRPPPPGALLHAHHQRVRQDAGGRQGHPGQLGAQHLLPLHRPVQLKLLIIWNHGMHWLDLVSVLSWIVLHGYVLPRRFLIKVKVGSSIGCHVGVVVHVCVEYVGGIWRRGTFACALPRPLSLYQCVSRP

SEQ ID NO: 16049 - protein, 350 aa, Glycine max
MAPLSSKAVALVALSSLLVTYASAGAGNFNDSAFTADPNWEDARATWYGAPTGAGPDDDGGACGFKNTNQYPFSSMTSCGNEPIFKDGKGCGSCYQIRCTNDQSCSGNPEDGGHHRHELLPGCQVPLRPERHRVRRHGQARPQREAPPLGHHRHPVQESAVRVPRSQGDLPRGAGVEPGVLRGAGGVRGRRRRRGAGGPHGGQLRDVDADARVVGIHLAAGLRPPPPGALLHAHHQRVRQDAGGRQGHPGQLGAQHLLPLHRPVQLKLLIIWNHGMHWLDLVSVLSWIVLHGYVLPRRFLIKVKVGSSIGCHVGVVVHVCVEYVGGIWRRGTFACALPRPLSLYQCVSRP

SEQ ID NO: 16050 - protein, 275 aa, Glycine max
MTSCGNEPIFKDGKGCGSCYQIRCTNDQSCSGNPEDGGHHRHELLPGCQVPLRPERHRVRRHGQARPQREAPPLGHHRHPVQESAVRVPRSQGDLPRGAGVEPGVLRGAGGVRGRRRRRGAGGPHGGQLRDVDADARVVGIHLAAGLRPPPPGALLHAHHQRVRQDAGGRQGHPGQLGAQHLLPLHRPVQLKLLIIWNHGMHWLDLVSVLSWIVLHGYVLPRRFLIKVKVGSSIGCHVGVVVHVCVEYVGGIWRRGTFACALPRPLSLYQCVSRP

SEQ ID NO: 16051 - DNA, 1038 bp, Glycine max
acccagctcacaagcatctccctcacctccggcgaaaaacacaccagagctcacctctcccctcgcttcctcgcgaaaatgtcgactgaagtggctgccgctgacatcccggtgcctcaggtggaggtagccgccgacgccgccgttgacacaccggcggcgaagccggccaaggcgcccaaggcggccaaggccaagaagtccactggcccgaagaagccccgcgtcaccccggcccacccgtcctacgccgagatggtgtcggaggcgatcgccgccctgaaggagaggagcgggtcgagcaccatcgcgatcggcaagttcatcgaggataagcacaaggcgcacctcccggccaacttccgcaagatcctgctgacccagatcaagaagctcgtcgccgccggcaagctgaccaaggtcaagggctcctacaagctcgccaaggcccccgccgccgtcaagcccaagacggcgaccaagaagaagcccgccgccaagcccaaggccaaggcgccagccaagaagacggccgccaagtccccggccaagaaggccgccgcgaagcccaaggccaaggccccagccaaggccaaggccgtcgcgaagcccaaggcggcggcgaagccgaaggcggctgccaagcccaaggccaaggctgccgccaagaaggcgcctgctgctgcgaccccgaagaagcctgttgcccggaagccgcccaccaagagggcgacgccggtgaagaaggccgctccggccaagaagcccgcggccaagaaggccaagaagtagaggccgcttgacggacctagatgccctggcggtagtattgagtagcctaattctctgttcggtgttgtcggtcaagagcttcttgactgtcttgggcggcggtgggctgtaaatctgatctatctgtgccgggggtgtacccttgtcgaggaagagtggtatccatgggaatcagttgtactagtagtagtaaccagtgtaattgagtctttttattatcgcagcaatatccatgagttatttgcc

SEQ ID NO: 16052 - protein, 263 aa, Glycine max
TQLTSISLTSGEKHTRAHLSPRFLAKMSTEVAAADIPVPQVEVAADAAVDTPAAKPAKAPKAAKAKKSTGPKKPRVTPAHPSYAEMVSEAIAALKERSGSSTIAIGKFIEDKHKAHLPANFRKILLTQIKKLVAAGKLTKVKGSYKLAKAPAAVKPKTATKKKPAAKPKAKAPAKKTAAKSPAKKAAAKPKAKAPAKAKAVAKPKAAAKPKAAAKPKAKAAAKKAPAAATPKKPVARKPPTKRATPVKKAAPAKKPAAKKAKK

SEQ ID NO: 16053 - protein, 237 aa, Glycine max
MSTEVAAADIPVPQVEVAADAAVDTPAAKPAKAPKAAKAKKSTGPKKPRVTPAHPSYAEMVSEAIAALKERSGSSTIAIGKFIEDKHKAHLPANFRKILLTQIKKLVAAGKLTKVKGSYKLAKAPAAVKPKTATKKKPAAKPKAKAPAKKTAAKSPAKKAAAKPKAKAPAKAKAVAKPKAAAKPKAAAKPKAKAAAKKAPAAATPKKPVARKPPTKRATPVKKAAPAKKPAAKKAKK

SEQ ID NO: 16054 - protein, 178 aa, Glycine max
MVSEAIAALKERSGSSTIAIGKFIEDKHKAHLPANFRKILLTQIKKLVAAGKLTKVKGSYKLAKAPAAVKPKTATKKKPAAKPKAKAPAKKTAAKSPAKKAAAKPKAKAPAKAKAVAKPKAAAKPKAAAKPKAKAAAKKAPAAATPKKPVARKPPTKRATPVKKAAPAKKPAAKKAKK

SEQ ID NO: 16055 - DNA, 457 bp, Glycine max
atctatctgtatcttggagcgaagaaaaaaggagaaaggaagatcggagatggcatcgacagcggcgtttccgttctggagagcggcggggatgacttacatcacctactcaaacatttgtgcgaatctcgtgaggaactgtctcaaggagcctttcaaagccgaagccctaaatcgcgagaaggttcatttctcgctctccaaatgggctggcggaaagcctgagaaaccaattctgcgttctgacacgcctggtgtttgagatttgtaacgttttgatatcaagtttgaggttaataatggtgaggaatgcaagatattgtgtactctgcaacattttccttctttgacttttaagattgttaacaatggagtttgtgtgagacagacctcattccaatcttgaaacttgtgtgttattttcttgctttacctctaaactcttttatatttttcc

SEQ ID NO: 16056 - protein, 86 aa, Glycine max
SICILERRKKEKGRSEMASTAAFPFWRAAGMTYITYSNICANLVRNCLKEPFKAEALNREKVHFSLSKWAGGKPEKPILRSDTPGV

SEQ ID NO: 16057 - protein, 74 aa, Glycine max
IYLYLGAKKKGERKIGDGIDSGVSVLESGGDDLHHLLKHLCESREELSQGAFQSRSPKSREGSFLALQMGWRKA

SEQ ID NO: 16058 - protein, 70 aa, Glycine max
MASTAAFPFWRAAGMTYITYSNICANLVRNCLKEPFKAEALNREKVHFSLSKWAGGKPEKPILRSDTPGV

SEQ ID NO: 16059 - DNA, 579 bp, Glycine max
aaaaacggggattttactagctgatgtgccgacatgcagccatgcatgcatccgagacgtaaatgctgctgctgccgttgtgtgaaccggaagaccaggtttgactcaacagaccccgccgcgctcgggctgggcgccgtcaacaagacccgcgccctcggcctccccgaccagtgcggcgtcaagacgccgccgctcagcaactgcgcctctgcccccaccacgtcgccatcctccggcgcgccggcgggacagacgccaacatcctccggagtagggtccaagtcgacgccgacggcggacgtggggagcggcggcgcgtcactccacagctcggccggcatcatcgccggcttcatcgtgcccgcggtctacgccgtggccaccctgtgatctgattggcgggtcgacgcggcctcttcttcttgtcagtcagtcagtagtgatttcatttgagattatatatactggggttcggggatcgaattggcgcgcatacatgtgatatgtgaatgtgatccatggccgattccatgtgttgtaccgtgagcttatctacttgattcattgttgccttgc

SEQ ID NO: 16060 - protein, 119 aa, Glycine max
MQPCMHPRRKCCCCRCVNRKTRFDSTDPAALGLGAVNKTRALGLPDQCGVKTPPLSNCASAPTTSPSSGAPAGQTPTSSGVGSKSTPTADVGSGGASLHSSAGIIAGFIVPAVYAVATL

SEQ ID NO: 16061 - protein, 115 aa, Glycine max
MHPRRKCCCCRCVNRKTRFDSTDPAALGLGAVNKTRALGLPDQCGVKTPPLSNCASAPTTSPSSGAPAGQTPTSSGVGSKSTPTADVGSGGASLHSSAGIIAGFIVPAVYAVATL

SEQ ID NO: 16062 - DNA, 1276 bp, Glycine max
aagccacggtcaagtcaagaaaagtggggcagaagcaccacttaacactctggtatagtattacactagtcgctagatcagtgatggcctctgcctcttgccttggcttagtagtgctcgtggcaatggcctccgcggcgtcggcgcagctgtcgtcgacgttctacgacacgtcgtgccccaacgcgctggccaccatcaaggccggcgtgacggccgccctgaacaccgaaacccgcatgggggcgtcgctggtccggctgcacttccacgactgcttcgttgatggatgtgacgggtctgttctgttggcggacacggggagcttcatcggcgagcagggcgcagccccgaacaacaattccattcgtggcatgaacgtcatcgacaacatcaagacccaggtggaggctgtgtgcaagcagaccgtctcctgctccgacatcctcgccgtcgccgcccgtgactccgtcgtcgcgctgggtgggccgacatggacagttcttctggggaggagggactccaccactgcaagcaagaccaacgcggaaaatgacctgccacctcctaccttcgacctccaaaacctcaccaccttgttcggcaacaagcagctcagcatggcagacatggttgccctctcaggcgcccacacgatcgggcaatcgcagtgccggtttttcagggacaggatctacaacgagaccaacatcaacaccaccttcgcgacatctctcagggccaactgcccccagtccggcggcgacagcagcctggcgccgctggacacagcgacgcccaatgcgttcgacaactcctactacaccaacctcatgtcccagaaggggctgcttcactcggaccaggtgctgttcaatggcggcggcgccgacaacacggtcatgagcttcgcgaccagcgcggccacgttcaacagcgccttcacgacggccatgataaacatgggaaacatcgcgccaaagacggggacgcaggggcagatcaggctcgtctgctccaaggtcaactcgtaatgtccgcgccgacgctctgctgctgcgcatgaatgaactgaataaggtctcggataccagtaccagaatctacggagtagcgtggcctgtggttacgtatgtgtgttggttgaaaattgtacctgtgtatgtatgtccacatgtgtaacgaatttctcctgcaaaggcatggaggattcctttcctttatatcagaatgtcatactgcgagatgataatatctgccactttaaccctctccg

SEQ ID NO: 16063 - protein, 343 aa, Glycine max
ATVKSRKVGQKHHLTLWYSITLVARSVMASASCLGLVVLVAMASAASAQLSSTFYDTSCPNALATIKAGVTAALNTETRMGASLVRLHFHDCFVDGCDGSVLLADTGSFIGEQGAAPNNNSIRGMNVIDNIKTQVEAVCKQTVSCSDILAVAARDSVVALGGPTWTVLLGRRDSTTASKTNAENDLPPPTFDLQNLTTLFGNKQLSMADMVALSGAHTIGQSQCRFFRDRIYNETNINTTFATSLRANCPQSGGDSSLAPLDTATPNAFDNSYYTNLMSQKGLLHSDQVLFNGGGADNTVMSFATSAATFNSAFTTAMINMGNIAPKTGTQGQIRLVCSKVNS

SEQ ID NO: 16064 - protein, 316 aa, Glycine max
MASASCLGLVVLVAMASAASAQLSSTFYDTSCPNALATIKAGVTAALNTETRMGASLVRLHFHDCFVDGCDGSVLLADTGSFIGEQGAAPNNNSIRGMNVIDNIKTQVEAVCKQTVSCSDILAVAARDSVVALGGPTWTVLLGRRDSTTASKTNAENDLPPPTFDLQNLTTLFGNKQLSMADMVALSGAHTIGQSQCRFFRDRIYNETNINTTFATSLRANCPQSGGDSSLAPLDTATPNAFDNSYYTNLMSQKGLLHSDQVLFNGGGADNTVMSFATSAATFNSAFTTAMINMGNIAPKTGTQGQIRLVCSKVNS

SEQ ID NO: 16065 - protein, 302 aa, Glycine max
MASAASAQLSSTFYDTSCPNALATIKAGVTAALNTETRMGASLVRLHFHDCFVDGCDGSVLLADTGSFIGEQGAAPNNNSIRGMNVIDNIKTQVEAVCKQTVSCSDILAVAARDSVVALGGPTWTVLLGRRDSTTASKTNAENDLPPPTFDLQNLTTLFGNKQLSMADMVALSGAHTIGQSQCRFFRDRIYNETNINTTFATSLRANCPQSGGDSSLAPLDTATPNAFDNSYYTNLMSQKGLLHSDQVLFNGGGADNTVMSFATSAATFNSAFTTAMINMGNIAPKTGTQGQIRLVCSKVNS

SEQ ID NO: 16066 - DNA, 696 bp, Glycine max
acgagaccattacctagaacatcctaatcgaaaagacagacacccaacggcatcatcatcatcaccgccaccgccacttcttctagatagctcctggtaccgccgtgccgtcattagccgcgggagcagagcctggacgagtcccagatcggtcggcaccgggaggcattcaggtaggcgggcaggcaggagtgggagctagattaagcgcagtgcgccggcatgggcgccgggattaggatcttggcggcggcgctcctggcgctcgcggccgtcggcggcgcgacggcgcagctccggcagggctactactccgccagctgccccaacgtggaggccatcgtgcaggccgcggtcgccctcaaggtccagcagacgcccgtcgccgtcggtgccaccgtccgcctcttcttccacgactgcttcgtccagggatgcgacgcgtcggtcatcatcgtgtcgtcggggaacaacacggcggagaaggaccacgtgagcaacctctccctcgccggcgacggcttcgacaccgtcatcaaggccaaggcggccgtggacacgcagtgccccagccccaacctggtgtcctgcgcggacatcctcaccatggccacccgggacgtcatcggcctggccggcggcccggcgtaccccgtggagctggggaggctggacgggctggtgtcgacggcgagc

SEQ ID NO: 16067 - protein, 158 aa, Glycine max
MGAGIRILAAALLALAAVGGATAQLRQGYYSASCPNVEAIVQAAVALKVQQTPVAVGATVRLFFHDCFVQGCDASVIIVSSGNNTAEKDHVSNLSLAGDGFDTVIKAKAAVDTQCPSPNLVSCADILTMATRDVIGLAGGPAYPVELGRLDGLVSTAS

SEQ ID NO: 16068 - protein, 87 aa, Glycine max
MRRVGHHRVVGEQHGGEGPREQPLPRRRRLRHRHQGQGGRGHAVPQPQPGVLRGHPHHGHPGRHRPGRRPGVPRGAGEAGRAGVDGE

SEQ ID NO: 16069 - DNA, 1073 bp, Glycine max
agctatcatcccacggacccgccgccgccgccgtcgagcactcgagcgcagcggagcggaccgcagccggtggtagggcgtcgagtcgagggaggatggggaagtcgaagagcaagggcgccaagttcgccgccgtcaagaagatcatcagcaagaagaccatccagaagtacaaggaagatgtgctggacccgcggaagaaggacaccgagaaggagaagctcggccggaatgtgccgcaggtgtcgtcggcgctcttcttcagctacaacatggcgctcgggccgccctaccgggtcatcgtcgacaccaacttcatcaatttctccatccagaacaagttggatttggagaaaggaatgatggattgcctttatgcaaaatgtaccccttgcatcactgattgtgttatggctgagcttgaaaagttaggacaaaaatatcgtgtggctttgagaattgctaaggaccctaggttccagagattagcgtgcacacacaagggaacttatgctgatgactgtattgttgagagaattactcagcacaaatgctacattgttgccacctgcgatagagatttaaagaggagaataagaaaggttcctggtgtgccaatcatgtatatcacccaacacaggtactcgatagaacgactccctgaagctacaattggtggagcaccaagaatctgattagccctgagatggtaccaaacaccatcacacttgcccaggttccttgatttaggatggatacgagtactgccgtgctgaatcgaactgattgtaaccacttcaaaattgtgtaccagcctcctcagggcgtcgttttcataaattttgaaagaaactttagaagaaagtgtatggttgtcctttgttctgaactgaactatagccaacttcccagcttgctttgtgttgttaatgatgcagagtcaagaatatattttatgtaatatgtaagtgttgtcatatggttcaatgcttttgcatgcttctggttcattgcactcagttgccaagccaacacatgtgccgcgtgttggattttgtaaactatatgttctg

SEQ ID NO: 16070 - protein, 230 aa, Glycine max
LSSHGPAAAAVEHSSAAERTAAGGRASSRGRMGKSKSKGAKFAAVKKIISKKTIQKYKEDVLDPRKKDTEKEKLGRNVPQVSSALFFSYNMALGPPYRVIVDTNFINFSIQNKLDLEKGMMDCLYAKCTPCITDCVMAELEKLGQKYRVALRIAKDPRFQRLACTHKGTYADDCIVERITQHKCYIVATCDRDLKRRIRKVPGVPIMYITQHRYSIERLPEATIGGAPRI

SEQ ID NO: 16071 - protein, 199 aa, Glycine max
MGKSKSKGAKFAAVKKIISKKTIQKYKEDVLDPRKKDTEKEKLGRNVPQVSSALFFSYNMALGPPYRVIVDTNFINFSIQNKLDLEKGMMDCLYAKCTPCITDCVMAELEKLGQKYRVALRIAKDPRFQRLACTHKGTYADDCIVERITQHKCYIVATCDRDLKRRIRKVPGVPIMYITQHRYSIERLPEATIGGAPRI

SEQ ID NO: 16072 - protein, 140 aa, Glycine max
MALGPPYRVIVDTNFINFSIQNKLDLEKGMMDCLYAKCTPCITDCVMAELEKLGQKYRVALRIAKDPRFQRLACTHKGTYADDCIVERITQHKCYIVATCDRDLKRRIRKVPGVPIMYITQHRYSIERLPEATIGGAPRI

SEQ ID NO: 16073 - DNA, 769 bp, Glycine max
accacaccaccaccagacagagagaacacacgcaaggagcacgaggaggaggcaagggaagccgccgccgccgccgccccgtccctcctcgccggccggccgccacaggtttcaagatgtcaacctgcacgtttgcagcttcctgtgccctcttgggcaatgctcgaacaaccgatgccccccagaaagcggtcaagagccgcctgagcttcctcggccgaggcgcgccgcagctgcggagcctgaggtcctccttcccctccaagaagctggacgtctccgcggcggccacgtacaaggtgaagctggtgaccccggaaggggacgagcacgagtttgaggcgccggacgacgcctacatcctggactcggcggagacggcgggggtggagctgccctactcgtgccgggcgggggcgtgctcgacctgcgcgggcaagatcgaggctggcgcggtggaccagtcggacgggtcgttcctggacgacgcgcagcaggaggagggctacgtgctgacatgcgtggcctaccccaagtcggactgcgtcatccacacccacaaggagggcgacctgtattaggagggctctcatctctggtgcccccagttggttgtgtgttgagtagaacaaaccttggtggttgtttatcccgtgcctgcctgtgtgcgtgctttggtcgttattagtcggaggtggttaagattgttgggtgaagaggccacccatggagaaggcgaataaaatctggctgtgactgatggcatcat

SEQ ID NO: 16074 - protein, 192 aa, Glycine max
HTTTRQREHTQGARGGGKGSRRRRRPVPPRRPAATGFKMSTCTFAASCALLGNARTTDAPQKAVKSRLSFLGRGAPQLRSLRSSFPSKKLDVSAAATYKVKLVTPEGDEHEFEAPDDAYILDSAETAGVELPYSCRAGACSTCAGKIEAGAVDQSDGSFLDDAQQEEGYVLTCVAYPKSDCVIHTHKEGDLY

SEQ ID NO: 16075 - protein, 154 aa, Glycine max
MSTCTFAASCALLGNARTTDAPQKAVKSRLSFLGRGAPQLRSLRSSFPSKKLDVSAAATYKVKLVTPEGDEHEFEAPDDAYILDSAETAGVELPYSCRAGACSTCAGKIEAGAVDQSDGSFLDDAQQEEGYVLTCVAYPKSDCVIHTHKEGDLY

SEQ ID NO: 16076 - protein, 112 aa, Glycine max
PHHHQTERTHARSTRRRQGKPPPPPPRPSSPAGRHRFQDVNLHVCSFLCPLGQCSNNRCPPESGQEPPELPRPRRAAAAEPEVLLPLQEAGRLRGGHVQGEAGDPGRGRARV

SEQ ID NO: 16077 - DNA, 885 bp, Glycine max
acctcatacttccactaccaagagaaagtcgttgacacaccacagataagcttctcgtcgctcacagcgaagagtcacacaatggcgtctgtcacttctccaaccactctcatctcctcctccacgagggctttcccagccaagtcttattcgcttccttctccctcagtctctttccttcgaaccctatcctctccttcctcatccgcttctctccgctccgcgtttgctcaacgctcttccctcagctccagttctcgccgtagcttcgctgtcaaggctcagaccgatgatcttccattggttggaaacaaggcccctgattttgaggcagaggcagtgtttgatcaggagttcatcaaggttaagctctctgagtacattgggaagaagtatgtgattctctttttctacccattggacttcactttcgtctgcccaacagagattactgccttcagtgaccggtacgcagagtttgagaagctgaacacggaagtgttaggtgtctcagtcgatagtgtgttctcccaccttgcgtgggtccagacagacagaaaatctggagggctcggtgatctgaactatcccctgatctcagatgtaactaaatcaatctcaaagtcatttggagtgctcatccatgatcagggaatagcactgagggggcttttcatcatcgacaaggaaggagtgatccaacattccaccatcaacaatcttggtattggacgaagtgttgatgagacaatgagaaccctccaggcgttacagtacatccaggagaaccctgatgaagtctgccctgcagggtggaaacctggtgagaagtcaatgaaacctgaccccaagctcagcaaagagtacttctcagctatttagaat

SEQ ID NO: 16078 - protein, 293 aa, Glycine max
TSYFHYQEKVVDTPQISFSSLTAKSHTMASVTSPTTLISSSTRAFPAKSYSLPSPSVSFLRTLSSPSSSASLRSAFAQRSSLSSSSRRSFAVKAQTDDLPLVGNKAPDFEAEAVFDQEFIKVKLSEYIGKKYVILFFYPLDFTFVCPTEITAFSDRYAEFEKLNTEVLGVSVDSVFSHLAWVQTDRKSGGLGDLNYPLISDVTKSISKSFGVLIHDQGIALRGLFIIDKEGVIQHSTINNLGIGRSVDETMRTLQALQYIQENPDEVCPAGWKPGEKSMKPDPKLSKEYFSAI

SEQ ID NO: 16079 - protein, 266 aa, Glycine max
MASVTSPTTLISSSTRAFPAKSYSLPSPSVSFLRTLSSPSSSASLRSAFAQRSSLSSSSRRSFAVKAQTDDLPLVGNKAPDFEAEAVFDQEFIKVKLSEYIGKKYVILFFYPLDFTFVCPTEITAFSDRYAEFEKLNTEVLGVSVDSVFSHLAWVQTDRKSGGLGDLNYPLISDVTKSISKSFGVLIHDQGIALRGLFIIDKEGVIQHSTINNLGIGRSVDETMRTLQALQYIQENPDEVCPAGWKPGEKSMKPDPKLSKEYFSAI

SEQ ID NO: 16080 - DNA, 1022 bp, Glycine max
atcaacaacctccccgctttctccttcccgtctctctcctctcctctggtcccgattcccttctccgagcttcctccctataaataaggcggcccgcggcggccatcaattcccgtcaccgcccaccgaggccgcgaattattcctccgccccgcccgccgcgaaaaccctagccgccgccgatcccatggccaccgcctccagccaggcgagcctcctcctccagaagcagctccgagatctcgcgaagcaccccgtcgatgggttttcagccgggctcgtcgacgacagcaacgtcttcgagtggcaggtcaccatcatcggcccgcccgagaccctatatgatggaggctatttcaatgcaataatgagcttcccacaaaattatccgaacagccctccaacagtcagattcacttctgaaatgtggcatcctaatgtttatccggatgggcgggtatgcatttctattcttcatccacctggtgatgatcccaacggatacgagctcgcgagtgagcgttggacaccagtccatacggttgagagtatagtattaagcatcatttcgatgctttctagtccaaatgatgaatcaccggcaaatattgaagcagctaaggactggagagagaagcaggatgagttcaagaagaaggtcaggcgcgccgtacggaaatcccaggaaatgctctgaataaaatgggagtactggggaagttagccatgccatttcaggtgtggagggttttgctgtcgatctccaaatgtccatccgacactagcaatttcacttctcccctgtatattttccattagcctgtctcctgtggaggtcttggttttgactctgaaaacgcaacgcatattctaagggtctggttgttgtaattgtgtggcttcggctatcaatattgagaaacttgggagagctgctacttaccataattctttaacgaacctgatataaacggacacctgcctgatcagctaatgttgaagtctgctctcatctggaagcg

SEQ ID NO: 16081 - protein, 231 aa, Glycine max
STTSPLSPSRLSPLLWSRFPSPSFLPINKAARGGHQFPSPPTEAANYSSAPPAAKTLAAADPMATASSQASLLLQKQLRDLAKHPVDGFSAGLVDDSNVFEWQVTIIGPPETLYDGGYFNAIMSFPQNYPNSPPTVRFTSEMWHPNVYPDGRVCISILHPPGDDPNGYELASERWTPVHTVESIVLSIISMLSSPNDESPANIEAAKDWREKQDEFKKKVRRAVRKSQEML

SEQ ID NO: 16082 - protein, 169 aa, Glycine max
MATASSQASLLLQKQLRDLAKHPVDGFSAGLVDDSNVFEWQVTIIGPPETLYDGGYFNAIMSFPQNYPNSPPTVRFTSEMWHPNVYPDGRVCISILHPPGDDPNGYELASERWTPVHTVESIVLSIISMLSSPNDESPANIEAAKDWREKQDEFKKKVRRAVRKSQEML

SEQ ID NO: 16083 - DNA, 1012 bp, Glycine max
tagccagtgcctcctcctcctcaatttcagcgccacccaaccaaatcacggccagccgagcgccttccccttcctctgccagctcgatcgtcgccggcgcacccagcagatgagcgccttccctgctccttttccttcctcctctgctcctctctctcacactgctcatctctcttccccccgtttctttctctacaggaggaaagcaccacgccatggcctccccaagctctgcttcatccccgtcttgggtccatgaggagacgaccacgccggccgcccttccccatctcgatcgggtccaggaccccgccgcctccagccacctctccgcggtcatggccccgatgggggttacctgccgcgagcctctgtcgtgaccagcacccgaccagcaggtcgccagcgtgcccgatgcctcctcctcgcgcatgcctggccgcgccacctggaccccgcagacaacaccacgccatggcccgcaggttcttctctgagttcatgtcgccctcgttccacgcgcctccggccagattgggcgctccaagcccggccatctccgccgcccttgcccgttctggccggatcccgccggttgggccccgtccccggccaccggtgccctcaccggagaccacctgcaccgtccgccaagtccctttcttcacccgctgcatcctctgcctcgctcgctcgtcccagccttcgttgaccgcgtcctgtctctcctgcgccaagaccaagcctgcgtccaacctccccaccgagccggcctcaaggcccgatgtacaggttatgcgatgatcatgacgcgagagcgatgttttgcttgtgttggcgttcttcttatgcttcttcttcgattaggggataggttccaggtcggcagcctgggctagcagggtggatgtcgtttgagtttctgtttgtgattcattcgtagtcggatggtgctcttttgtaatatgatgttgtattcgtgtggcattgtatgccttttgtatgcatcccc

SEQ ID NO: 16084 - protein, 182 aa, Glycine max
MRRRPRRPPFPISIGSRTPPPPATSPRSWPRWGLPAASLCRDQHPTSRSPACPMPPPRACLAAPPGPRRQHHAMARRFFSEFMSPSFHAPPARLGAPSPAISAALARSGRIPPVGPRPRPPVPSPETTCTVRQVPFFTRCILCLARSSQPSLTASCLSCAKTKPASNLPTEPASRPDVQVMR

SEQ ID NO: 16085 - protein, 129 aa, Glycine max
MPPPRACLAAPPGPRRQHHAMARRFFSEFMSPSFHAPPARLGAPSPAISAALARSGRIPPVGPRPRPPVPSPETTCTVRQVPFFTRCILCLARSSQPSLTASCLSCAKTKPASNLPTEPASRPDVQVMR

SEQ ID NO: 16086 - protein, 109 aa, Glycine max
MARRFFSEFMSPSFHAPPARLGAPSPAISAALARSGRIPPVGPRPRPPVPSPETTCTVRQVPFFTRCILCLARSSQPSLTASCLSCAKTKPASNLPTEPASRPDVQVMR

SEQ ID NO: 16087 - DNA, 919 bp, Glycine max
gtacagtggcaaattattttcagtcgataattggtggattgtctgaccctgtgaccgagtgcggaaacagcagtcagtagacgacactgaatcgccaacaactgcgttcatcatgtcgccggcgacttcttccgcggtgggtaccctatccggcggcctcctcccccacggtgcacatcgccggcgacccttgccaaccgcccgcctcctcccgccgcgttggtctaggctccaggtcaacgcggcccgtcatcgccgcctggccactcccccgcgcgcccagagcgctccctccccagggtacctgccggactcggagttctacaagatcgaggccatcctgaggccatggagggtgtcgcatgtctcgtcgggtttgctagaaatggggatcagaggtgtgacggtgtccgatgtgcggggctatggggcgcagggcgggtcgacggagcggtacgaagggtcagaattttcagaagatacatttattgctaaagttaaaatggaaatagtcgtgtgcaaggagcaggttgagccagtaattgacaaaataattgagaaggccagaactggagaaattggtgatgggaagatattcttgatacccgtcgcggatgttgtaagggtacgcaccggcgaacgcggagtgcatgcggagaagatgatcggcggtctgtcagacaaactgcctccggtgatcacaatctcatgagtagagcttgactgctcttgctgcctgtaactgtaagcgcatccctcaggctggttgcttgtggccgtgtgtgtcttgacctttggggaataatgtgtatgtaactttgcgtgttggcacgaataaattggcaccagcatccatacggcgggtggtgttgttgaatggggtggttactgtggttcgtgtgcggaatgcagtgattgc

SEQ ID NO: 16088 - protein, 199 aa, Glycine max
MSPATSSAVGTLSGGLLPHGAHRRRPLPTARLLPPRWSRLQVNAARHRRLATPPRAQSAPSPGYLPDSEFYKIEAILRPWRVSHVSSGLLEMGIRGVTVSDVRGYGAQGGSTERYEGSEFSEDTFIAKVKMEIVVCKEQVEPVIDKIIEKARTGEIGDGKIFLIPVADVVRVRTGERGVHAEKMIGGLSDKLPPVITIS

SEQ ID NO: 16089 - protein, 108 aa, Glycine max
MGIRGVTVSDVRGYGAQGGSTERYEGSEFSEDTFIAKVKMEIVVCKEQVEPVIDKIIEKARTGEIGDGKIFLIPVADVVRVRTGERGVHAEKMIGGLSDKLPPVITIS

SEQ ID NO: 16090 - DNA, 807 bp, Glycine max
aagggttaaaccgtgcatgaacaataaaaaaaataatggagtcttggaggattagtctagtggcgatagcaatagcattactaatggctacgttggtgtcagctggtgaggataaggcgaaagataaggaagagtgtactgagcagcttgtgggtatggccacttgtcttccttacgtgcaaggacaggcaaagactccgacgccggactgttgctccggcctgaaacaggtcctcaaatccgacaaaaagtgtctttgtgtaatcatccaagacaggaatgatcccgacttgggtctccagatcaatgtgtctctcgctcttgctcttccttctgtttgccatgccgttgctgacgtcactaagtgccctgctttgcttcacatggacccaaaatctcaagaagcccaagtgttctatcagctagcaaatggtttaaacaaaaccggcccagcctctgctcccaccatttcggcccctgcgcccaccagcgtatctccaaccgcaggatccgaggatggtaacaacagtggtcgggcgacctctttgccaagcaagaaccacgctcagagctttcggaaacgatggctagtgcttgaagttgctgcctatctcttcataatatcatttactatcaccttataaaagtaatattgaaaagtaaatttgtgcgcttgcagtgacgttgattttgtgcagttactttcgtttcgtgagaactcttctcaacctttttttgtctaatgcaaaataagacgcgagttacaatttttgtattgtctcgtatgcttttatcaatttttatttt

SEQ ID NO: 16091 - protein, 202 aa, Glycine max
MESWRISLVAIAIALLMATLVSAGEDKAKDKEECTEQLVGMATCLPYVQGQAKTPTPDCCSGLKQVLKSDKKCLCVIIQDRNDPDLGLQINVSLALALPSVCHAVADVTKCPALLHMDPKSQEAQVFYQLANGLNKTGPASAPTISAPAPTSVSPTAGSEDGNNSGRATSLPSKNHAQSFRKRWLVLEVAAYLFIISFTITL

SEQ ID NO: 16092 - protein, 186 aa, Glycine max
MATLVSAGEDKAKDKEECTEQLVGMATCLPYVQGQAKTPTPDCCSGLKQVLKSDKKCLCVIIQDRNDPDLGLQINVSLALALPSVCHAVADVTKCPALLHMDPKSQEAQVFYQLANGLNKTGPASAPTISAPAPTSVSPTAGSEDGNNSGRATSLPSKNHAQSFRKRWLVLEVAAYLFIISFTITL

SEQ ID NO: 16093 - protein, 162 aa, Glycine max
MATCLPYVQGQAKTPTPDCCSGLKQVLKSDKKCLCVIIQDRNDPDLGLQINVSLALALPSVCHAVADVTKCPALLHMDPKSQEAQVFYQLANGLNKTGPASAPTISAPAPTSVSPTAGSEDGNNSGRATSLPSKNHAQSFRKRWLVLEVAAYLFIISFTITL

SEQ ID NO: 16094 - DNA, 1032 bp, Glycine max
agcgactagaatatcccggcccgaaacagcaaggtctctctctcgcgctcgcctctctcctcctcgtcttcggcggcggcgacggcggtggcgatgctgtccggcgacgttcccccgaaccagaccgtctacttcaggaacctcaacgagaaggtcaagaaagaagagctgaagagatcactttatgcattgtgctctcagtatggaaggatagtggatgttgtggccttgaaaactcataaactgagggggcaagcctgggtggcattcagtgaaattacagcggctaccaacgctttccggggcctacaggacttcgatttttacggcaaaaaaatgcgggtacaatatgcaaaaacaaagtctgactgttttgcaaaagcagatgggtcttatgctcctaaagagaaaaggaagaagcaagaggagaaagctgctgagaaaaaacggcgaactgaagatgggcaacaacctggtgctagtgctcctgttgccccaagcaatggaactggtcatcaaccttctcgttttgccaagcctccgcaagagccagctgctccgccgaacaacatcctcttcctccagaacatgccggaccagaccacgagcatgatgctccagatcctgttccagcaataccctggtttccgggaggtgcggatgatcgaagccaagccaggcattgcttttgtggagtacgaggatgagaaccagtccatggttgcaatggaagccctccagggtttcaagatcagcccagagaacccaatggccatctcatacgccaaaaagtgaaaacgatccatgtgatctcggaaccggccaaaagaaatctgtaactgtaagattttccaccttaagctttcaagctgctgtgctgtgcttgtgctggctttctaaccctgtatttcttggaagtgacttgcttgttgtttaagaagttaaaaagtatgtgctactttaaatcaggtttggctctacgttttcatgtgaaccctggtattgtccttgtcaagtctggtatcgtggcct

SEQ ID NO: 16095 - protein, 233 aa, Glycine max
MLSGDVPPNQTVYFRNLNEKVKKEELKRSLYALCSQYGRIVDVVALKTHKLRGQAWVAFSEITAATNAFRGLQDFDFYGKKMRVQYAKTKSDCFAKADGSYAPKEKRKKQEEKAAEKKRRTEDGQQPGASAPVAPSNGTGHQPSRFAKPPQEPAAPPNNILFLQNMPDQTTSMMLQILFQQYPGFREVRMIEAKPGIAFVEYEDENQSMVAMEALQGFKISPENPMAISYAKK

SEQ ID NO: 16096 - protein, 152 aa, Glycine max
MRVQYAKTKSDCFAKADGSYAPKEKRKKQEEKAAEKKRRTEDGQQPGASAPVAPSNGTGHQPSRFAKPPQEPAAPPNNILFLQNMPDQTTSMMLQILFQQYPGFREVRMIEAKPGIAFVEYEDENQSMVAMEALQGFKISPENPMAISYAKK

SEQ ID NO: 16097 - DNA, 1015 bp, Glycine max
ttttagatcacaccgtgggttttcttggtcggtaggaataggattcaggcccgggcggccgcgtcaaaatcgtctctttgctcctcctcctgtccgtccgtctccgtccgtccgcccgcccgccccgaagcgtctcgccgccccctccaccggagaaccccctcgaaggcgagcacccgccctccccttcctcccggattcttgtctgccatgggtgactacacaatccggataagcaccagcttgatcgagcagctcgcgcgcgatgacgagaagcagatgaagaggaggaccaggaaacccaagccgaggaaggtcgtggagcaaccagaggagcctcaggacaatggcagggaacttccaactgaacccaagagcagccctgctcctgttttgccttttccgccacccatgtacctgccagtgacccccgctcctccaccgcccccgcccgtgatccaggaggtggaagccatacgcgccgtggttgtggagagcgagaaggtgctggagaagctgcagaagaaggaggcgacgatgcgcgaggagctcaccaagagggccaaggagctgcacgacaaggagttcaagctgccctaccagaacccctcgccgtgcaccgacgagagggcaggctgcgctgagtgctacaggagcaacgtgcaggacccgctcaagtgcgccgaggcggtcaagaggttcgaggcgtgcgttcgcatggcgattcggggcggtaccaccatgggagctgctcagtaggcagtggcgctgggagtcggggctgagtgagcgaggtgtcgagcacacgattttgcttctgtcgggatgattgattgaataacctgcctggatttttgtttggtgagacctgaaacaccatcagttgtagattaattctggtaacgggttgctactggtgttggcaacaagaggccatgagtgtccttgaatttaggggagtggctccatgctacttgcatacatattacaaaatgagacatgaaatttgcagggt

SEQ ID NO: 16098 - protein, 182 aa, Glycine max
MGDYTIRISTSLIEQLARDDEKQMKRRTRKPKPRKVVEQPEEPQDNGRELPTEPKSSPAPVLPFPPPMYLPVTPAPPPPPPVIQEVEAIRAVVVESEKVLEKLQKKEATMREELTKRAKELHDKEFKLPYQNPSPCTDERAGCAECYRSNVQDPLKCAEAVKRFEACVRMAIRGGTTMGAAQ

SEQ ID NO: 16099 - protein, 159 aa, Glycine max
MKRRTRKPKPRKVVEQPEEPQDNGRELPTEPKSSPAPVLPFPPPMYLPVTPAPPPPPPVIQEVEAIRAVVVESEKVLEKLQKKEATMREELTKRAKELHDKEFKLPYQNPSPCTDERAGCAECYRSNVQDPLKCAEAVKRFEACVRMAIRGGTTMGAAQ

SEQ ID NO: 16100 - protein, 115 aa, Glycine max
MYLPVTPAPPPPPPVIQEVEAIRAVVVESEKVLEKLQKKEATMREELTKRAKELHDKEFKLPYQNPSPCTDERAGCAECYRSNVQDPLKCAEAVKRFEACVRMAIRGGTTMGAAQ

SEQ ID NO: 16101 - DNA, 971 bp, Glycine max
atccaacacaaaaccaaacaggtcttacgcaacaaatggagagcacccagagcaacacaagcgtgatgaaccatttcatcctggtgcacggcctctgccacggggcctggtgttggtacaaggtggttgcggcgcttcaggcagcggggcaccgtgtcacggcggtcgacctggccgcgtccggcgctcacccggcgcgcatcgacgaggtgcactcgttcgaggagtactcccagcctctgcttgacgtagtggccgcggcgccagagggtgacggcgagaggctgattctggtcgggcacagccacggcgggctcagcttggcgctagccatggagaggttccccggcaaggtcgccgccgccgtgttcgcagccgccgggatgccgtgcgttggcaagcacatgggcgtcaccaccgaggagttcatgcgaaggacatcatcggaaggactcatggactgcaagatgctgccaatcaataacaaccacggtgcaggggttgcaatgataatgggcccaaacttcttagcacacaagaactaccagcaaagttcacctgaggatttggccctggcaaaaatgttggtgagaccgggaaacctgttcatggaggatccggtgatgaaggatgcaagcctgctcaccgataccaactacgggtcggtgaagaaggtatatgtggtagcaaaggctgatggctccagcaccgaggagatgcagcgttggatggtgttgttgagccccggcacggaggctgaggagatcgcgggagctgaccacgccatcatgagctcaaggcctagggagctctgtgatgctctggtcaagatcgccgacagcttaaatacttgctaaattgtacgatatatatccctggaaatcaatgtaggtgtgtacttgattttcatctaaaaataaatatgttcagtgatactattaaatcaatggaaattaagtagtattaccttc

SEQ ID NO: 16102 - protein, 284 aa, Glycine max
PTQNQTGLTQQMESTQSNTSVMNHFILVHGLCHGAWCWYKVVAALQAAGHRVTAVDLAASGAHPARIDEVHSFEEYSQPLLDVVAAAPEGDGERLILVGHSHGGLSLALAMERFPGKVAAAVFAAAGMPCVGKHMGVTTEEFMRRTSSEGLMDCKMLPINNNHGAGVAMIMGPNFLAHKNYQQSSPEDLALAKMLVRPGNLFMEDPVMKDASLLTDTNYGSVKKVYVVAKADGSSTEEMQRWMVLLSPGTEAEEIAGADHAIMSSRPRELCDALVKIADSLNTC

SEQ ID NO: 16103 - protein, 273 aa, Glycine max
MESTQSNTSVMNHFILVHGLCHGAWCWYKVVAALQAAGHRVTAVDLAASGAHPARIDEVHSFEEYSQPLLDVVAAAPEGDGERLILVGHSHGGLSLALAMERFPGKVAAAVFAAAGMPCVGKHMGVTTEEFMRRTSSEGLMDCKMLPINNNHGAGVAMIMGPNFLAHKNYQQSSPEDLALAKMLVRPGNLFMEDPVMKDASLLTDTNYGSVKKVYVVAKADGSSTEEMQRWMVLLSPGTEAEEIAGADHAIMSSRPRELCDALVKIADSLNTC

SEQ ID NO: 16104 - protein, 263 aa, Glycine max
MNHFILVHGLCHGAWCWYKVVAALQAAGHRVTAVDLAASGAHPARIDEVHSFEEYSQPLLDVVAAAPEGDGERLILVGHSHGGLSLALAMERFPGKVAAAVFAAAGMPCVGKHMGVTTEEFMRRTSSEGLMDCKMLPINNNHGAGVAMIMGPNFLAHKNYQQSSPEDLALAKMLVRPGNLFMEDPVMKDASLLTDTNYGSVKKVYVVAKADGSSTEEMQRWMVLLSPGTEAEEIAGADHAIMSSRPRELCDALVKIADSLNTC

SEQ ID NO: 16105 - DNA, 987 bp, Glycine max
gcaccgctcgcttccgcccctccccaacctgcgtaccctcccccccaccgccgcgccgcccgcctcggctgaacgacggccgggccctctcggcggcggcgatcgacgatggtggtggccacggaggaaatggcggtctactgcttcgacaccctcgtcgcccactacagcggcgagcagccgccgccgcccgccttcgaggagggcgtccacccactgtttgtcacctggaagaaggctaccaatggttccgagccacgcctaaggggatgcattggaactttggagccccgtcagattgtaagtggcttcaaggattatgcgctgacaagtgccctgagggatcggcgcttttctccgatacagtccaaagagctgccatatttggaatgcacagtttctatattgactgaatacgaaactgcactcaaccaccttgattgggaggttggaaagcatggtttaattattgagttcaccgatcctgactataatgtaagacggagtggaacttatttacctgaggttgctgcccatgaaggatggacacaactagagaccattgactcgctcatgaggaaggctggctacaatggcaccatcactgagtctttgaggaagaaaatccgcgtcacccgctaccagagtaccctgtacaccatgcactatggtgaatatactgcatatgtcaagaagaacagaggttaaattaacggggaacccatagttaatggattcaaaccaggccagtgatttatctgtactgtagcaggtactacaactatttataatttggcttggaaggaattggcgtgagaattagtttaaaacaaatcaattctagtcattgatctgccatcatgccatttcattccaaagaatgtggggtgccatgtcaacagccctcgtgtcattctgggacacaaattaaatggtgatggttatgtatctgtaagcatatgcactttgattacaaataattgtgtg

SEQ ID NO: 16106 - protein, 199 aa, Glycine max
MVVATEEMAVYCFDTLVAHYSGEQPPPPAFEEGVHPLFVTWKKATNGSEPRLRGCIGTLEPRQIVSGFKDYALTSALRDRRFSPIQSKELPYLECTVSILTEYETALNHLDWEVGKHGLIIEFTDPDYNVRRSGTYLPEVAAHEGWTQLETIDSLMRKAGYNGTITESLRKKIRVTRYQSTLYTMHYGEYTAYVKKNRG

SEQ ID NO: 16107 - protein, 192 aa, Glycine max
MAVYCFDTLVAHYSGEQPPPPAFEEGVHPLFVTWKKATNGSEPRLRGCIGTLEPRQIVSGFKDYALTSALRDRRFSPIQSKELPYLECTVSILTEYETALNHLDWEVGKHGLIIEFTDPDYNVRRSGTYLPEVAAHEGWTQLETIDSLMRKAGYNGTITESLRKKIRVTRYQSTLYTMHYGEYTAYVKKNRG

SEQ ID NO: 16108 - protein, 136 aa, Glycine max
TARFRPSPTCVPSPPPPRRPPRLNDGRALSAAAIDDGGGHGGNGGLLLRHPRRPLQRRAAAAARLRGGRPPTVCHLEEGYQWFRATPKGMHWNFGAPSDCKWLQGLCADKCPEGSALFSDTVQRAAIFGMHSFYID

SEQ ID NO: 16109 - DNA, 652 bp, Glycine max
ctctccttcttcttcgctcagctcctacaataaagggcgaagagtctcacctccttgacttttgctttgccatcgcttcctttttgaggtcaaaatggttgaacagactcagcagcccacgattttccagaaggcttctggccagatcttgcgttccggtgtttctcaggacatccatggctacacatctggtttccagaggcgtgcaacgtacggaaactactccaacgctgcgttccagtaccctcttgccgccacttccaggattgtgacaactacttcccctgtgttcgtccaggctccaggagagaaaggattctctagctttgctattgatttcttgatgggtggtgtttccgctgctgtctccaagactgctgctgctcccattgagcgtgttaagcttttgattcagaatcaggatgagatgcttaaggctggtaggctctctgagccttacaagggtattggtgactgtttcggcaggactattaaggatgagggttttggttccttgtggagaggaaacactgctaacgttatccgttacttccccactcaggccttgaactttgccttcaaagattacttcaagaggcttttcaacttcaagaaggacaagaatggctactggaagtggtttgctggtaac

SEQ ID NO: 16110 - protein, 186 aa, Glycine max
MVEQTQQPTIFQKASGQILRSGVSQDIHGYTSGFQRRATYGNYSNAAFQYPLAATSRIVTTTSPVFVQAPGEKGFSSFAIDFLMGGVSAAVSKTAAAPIERVKLLIQNQDEMLKAGRLSEPYKGIGDCFGRTIKDEGFGSLWRGNTANVIRYFPTQALNFAFKDYFKRLFNFKKDKNGYWKWFAGN

SEQ ID NO: 16111 - protein, 103 aa, Glycine max
MGGVSAAVSKTAAAPIERVKLLIQNQDEMLKAGRLSEPYKGIGDCFGRTIKDEGFGSLWRGNTANVIRYFPTQALNFAFKDYFKRLFNFKKDKNGYWKWFAGN

SEQ ID NO: 16112 - DNA, 1141 bp, Glycine max
aaccaaagccagagcgcccgtctctcccccctcccacgccgccgcacaccgaaccctagcgccccagcgagcgagcgagcgacagccatgccggcggacgcgaagatccggtggggggagctcgaggaggacgacgggggcgacctcgacttcctgctgccgccgcgggtggtcatcgggcccgacgagaacggcttcaagaagacgatcgagtaccgcttcgacgacgacggcaacaaggtcaaggtcaccaccaccacccgcgtccgcaagctcgcgcgcgcgcgcctctccaaggccgccgtcgagcgtcgcaactggtccaagttcggcgacgccgccagcggcgacgacgcctccgcgcgcctcaccgtcgtctccaccgaggagatcctcctcgagcgcccgcgcgccccagggagcaaagctgatgaaccaagtgcgtctggtgacccactggcaatggcaagcaagggaggtgctgttctcatggtttgcagaacctgtggtaagaagggtgaccactggacctcaaagtgcccctacaaggacctcgctccaccaaccgatgcatcggacatgcctcctacttctgacggccctgcagcactgagtggccctgccaagggctcatacgttgctccaaggctaagggctggtgctgttcataccgatgctgggcacgacatgaggcgcaggaacgacgagaacagtgtccgtgttaccaatctgtctgaggacacccgcgagcccgacctcctcgagctgttccgcacgtttggcccggtcagccgtgtctatgtcgcggtggatcagaagactggaatgagcaggggctttgggtttgtcaactttgttcacagggaggacgccgagaaggccatcagcaagctcaatgggtatggttatgataacctcatcctccatgtggagatggctgcacctaggcctacttagttactgcctactaagcatccagatttcctacaagtgtcgtatcattatggtctccgaaatacccgtacgtttgtgtcgtgagcttgtgtcatgttttgccttgttgagaataactacactctggtggtgaaaaagtgaatttcttaagggatggcacttgagtttatatttcatcaagctttgt

SEQ ID NO: 16113 - protein, 318 aa, Glycine max
NQSQSARLSPLPRRRTPNPSAPASERATAMPADAKIRWGELEEDDGGDLDFLLPPRVVIGPDENGFKKTIEYRFDDDGNKVKVTTTTRVRKLARARLSKAAVERRNWSKFGDAASGDDASARLTVVSTEEILLERPRAPGSKADEPSASGDPLAMASKGGAVLMVCRTCGKKGDHWTSKCPYKDLAPPTDASDMPPTSDGPAALSGPAKGSYVAPRLRAGAVHTDAGHDMRRRNDENSVRVTNLSEDTREPDLLELFRTFGPVSRVYVAVDQKTGMSRGFGFVNFVHREDAEKAISKLNGYGYDNLILHVEMAAPRPT

SEQ ID NO: 16114 - protein, 289 aa, Glycine max
MPADAKIRWGELEEDDGGDLDFLLPPRVVIGPDENGFKKTIEYRFDDDGNKVKVTTTTRVRKLARARLSKAAVERRNWSKFGDAASGDDASARLTVVSTEEILLERPRAPGSKADEPSASGDPLAMASKGGAVLMVCRTCGKKGDHWTSKCPYKDLAPPTDASDMPPTSDGPAALSGPAKGSYVAPRLRAGAVHTDAGHDMRRRNDENSVRVTNLSEDTREPDLLELFRTFGPVSRVYVAVDQKTGMSRGFGFVNFVHREDAEKAISKLNGYGYDNLILHVEMAAPRPT

SEQ ID NO: 16115 - protein, 203 aa, Glycine max
TKARAPVSPPSHAAAHRTLAPQRASERQPCRRTRRSGGGSSRRTTGATSTSCCRRGWSSGPTRTASRRRSSTASTTTATRSRSPPPPASASSRARASPRPPSSVATGPSSATPPAATTPPRASPSSPPRRSSSSARAPQGAKLMNQVRLVTHWQWQAREVLFSWFAEPVVRRVTTGPQSAPTRTSLHQPMHRTCLLLLTALQH

SEQ ID NO: 16116 - DNA, 963 bp, Glycine max
acagacgcgagcgcgttaaacgagagaagaacagagagacagatcagacaacaatggcagccaaaccagacctgaagttgttgggcatgtcggtgagtccattcgtcatccgtgttcgcatggcgctgcacatgaagggcgtgagccacgagtacatcgagcaggacctcttcaacaagagcgagctcctcctcgagtccagcccggtggagaagaaggtgcccgtgctcatccacgacggcaagcccgtatgcgactcgccggccatcgtgcagtacatcgacgaggtctgggccgccacggggccgccgatcctccccgccgacccctatgagcgcgccgtcgctcgtttctggaccgcctacgtggacgacaagctattccctgcttacgctggcactgctaaggcagccacggaggaggagaggacgcaacagattaacgagatgttcgcggtgatggggcagctggaggaggcatttgcccagtgctcaaacgggaaggccttcttcgccggcgactccatcggcaacctcgacatcgccgttggatgcaatctgctcttgctcgaggtgctacgcagtatgtatggcgtggagttcgtcgacactgggaggaccccgctcttggcagcgtgggcgaagcggttcggggaaaccgatgcggcgagggaggtggtgcccgacgtgcacgtcgccgtggagtacgccaagaagcgtcaggcttattgggctgctgccgcggctacaaagtgacatgattcagatcagatcagtccgagtactacggactgaaaattatctcaagtccataggatgttgctccaacaataaagaggacaaatcatggatacaccatcttaaacatgatgattaacttacctcacggggttatccaacaatcgctgatttagttattgatcctagtagtagtctagatacgcaacgaagtgacatttttttc

SEQ ID NO: 16117 - protein, 250 aa, Glycine max
RRERVKREKNRETDQTTMAAKPDLKLLGMSVSPFVIRVRMALHMKGVSHEYIEQDLFNKSELLLESSPVEKKVPVLIHDGKPVCDSPAIVQYIDEVWAATGPPILPADPYERAVARFWTAYVDDKLFPAYAGTAKAATEEERTQQINEMFAVMGQLEEAFAQCSNGKAFFAGDSIGNLDIAVGCNLLLLEVLRSMYGVEFVDTGRTPLLAAWAKRFGETDAAREVVPDVHVAVEYAKKRQAYWAAAAATK

SEQ ID NO: 16118 - protein, 233 aa, Glycine max
MAAKPDLKLLGMSVSPFVIRVRMALHMKGVSHEYIEQDLFNKSELLLESSPVEKKVPVLIHDGKPVCDSPAIVQYIDEVWAATGPPILPADPYERAVARFWTAYVDDKLFPAYAGTAKAATEEERTQQINEMFAVMGQLEEAFAQCSNGKAFFAGDSIGNLDIAVGCNLLLLEVLRSMYGVEFVDTGRTPLLAAWAKRFGETDAAREVVPDVHVAVEYAKKRQAYWAAAAATK

SEQ ID NO: 16119 - protein, 222 aa, Glycine max
MSVSPFVIRVRMALHMKGVSHEYIEQDLFNKSELLLESSPVEKKVPVLIHDGKPVCDSPAIVQYIDEVWAATGPPILPADPYERAVARFWTAYVDDKLFPAYAGTAKAATEEERTQQINEMFAVMGQLEEAFAQCSNGKAFFAGDSIGNLDIAVGCNLLLLEVLRSMYGVEFVDTGRTPLLAAWAKRFGETDAAREVVPDVHVAVEYAKKRQAYWAAAAATK

SEQ ID NO: 16120 - DNA, 870 bp, Glycine max
atcatcgataaaagcaaagaaacaagattcgaaaaagttagcgttaaacaatctccacttctctctcccacaagaaaatcaccaagaaaccgttaatcatctatggcgaacatgaacactcttcaacagatgatcttccctgacgagaacgctccgattcatcgcaaaaagagtgttactgctgcttctcttaagaccaaaggaactgtacttggtcagaagaaacctggaggggctcgtaaggctctgaatgatatcacaaacaagtctggtgttcttcccaaagcttcttctaagaacaagcaactcgcgtctgctgcaaagggagaaatcaacatagctggagagatgttcttgcatgatcacagcaagtgcatcaaagagcagcagagtctctgggatgatcacttctctgctgacattctactccaccatgattcgtccagcgtcaagggaaagaatctcaagtatgacaaagaagtgatggatggtaagaacaatctgacttgtgaggaaccagaagagattccatctcccaagctgactgattggctcaagagctcaaccccctggcgctctccaatacgtcatggctctatgatgatgccttccacacctctggcttggcggtttgattcagacgaattcactctcaaggaagactttgacgacctcttctgaatgtctgtttcttaagtgtctaagcttttcatccttcggatgaagtagtagtagtagtaatagcaagcaactttctttcgtttcagctcatcaatgcttcagttctttatgtacttaacaactctgtgtccgtccatcactctctttaactgatttcatgaattaaaaaagttggaatcttttcaagcg

SEQ ID NO: 16121 - protein, 192 aa, Glycine max
MANMNTLQQMIFPDENAPIHRKKSVTAASLKTKGTVLGQKKPGGARKALNDITNKSGVLPKASSKNKQLASAAKGEINIAGEMFLHDHSKCIKEQQSLWDDHFSADILLHHDSSSVKGKNLKYDKEVMDGKNNLTCEEPEEIPSPKLTDWLKSSTPWRSPIRHGSMMMPSTPLAWRFDSDEFTLKEDFDDLF

SEQ ID NO: 16122 - protein, 189 aa, Glycine max
MNTLQQMIFPDENAPIHRKKSVTAASLKTKGTVLGQKKPGGARKALNDITNKSGVLPKASSKNKQLASAAKGEINIAGEMFLHDHSKCIKEQQSLWDDHFSADILLHHDSSSVKGKNLKYDKEVMDGKNNLTCEEPEEIPSPKLTDWLKSSTPWRSPIRHGSMMMPSTPLAWRFDSDEFTLKEDFDDLF

SEQ ID NO: 16123 - protein, 183 aa, Glycine max
MIFPDENAPIHRKKSVTAASLKTKGTVLGQKKPGGARKALNDITNKSGVLPKASSKNKQLASAAKGEINIAGEMFLHDHSKCIKEQQSLWDDHFSADILLHHDSSSVKGKNLKYDKEVMDGKNNLTCEEPEEIPSPKLTDWLKSSTPWRSPIRHGSMMMPSTPLAWRFDSDEFTLKEDFDDLF

SEQ ID NO: 16124 - DNA, 766 bp, Glycine max
actcttcaaagtctccgccagacacttctccatcaaaactcctctcacacaatggccacttccttccctaccttgacaccttttcttttcatcctccttctctccatcccctccgttcttgaagcagctcatcaccacacggcggcgccggctccggctgtagactgttcgatgctcatactcaacatggctgattgtttgtcctttgtttccgctggaggcacggaggccaagccggctagttcgtgttgcaacggccttaagacggtgctcaagactgacgcagagtgtctatgtgaggcgtttaaaagcagtgcttctctaggagttactttgaacatgactaaagcagctacacttcccgctgcatgcaagcttcacgctccttctatggctgcttgtggattgtccgccgctcctactatggctccaggtcttgctccaggaggagctgctggacccgacttaagttttctatctccaaacccatctccagggaaccgcggatcttccttgcttcccttctccttcaccaccgtactcggtgctatgtccttcgtattgttattcttgtctcgtgtctgaagaagccagctagatttggttgtatgaaatggctttgggtttgggttttcgtgactttagttttgcgtgtcttttgagtctacttctgttttagaccatgtcggtttctgttcgtagtttatttaatcttaattacgtttcacattggtccttttatctaagaacatctctgatccctcgt

SEQ ID NO: 16125 - protein, 194 aa, Glycine max
TLQSLRQTLLHQNSSHTMATSFPTLTPFLFILLLSIPSVLEAAHHHTAAPAPAVDCSMLILNMADCLSFVSAGGTEAKPASSCCNGLKTVLKTDAECLCEAFKSSASLGVTLNMTKAATLPAACKLHAPSMAACGLSAAPTMAPGLAPGGAAGPDLSFLSPNPSPGNRGSSLLPFSFTTVLGAMSFVLLFLSRV

SEQ ID NO: 16126 - protein, 177 aa, Glycine max
MATSFPTLTPFLFILLLSIPSVLEAAHHHTAAPAPAVDCSMLILNMADCLSFVSAGGTEAKPASSCCNGLKTVLKTDAECLCEAFKSSASLGVTLNMTKAATLPAACKLHAPSMAACGLSAAPTMAPGLAPGGAAGPDLSFLSPNPSPGNRGSSLLPFSFTTVLGAMSFVLLFLSRV

SEQ ID NO: 16127 - protein, 137 aa, Glycine max
MLILNMADCLSFVSAGGTEAKPASSCCNGLKTVLKTDAECLCEAFKSSASLGVTLNMTKAATLPAACKLHAPSMAACGLSAAPTMAPGLAPGGAAGPDLSFLSPNPSPGNRGSSLLPFSFTTVLGAMSFVLLFLSRV

SEQ ID NO: 16128 - DNA, 957 bp, Glycine max
agacacgcgaaagcaaacacacagggagcgaagaagaaacccagctaggggcgtctggtgcattggcgcaggagaccaatggcgggcctcgggtttgaggagaccaagctccggctcggcctgccaggcggcagcaacgaggccgaggaggcggccgccgcggtgaggagctccggcaagaggggctacgccgagaccatcgacctcgtgctgaagctggagccagcgtcggcggccgcgccgccgtccgaggacgacgaggaagtggccgatggtgtcgcggaggcgcagccctctccggctgctgccgacgggcagttgaagcggtcgccgagccagtgcagcgtggtcaccgccgcgcagccggacgcgggaccccgagaagccgcgcgcgcccaaggcgcaggcggtggggtggccgccggtgcggtcgttccggaggaacatgctggcggcgacggcggagagagggggggcggcgctggtgaaggtgagcatggacggcgcgccctacctgcgcaaggtggacatgggcacctacaagagctaccaggagctgtccaaggccctggagaagatgttcagctccttcaccatcggcaacgactgctcgcaggctcaggggatgacgggcatgaacgagagcaagctggtggacctgctcaacggctccgactatgtgcccacctacgaggacaaggacggcgactggatgctcgtcggcgacgtcccctgggagatgttcgtcgcgtcctgcaagcgcctccggataatgaaaggatcagaagccatcggcctggcaccaagggcaatggagaaatgcaagagcaggagctgaccgtttgctaccaattcaagattatggctctgcttgcccaactatgtaccatactatactgcgtactcctacttcctatgttttatcttgttgttatatatgtgtagtatgtatacgtg

SEQ ID NO: 16129 - protein, 288 aa, Glycine max
MAGLGFEETKLRLGLPGGSNEAEEAAAAVRSSGKRGYAETIDLVLKLEPASAAAPPSEDDEEVADGVAEAQPSPAAADGQLKRSPSQCSVVTAAQPDAGPREAARAQGAGGGVAAGAVVPEEHAGGDGGERGGGAGEGEHGRRALPAQGGHGHLQELPGAVQGPGEDVQLLHHRQRLLAGSGDDGHEREQAGGPAQRLRLCAHLRGQGRRLDARRRRPLGDVRRVLQAPPDNERIRSHRPGTKGNGEMQEQELTVCYQFKIMALLAQLCTILYCVLLLPMFYLVVIYV

SEQ ID NO: 16130 - DNA, 1462 bp, Glycine max
ctattctattctatcagtctatctcctttgcactataccccactgcgtacttggaaaatggcttcttcttcttccctcctctcggccggcgtctccatcctcctgatccaagccgtggcggtgagcgtcggcgtggccaccgcgggagacgcgccggcgcagctgccgcggtcggagctggcggcgatcttcagggtgatggccgacctcctcggcgacccgacgtggccgcagctccacccgcggccctgcacagacacgccctggccgggcctccagtgcgagctcgcccccgacgacagcacccgcctccgcgccacccgcctccatttcggccccgacgtctccaccccgccgtgcaggcccggcgccaggctcgccgcccccgcgatccttggcctgccccacctcaggaccctctccctcttcggctgcttcgtcgacgccggccccgtcgagctgccgacggcgctcttcaccaacgcctcctccctcgagcagctcgttctcaagtccaacccgggcctgaccggccggataccggcaaccttgaccaacctgaagagcctgcaagtgcttagcctgtcccagaacggcttccacggtgagatccccagggagctcggcggcctcaccgcgttgcagcagctcgacctcagctacaacaacatcaccggcgagataccggatgagattggaggcatggcgagcctgtccatcctggacctgagctggaacggcatcggcggcggcgtgccggcggcattgggtggcctgaagatgctgcagaaggcggacctgagctacaactggctcgccggcgtggtgccaccggaggtcgggtccctgaaggagctggtgttcctggacctgagccacaacgggctcgcgggcccgctgccagcttcccttgccgggctggcgaagctgcagtacctgctcctgcaggacaaccccatcggcacggcggtgccggcggtggtcgggtcgctgcggcggctgcaggtgctgggcctgtcggggtgcaacctgacggggccgatcccgcggggcgcgttcgcggcgctggggagcctgatggcgctgtcgctggaccggaaccggctggacgggccgatcccggcgagcctcggcgcgctgccgcacctggggcagctcaacctgagccagaaccggctcgccggggagatcgcgctgccggtcgagttcgtggcgcggctcggcaggcggctcgacgtgcgcggcaacgaggagctgtgcgtcggtcagggaaggtacggcgggctgcaggccagctacctcagggcgccgccgtgcgtgggacgggggagcaccaacgggacggccgcgctggacgagggcgccgcgggggtttacggaccagtcgttgggctggtgtgccaccttcttgtgttgttggcactcaagctgtgacgtctctgatcaaatatttgagcgggcg

SEQ ID NO: 16131 - protein, 477 aa, Glycine max
LFYSISLSPLHYTPLRTWKMASSSSLLSAGVSILLIQAVAVSVGVATAGDAPAQLPRSELAAIFRVMADLLGDPTWPQLHPRPCTDTPWPGLQCELAPDDSTRLRATRLHFGPDVSTPPCRPGARLAAPAILGLPHLRTLSLFGCFVDAGPVELPTALFTNASSLEQLVLKSNPGLTGRIPATLTNLKSLQVLSLSQNGFHGEIPRELGGLTALQQLDLSYNNITGEIPDEIGGMASLSILDLSWNGIGGGVPAALGGLKMLQKADLSYNWLAGVVPPEVGSLKELVFLDLSHNGLAGPLPASLAGLAKLQYLLLQDNPIGTAVPAVVGSLRRLQVLGLSGCNLTGPIPRGAFAALGSLMALSLDRNRLDGPIPASLGALPHLGQLNLSQNRLAGEIALPVEFVARLGRRLDVRGNEELCVGQGRYGGLQASYLRAPPCVGRGSTNGTAALDEGAAGVYGPVVGLVCHLLVLLALKL

SEQ ID NO: 16132 - protein, 458 aa, Glycine max
MASSSSLLSAGVSILLIQAVAVSVGVATAGDAPAQLPRSELAAIFRVMADLLGDPTWPQLHPRPCTDTPWPGLQCELAPDDSTRLRATRLHFGPDVSTPPCRPGARLAAPAILGLPHLRTLSLFGCFVDAGPVELPTALFTNASSLEQLVLKSNPGLTGRIPATLTNLKSLQVLSLSQNGFHGEIPRELGGLTALQQLDLSYNNITGEIPDEIGGMASLSILDLSWNGIGGGVPAALGGLKMLQKADLSYNWLAGVVPPEVGSLKELVFLDLSHNGLAGPLPASLAGLAKLQYLLLQDNPIGTAVPAVVGSLRRLQVLGLSGCNLTGPIPRGAFAALGSLMALSLDRNRLDGPIPASLGALPHLGQLNLSQNRLAGEIALPVEFVARLGRRLDVRGNEELCVGQGRYGGLQASYLRAPPCVGRGSTNGTAALDEGAAGVYGPVVGLVCHLLVLLALKL

SEQ ID NO: 16133 - protein, 411 aa, Glycine max
MADLLGDPTWPQLHPRPCTDTPWPGLQCELAPDDSTRLRATRLHFGPDVSTPPCRPGARLAAPAILGLPHLRTLSLFGCFVDAGPVELPTALFTNASSLEQLVLKSNPGLTGRIPATLTNLKSLQVLSLSQNGFHGEIPRELGGLTALQQLDLSYNNITGEIPDEIGGMASLSILDLSWNGIGGGVPAALGGLKMLQKADLSYNWLAGVVPPEVGSLKELVFLDLSHNGLAGPLPASLAGLAKLQYLLLQDNPIGTAVPAVVGSLRRLQVLGLSGCNLTGPIPRGAFAALGSLMALSLDRNRLDGPIPASLGALPHLGQLNLSQNRLAGEIALPVEFVARLGRRLDVRGNEELCVGQGRYGGLQASYLRAPPCVGRGSTNGTAALDEGAAGVYGPVVGLVCHLLVLLALKL

SEQ ID NO: 16134 - DNA, 429 bp, Glycine max
atgcatatccgtttatcaaattaatttgctatctacgtaatattttcagtaacttgagtgagtgtctgttgtgattatttgaaacatgggtggtaaaggtggtagcagtgatggcggtagcggtggcggtaatgcaaaaagtggcggtggaggaaattctagcaaaggtggtggcagtggcgttggttcagggggttatatgaaagcccctggtggtgatggatcttacatttcaaggggaacatttgaaaacaaccctcaggggtatttcagtggtctgcatggtgcggataagggcaacaagaagtagtgccattaatttgttctaatgttttaagctgcatgttctcttaaatatttaactctcgtggtgatctatgtcgtcactatatcaatatatataaataaacgcagctatgaattactgtt

SEQ ID NO: 16135 - protein, 74 aa, Glycine max
MGGKGGSSDGGSGGGNAKSGGGGNSSKGGGSGVGSGGYMKAPGGDGSYISRGTFENNPQGYFSGLHGADKGNKK

SEQ ID NO: 16136 - DNA, 628 bp, Glycine max
atcgaaaaaagctcactcaaacacaggcacagccacccaacactatcacaaagccgcacaagctagacaatctcctcataagtgctagcggagcctcccagctagcaatatggcaaagtgcctcgccgtcgccctcctgctgctgctggtgctcgcgtactgcgacgggagggagctaaaccagaaggaccaggcactcgcaacggcacgcggtgccggggccgccggtggtggcgtcggcgaggagaagattttggggttgcctgacctgccgcctgtgggaaccgttaccggtaccagcaccactaacggcccgctggtggcgcttcctgcccttcccgggatccctgctcacccatgatcacctctagttcatgtgctggcttacaagatgaagctcacctcgtgactttacacttctaggctctagcttaacatcgcccggaaggccaacaccggcgtttcgctcatgtccatgttccttccttaatgggcgtctgtatcatctatccccgtctgtatttcttttcagttcatgttctagtatttttcgtttccttgatgtgctacatgtatgatgtatcatcaatgtaataaatacttcttttttcaaaaaaaaaaaaaaaaa

SEQ ID NO: 16137 - protein, 83 aa, Glycine max
MAKCLAVALLLLLVLAYCDGRELNQKDQALATARGAGAAGGGVGEEKILGLPDLPPVGTVTGTSTTNGPLVALPALPGIPAHP

SEQ ID NO: 16138 - protein, 58 aa, Glycine max
RKKLTQTQAQPPNTITKPHKLDNLLISASGASQLAIWQSASPSPSCCCWCSRTATGGS

SEQ ID NO: 16139 - DNA, 739 bp, Glycine max
acacaagttctaaacaatggtgtcgtcgaagaaaccgaaccaggagaagaagccgaggagcgatggcgtcaacaaagctggtggtggtaacacacgcagctccggttccaaaccgaagaagaagaataccaacgtacaggccaatgcgaagaaggagccggaggttcacgagatctcggagtcttcgagcagcgactccgcaggagaagcgagacgtgatgagccggtgaaaagcaatggcggaggagtggaagacgctaagatgattaggtttccgatgaataggatccggaggataatgagaagcgataactctgctcctcagatcatgcaggacgccgtgtttcttgtcaacaaggccacggaattgttcattgagcggttttctgaagaagcttatgaaagttctgtccaggacaaaaagaaattcatccactacaaacatctctcatctgtagttagcaacgacgagagatacgagttccttgcggattgtgttcgtgagaaactaaaagcagacgtggcgatggaggaatgggaaagaagcatgacagatgcaggctgataaatacaccggttggaagcaacctgaaccgcgtgtcctgtcctggtttattgattccatctgcctggtcttcaccttttttaataacctccataatgagattgcacatatttcattactaaaatgtatcaattgcaataatttttatagtataatctgccaacgatgaacttt

SEQ ID NO: 16140 - protein, 182 aa, Glycine max
MVSSKKPNQEKKPRSDGVNKAGGGNTRSSGSKPKKKNTNVQANAKKEPEVHEISESSSSDSAGEARRDEPVKSNGGGVEDAKMIRFPMNRIRRIMRSDNSAPQIMQDAVFLVNKATELFIERFSEEAYESSVQDKKKFIHYKHLSSVVSNDERYEFLADCVREKLKADVAMEEWERSMTDAG

SEQ ID NO: 16141 - protein, 100 aa, Glycine max
MIRFPMNRIRRIMRSDNSAPQIMQDAVFLVNKATELFIERFSEEAYESSVQDKKKFIHYKHLSSVVSNDERYEFLADCVREKLKADVAMEEWERSMTDAG

SEQ ID NO: 16142 - protein, 95 aa, Glycine max
MNRIRRIMRSDNSAPQIMQDAVFLVNKATELFIERFSEEAYESSVQDKKKFIHYKHLSSVVSNDERYEFLADCVREKLKADVAMEEWERSMTDAG

SEQ ID NO: 16143 - DNA, 892 bp, Glycine max
ctctttcgctgcggctctcgcgactcatcctccccatcccaaaaccctcgaaaagcaaaggcggcggcgcgacatggcagaggtcgaagctgcgctcccggtggcggcgacagagaccccggaggtcgccgccgagggcgacgcgggtgcggccgaggcgaaggggccgcacaagctgcagcggcagtggaccttctggtacgacatccagaccaagcccaagcccggcgccgcctggggcacctcgctcaaaaagggctacaccttcgacaccgtcgaagagttctggtgcttgtatgatcagattttccgtccgagtaagctggtaggaagtgctgattttcatttattcaaggctggggtagaaccaaagtgggaagatccagagtgcgcaaatggaggcaaatggactgtgatatctagcaggaagaccaatcttgataccatgtggcttgaaacgtgtatggctctgattggagagcagttcgatgaaagccaggaaatttgtggtgttgttgctagtgtccgccagagacaggataagctttcattatggactaagactgccagtaacgaagctgttcaggtggacattggcaagaaatggaaggaggttattgactacaatgataagatggtctacagcttccacgatgactcaagaagtcagaaaccaagcagaggtggacgatacaccgtctaaggctgcacacatgatgaagaccgcagcttggaaaagtggccgtgtagtgttttaccgagattcgaaccgcctcagctaatgttgtttgaggcaattttccaatctactatgtcgttttgctctctgattgcttgtggtatgcagagatgtcgtatgcactcaattttcctcgcaatatcccttgatttt

SEQ ID NO: 16144 - protein, 233 aa, Glycine max
SFAAALATHPPHPKTLEKQRRRRDMAEVEAALPVAATETPEVAAEGDAGAAEAKGPHKLQRQWTFWYDIQTKPKPGAAWGTSLKKGYTFDTVEEFWCLYDQIFRPSKLVGSADFHLFKAGVEPKWEDPECANGGKWTVISSRKTNLDTMWLETCMALIGEQFDESQEICGVVASVRQRQDKLSLWTKTASNEAVQVDIGKKWKEVIDYNDKMVYSFHDDSRSQKPSRGGRYTV

SEQ ID NO: 16145 - protein, 209 aa, Glycine max
MAEVEAALPVAATETPEVAAEGDAGAAEAKGPHKLQRQWTFWYDIQTKPKPGAAWGTSLKKGYTFDTVEEFWCLYDQIFRPSKLVGSADFHLFKAGVEPKWEDPECANGGKWTVISSRKTNLDTMWLETCMALIGEQFDESQEICGVVASVRQRQDKLSLWTKTASNEAVQVDIGKKWKEVIDYNDKMVYSFHDDSRSQKPSRGGRYTV

SEQ ID NO: 16146 - DNA, 733 bp, Glycine max
gaccatcgccgcagacagaggtcggaagaagaggaaggaaaaggcgctctctctctgtctctcccacacggcggcgcggtgtagccggcggcggcgatggctttctggcaggcgcgcgacttcctgttctgcggcgtgtgcggcaccctcctcgacttcaactcccaccgctacgcctcctgccctctctgcggcttcaagcgcaaggccaaagagatcgaagggaaagaaactcgctacgcggtcaccgcggaggatattagaagagagctaaagataaaaccgtttgtggttcttgaatcggcgccgaatatggacatagtcgtgcaaagatccctgacagagcgagcctgtccagaatgcaaccatcatgaactcgaatattacaccaagcagcttcggtcggcggatgaggggcagactatcttctacgagtgcccggagtgcggccacgcattcaacgagaatacctaagagaaaagttttctactatcagggtatgggtatgcgtggaagaatctgctcctgccattggttgacaatcgatgttcaccgaaatttcgcctgccatgggttgaccattgatgttccagctttttggcgtgtattctaatcttcaatgttacctgggatatgttaatgctcctttctatctaacggtttttgatggaacctgtctgtctgatgtatttgactgaatgtggccatagaaagagcaggatatattgtttct

SEQ ID NO: 16147 - protein, 125 aa, Glycine max
MAFWQARDFLFCGVCGTLLDFNSHRYASCPLCGFKRKAKEIEGKETRYAVTAEDIRRELKIKPFVVLESAPNMDIVVQRSLTERACPECNHHELEYYTKQLRSADEGQTIFYECPECGHAFNENT

SEQ ID NO: 16148 - protein, 90 aa, Glycine max
TIAADRGRKKRKEKALSLCLSHTAARCSRRRRWLSGRRATSCSAACAAPSSTSTPTATPPALSAASSARPKRSKGKKLATRSPRRILEES

SEQ ID NO: 16149 - protein, 86 aa, Glycine max
PSPQTEVGRRGRKRRSLSVSPTRRRGVAGGGDGFLAGARLPVLRRVRHPPRLQLPPLRLLPSLRLQAQGQRDRRERNSLRGHRGGY

SEQ ID NO: 16150 - DNA, 1154 bp, Glycine max
gcaagcatccattcgagcttcacaaaactagtactccaacgtgtgctcctttctcaagtgtgtgtgtccgtgagctagctttagtattagtgcagtttagctactagctagttggaacttacgttgacactgctcttcttctgcgtgttgtgcactagtgtgtccgtgtgctagtagcctacagcaccgtttctctcgggaggcatttcatatacacgcgattaacacgtacagtacagacatccttcaacgacaatcatggtcggcgctcaagagcaagggctgaagctgctggtgccgcggagcggcgtgagcatatacgccatccgcgtccagatggcgcttgccatgaagggtctggcttacgactacctccccgaggaccccaggtgcaagagcgacctcctcctcgcgtccaatcccgtgcacaagacactgcccgtcctcatccacagcggcaggcccgtctgcgagtcgctcatcatcgtggagtaccttgacgatgcattccccggcaacggcgcgtccatcctccccgccgacccctaccgccgcgccgtcgcccgcttttgggccgcctatgtcgacaacaagatgttcccttcgtgcatcggcattctcaatacggcgaatcagcaggagagagctgacaaggtggaggagaccttggcagctttcgggctcctagaggccgccttggcggagtgctccaaagaaggcgaggcggaggcgccgttcttcggtggtggctccatcgggttcctggacatcgcgctcgggtgctatattccctggttcgaagcgataggccgccttgctggcgtgccgccgttcctagacgcggcgaggacaccaaagctggctgcgtgggcggggcggttcagcgccgccaagccgttcattgccctgctgactgcggtggacaaggtggaggagtacatcactaaggtgctttatccaaagtggaacgtcgctgtcacagctagcaactaattaaagatcatgtatttccattgccggcaggggatcgtgtcgatccaataattactttgctttccgagttaactgttagatagattgcttagatagattgattggctctcaaggcaactatgtaattttttggctctcagagtaactttgagtttacttct

SEQ ID NO: 16151 - protein, 244 aa, Glycine max
MVGAQEQGLKLLVPRSGVSIYAIRVQMALAMKGLAYDYLPEDPRCKSDLLLASNPVHKTLPVLIHSGRPVCESLIIVEYLDDAFPGNGASILPADPYRRAVARFWAAYVDNKMFPSCIGILNTANQQERADKVEETLAAFGLLEAALAECSKEGEAEAPFFGGGSIGFLDIALGCYIPWFEAIGRLAGVPPFLDAARTPKLAAWAGRFSAAKPFIALLTAVDKVEEYITKVLYPKWNVAVTASN

SEQ ID NO: 16152 - protein, 218 aa, Glycine max
MALAMKGLAYDYLPEDPRCKSDLLLASNPVHKTLPVLIHSGRPVCESLIIVEYLDDAFPGNGASILPADPYRRAVARFWAAYVDNKMFPSCIGILNTANQQERADKVEETLAAFGLLEAALAECSKEGEAEAPFFGGGSIGFLDIALGCYIPWFEAIGRLAGVPPFLDAARTPKLAAWAGRFSAAKPFIALLTAVDKVEEYITKVLYPKWNVAVTASN

SEQ ID NO: 16153 - protein, 214 aa, Glycine max
MKGLAYDYLPEDPRCKSDLLLASNPVHKTLPVLIHSGRPVCESLIIVEYLDDAFPGNGASILPADPYRRAVARFWAAYVDNKMFPSCIGILNTANQQERADKVEETLAAFGLLEAALAECSKEGEAEAPFFGGGSIGFLDIALGCYIPWFEAIGRLAGVPPFLDAARTPKLAAWAGRFSAAKPFIALLTAVDKVEEYITKVLYPKWNVAVTASN

SEQ ID NO: 16154 - DNA, 906 bp, Glycine max
agaacatcctaatcgaaaaacagagcccgaagccaaaggaaatccactccaatccaatccccacagaaatccccatctcaaaaccctagcccgtccgatcccggcgagatggccaacccgagggtgttcttcgacatgaccgtcggcggcgcgccggccgggcgcatcgtgatggagctgtacaaggacgcggtgccgcggacggtggagaacttccgcgcgctctgcaccggcgagaagggcgtcggcaagagcggcaagccactgcactacaagggcagctcgttccaccgcgtgatccccgacttcatgtgccagggcggcgacttcaccaagggcaacggcaccggcggcgagtccatctacggcgagaagttcgccgacgagaagttcgtccacaagcacaccaagcccgggatcctctccatggccaacgcgggccccaacaccaacggctcccagttcttcatctgcaccgtcccctgcaattggctcgacggcaagcacgtggtcttcggcgaggtcgtcgagggcatggacgtcgtcaagaacatcgagaaggtgggctcccgcagcggcacctgctccaagcaagtcgtcatcgccgactgcggccagctctagatccgtccgcccgccggtcgcctgtcgtcgtcgccccgtgtcccgtgtcgtcgatctaaataagagagtcgtgtgtcgtgtcgtgtcttccccttgtccgtccgatgagatctccgtggttggtttaggagggttttaggtggactcttttggccgctggatctgtgtccggcggccatggttatcttcctgtgtctgctgctatcttactgtttgaatgagatgaactccgctatgaattatccaaaaaaaaaaaaaaaaaagcttatcgataccgtcgac

SEQ ID NO: 16155 - protein, 171 aa, Glycine max
MANPRVFFDMTVGGAPAGRIVMELYKDAVPRTVENFRALCTGEKGVGKSGKPLHYKGSSFHRVIPDFMCQGGDFTKGNGTGGESIYGEKFADEKFVHKHTKPGILSMANAGPNTNGSQFFICTVPCNWLDGKHVVFGEVVEGMDVVKNIEKVGSRSGTCSKQVVIADCGQL

SEQ ID NO: 16156 - protein, 162 aa, Glycine max
MTVGGAPAGRIVMELYKDAVPRTVENFRALCTGEKGVGKSGKPLHYKGSSFHRVIPDFMCQGGDFTKGNGTGGESIYGEKFADEKFVHKHTKPGILSMANAGPNTNGSQFFICTVPCNWLDGKHVVFGEVVEGMDVVKNIEKVGSRSGTCSKQVVIADCGQL

SEQ ID NO: 16157 - protein, 150 aa, Glycine max
MELYKDAVPRTVENFRALCTGEKGVGKSGKPLHYKGSSFHRVIPDFMCQGGDFTKGNGTGGESIYGEKFADEKFVHKHTKPGILSMANAGPNTNGSQFFICTVPCNWLDGKHVVFGEVVEGMDVVKNIEKVGSRSGTCSKQVVIADCGQL

SEQ ID NO: 16158 - DNA, 1006 bp, Glycine max
atctactgcccccgccgtcctcgcctcctcccccgatccaaatccgaaatttttcccctccccgcagcccgctccctcctccgcgcccgcactgtagcccgagcgctcggctccaccgccgtgggctgtagccgccgtcgctgccatggcgaacgacgggtcccccaagtccggtgacatcccgccctaccccgagatgattctcgcggcgatcgaggcgctgggcgacaagaacggctcgagcaagtccgccatctccagctacatcgaggagaagtacgagggcctcccctcggcgcacgcctccctcctcacggccaacctcgccagcatgaaggaggccggcaagctcgccttcgtcaagaacaactacctcaaggctgacgctccctccgccaccccggcaaagcgcggccgcggccgcccgcctaaggaccctaacgcgccgcccaagccgaaggctgcgcccaaggaccccaacacgcccaagcgcggccggggccgcccgcccaaggctaaggatcccatggccgacgccgtcaaggatgccgtcgccaaggcgaccaccggcatgccccggggccgcggccgcccgccgggtccctcctcggccaagaaggccaaggtcgccaaggaggctgcctctccggctcccgcggacggctccgctcctgccaagcgtggccgtgggcgcccacgcaaggtggcggtgtgaggcctgcgtgctgatgcctttcggtctgtgtatctcgctgtggttgcgacggtggtaagctcctaggtgtgaccgtgcttcttcgatttgtgctccgtactaattgttccgtcggcttagttgctcagtatgtgttgtaacctaatcgagatgagtgtgcacaatggatggatggatgtttttagcttcggttgtagttgactgtgctgctgtgagtgaacatgttcattttttttatcgccatctctgttgcttccgcattatgatgaagatgtttgtcatgttgttgtg

SEQ ID NO: 16159 - protein, 189 aa, Glycine max
MANDGSPKSGDIPPYPEMILAAIEALGDKNGSSKSAISSYIEEKYEGLPSAHASLLTANLASMKEAGKLAFVKNNYLKADAPSATPAKRGRGRPPKDPNAPPKPKAAPKDPNTPKRGRGRPPKAKDPMADAVKDAVAKATTGMPRGRGRPPGPSSAKKAKVAKEAASPAPADGSAPAKRGRGRPRKVAV

SEQ ID NO: 16160 - protein, 172 aa, Glycine max
MILAAIEALGDKNGSSKSAISSYIEEKYEGLPSAHASLLTANLASMKEAGKLAFVKNNYLKADAPSATPAKRGRGRPPKDPNAPPKPKAAPKDPNTPKRGRGRPPKAKDPMADAVKDAVAKATTGMPRGRGRPPGPSSAKKAKVAKEAASPAPADGSAPAKRGRGRPRKVAV

SEQ ID NO: 16161 - protein, 127 aa, Glycine max
MKEAGKLAFVKNNYLKADAPSATPAKRGRGRPPKDPNAPPKPKAAPKDPNTPKRGRGRPPKAKDPMADAVKDAVAKATTGMPRGRGRPPGPSSAKKAKVAKEAASPAPADGSAPAKRGRGRPRKVAV

SEQ ID NO: 16162 - DNA, 1310 bp, Glycine max
gaaaaatcttctccctgcctctgcgtagctcttctcgcccccgcttgtctccgccgcgggcgcggccggcgctcggccgtccgcacacgacgcaacgccccgccccgccctccgctcccactgttcggtcggcccaagatcctcatccgaacttaagacaaaatgggctcaagagtttttgctttgttcatcactggcgttgtccttttgggcagtagaatcttggccttggaccacactgttgttgaaaagagattaaatgagaacacggtatcacttacaacaaagggaagtccacaactatgccaactttgtgagcagtttgccacagaaaccctcttctatttgaaggagaatgagacccggatcgaaattatagatactcttcaccaagcttgtttgaaatttcattcacttaagttagagtgtacaaagttggttgattattatgcagcactgttcttcgcacaaattgattctctaagccctgaagaattttgcgtatcagcaagtctttgtgaggaagttacatacattcgcctcccaggacatgaacatgcttgcaccctttgtcatgaggttgttgatgagattcgtactggtcttgaagaccctgagatggagctcaagataatcgagatacttctgaaaggatgcaacaacacagagagcttcgtacagaagtgcaagaagatgataatccaaaatgcaccactcatactagaagatatcaagaagtttctcgagaagagagatttctgcgattctatccgtgtctgtggaggcaaaattgctcgccctccaggaggaggtctgagaggcctgtctactgtgtgagctctttcttttcctgaacacgcatgacgattgcgtggcatttaatgaagaacacgggggctatctgacctcacgcggtgatgtttagaagaaagattggtggtgtaagtctacgaacgaaaagatcttccataatgctatttccgagcagtgtactccctccgtcccataattcttgtcttagatttgtctagatacggatgtacctaacactaaaacgtgacttgatacatccgtatttggacaaatctaagacaagaattttgagacggagggagcatatattatacagcattggcattgtacctgtggagaagtgtatatattatcacagtcatcaaatgaaatttctgtgatagttgttgctacatgatcgttcatggaacgtaagcaaaatgtatgcttaaagtgtagagcatatacgcgtgtaaacaaattatgaactatgtgcagtggacttttatttatgatgc

SEQ ID NO: 16163 - protein, 224 aa, Glycine max
MGSRVFALFITGVVLLGSRILALDHTVVEKRLNENTVSLTTKGSPQLCQLCEQFATETLFYLKENETRIEIIDTLHQACLKFHSLKLECTKLVDYYAALFFAQIDSLSPEEFCVSASLCEEVTYIRLPGHEHACTLCHEVVDEIRTGLEDPEMELKIIEILLKGCNNTESFVQKCKKMIIQNAPLILEDIKKFLEKRDFCDSIRVCGGKIARPPGGGLRGLSTV

SEQ ID NO: 16164 - DNA, 675 bp, Glycine max
aatcgaaaaagcaatctagcgaaccgcggcagactcctccccgcaaacccccagatcccgacgagaccacgccacaccgcggcgaagccctagcctccggccagtgccgccgcagcgatggtgtacttcgattcatgggacgagttcgtcgaccggtccgtgcagctcttccgcgccgaccccatcaccactcgctattgtatgaagtaccggcactgcgacgggaagctcgtgctcaaggtcaccgacgaccgcgagtgcctgaagtttaagactgatcaagctcaggacgcaaagaagatggagaagcttaacaacatctttttcgctctcatgactcgtggacctgatgctgatataagcgaggtttcagggaaggaacaggcggagcagcagcaatcaaagaagggacggggcaggaggcagtagtatcatgttctgggtttctttcagaaagatcacaactgggagtggtgggtggatattttgatcgactcctgttagccatgttacaactgtgagtggtgggtggtctaagagtggtgagtagttttctaagacaatgtgcgccatcgttggatcctttttcctggcacaaaaccgcgaagtacacttacccacacaatcatggttgatgagacaaatcaaatctttaaaaaaaaaaaaaaaaaagct

SEQ ID NO: 16165 - protein, 103 aa, Glycine max
MVYFDSWDEFVDRSVQLFRADPITTRYCMKYRHCDGKLVLKVTDDRECLKFKTDQAQDAKKMEKLNNIFFALMTRGPDADISEVSGKEQAEQQQSKKGRGRRQ

SEQ ID NO: 16166 - protein, 89 aa, Glycine max
SKKQSSEPRQTPPRKPPDPDETTPHRGEALASGQCRRSDGVLRFMGRVRRPVRAALPRRPHHHSLLYEVPALRREARAQGHRRPRVPEV

SEQ ID NO: 16167 - protein, 75 aa, Glycine max
MKYRHCDGKLVLKVTDDRECLKFKTDQAQDAKKMEKLNNIFFALMTRGPDADISEVSGKEQAEQQQSKKGRGRRQ

SEQ ID NO: 16168 - DNA, 654 bp, Glycine max
actgttctctaatctaaatctaatttcacctttcctacaaaacctaaaacctttttcttattacacaacctaaaagtctctaagtttctgacaatgtcggaagagttcgacgaatctgagatcattttctccgacagcttcttcccaattcgccgccgcgaggacgtgatcgagaaagagaatcgtccggttaatttccgagaaaactccgaaagcagaatgagaaacacatcgaggctgagtaaaacgacgccgttgccttcaccggcggttttctcatcgtcgcttccagtgaatattccgggaaggaggtattctgaggatgaggaatattcggaagacggaggaaggagaatggttccgccgcatctgatcgttggacggaggatcgaaagcggtcaaatggcgttttccgtttgtacaggtcagggaaggactcttaaaggccgagatctgagccgggttcgtaattcggttctcaggttaaccggttttttggaggcttaaatatggaccggtttttgatttattaaaaaaattcgtcttccaatttttttttttatttagcggaagaaatcagttgtctgatattgttgttagtttagtcacttgaacgaatgtcaaaaggaaaatgtcaaaaagaacatttatttc

SEQ ID NO: 16169 - protein, 137 aa, Glycine max
MSEEFDESEIIFSDSFFPIRRREDVIEKENRPVNFRENSESRMRNTSRLSKTTPLPSPAVFSSSLPVNIPGRRYSEDEEYSEDGGRRMVPPHLIVGRRIESGQMAFSVCTGQGRTLKGRDLSRVRNSVLRLTGFLEA

SEQ ID NO: 16170 - protein, 95 aa, Glycine max
MRNTSRLSKTTPLPSPAVFSSSLPVNIPGRRYSEDEEYSEDGGRRMVPPHLIVGRRIESGQMAFSVCTGQGRTLKGRDLSRVRNSVLRLTGFLEA

SEQ ID NO: 16171 - DNA, 757 bp, Glycine max
agaaaggcgagcaaaagtttcacttggcctccccaacctcgtgtcctccggcgagtctctgcggcggcggcgatggcttccttctccgaggctccctccggcaaccccgacgccggcgccaagatcttcaagaccaagtgcgcgcagtgccacaccgtcgacgcgggcgccggccacaagcaaggtccaaacttgcatggtctgtttgggaggcagtcgggtaccaccgctggttactcctactctgcggcaaacaagaacaaggctgtggagtgggaggagaacactctgtatgactacttgcttaatcctaagaagtacatccctggaaccaagatggtcttccctgggctgaagaagccacaggaccgtgctgatctcattgcgtacctgaagaaagccacctcctcttgaaagggcatgatgatgctgtgatcttgtcatggcgagtgaattcattttgcagtaaaataagaagattagacattaatagtcacttgtttgatggggtgtgatccacgagacaattatcttgcgaatttcgttttcatgatatgggtttcatatcactaggtttagttggaaatcttcgtcaatcttttgattcagttgctggaaaaccccagtacgcatgttttgaccaccaggtggcggtgggactagaatgcacacccatgttgatgaacatgagatctttaaaattgatataaagctttctgcctgtgttatggagtcgtcaaatctgacttcattctgc

SEQ ID NO: 16172 - protein, 137 aa, Glycine max
RKASKSFTWPPQPRVLRRVSAAAAMASFSEAPSGNPDAGAKIFKTKCAQCHTVDAGAGHKQGPNLHGLFGRQSGTTAGYSYSAANKNKAVEWEENTLYDYLLNPKKYIPGTKMVFPGLKKPQDRADLIAYLKKATSS

SEQ ID NO: 16173 - protein, 117 aa, Glycine max
ERRAKVSLGLPNLVSSGESLRRRRWLPSPRLPPATPTPAPRSSRPSARSATPSTRAPATSKVQTCMVCLGGSRVPPLVTPTLRQTRTRLWSGRRTLCMTTCLILRSTSLEPRWSSLG

SEQ ID NO: 16174 - protein, 113 aa, Glycine max
MASFSEAPSGNPDAGAKIFKTKCAQCHTVDAGAGHKQGPNLHGLFGRQSGTTAGYSYSAANKNKAVEWEENTLYDYLLNPKKYIPGTKMVFPGLKKPQDRADLIAYLKKATSS

SEQ ID NO: 16175 - DNA, 1041 bp, Glycine max
actcctttgggtaaaccacaccctcaatctagaaaaatggggtctcgtacacaaaacctctcttttcttatcctcctcttccttggctttcttgccgtctccttcgcttgcgactgtagccctcctaaaccatcacctcacccccacaaaccgcctaaaccaccggcagtaaaacctcccaaaccacccaccgtcaaaccacacccacaccctaaaccccctaccaaaccgcccactgtcaaaccacccccacatccgaaaccccctaccaaacctcatcccaccccgaaaccacccacgaaaccgcccaccgttaaaccacctccgtccatcccgaaaccacccacgaaaccgcccaccgttaaacctcctccgtctaccccgaaaccacccacgaaaccgcccactgttaaaccacctccgtccacccctaaaccacccactcataagcctccacccgtcgtaacgccgccatcaccgtgcccaccgccacctgttgttacgccaccaacaccaaccccaccggtcgtaacaccgccaacaccaactccaccaaagccagagacttgcccaatcgacacgttgaagctaggcgcttgtgtggacgttcttggaggtttgattcacatcgggcttggtaaaacgcacgctaaagaaaagtgttgtccggttttgggaggtttagttgacctagacgcagccgtttgcttatgtaccaccattaaagccaaacttctcaacatcgaccttatcatcccaattgctcttgaggttcttgtcgcctgtggaaagactccaccacctggcttcaaatgtccagcttaattgatgaagagtctccgaagctttcgtttttgtagaatgtgttggattgatgatctcttttgatgagaggttaatgtgcgtgtgtgggaggtttaatcacttgtttcatttgatacaataaaaagggtttatttgcgttttctttttttttttggtcaaaggtttatttgtgttttcatgttgtacttttaataagaagaaaaactgtaaaacggc

SEQ ID NO: 16176 - protein, 274 aa, Glycine max
TPLGKPHPQSRKMGSRTQNLSFLILLFLGFLAVSFACDCSPPKPSPHPHKPPKPPAVKPPKPPTVKPHPHPKPPTKPPTVKPPPHPKPPTKPHPTPKPPTKPPTVKPPPSIPKPPTKPPTVKPPPSTPKPPTKPPTVKPPPSTPKPPTHKPPPVVTPPSPCPPPPVVTPPTPTPPVVTPPTPTPPKPETCPIDTLKLGACVDVLGGLIHIGLGKTHAKEKCCPVLGGLVDLDAAVCLCTTIKAKLLNIDLIIPIALEVLVACGKTPPPGFKCPA

SEQ ID NO: 16177 - protein, 262 aa, Glycine max
MGSRTQNLSFLILLFLGFLAVSFACDCSPPKPSPHPHKPPKPPAVKPPKPPTVKPHPHPKPPTKPPTVKPPPHPKPPTKPHPTPKPPTKPPTVKPPPSIPKPPTKPPTVKPPPSTPKPPTKPPTVKPPPSTPKPPTHKPPPVVTPPSPCPPPPVVTPPTPTPPVVTPPTPTPPKPETCPIDTLKLGACVDVLGGLIHIGLGKTHAKEKCCPVLGGLVDLDAAVCLCTTIKAKLLNIDLIIPIALEVLVACGKTPPPGFKCPA

SEQ ID NO: 16178 - DNA, 995 bp, Glycine max
aatgagaagctggttcacagtcttctagtccacttgaaatcaaaagaaccaccaatggcctcttcaatatccctcttcctcctccctctccttcttcttctctcacacgcttcagaagcttcaacggtaatattctacaacaagtgcacatacacagtctggcctggtatccaagctagctccggtcagccgctactcggcggcggcggattcaaactttctcctaaaagagcttacactctccaacttccatcgctttggtctggtcggttctggggccgccacggttgctccttcgatagatctggccgtggtcgttgcgccaccggagactgcggtggttctctcctctgtaacggagccggaggtgtacctccagctactctcagagatcaccctcggccatgaccaggacttttatgacgtcagcctcgttgatggatacaacttagctatgtcgataatgcctgtgaaaggcacagggaagtgcacctacgcaggttgcgttagcgacttgaacagaatgtgtccggttggtctacaagtccgttcacgtgatgggaaacaggtagtagcctgtaaaagcgcatgttctgcctttaactcaccacgctactgttgcaccggttcgttcggtaacccacagacgtgcaggcccacggcttactccaagatcttcaaagtagcttgtcctaaggcctactcctacgcttacgatgaccccactagcattgccacgtgtaccaaagctaactacgtcgtcactttttgcccccaccgtggccgttgattaagatcttagcattaaatataattaagaataaatttataaatttactctgttatttggcacgaggtttcttttgagttattaagacttttccagcttaatgacgtaatttactgctttccgatttattgttctatctatttttttcgttcatctagagctaatcacatgagatttcatccaatcgttattaagactttttcag

SEQ ID NO: 16179 - protein, 135 aa, Glycine max
NEKLVHSLLVHLKSKEPPMASSISLFLLPLLLLLSHASEASTVIFYNKCTYTVWPGIQASSGQPLLGGGGFKLSPKRAYTLQLPSLWSGRFWGRHGCSFDRSGRGRCATGDCGGSLLCNGAGGVPPATLRDHPRP

SEQ ID NO: 16180 - protein, 117 aa, Glycine max
MASSISLFLLPLLLLLSHASEASTVIFYNKCTYTVWPGIQASSGQPLLGGGGFKLSPKRAYTLQLPSLWSGRFWGRHGCSFDRSGRGRCATGDCGGSLLCNGAGGVPPATLRDHPRP

SEQ ID NO: 16181 - protein, 111 aa, Glycine max
MSIMPVKGTGKCTYAGCVSDLNRMCPVGLQVRSRDGKQVVACKSACSAFNSPRYCCTGSFGNPQTCRPTAYSKIFKVACPKAYSYAYDDPTSIATCTKANYVVTFCPHRGR

SEQ ID NO: 16182 - DNA, 948 bp, Glycine max
  misc_feature (858)..(858): n is a, c, g, or t
atatattaaattttttcgtcacccagaagaagagcgagagagagtgggggaacgaagaagctacagctacagctgaaacagaagctccttcgatctacaatctatagcgattaagctctcattttctgagagtgttctttctttctctctctctctctctcaccgtgattccaccatttccccatcatgatttctgctaccaaactcaaatccgttgatttttacaggaaaatcccgagagatttgactgaggcgtcgctatcaggagccggattatccatagtggcagctctggctatgatgtttttatttggaatggaactaagtagttatttgtctgttagcacctcgacatctgtaattgttgacaagagttctgatggtgactatttacgtatcgatttcaatatcagttttcctgcactctcatgtgagtttgcatcagttgatgtgagtgatgtgctgggaacaaacaggctcaatataacaaaaacagttcgtaagttttctattgattccaatttaagacccactggtgctgagtttcattcaggtacagttgcaaatgctgtaaagcatgatgatgaagtagatgaagaatctgttgaaggttctttttcactcacaacacataattttgataaatatgttcatcagtaagtggcaacttctaaaaatatttcattcaatttttctttgttttagctttgtgagaactcaaaagttccttttaatatgcattgtttactcggtttttaataattcttttgcaggtttccaattacggctgtaaatttttatgcaccttggtgttcctggtgtcaacgtttgaaaccttcatgggagaagacggctaanattatgaaagagagatatgacccagaaatggatgggcgtattattttggcaaaggtagattgcactcaagaaggtgatttatgcaggagg

SEQ ID NO: 16183 - protein, 157 aa, Glycine max
MISATKLKSVDFYRKIPRDLTEASLSGAGLSIVAALAMMFLFGMELSSYLSVSTSTSVIVDKSSDGDYLRIDFNISFPALSCEFASVDVSDVLGTNRLNITKTVRKFSIDSNLRPTGAEFHSGTVANAVKHDDEVDEESVEGSFSLTTHNFDKYVHQ

SEQ ID NO: 16184 - protein, 120 aa, Glycine max
MMFLFGMELSSYLSVSTSTSVIVDKSSDGDYLRIDFNISFPALSCEFASVDVSDVLGTNRLNITKTVRKFSIDSNLRPTGAEFHSGTVANAVKHDDEVDEESVEGSFSLTTHNFDKYVHQ

SEQ ID NO: 16185 - protein, 119 aa, Glycine max
MFLFGMELSSYLSVSTSTSVIVDKSSDGDYLRIDFNISFPALSCEFASVDVSDVLGTNRLNITKTVRKFSIDSNLRPTGAEFHSGTVANAVKHDDEVDEESVEGSFSLTTHNFDKYVHQ

SEQ ID NO: 16186 - DNA, 1645 bp, Glycine max
aaaatagaagaaaggattatcagagtcgcattgtcgattcagagaaaaaaaaattgaattcaatctgatagatcctatcacagcaaaaaaaattggattgaataaggtgtttccgatttcaaaaacaatcacacaaatggttaataaaagttaggtttcttaatttctgcttcttattacatcatcttaaatctttggttttggatccatccaataatcatggagagcataataagcaagctccgcaacctagacgcctaccctaaaatcaacgaggatttctacagccgcacgctctccggcggtgtcatcactctcgcttcctccattctcatgctcttgctcttctactccgagctccggttgtatcttcacgctgtcaccgagaccaagcttgtcgtcgacacttccagagccgaaacgctgcgtatcaattttgatgttacgtttcctgcgcttccatgttccatactcagtcttgatgccatggacatcagcggagagcagcgtctagatgttaaacacgatataatcaagaagagattagactctcgtggcaatgtgatagaaacaaggcaagaaggaattggtgctcccaagattgaaaagccattgcagaggcatggaggcaggctcgagcacaatgagacttattgtggttcctgttatggttctgaagtgtcagatgatgattgttgtaattcctgtgaggatgttcgtgaagcataccgtaagaaaggttgggcactttcaaatcctgatttaattgaccagtgcaaaagagaaggattcttacaaagaatcaaggatgaagaaggtgaaggatgcaatgtgtatggtttcttggaagtaaataaggttgcagggaattttcattttgcacctgggaaaagctttcagcaatctggtgtacatgtacatgacctgctggcttttcaaaaggattcttttaatttaagtcaccacatcaacagattaactttcggagagtatttccctggtgttgttaatcctcttgacaacgtgcattggacacaagaaacaccaagtgggatgtaccagtattttattaaggttgtgcctacagtatacactgatgtgagtgggcatactatccagtcaaaccagttctctgttacagaacacttcaggactggagacatgggccgtctgcagtcccttcccggagttttctttttctatgacctctctccaattaaggttacttttacggaagaaaatgtctcattcttacattttcttactaatgtttgtgccatagttggaggtattttcaccgtttctggaatactagattcattcatctatcacggtcaaagggctatcaagaagaagatggaacttggtaaatttaactgatgggtgctatttgagtaatttcgagcgaatggctctccagagacaatctattcaagagaaggtcaactactgattgaaattccccttggggttctgagttcttcggttacaacaaaaggattttgcccttagatcaaggttgaaatgcctagatatcatgtgcaacaaatgctactttgccttgattcatatcttttctgacagctctgatgttgtgaatgttatgtgttttatggaaagtagaggggcttttccttgcagaagc

SEQ ID NO: 16187 - protein, 386 aa, Glycine max
MESIISKLRNLDAYPKINEDFYSRTLSGGVITLASSILMLLLFYSELRLYLHAVTETKLVVDTSRAETLRINFDVTFPALPCSILSLDAMDISGEQRLDVKHDIIKKRLDSRGNVIETRQEGIGAPKIEKPLQRHGGRLEHNETYCGSCYGSEVSDDDCCNSCEDVREAYRKKGWALSNPDLIDQCKREGFLQRIKDEEGEGCNVYGFLEVNKVAGNFHFAPGKSFQQSGVHVHDLLAFQKDSFNLSHHINRLTFGEYFPGVVNPLDNVHWTQETPSGMYQYFIKVVPTVYTDVSGHTIQSNQFSVTEHFRTGDMGRLQSLPGVFFFYDLSPIKVTFTEENVSFLHFLTNVCAIVGGIFTVSGILDSFIYHGQRAIKKKMELGKFN

SEQ ID NO: 16188 - protein, 348 aa, Glycine max
MLLLFYSELRLYLHAVTETKLVVDTSRAETLRINFDVTFPALPCSILSLDAMDISGEQRLDVKHDIIKKRLDSRGNVIETRQEGIGAPKIEKPLQRHGGRLEHNETYCGSCYGSEVSDDDCCNSCEDVREAYRKKGWALSNPDLIDQCKREGFLQRIKDEEGEGCNVYGFLEVNKVAGNFHFAPGKSFQQSGVHVHDLLAFQKDSFNLSHHINRLTFGEYFPGVVNPLDNVHWTQETPSGMYQYFIKVVPTVYTDVSGHTIQSNQFSVTEHFRTGDMGRLQSLPGVFFFYDLSPIKVTFTEENVSFLHFLTNVCAIVGGIFTVSGILDSFIYHGQRAIKKKMELGKFN

SEQ ID NO: 16189 - protein, 297 aa, Glycine max
MDISGEQRLDVKHDIIKKRLDSRGNVIETRQEGIGAPKIEKPLQRHGGRLEHNETYCGSCYGSEVSDDDCCNSCEDVREAYRKKGWALSNPDLIDQCKREGFLQRIKDEEGEGCNVYGFLEVNKVAGNFHFAPGKSFQQSGVHVHDLLAFQKDSFNLSHHINRLTFGEYFPGVVNPLDNVHWTQETPSGMYQYFIKVVPTVYTDVSGHTIQSNQFSVTEHFRTGDMGRLQSLPGVFFFYDLSPIKVTFTEENVSFLHFLTNVCAIVGGIFTVSGILDSFIYHGQRAIKKKMELGKFN

SEQ ID NO: 16190 - DNA, 1082 bp, Glycine max
attgtgtggatgaggacagtgtagtgtagtgccattgagaagcattaatgatactagttagccatatccaagctccttgcgtaggagccatgttttcaaagtgttgttctctattgtctctacccaaattcatcactgttacaaacccaccaacgttttccaaccctgtacctaatttcatcactagaagaataagctccacaagaccctttcatctcacactcgccaaagcagagggaaacctcgattcagattcaccctcaacctccacttcttctccttctccttctccttttgccactgaccaaacggttttcgtgactggcaaggatgttccattggagggtgtcatccagttcgagaaaccagcctcttctcctccttttgaaaaatgggggcgtgtggctctgctagctggtgcggatgtgttggccttgtttgtgttttcgacaattggaagatatagtcatggactttctgttttggaccttgagacaccgcgcactgctgacccttttattgcggggtggtttttgggtgcttacttccttggaggttttggggaggatggccgcgggatgaacggtctctcgaagggtgtcgttgctactgcgaagtcatgggctgttgggatccctataggaatagtaataaaggcagcaacatcgggtcatctaccgaattatggttttgtatttgtgagtctgggaagcactgctgttttacttgttacattcagagcattattatatactattcttccagttgacaatagtaagaagagcgatgactatcgccgcggcagtccctttgaactctttgagctgctaacatcattagtacggcggtggtagcaatggtttgcatgttcaaggcaccataatgtgtatgcatctaaacatcagtttccatcgctagtctccttgtactatctgctcgtatgaaaaaagtaagagtagatgtttactgcagttgaattttattcaactaaatgtgtatactattattacacctttgatcaatcaaaagtgcattaactaccaaaaaaaaaaaaaaaaaatcaagattcgcacgagaccatt

SEQ ID NO: 16191 - protein, 268 aa, Glycine max
MILVSHIQAPCVGAMFSKCCSLLSLPKFITVTNPPTFSNPVPNFITRRISSTRPFHLTLAKAEGNLDSDSPSTSTSSPSPSPFATDQTVFVTGKDVPLEGVIQFEKPASSPPFEKWGRVALLAGADVLALFVFSTIGRYSHGLSVLDLETPRTADPFIAGWFLGAYFLGGFGEDGRGMNGLSKGVVATAKSWAVGIPIGIVIKAATSGHLPNYGFVFVSLGSTAVLLVTFRALLYTILPVDNSKKSDDYRRGSPFELFELLTSLVRRW

SEQ ID NO: 16192 - protein, 254 aa, Glycine max
MFSKCCSLLSLPKFITVTNPPTFSNPVPNFITRRISSTRPFHLTLAKAEGNLDSDSPSTSTSSPSPSPFATDQTVFVTGKDVPLEGVIQFEKPASSPPFEKWGRVALLAGADVLALFVFSTIGRYSHGLSVLDLETPRTADPFIAGWFLGAYFLGGFGEDGRGMNGLSKGVVATAKSWAVGIPIGIVIKAATSGHLPNYGFVFVSLGSTAVLLVTFRALLYTILPVDNSKKSDDYRRGSPFELFELLTSLVRRW

SEQ ID NO: 16193 - DNA, 1023 bp, Glycine max
ctgttttaaggccccaaaccctctcgaatccgcccctctcctgcgccgtcgtcctcctcctcctcctcgcctccccgcggccacacctcgactcgctccctccctcgagatcatctgtgtcatccttttgaggcgagatggcggctacattcaatgttaacgctgaggcaggccttcaaaagcttgatggctaccttctgtctcgcagttacatctctggataccaagcttccaaggatgacttggctgtgtattctgagttctcagttgctccaccatcgacctgcaccaatgttgcaaggtggtacaatcacattgatgcgctcctgaagctgagcggggttactgcggccggtcaaggtgtgaaggttctgtcatcagttgtccctgaaacctcaactactgatgttgctgaggctcctgcagctgatgatgacgatgacagtgatgttgacctttttggagaggaaaccgaagaggagaagaaggcagctgaagagcgtgctgccaaagcaaaggcttctaccaagaagaaagaatctggcaagtcgtcagttttgcttgatgttaagccatgggatgatgagactgacatggtcaagcttgaggaagctgtccgaagcatcaagatggagggccttctgtggggcgcttccaagctcatgccagttggatatggcatcaagaagcttcagattatgatgaccatcattgatgaccttgtgtctgttgacactctgattgaagaccatctctgcgtcgagccagccaacgagtacatccagagctgtgacattgttgccttcaacaaaatctaaatcttcctgaggcaagtgatggcggtcggtggacaatgcagcagcacaaacaatatatctacagttttccgttgccgtagctaaagcagcataacatattctgccctgtgaggtttttggaccttaggttgagttgggtcgtagtattactactgagtgctatttgcttcgtatgaaatgagacaatgtggttgattcctgttgc

SEQ ID NO: 16194 - protein, 226 aa, Glycine max
MAATFNVNAEAGLQKLDGYLLSRSYISGYQASKDDLAVYSEFSVAPPSTCTNVARWYNHIDALLKLSGVTAAGQGVKVLSSVVPETSTTDVAEAPAADDDDDSDVDLFGEETEEEKKAAEERAAKAKASTKKKESGKSSVLLDVKPWDDETDMVKLEEAVRSIKMEGLLWGASKLMPVGYGIKKLQIMMTIIDDLVSVDTLIEDHLCVEPANEYIQSCDIVAFNKI

SEQ ID NO: 16195 - DNA, 767 bp, Glycine max
aggttagattcagaatctgttaggttcagcagctttttctcctctttgtggtttttgagctacttgtcttgcgtatatagttttagctgtatataaatgaagaagcagattatggatgagtctgagaatttgtgtttcaagaagtcactgatgtcgcctcctcctcctccaccgcttcctccatctccaggatatggatcaagaaagatcgatggagacagcataaccaatatacagatcaagaagttctggaggcagaagcagatcattgaagaggagcatctctttgctgctattaaggctgcagctcgtgtcagagcccgcaatctctctgatgaggactacaaacgctttgaagaaagcttagacatccaggaccctgaaatcgaagctcatgaggggattaaagactggtggatgaagagcaagttcgcatacttgaaccagcctgctcttggatcttctgattcactgaagagaaaaaggttttcgtctgatgtaccaaactatttctccttcaagccttgcattcctctctatgcaacgtcgctcaatgtcttttagatatgagcaaaatctctttcaagatcaattgtcttgtgtatatatgtctgtctacatatatgtgtgtttgtgtctatgtacattcatgtgttactgttcccatgttaatggatatggactttattgtgtgattgtcgatttgtaactattgaataaaattcaatattagtatggaacattaatttcttcttgttccatagatg

SEQ ID NO: 16196 - protein, 155 aa, Glycine max
MKKQIMDESENLCFKKSLMSPPPPPPLPPSPGYGSRKIDGDSITNIQIKKFWRQKQIIEEEHLFAAIKAAARVRARNLSDEDYKRFEESLDIQDPEIEAHEGIKDWWMKSKFAYLNQPALGSSDSLKRKRFSSDVPNYFSFKPCIPLYATSLNVF

SEQ ID NO: 16197 - protein, 150 aa, Glycine max
MDESENLCFKKSLMSPPPPPPLPPSPGYGSRKIDGDSITNIQIKKFWRQKQIIEEEHLFAAIKAAARVRARNLSDEDYKRFEESLDIQDPEIEAHEGIKDWWMKSKFAYLNQPALGSSDSLKRKRFSSDVPNYFSFKPCIPLYATSLNVF

SEQ ID NO: 16198 - protein, 137 aa, Glycine max
MSPPPPPPLPPSPGYGSRKIDGDSITNIQIKKFWRQKQIIEEEHLFAAIKAAARVRARNLSDEDYKRFEESLDIQDPEIEAHEGIKDWWMKSKFAYLNQPALGSSDSLKRKRFSSDVPNYFSFKPCIPLYATSLNVF

SEQ ID NO: 16199 - DNA, 1014 bp, Glycine max
aaatctcctctcccttgagcagttttaatctttctcgctcctccccctccgatctcccgacgagattgtactcgctcccggatcgtcgccggagcgtctcctcgatcaggcaagatgaacaggaagccaggcgactgggactgcaggtcgtgccagcacctcaacttcagtcgccgggacctatgccagcgctgcggcgagccacgcagtgccgctgaccgtggcagcgtcggtggcgctcttggtggtgactacgccaactttggcggccgtgggcgggggtggttcctcctttggtaccggctttggtgccggctctgacgtccgcccgggcgactggtactgcacctgcggggcgcacaacttcgccagccgctccagctgcttcaagtgtgctgccttcaaggaggaagctgccgtcaatggtggcgctggtggctttgatggtgacatgtcacgctcaaggggcttcggcttcggcgctgtcggtggcatgggtggcggcatgggagccggcgcggccggtggtcgtgccagccgccctggctggaagtctggcgactggatttgcaccaggtctggatgcaacgagcacaacttcgccagcaggcaggagtgcttcaggtgcaacgcaccgagggactccggtagcgccacgccatacgaaaatttcttgcactgaggtgtaggaaggccgcggcgatgagcagaagcagcaaagggtgtccgtgtcccgcagtcgacatcatcatcataagaagaagaagaagaaagtagaatgcaaagaaatcctcctcgagtgcatgcttactagttttgtctcttcccgttttagatttggttgtcatttcccatttgggaccgtccgtctgtccgtctgatcgatgatgactagctatgtttaccgttttattatttccgttcctttcatcaagtttgcagttcgagttatgtaacccaaagacgtatgctttgcttcagaagtattattgactagtagtactattgcgtctt

SEQ ID NO: 16200 - protein, 88 aa, Glycine max
MVALVALMVTCHAQGASASALSVAWVAAWEPARPVVVPAALAGSLATGFAPGLDATSTTSPAGRSASGATHRGTPVAPRHTKISCTEV

SEQ ID NO: 16201 - protein, 81 aa, Glycine max
MVTCHAQGASASALSVAWVAAWEPARPVVVPAALAGSLATGFAPGLDATSTTSPAGRSASGATHRGTPVAPRHTKISCTEV

SEQ ID NO: 16202 - protein, 76 aa, Glycine max
MSRSRGFGFGAVGGMGGGMGAGAAGGRASRPGWKSGDWICTRSGCNEHNFASRQECFRCNAPRDSGSATPYENFLH

SEQ ID NO: 16203 - DNA, 651 bp, Glycine max
ctcaccctcaccctcagcgcggtgctctccatgattagctcctcttggagggcaggaacgcacgtcagcgcgaactcaatcgcagcagccgcggctatatagcctcgggggcactgctgcacttgctgctcggggtcagcgaggagtacgtctacgtcgtgatggggtggagatctgcggccggccgtctgctggcgatcctgctcgttgtgcacctcctcgtcgcctcctcccacgccgcccgcttcacgaggagctacaggatgatggccgtggaggctcggacgttccgtggcgctggtggttcagcagagggcaacaggagggagagcgacgcgatcgtggaggagatgttcgggaggatggcgctgcagacaaccgactacccgggttcaggccctaacgatcgtcacactcccaaggcgcccgggacatgatcgtgccatgtcaaagtccagaccctcagctcgcccagacgcacgtcatatatagtatatgatgtacagaagatttattagctcatcgacaaattagaacttagaacccatcaaaatgggggattattcaagtgtaaattcgtatacgtgtggaggttactgtaagattgcgtgctatgccatttctattaatagaagtctaatgcttttatcc

SEQ ID NO: 16204 - protein, 91 aa, Glycine max
MGWRSAAGRLLAILLVVHLLVASSHAARFTRSYRMMAVEARTFRGAGGSAEGNRRESDAIVEEMFGRMALQTTDYPGSGPNDRHTPKAPGT

SEQ ID NO: 16205 - protein, 57 aa, Glycine max
MMAVEARTFRGAGGSAEGNRRESDAIVEEMFGRMALQTTDYPGSGPNDRHTPKAPGT

SEQ ID NO: 16206 - protein, 56 aa, Glycine max
MAVEARTFRGAGGSAEGNRRESDAIVEEMFGRMALQTTDYPGSGPNDRHTPKAPGT

SEQ ID NO: 16207 - DNA, 882 bp, Glycine max
agcaagcagctgatccgagttaaccattagccaaaagtaatcttgcttttccatttcccgagagagctcagttcgtgtctgcactccagtccagtgtttgtttgagcagcagccatggcctccaaccaggacaaggcaagctaccgcgccggcgaggccaaggcccacaccgaggagaaggccggacaggtgaccggcgcggccaaggacgaggcgtgcgacgccaaggaccgggcgtcgggcgcggcggggcaagcgacggggaaggggcagggcgccgtggaggccacgaagcagaaggccggcgaggcggggcagaagacgtccgagacggcgcaggccggcaaggaccgggccgccgagggcaaggaccggaccggcagctacctcggccacgcgaccgaggggaccaagcagaaggcctccgaggcgacggggtacacgcaggacagggcttccgacgcggcgcagtacaccaaggactccgccgtcgccggcaaggacaagaccggcagcgtcctcagccaggccggcgagcaggtgaagaacgcggtggtcggcgcgaaagacgcggtggcgagcacgctggggatggggggagacaacacctccagcgcaaccaaggacgcgagcaccaccgagaccatcaccaagagccgtcactagattatacctgtcgcggttgcataatgctttctttccttcagttcccctcgagctccacattcctgtggtgtgtccgagtctctatgtcgaggtcgggcgagaatgtctgactgacgagagatgtatcttggtgttcagagttctcgttttaagttccacaatggtgtaataataacaataataataaagtactgcgtaccgtaagtaatttcgtcc

SEQ ID NO: 16208 - protein, 183 aa, Glycine max
MASNQDKASYRAGEAKAHTEEKAGQVTGAAKDEACDAKDRASGAAGQATGKGQGAVEATKQKAGEAGQKTSETAQAGKDRAAEGKDRTGSYLGHATEGTKQKASEATGYTQDRASDAAQYTKDSAVAGKDKTGSVLSQAGEQVKNAVVGAKDAVASTLGMGGDNTSSATKDASTTETITKSRH

SEQ ID NO: 16209 - DNA, 719 bp, Glycine max
acgagaaaagagaaagagcgagagccgaggagaagataaaatctacaggaaaaacaggggagaggcagagagaacagaggcgaaggagcaatgccgacgggtcggatgagcggcaacatcacgcaggactgggagccggtggtcctgcggcgggcgaagcccaaggcggccgacctcaagtccgccaaggcggtgaaccaggcgctgcggacgggcgcgccggtggagacggtgcgcaaggcggcggcggggacgaacaagaatgcctccgccgcggccgtggcggcgcccgcgcggaagctggacgagatgacggagccggcggggctggggcgcgtgggcggcgacgtgcgcgcggccatccagaaggcgcgcgtcgccaaagggtggagccaggcggagctggccaagcgcgtcaacgagcgggcgcaggtggtgcaggagtacgagagcggcaaggccgtccctgtccaggccgtgctcgccaagatggagcgcgccctcgaggtcaagctccggggcaaggcggttggggcgcccgcgccgacaaagtgatggttcgtggggacatatcctgcctgtgaatttgtgatgaatggtagtaaatcggatctgtaaatctcgggttgctttgtggtagattgggctgtaagtcgtgcaaagtgatgtctagaagtctcatgtggaatttgatgctaaatcctattgttagctgattt

SEQ ID NO: 16210 - protein, 193 aa, Glycine max
EKRERARAEEKIKSTGKTGERQREQRRRSNADGSDERQHHAGLGAGGPAAGEAQGGRPQVRQGGEPGAADGRAGGDGAQGGGGDEQECLRRGRGGARAEAGRDDGAGGAGARGRRRARGHPEGARRQRVEPGGAGQARQRAGAGGAGVRERQGRPCPGRARQDGARPRGQAPGQGGWGARADKVMVRGDISCL

SEQ ID NO: 16211 - protein, 154 aa, Glycine max
MPTGRMSGNITQDWEPVVLRRAKPKAADLKSAKAVNQALRTGAPVETVRKAAAGTNKNASAAAVAAPARKLDEMTEPAGLGRVGGDVRAAIQKARVAKGWSQAELAKRVNERAQVVQEYESGKAVPVQAVLAKMERALEVKLRGKAVGAPAPTK

SEQ ID NO: 16212 - protein, 149 aa, Glycine max
MSGNITQDWEPVVLRRAKPKAADLKSAKAVNQALRTGAPVETVRKAAAGTNKNASAAAVAAPARKLDEMTEPAGLGRVGGDVRAAIQKARVAKGWSQAELAKRVNERAQVVQEYESGKAVPVQAVLAKMERALEVKLRGKAVGAPAPTK

SEQ ID NO: 16213 - DNA, 898 bp, Glycine max
agcaacgagctagatcaaacacaaatcgccgagcgatcatctctccgtgtgtgctagcttctaattctctaatcgatcatgggtggaggccacgacatgcacggcggccacaacggcggcgtgaagggcttcgtgtccggcctcgttaacggcgggaaaggccacggctacggatcgtcatacggccaggggcacggctacggcggtggccacgtgcagggctacggcggccatggccagagctacgagcacgggtacggcgggcatgcgcagcacgggcacggcggctatgagcacgggtacggcggcggacatgcgcagcacggccatggccacgagcacgggtacggcggacacgtgcagcagcacggatacggcggtggccacgcgcagctcgggtaccctcctgccgccggtgcctaccctccgcacggcggttaccaggcgcacggctacgcgccggcggcctacccctctcacggggcgcaccacggtcacatgggatcgtaccacaccgggcatggcggcgggcaccaccacggcggcaagcacggaggcaagtaccatggcggcaagcacggcagtaggtggtgaagtactgaagtggctagctgcagccattgctggcgcgctctacgacgtccacgtacctgtgcgcccccatggccagttacgtacgctggcgtatctccatcatctgccttagttgattcaccatgctccgttgtagcgaccaataacgtcttacattactgagacgaagggagtactacctaaataaagagctacgcgtgcatgggcaaggtgtgtggtatgtaatgtctgtgtaccttaaaaaatgtaatgatctatgtggtgacctaagtctgtcgtgcgtgacttaataggagtactacat

SEQ ID NO: 16214 - protein, 171 aa, Glycine max
MGGGHDMHGGHNGGVKGFVSGLVNGGKGHGYGSSYGQGHGYGGGHVQGYGGHGQSYEHGYGGHAQHGHGGYEHGYGGGHAQHGHGHEHGYGGHVQQHGYGGGHAQLGYPPAAGAYPPHGGYQAHGYAPAAYPSHGAHHGHMGSYHTGHGGGHHHGGKHGGKYHGGKHGSRW

SEQ ID NO: 16215 - protein, 165 aa, Glycine max
MHGGHNGGVKGFVSGLVNGGKGHGYGSSYGQGHGYGGGHVQGYGGHGQSYEHGYGGHAQHGHGGYEHGYGGGHAQHGHGHEHGYGGHVQQHGYGGGHAQLGYPPAAGAYPPHGGYQAHGYAPAAYPSHGAHHGHMGSYHTGHGGGHHHGGKHGGKYHGGKHGSRW

SEQ ID NO: 16216 - protein, 157 aa, Glycine max
MARATSTGTAGMRSTGTAAMSTGTAADMRSTAMATSTGTADTCSSTDTAVATRSSGTLLPPVPTLRTAVTRRTATRRRPTPLTGRTTVTWDRTTPGMAAGTTTAASTEASTMAASTAVGGEVLKWLAAAIAGALYDVHVPVRPHGQLRTLAYLHHLP

SEQ ID NO: 16217 - DNA, 1168 bp, Glycine max
acttgttcttctctagctaccttatcatcataaaaacgagaaacgaatgattcacattagccaaaactaaacgccgctctatttccgtctcattttcactcactatggcttcggatgagaccatgaactttcactcttgttcgttacacgaagatgactttgatgatgatgatgatgatcacccccacaacttgtcgaggctctccgtgtgcactggcagcacctttggtgtcgacgacgatgttgacaatctggcctccatgtgcgtgtcacacttgtccatcgaaagcttcgacgcagatggtgagttatcatccgactcagaaaacgaattgggaagttgttactctctgccctctacgcccccacgaatgaggaaacagcttaaggactatgccagtgacaatgggaatgaaattacaaacaagagtgatccacggagaaggagaagatcctttaggagggagaggtgggggtttgagaagactaagatcaggaaagaggaggggcttagtggggatagtgatcaaagtggtgtcatgctcataactagacccaaaggtggaattaggtctctttgcatggacttggaagaagttaaggcttgtagagatcttggatttgagttggaacacgaacgtatgcttgagatcccttctcgtctctctttttccaattccacacttgacactagcagtggtagcaactctcccatcgccaattggcgtatctctgctccaggtgatgatccacgagacgtgaaggcacggctcaaagtgtgggcgcaggcggtggcacttgcgtctgcctcaaaatacggcacatgaattcaattttcttctaactcgttcttgctttttgttcgattgagactatatgttatagcgtattagtataatataagcctttttgtcttcccactatgattggtggttgtatcattttgttgtagattttaggttgtttttttcccactaggagtgttgaggtttcaggtggaagttcgttttttgagtgatggtcacttttgttctgtacagtagtagtgtttgaataaaatgaagaggccgtgattggagaaagtaaagtagtgtgtgcatagctagtgaaaatatgtagtaccaatgtgaacgcccaaagaaaaaacactggtgaaatttttggattc

SEQ ID NO: 16218 - protein, 240 aa, Glycine max
MASDETMNFHSCSLHEDDFDDDDDDHPHNLSRLSVCTGSTFGVDDDVDNLASMCVSHLSIESFDADGELSSDSENELGSCYSLPSTPPRMRKQLKDYASDNGNEITNKSDPRRRRRSFRRERWGFEKTKIRKEEGLSGDSDQSGVMLITRPKGGIRSLCMDLEEVKACRDLGFELEHERMLEIPSRLSFSNSTLDTSSGSNSPIANWRISAPGDDPRDVKARLKVWAQAVALASASKYGT

SEQ ID NO: 16219 - protein, 234 aa, Glycine max
MNFHSCSLHEDDFDDDDDDHPHNLSRLSVCTGSTFGVDDDVDNLASMCVSHLSIESFDADGELSSDSENELGSCYSLPSTPPRMRKQLKDYASDNGNEITNKSDPRRRRRSFRRERWGFEKTKIRKEEGLSGDSDQSGVMLITRPKGGIRSLCMDLEEVKACRDLGFELEHERMLEIPSRLSFSNSTLDTSSGSNSPIANWRISAPGDDPRDVKARLKVWAQAVALASASKYGT

SEQ ID NO: 16220 - protein, 188 aa, Glycine max
MCVSHLSIESFDADGELSSDSENELGSCYSLPSTPPRMRKQLKDYASDNGNEITNKSDPRRRRRSFRRERWGFEKTKIRKEEGLSGDSDQSGVMLITRPKGGIRSLCMDLEEVKACRDLGFELEHERMLEIPSRLSFSNSTLDTSSGSNSPIANWRISAPGDDPRDVKARLKVWAQAVALASASKYGT

SEQ ID NO: 16221 - DNA, 569 bp, Glycine max
atctcggcggcgccacaccgccgaccaccaccagcaacacacacacagcagccaagcgaagctcgccgcagatcgaagatgtcgggccgtggcaagggcgggaaggggctgggcaagggtggcgccaagcgccaccggaaggttctccgcgacaacatccagggcatcaccaagccggcgatccgccgtctggctcgccgtggcggcgtgaagcgcatctcggggctcatctacgaggagacccgcggcgtgctcaagatcttcctcgagaacgtcatccgcgacgcggtcacctacaccgagcacgcccgccgcaagaccgtcaccgccatggacgtcgtctacgccctcaagcgccagggccgcaccctctacggattcggcggctaggccacgccggtccactcatatccacctcgcgccgccagattcgtagctagccatggttgttcagtgttcatggtcttgggtgtaatggccgcatctcgctgctgtatgccctggccatgattgttgtttggatgtagtcagatctgtgatggaattgaaattgaagtggtttaccctcg

SEQ ID NO: 16222 - protein, 145 aa, Glycine max
LGGATPPTTTSNTHTAAKRSSPQIEDVGPWQGREGAGQGWRQAPPEGSPRQHPGHHQAGDPPSGSPWRREAHLGAHLRGDPRRAQDLPRERHPRRGHLHRARPPQDRHRHGRRLRPQAPGPHPLRIRRLGHAGPLISTSRRQIRS

SEQ ID NO: 16223 - protein, 129 aa, Glycine max
ISAAPHRRPPPATHTQQPSEARRRSKMSGRGKGGKGLGKGGAKRHRKVLRDNIQGITKPAIRRLARRGGVKRISGLIYEETRGVLKIFLENVIRDAVTYTEHARRKTVTAMDVVYALKRQGRTLYGFGG

SEQ ID NO: 16224 - protein, 103 aa, Glycine max; identical to SEQ ID NO: 71

SEQ ID NO: 16225 - DNA, 1028 bp, Glycine max
gatgatgtttccacggcaatgacagaacaaagatctttctttttctctctgtgtcaggaacttacctctttgaagttataataatattcaagtgaagctcgtcaaggtgaaacagagtttctctgaatcgaagtagcgactcgtgtttttgattccatggctttgacttcgtgcctaaagactggagtagttccgatgtctccgaccaccgggttgtatctttccggcagcctcttgaagtcggacagtggcttcgccgttccgacgaagttacagagtgttcgaaaaagtgatagagagaggttgagaatccaagccgtgttcagctttcctcctgcgttcctaacaagaaacggtcgagcagagaagcagaagcagctgaagcaagaccttctcgaagccattgagcctctcgaacgtggcgccaccgcctcgcctgatgaccagcttcggatcgatcagttggcgcgtaaagtggaagcagtgaatccaaccaaggagcctctgaagtctgatttgctcaatgggaaatgggagctcatttacacaacctctgcttctattctccaggctaagaaaccgaagttcttgagatcaataacaaactaccagtctatcaatgtggataccctcaaggttcaaaacatggagacttggcctttcttcaactcggtaactggagacataagacccctcaattcaaggaaggtcgctgtgcagctcaaagtgtttaaaattctcggccttattcctgtaaatgcacctgaaacagcacgtggtgaactagagattacttatgtggacgaggaactacggttgtcaaggggtgacaagggcaacttgtttatattgaagatgtttgatcccacttaccgaatccctctctgaagccaaatggttccaagcccatcatacatacatacatacccccatcgcttgttctgtctctctcttcatcatcatatgtatagaagaatgtttcttcttctacaaacataaaatcttaataagatcaaaacaagagtctc

SEQ ID NO: 16226 - protein, 243 aa, Glycine max
MALTSCLKTGVVPMSPTTGLYLSGSLLKSDSGFAVPTKLQSVRKSDRERLRIQAVFSFPPAFLTRNGRAEKQKQLKQDLLEAIEPLERGATASPDDQLRIDQLARKVEAVNPTKEPLKSDLLNGKWELIYTTSASILQAKKPKFLRSITNYQSINVDTLKVQNMETWPFFNSVTGDIRPLNSRKVAVQLKVFKILGLIPVNAPETARGELEITYVDEELRLSRGDKGNLFILKMFDPTYRIPL

SEQ ID NO: 16227 - protein, 230 aa, Glycine max
MSPTTGLYLSGSLLKSDSGFAVPTKLQSVRKSDRERLRIQAVFSFPPAFLTRNGRAEKQKQLKQDLLEAIEPLERGATASPDDQLRIDQLARKVEAVNPTKEPLKSDLLNGKWELIYTTSASILQAKKPKFLRSITNYQSINVDTLKVQNMETWPFFNSVTGDIRPLNSRKVAVQLKVFKILGLIPVNAPETARGELEITYVDEELRLSRGDKGNLFILKMFDPTYRIPL

SEQ ID NO: 16228 - DNA, 1335 bp, Glycine max
aaaacataactcaaccatggcaaagttcagttccagaaaaaaatcctccatttgggtccccaacggttgcatcttcttcctcggaggagcactcacaaccctccttctcctctggggtctatcctccttcataatccccatcccaaactctgacccagaactcaaccctgtctccacaaaactcagttccctccaattccccacaaacaccgactcaccagaaacaactttttacgacgaccccgaaacgagttacaccatggacaagcccatgcacaactgggacgagaagagaaaacagtggcttttgcatcatccttcattcaccgtcacgacacatgatagcaagatcctcgtcgtgacggggtcgcagccgaagcgctgccacaaccccatcggcgatcaccttctattaaggttcttcaagaacaaggttgactactgccgcctccacaactacgacataatttacaataacgccctattgcaccccaaaatgggatcatactgggccaagtacccggtgatccgagccgccatggtggctcacccggaggccgagtgggtctggtgggtcgactcggacgcggtcttcaccgacatggagttcactctccctctcaaccgctacaaggaccacaacctcgttgtccacggttgggaaaatctcgtacgtgaaaaccgtagctggacggggcttaacgccggcgttttcctcatgagaaactgtcagtggtcgttggattttatggacgtgtgggccagcatgggcccaatgtccccggagtatgaaaaatggggggaaaccttaaaatccacgttcaaggacaaggttcttccggactcggacgatcagacggcgctggcatatctgatcgcggttgagaacaaatgggcggacaagatctttctggagagtgagtactatttccaaggctactggttggagatttcgaagacttactataacgttagcgagaggtacgatgaggtggagagaaaggttaaaggattgaggaggaggcacgcggagaaagtgagtgaaagttatggtttgatgagggaggagtatttgaacgatgtgggagagtggaagaggcctttcatcacgcatttcactgggtgccaaccctgcaatggacaccataaccctgcgtatgatgctatggattgctggaacagcatggagagggctcttaacttcgctgataatcaggtgttgcgcgtctatggttacatgcgtaaggatctcttgaataaggccatttcacctataccttttgattatcccaatgttgtgtagatttactcaggtaaataaataatgatgaaatt

SEQ ID NO: 16229 - protein, 433 aa, Glycine max
KHNSTMAKFSSRKKSSIWVPNGCIFFLGGALTTLLLLWGLSSFIIPIPNSDPELNPVSTKLSSLQFPTNTDSPETTFYDDPETSYTMDKPMHNWDEKRKQWLLHHPSFTVTTHDSKILVVTGSQPKRCHNPIGDHLLLRFFKNKVDYCRLHNYDIIYNNALLHPKMGSYWAKYPVIRAAMVAHPEAEWVWWVDSDAVFTDMEFTLPLNRYKDHNLVVHGWENLVRENRSWTGLNAGVFLMRNCQWSLDFMDVWASMGPMSPEYEKWGETLKSTFKDKVLPDSDDQTALAYLIAVENKWADKIFLESEYYFQGYWLEISKTYYNVSERYDEVERKVKGLRRRHAEKVSESYGLMREEYLNDVGEWKRPFITHFTGCQPCNGHHNPAYDAMDCWNSMERALNFADNQVLRVYGYMRKDLLNKAISPIPFDYPNVV

SEQ ID NO: 16230 - protein, 428 aa, Glycine max
MAKFSSRKKSSIWVPNGCIFFLGGALTTLLLLWGLSSFIIPIPNSDPELNPVSTKLSSLQFPTNTDSPETTFYDDPETSYTMDKPMHNWDEKRKQWLLHHPSFTVTTHDSKILVVTGSQPKRCHNPIGDHLLLRFFKNKVDYCRLHNYDIIYNNALLHPKMGSYWAKYPVIRAAMVAHPEAEWVWWVDSDAVFTDMEFTLPLNRYKDHNLVVHGWENLVRENRSWTGLNAGVFLMRNCQWSLDFMDVWASMGPMSPEYEKWGETLKSTFKDKVLPDSDDQTALAYLIAVENKWADKIFLESEYYFQGYWLEISKTYYNVSERYDEVERKVKGLRRRHAEKVSESYGLMREEYLNDVGEWKRPFITHFTGCQPCNGHHNPAYDAMDCWNSMERALNFADNQVLRVYGYMRKDLLNKAISPIPFDYPNVV

SEQ ID NO: 16231 - protein, 347 aa, Glycine max
MDKPMHNWDEKRKQWLLHHPSFTVTTHDSKILVVTGSQPKRCHNPIGDHLLLRFFKNKVDYCRLHNYDIIYNNALLHPKMGSYWAKYPVIRAAMVAHPEAEWVWWVDSDAVFTDMEFTLPLNRYKDHNLVVHGWENLVRENRSWTGLNAGVFLMRNCQWSLDFMDVWASMGPMSPEYEKWGETLKSTFKDKVLPDSDDQTALAYLIAVENKWADKIFLESEYYFQGYWLEISKTYYNVSERYDEVERKVKGLRRRHAEKVSESYGLMREEYLNDVGEWKRPFITHFTGCQPCNGHHNPAYDAMDCWNSMERALNFADNQVLRVYGYMRKDLLNKAISPIPFDYPNVV

SEQ ID NO: 16232 - DNA, 1219 bp, Glycine max
gttgagcttcttcctccagccccattgatccccggcgcgacgccctaacctacaccgcgcccgctccctctctctctggctcgcggctacctgctcacgcgcggccgccgtgatggcctcgtcggcgacgagggaggtgcttatgctggaggcgccaccgtccgaggctgcgggtgtgccttggcgcccgcctccggacgctgagacggtggacgcgctgccctacatcgacggggactacggcgaccctgcggtgaagcgcgaggttgaccgcctcgtcgaggaggagatgcgccgggctcaccgcaagcccgccgacttcctccgtgacttgccccccgttcccatcattggattcgagaatcatcctatgcttgcgaaagagtacgaacgtgttagagctggcaagccacctgctaccatggagatgtcccgctatggtttggagccacccccagcgaacaagagaaatgatgttcttgcttggaggcaggctttacggaatgcccagagccagctgcagcatcaaattgtgcggattgagaatttggagcttatgctgaagcacggtgttgaggtttggaagctccagaacagaaaaatggaatcagttttgtctaggacacaaaaaatgactctggaatacaatgaaaagatagaaactgtcaaccgtgagaggaaatttcatcagcaaaacactggtggacaactccatgcgttgacagtagaatggcaggaactgtgtcagaaaaacatagctattcaagctgcctgtgttgatctgcagaatcaaattgatctgcttaaacttgaagctaaagaacagggaatgccaatggctggtggcaatgaaactaacccacaagcatcagtagggatttgagatacagatgtaggaaggcagaagctgtggctccatgagatgtcagctagaggttccagtagccactatgcttacctgacccacacctggctgttccgttgacaacggccattgtggaatgtgcgttatgcaacgtgatggcatgtgctggtggacacctggtcacctggtagagaaacagcttaaacgcatgtattgttctgtgacaagagagagaatcagaatgcccatctcttttgttgatcgcaaatgggtatcaacttttcagggtgtaaatttgtactgtaacatggaagtgtcagctgaatgtttcgtctatttagctctgcttgtttc

SEQ ID NO: 16233 - protein, 256 aa, Glycine max
MASSATREVLMLEAPPSEAAGVPWRPPPDAETVDALPYIDGDYGDPAVKREVDRLVEEEMRRAHRKPADFLRDLPPVPIIGFENHPMLAKEYERVRAGKPPATMEMSRYGLEPPPANKRNDVLAWRQALRNAQSQLQHQIVRIENLELMLKHGVEVWKLQNRKMESVLSRTQKMTLEYNEKIETVNRERKFHQQNTGGQLHALTVEWQELCQKNIAIQAACVDLQNQIDLLKLEAKEQGMPMAGGNETNPQASVGI

SEQ ID NO: 16234 - protein, 246 aa, Glycine max
MLEAPPSEAAGVPWRPPPDAETVDALPYIDGDYGDPAVKREVDRLVEEEMRRAHRKPADFLRDLPPVPIIGFENHPMLAKEYERVRAGKPPATMEMSRYGLEPPPANKRNDVLAWRQALRNAQSQLQHQIVRIENLELMLKHGVEVWKLQNRKMESVLSRTQKMTLEYNEKIETVNRERKFHQQNTGGQLHALTVEWQELCQKNIAIQAACVDLQNQIDLLKLEAKEQGMPMAGGNETNPQASVGI

SEQ ID NO: 16235 - protein, 197 aa, Glycine max
MRRAHRKPADFLRDLPPVPIIGFENHPMLAKEYERVRAGKPPATMEMSRYGLEPPPANKRNDVLAWRQALRNAQSQLQHQIVRIENLELMLKHGVEVWKLQNRKMESVLSRTQKMTLEYNEKIETVNRERKFHQQNTGGQLHALTVEWQELCQKNIAIQAACVDLQNQIDLLKLEAKEQGMPMAGGNETNPQASVGI

SEQ ID NO: 16236 - DNA, 1144 bp, Glycine max
aatttcctttagcgtctctttaaaagttgtaatctttaggggcctttgtgaagagaaagagagagatctcagatcatcaaaagtgcgtttggtaaagggatggcaggtcgctacgatcggaaccccttcgacgaaggagacgaagtcaatccttttgcgaatcccggaagtgtacccgctgcttcgagttccagactatcgcctttgcctccggaacctgctggttttggttttggtcgcactgttgacgttcctcttgacagaccagggtctggtgcccaggatctgaagaagaaagagaaggagctccaagccaaagaagctgagcttaaacgacgggagcaggatctcaaacggaaagaggatgctgctgcacgagctggaattgttatcgaggtgaaaaactggccgcccttgttccctcttatccaccatgacattgcaaatgaaattcccattcgtctccaaaggctacagtatattgctttctcaacatacttggggttggttcttgcacttttctggaacgtcatcgccgttactacagcttggatcaaaggagaaggagtaacgatttggcttcttgctcttatttacttcatctcgggtgtcccaggaggctatgtgttatggtatcgtcctctctaccgtgccttcagaaatgatagcgcattgagctttggatggtttttcttgttctacatgctccacatagctttctgcgtctttgctgcagttgctcctcctgttgtcttcaaaggaaagtcacttgcgggcatattacctgcgctagatatgttgagcagtcaggcactggtcggaatcttctacttcatcgggtttgcgtttttctgccttgaatcagtggtcagcatctgggttattcagcaagtatacatgtacttccgagggagcgggaaagcagatgagatgaaaagggatgctgcaagaggagccatgagagctgcggtttgatacaaatgatttgaactcatgatcgctcctgaagctattggttgtgatgtgtaactttttacattcttcagctctttgacctttttgttttgttttgtttttacagcagcaaagtaaaaaaaaaaatttgtgtatttgtttttattcaatttgagttcagatttcatac

SEQ ID NO: 16237 - protein, 291 aa, Glycine max
MAGRYDRNPFDEGDEVNPFANPGSVPAASSSRLSPLPPEPAGFGFGRTVDVPLDRPGSGAQDLKKKEKELQAKEAELKRREQDLKRKEDAAARAGIVIEVKNWPPLFPLIHHDIANEIPIRLQRLQYIAFSTYLGLVLALFWNVIAVTTAWIKGEGVTIWLLALIYFISGVPGGYVLWYRPLYRAFRNDSALSFGWFFLFYMLHIAFCVFAAVAPPVVFKGKSLAGILPALDMLSSQALVGIFYFIGFAFFCLESVVSIWVIQQVYMYFRGSGKADEMKRDAARGAMRAAV

SEQ ID NO: 16238 - DNA, 771 bp, Glycine max
atcgaaaagaaaaaataaaaaatggcatcttctacctcatcctctgcctttctcctcctccatggcctcgcttctgcttctccctcgaaggcttctgctttcttcgcttcccccatcagcccctccttcccactctcgacctccacctccatcaacgcgtcctctccgcggcggcccttgccccctgctcctcgcgccaccggccgcggcggtgacaaggacaaccgcgtgcaggagctgagggtgcctgattcctggctcacgcccggaggagcagcgcaggaatccgaatggctgaggggaacgctacacaagtggctggacgacgagtactgccccgagccggccaacgtggacatcagcaacacggccgcaaggtcgtaccacgagtccctcacggcgaagcagtctgatgtgggggagatcctgatgaagatggtcggagatctgcaggagctgtcgtaccaggagagcttccacggggccttctccgccgccaacgccgcggtgcgcttgataacgcagaggatggagtcgtcagccggtgagtgatcgttgacagacagagctagccgaaccggcaataggtggctcaagttgtctggctgccccgaccatcattgtgtttagtggtcgaacgggaaggcaatctgctttgtttcactgcagattagctttgtgaattacctggcgttggcaagtggtctgttcaatttgaatcaaagtgacataccgtgtcctgctcgaccgatgttaatagtacgttcttct

SEQ ID NO: 16239 - protein, 176 aa, Glycine max
MASSTSSSAFLLLHGLASASPSKASAFFASPISPSFPLSTSTSINASSPRRPLPPAPRATGRGGDKDNRVQELRVPDSWLTPGGAAQESEWLRGTLHKWLDDEYCPEPANVDISNTAARSYHESLTAKQSDVGEILMKMVGDLQELSYQESFHGAFSAANAAVRLITQRMESSAGE

SEQ ID NO: 16240 - DNA, 817 bp, Glycine max
aagttagtcagacaacgggccactctctcgcgcctttagaaaccacgagtacgtagatcaatcttgattgatttctctctccgtcccggccggccatgaggagctcagtgcacgtgccagccgcggtagaggcgctgctgggccacccggtggcggcactgtcggagaggccggcgccgcggctaacgcggctgctggtgaacgtgacggtggagcggagcctgtggccggtgcacgtgctgctgggcgccgatgccacggtggccgacctggcgcgcgccgccgtcgacgcctatgccgccgaggggcgcaggccgccgctccccaccgatgacggcgccaccgacgcggccgcgcggttcgaagctgcacctctccaagtacgccctcgacgctcttgacccggaagagaaggtgcttgacctgggctctcgcaacttcttcctttgcgccgccaggtcgacgctgggatcagatcatcatctgcgacttcgctcatcactgacatgtcttgatgtctgaaggaaaaaagtgtgtgccatgtaaaacgagttggcatgtcggcctatatatgtggagtatatataactcatgttcgatccttctttggttgatcggtctgccagatcctctgcatcagtgtgtacgtagtgttagcttaggtatacatacagttcggccaagcaacgatacatacagatacatgtccggcgtatttacgagctcaagatatgtacgtggcgacgctgtatgtatacagctgcaagatgcaacgtttatgtatgtacctagtgccatgatgttacgtttctggact

SEQ ID NO: 16241 - protein, 101 aa, Glycine max
MRSSVHVPAAVEALLGHPVAALSERPAPRLTRLLVNVTVERSLWPVHVLLGADATVADLARAAVDAYAAEGRRPPLPTDDGATDAAARFEAAPLQVRPRRS

SEQ ID NO: 16242 - protein, 101 aa, Glycine max
MSEGKKCVPCKTSWHVGLYMWSIYNSCSILLWLIGLPDPLHQCVRSVSLGIHTVRPSNDTYRYMSGVFTSSRYVRGDAVCIQLQDATFMYVPSAMMLRFWT

SEQ ID NO: 16243 - protein, 89 aa, Glycine max
MPRWPTWRAPPSTPMPPRGAGRRSPPMTAPPTRPRGSKLHLSKYALDALDPEEKVLDLGSRNFFLCAARSTLGSDHHLRLRSSLTCLDV

SEQ ID NO: 16244 - DNA, 1310 bp, Glycine max
atttcccttcatccgtcggcctttgagagtccacccgaccagccgccgcgccgcgcgcagcaggagcccctcgacggcggccgtcggcgctagggttcttcacgtccaccttcgtaccttagccttctcgctattctcgttccgtcctccggatacccaccctctcttgccgtgtttctgccgaggcagcggaatctcccccgatggaggcggccgccgtcgcttcctccggccccgggctgcgctgcgcgcttaaccccgccccgaaccagcataggaaaggcgcgcgcttgagcttaccggccaagagtcagcagcgctgcgccgtcacttgcgggcgcttgctgctccgccccaacgctcgcgtatgcacggcggcatcggcatcggcatcgacggtgatggatagcggggctggggactccggggtgaggaggaagaggctcgcggtgttcgtctcaggcgggggctcgaacttccggtcgatccacgaggccgttctgggtgggaaggtgaacggggatgttgttgcgctcgtcaccgataagccaggctgcggtggcgcggagtatgcaaggtgcaatggcatgcccgtggtcgtgtttcccaagtcgaaatcggcgccggagggggtctccacagatgaacttctgaatgttctgagggatctgaaggtagactttattctacttgctggttacttgaagctcatacctggtgagctagttaagtcatttcccagatccatgctgaatatacatccttcactgctcccggcatttggaggcaagggttattatggtttgaaagtgcataaagcagttattgcatctggagccagatactcaggaccaactgtgcactttgtggatgagcagttcgacacagggaaaaccttggcccaaagagttgtgccagtgttagccaatgatactccagagcaattggctgcaagggttcttcacgaggagcaccaagtttacgttgaggcagttgctgccttgtgtgaggatcgaattgtgtggcgagacgatggtgtcccacttatcagaagtcagacaaaccccaatgcgtatacctaattcgtgatctctgtcctgagatctcctgaaaactaatgaagtttgtagtgtccgcaccaagtgccagttttcgccacggcatgtagtcaacacacaccgtttgtctgattgagtgaaataacatgtctaataatctggtcccagaaacataatgtgtaccttgcactgtgtttaactcattgtatggcttggcttcgatgataatctgtgcctgaaataacatttctg

SEQ ID NO: 16245 - protein, 292 aa, Glycine max
MEAAAVASSGPGLRCALNPAPNQHRKGARLSLPAKSQQRCAVTCGRLLLRPNARVCTAASASASTVMDSGAGDSGVRRKRLAVFVSGGGSNFRSIHEAVLGGKVNGDVVALVTDKPGCGGAEYARCNGMPVVVFPKSKSAPEGVSTDELLNVLRDLKVDFILLAGYLKLIPGELVKSFPRSMLNIHPSLLPAFGGKGYYGLKVHKAVIASGARYSGPTVHFVDEQFDTGKTLAQRVVPVLANDTPEQLAARVLHEEHQVYVEAVAALCEDRIVWRDDGVPLIRSQTNPNAYT

SEQ ID NO: 16246 - protein, 226 aa, Glycine max
MDSGAGDSGVRRKRLAVFVSGGGSNFRSIHEAVLGGKVNGDVVALVTDKPGCGGAEYARCNGMPVVVFPKSKSAPEGVSTDELLNVLRDLKVDFILLAGYLKLIPGELVKSFPRSMLNIHPSLLPAFGGKGYYGLKVHKAVIASGARYSGPTVHFVDEQFDTGKTLAQRVVPVLANDTPEQLAARVLHEEHQVYVEAVAALCEDRIVWRDDGVPLIRSQTNPNAYT

SEQ ID NO: 16247 - protein, 164 aa, Glycine max
MPVVVFPKSKSAPEGVSTDELLNVLRDLKVDFILLAGYLKLIPGELVKSFPRSMLNIHPSLLPAFGGKGYYGLKVHKAVIASGARYSGPTVHFVDEQFDTGKTLAQRVVPVLANDTPEQLAARVLHEEHQVYVEAVAALCEDRIVWRDDGVPLIRSQTNPNAYT

SEQ ID NO: 16248 - DNA, 640 bp, Glycine max
acaaattctcagctattgagattttagcatttcatcctaaaaatgttctttcagattattcagggggttttcaccggcgttgaggcattagctctattggcattcgctggtataacccttggcggctcagcagtgggactagctttaagcacgccgctttttatcctattcagtccgattctcgtgccagcaactatagccaccactttgttaactacgggtttcacgacctccgggggcttaggaatggtggctctccgcatcttctggaaactcttcaagcgtcttaggaagaaggggaaaggaacgccaaaaattccgggattggccccgggggctccagattctgatccagtgtctggaggataaacggagtaggctttcgtagtatgagataatctatggaggaatttaatgagaattgctggggttccttaaataaaacctaaaattatccagtgtctttaacgtaatactgattacgcgcggatgaaactaatgtttcatataccatttttcaaatgtatatcgtgttacgaaattataataaatgtactcgatcatgttgtatatattaaagaattaagtgatatcactgagattaccatagatgattatattcaagttacattattgattc

SEQ ID NO: 16249 - protein, 108 aa, Glycine max
MFFQIIQGVFTGVEALALLAFAGITLGGSAVGLALSTPLFILFSPILVPATIATTLLTTGFTTSGGLGMVALRIFWKLFKRLRKKGKGTPKIPGLAPGAPDSDPVSGG

SEQ ID NO: 16250 - DNA, 795 bp, Glycine max
actcaggacaataagtttaaagccatcaaatccaaaaaaaaatatttgttttaataatctaagcttcatcaatggcgaatcaagcagctatagcatttttctttttcgttttggcggtcttctccaacttggagctctcgtcttctacgcttttccatggcaaggtctcttgccttgactgccaccgcggtttcgacttctcaggcgttaaggttctcctaaagtgcgaaggcgagaagaaacacataaccacgatggcgacttcagacggatctttccggtcagtgcttccgaccaatgacagaaaacactccatgaactgtcttgcaaagctcttgggaggtcctgagcaactttatgctcataaacacaacatggtctctgaactggttaagtcaaaacacgataccaaggttcttactacctcaaacccactttccttctctctctcatgccctaaaccaactggagataatgtcggaaacatgataggagattcgaagactgttaattttcctgggacaggaggttttggattcccacctgctagcttctttcccttcttaccaatcattggcatcccatgattttaattaaatgtgcttgataagacgggggacgtatttattcataaatgttgttgtttatgtgaatttaagtgagcgaacaaaattgtttttgttttgtgagatataattaaggtttgtttatgtgataagaaaatgttggttatcggcttcttggatccgttgctttgtaccatgtttgtgataataataaagattgcattagtcc

SEQ ID NO: 16251 - protein, 171 aa, Glycine max
MANQAAIAFFFFVLAVFSNLELSSSTLFHGKVSCLDCHRGFDFSGVKVLLKCEGEKKHITTMATSDGSFRSVLPTNDRKHSMNCLAKLLGGPEQLYAHKHNMVSELVKSKHDTKVLTTSNPLSFSLSCPKPTGDNVGNMIGDSKTVNFPGTGGFGFPPASFFPFLPIIGIP

SEQ ID NO: 16252 - protein, 110 aa, Glycine max
MATSDGSFRSVLPTNDRKHSMNCLAKLLGGPEQLYAHKHNMVSELVKSKHDTKVLTTSNPLSFSLSCPKPTGDNVGNMIGDSKTVNFPGTGGFGFPPASFFPFLPIIGIP

SEQ ID NO: 16253 - protein, 90 aa, Glycine max
MNCLAKLLGGPEQLYAHKHNMVSELVKSKHDTKVLTTSNPLSFSLSCPKPTGDNVGNMIGDSKTVNFPGTGGFGFPPASFFPFLPIIGIP

SEQ ID NO: 16254 - DNA, 704 bp, Glycine max
actttccccgttctccttccaatccaccactccgccgctagggtttttaagttttagtcccacagcagcggcggccgtcggcggcgacaaccaaacccccgcgggatcccgagcgaactcgagcgagagagatgaggctcctcacgcacaacttcctggcgtcgaacgtgaagggcgtgagcacgggctacccgctcgcgctggaggtcgccaagacgtccatcaaggaggtggagctcaacgtcgacttcctccgcgggatccttcccaagatcgactggcgggcgctcttcgccgccaccagcgccgcggggttcccggagctcctcgctgcagagcagccgcccgaggcggagctcttcgccgagggcgccgcggacgtcgaaggcagcgcgatccgccgcctccaccacgcgctcctcgagatccacgtcgaggagggcaccctcgtctgccccgacagcggccgctccttccccatcctgaagggcgtccccaatatgcttctccatgaggacgaggtgcggcactgactcgcgtgcagcaccagccggctgccttgcttgcttgtttgctcgtgccacatacggttatgcacttccagggcttagactcctaagattgtgtgtatgaactatcctagtatgaattgtggatcttgaagtcgtaccttgataaatactactacctgtgacgttttgctc

SEQ ID NO: 16255 - protein, 170 aa, Glycine max
LSPFSFQSTTPPLGFLSFSPTAAAAVGGDNQTPAGSRANSSERDEAPHAQLPGVEREGREHGLPARAGGRQDVHQGGGAQRRLPPRDPSQDRLAGALRRHQRRGVPGAPRCRAAARGGALRRGRRGRRRQRDPPPPPRAPRDPRRGGHPRLPRQRPLLPHPEGRPQYASP

SEQ ID NO: 16256 - protein, 133 aa, Glycine max
MRLLTHNFLASNVKGVSTGYPLALEVAKTSIKEVELNVDFLRGILPKIDWRALFAATSAAGFPELLAAEQPPEAELFAEGAADVEGSAIRRLHHALLEIHVEEGTLVCPDSGRSFPILKGVPNMLLHEDEVRH

SEQ ID NO: 16257 - DNA, 1002 bp, Glycine max
agacattgtctcaatcccacacgcttcttactcctctcataacttttctgctccccgttgagaaagatttgaatccaaaggaaaaataacgctaatggctccaagagacagccgagccaccgcgctcattgggcccggcccaagcctatcaccggcccacaaagagatccgctacagaggcgtcaggaaacgcccctggggccgctacgccgccgagatccgcgatcccggcaagaaaacccgcgtctggctcggcactttcgacaccgccgaggaagccgcgcgcgcctacgacaccgccgcgcgtgagtttcgtggcgccaaggccaagaccaatttcccgacaccctcggaactcatccttaacaacaacaacataaacgctcgtagtcccagccagaccagcaccctcgactcatcctctcccccgccaccgccaccgctagaccttaccctcacccctctctcctccgctgtcttcccggtggcgcgtcctgttctattcttcgacgcattcgcgcgtgcggacaccatggtcgccgtctcgcgccgcgagacctgcggcttcgaacgccccgccgccgatttccgccgcggcgactccgactctgattataaccgccgcatactcctggatcttgacctgaacgtacctcctctcccggaggttgcctgattcatgcagggagttctgtttttttcgcaattattgtttttttggttttttaagcatctgggaggtactactacgcatcttttttgacgaaagtgccctcgagggagcagcaaagtgagtagtggatgacatgatgctcggatttgttgaccattttgtgatgatgaagatatataaccggcacgttatgtaaatacacgttataaccgaaagcaaacgtgcttttgcttggttgcttttttttttgcaactgaggactcttattcagagtatctcatggttgtttctgcaatttctcaaaatatataaatattccaatttccatc

SEQ ID NO: 16258 - protein, 193 aa, Glycine max
MAPRDSRATALIGPGPSLSPAHKEIRYRGVRKRPWGRYAAEIRDPGKKTRVWLGTFDTAEEAARAYDTAAREFRGAKAKTNFPTPSELILNNNNINARSPSQTSTLDSSSPPPPPPLDLTLTPLSSAVFPVARPVLFFDAFARADTMVAVSRRETCGFERPAADFRRGDSDSDYNRRILLDLDLNVPPLPEVA

SEQ ID NO: 16259 - DNA, 1318 bp, Glycine max
atccgtcaaactcccaagaaacccttcagaaccttcctcactctttctctcttcctttttttttctttttttttctataaacctaacctaaccaaaaaacccttttcattattcttcattcatttattcttattcatcttttcattcactcactctcactcatggctgaagatgggaacaacaacgatgtacccttacacaaattcaaagacagcaatccaaaccctgaagagttcgatgcaaagggttacagcctcagcggaaaaatcatgctttcagcaataatccttcttttcttcgtcgtcgttttgatgttgtgccttcatatctacgcgcgctggtacctccggcgtgctcgccgccgccagctccggcgccaacgcgagctccgccgcacccagcttgtcttttacaacgacgacgccacccccgcagccgtgtcacgtggcctcgacgccgccatccttgccacgctccccgtcttcaccttcgacccggaaaaaaccgggccggagtgcgctgtttgcttgtcggagttcgaacccggtgaaacgggtcgggtcttgcccaaatgtaatcacagtttccacatagaatgtattgacatgtggttccattctcatgacacgtgtcctctttgtcgcgccccggttgaacgcgcgccggaaccggaagttgttgttataacagtacccgatccggtttccgaaaccggttcaggcgaaaatgagaaccgaaccggttcttcttcttcttcctcttcggttggattgagtaagcctaagccttcgttggttggtgtgacaattgaggtgcctccgagggacgagaattttcaaaacgagttgcaaccgagttgcgactcatcctcctcgtttcggtcgccgatgagtcgcatgctgtcgtttacgaggatgctcggcagggaaaagaaggggaacgtgtcgccgtcgtcgtgcggcggcggcgattgtagctccgccgcggagcgaggtgagcgagaggagactcagtgagtcggtgactcgggtgctgacgtggcacttgttggaagcggaaaaacttgggttgttggcgcgtggcggtgtgtaatagtgacgtttctggattttaatgtaggcggtgagcggcgcgtgagttaggtggcgcgagatactgacgtagaatggttttgggatgaacataaatgatgtacttattcgttgatatatatattttttctttatttgtttcttatcttcgggttccaaaaatagttaaatagaatacgaaaattgctaattgtaatgcttgcttacatagaaatgaaaccaatttt

SEQ ID NO: 16260 - protein, 284 aa, Glycine max
MAEDGNNNDVPLHKFKDSNPNPEEFDAKGYSLSGKIMLSAIILLFFVVVLMLCLHIYARWYLRRARRRQLRRQRELRRTQLVFYNDDATPAAVSRGLDAAILATLPVFTFDPEKTGPECAVCLSEFEPGETGRVLPKCNHSFHIECIDMWFHSHDTCPLCRAPVERAPEPEVVVITVPDPVSETGSGENENRTGSSSSSSSVGLSKPKPSLVGVTIEVPPRDENFQNELQPSCDSSSSFRSPMSRMLSFTRMLGREKKGNVSPSSCGGGDCSSAAERGEREETQ

SEQ ID NO: 16261 - protein, 248 aa, Glycine max
MLSAIILLFFVVVLMLCLHIYARWYLRRARRRQLRRQRELRRTQLVFYNDDATPAAVSRGLDAAILATLPVFTFDPEKTGPECAVCLSEFEPGETGRVLPKCNHSFHIECIDMWFHSHDTCPLCRAPVERAPEPEVVVITVPDPVSETGSGENENRTGSSSSSSSVGLSKPKPSLVGVTIEVPPRDENFQNELQPSCDSSSSFRSPMSRMLSFTRMLGREKKGNVSPSSCGGGDCSSAAERGEREETQ

SEQ ID NO: 16262 - protein, 234 aa, Glycine max
MLCLHIYARWYLRRARRRQLRRQRELRRTQLVFYNDDATPAAVSRGLDAAILATLPVFTFDPEKTGPECAVCLSEFEPGETGRVLPKCNHSFHIECIDMWFHSHDTCPLCRAPVERAPEPEVVVITVPDPVSETGSGENENRTGSSSSSSSVGLSKPKPSLVGVTIEVPPRDENFQNELQPSCDSSSSFRSPMSRMLSFTRMLGREKKGNVSPSSCGGGDCSSAAERGEREETQ

SEQ ID NO: 16263 - DNA, 987 bp, Glycine max
cttctcccttctcctacctcccacacatcctcgaatcacaacctcacacctcctcccctgagtcctgaccgaccaccccgcagctagcttcgcgcagccagcaccgaccgatcacacgctagctgctgctgctgaggcgaccgaccggctatccatggcggtgaaagactgcggcgggcacaagggcgggggctgcgagtgccaccgccgccggctctaccgcaagtgctgcggcgcgctgctggccctcgtcatcctcgccctcttcatcatcctcatcgtctacctggtgctccgcccccacaagccccgcttctacctgcaggacctggcggtgctctgcctcaacgtcacgccgcccacctccgcctacctcttcaccaccatgcaggccacggtcgcggcgcgcaaccccaacgaccgcgtcggcgtctactacgacgaggcggacatgtacgcggagtacaagggcgtgcccatcaccgtccccacccgcctccccgtcgcctaccagggccaccgggaccagtccgtctggtcgccctacctccggtccatggacagcgtcgtgctcccgccgcagctcgccatcgcgctggcgcaggacgagacggccgggtacgtgctggtggacgtcaaggtggacggtcaggtgcgctggaaggtgggcacgtggatctccggccactaccacctccgggtcaactgcccggccctcatcagggtgaacgagggcaagggcagctacggcgccaccaccggcggcggccccgactacttccgcttccagcaggccgccgcctgcgccgtcgacgtctgatcatgcatcatcggttcgacctccaccgatccatgcctgtgtccaaattcaaattcaggggaatcgattgattgcttttctctctctagtttctttcttgcttctttttagtctctttttgacttgttgatcgattggttaaagaaatgaatgaaaacaaaaggttg

SEQ ID NO: 16264 - protein, 221 aa, Glycine max
MAVKDCGGHKGGGCECHRRRLYRKCCGALLALVILALFIILIVYLVLRPHKPRFYLQDLAVLCLNVTPPTSAYLFTTMQATVAARNPNDRVGVYYDEADMYAEYKGVPITVPTRLPVAYQGHRDQSVWSPYLRSMDSVVLPPQLAIALAQDETAGYVLVDVKVDGQVRWKVGTWISGHYHLRVNCPALIRVNEGKGSYGATTGGGPDYFRFQQAAACAVDV

SEQ ID NO: 16265 - protein, 144 aa, Glycine max
MQATVAARNPNDRVGVYYDEADMYAEYKGVPITVPTRLPVAYQGHRDQSVWSPYLRSMDSVVLPPQLAIALAQDETAGYVLVDVKVDGQVRWKVGTWISGHYHLRVNCPALIRVNEGKGSYGATTGGGPDYFRFQQAAACAVDV

SEQ ID NO: 16266 - protein, 122 aa, Glycine max
MYAEYKGVPITVPTRLPVAYQGHRDQSVWSPYLRSMDSVVLPPQLAIALAQDETAGYVLVDVKVDGQVRWKVGTWISGHYHLRVNCPALIRVNEGKGSYGATTGGGPDYFRFQQAAACAVDV

SEQ ID NO: 16267 - DNA, 701 bp, Glycine max
agaaggttgtggggttagggctttagagtgtcttttcttctttttcttcttcttcttcttcgttgaatcgcgattgttctgttgtgcgactgaaagaagagagatcgaaaatggcgttggctttcgacgagttcggaaggcctttcataatcctgaaggaacaggagcagaagagcagacttcgaggtttggacgctcagaaagccaacatctccgccggcaaagccgtcgctcgcatcctccgaacctccctcggccccaaaggcatggacaagatgctccagagccccgacggcgacgtcactatcacgaacgacggtgccacgatccttgaccagatggacgtggacaaccaaatcgcgaagctgatggtggagctctcgcggagtcaggactacgaaatcggcgacggaaccaccggcgtcgtcgtcatggccggcgcgcttctcgagaaggccgagcgcctcctcgagcggggaattcaccccatcaggatcgccaagggttacgaaatggcgtccaggatcgccgtcgagcatctcgagcgcgtcgccaacaagttcgagttcgacgagtccaatttggagcccctcattcaaacttgcatgaccaccctctcctccaaaattgtgaatcggtgtaagcgtagcttggctgagattgctgttaaggctgttcttgctgttgctgatctggcgagg

SEQ ID NO: 16268 - protein, 197 aa, Glycine max
MALAFDEFGRPFIILKEQEQKSRLRGLDAQKANISAGKAVARILRTSLGPKGMDKMLQSPDGDVTITNDGATILDQMDVDNQIAKLMVELSRSQDYEIGDGTTGVVVMAGALLEKAERLLERGIHPIRIAKGYEMASRIAVEHLERVANKFEFDESNLEPLIQTCMTTLSSKIVNRCKRSLAEIAVKAVLAVADLAR

SEQ ID NO: 16269 - protein, 145 aa, Glycine max
MDKMLQSPDGDVTITNDGATILDQMDVDNQIAKLMVELSRSQDYEIGDGTTGVVVMAGALLEKAERLLERGIHPIRIAKGYEMASRIAVEHLERVANKFEFDESNLEPLIQTCMTTLSSKIVNRCKRSLAEIAVKAVLAVADLAR

SEQ ID NO: 16270 - protein, 142 aa, Glycine max
MLQSPDGDVTITNDGATILDQMDVDNQIAKLMVELSRSQDYEIGDGTTGVVVMAGALLEKAERLLERGIHPIRIAKGYEMASRIAVEHLERVANKFEFDESNLEPLIQTCMTTLSSKIVNRCKRSLAEIAVKAVLAVADLAR

SEQ ID NO: 16271 - DNA, 904 bp, Glycine max
attctctgttttcttttaacatccgataaggatcggatctagctctcttcttattcgattcctctgtctcgtcgatcgaggaactaagcagtgatgggtgctggccggagatgggccgtcgatttctccgatcaatctaccgtcccatcttcccgggacatcctagatccacctggcttctctcgtgtttctcccgagcaggatgactcagcaacgagccgccaaaagaaagacgctgaagctaactggaaacttcagaaagcgtgggaagtagcgcagtcaccatttaagaatttgatgatgatgggtttcatgatgtggatggctggaaacactgttcatctctttagcattggtatcactttctctgctctttggcagcctctcagcgccctccagagcgttggaaaggtttttgagccattcaaggataacaaggtggaactacttatgcccaagctggtgtttcttgcccttaaccttggagggttagctttgggtatttggaagctcaacactttggggcttcttccaactcatgcatcagattgggtttcatctctaccccctcctcaggaggttgaacactctggcggaggatttgctttccactgatgagcatgtgtctctttgagataattacgaaagatacttaagtgatttgttcaatcctatatcatgaggggaagattcatgtggaccttctcatctcgtgatcttcttgtagcattttcaaaactctgaaaccatagcttttttcacttatggtgtgatgttcattgctcatcataactttgaattgtattattggcactgaaggaactttcccagcttttttatagacaggaatggataatgttacagactgaagtttggttcttaatttgcttgaaccatgactctg

SEQ ID NO: 16272 - protein, 173 aa, Glycine max
MGAGRRWAVDFSDQSTVPSSRDILDPPGFSRVSPEQDDSATSRQKKDAEANWKLQKAWEVAQSPFKNLMMMGFMMWMAGNTVHLFSIGITFSALWQPLSALQSVGKVFEPFKDNKVELLMPKLVFLALNLGGLALGIWKLNTLGLLPTHASDWVSSLPPPQEVEHSGGGFAFH

SEQ ID NO: 16273 - protein, 105 aa, Glycine max
MMMGFMMWMAGNTVHLFSIGITFSALWQPLSALQSVGKVFEPFKDNKVELLMPKLVFLALNLGGLALGIWKLNTLGLLPTHASDWVSSLPPPQEVEHSGGGFAFH

SEQ ID NO: 16274 - protein, 104 aa, Glycine max
MMGFMMWMAGNTVHLFSIGITFSALWQPLSALQSVGKVFEPFKDNKVELLMPKLVFLALNLGGLALGIWKLNTLGLLPTHASDWVSSLPPPQEVEHSGGGFAFH

SEQ ID NO: 16275 - DNA, 840 bp, Glycine max
acaattcccaggaagaacgtttcaattctaatcagtagttaaacttttccctacaccaaaatcatctcttcactaatggaaggtggactaaagggaagctcattacaagatatgaagcttttgtttgttgaaatgggtgttggctatgaccttcatggtcaggacataacagctgccgcaatgagagcatgcagagatgcaatttctgccaattcaattccagctttccgtaaaggtagcatccctggtgttacatctgatcacatgaaattacatgtcaaactgggggtgcctcatcctctgcaacaaaacttgaacaaggataaaattaagtctgtgtttccatacggacaaatcatgaactttgaagtagtggatggtggacttgtgtgctcaactgaagaaatggccgaaaagaacgatgactgctacattgttaatgctgctgtatatgttggctactaggcttttggtatcttagatccctctggaatcttaatttccatggggaacttgcatgtgtgttggagttttgttgcttcagtaaagctgcaatgagggcaaagtttgcattttagcttttttatatgtattttaattaagagtagttgtgttatcctttcattgtttctgcacgaatgtacctagtacttttgtcagttaggttgaatttactatgtttgtttgtaataatggatcaaagatcatctgaagttcatttttgaactgcatacttctcaaccattgatgtatactttaccttaaacaaaatattaatagaaaaataaaataaattaatgtagggtgaaagcttaaactgcacccctgctgttagttttc

SEQ ID NO: 16276 - protein, 129 aa, Glycine max
MEGGLKGSSLQDMKLLFVEMGVGYDLHGQDITAAAMRACRDAISANSIPAFRKGSIPGVTSDHMKLHVKLGVPHPLQQNLNKDKIKSVFPYGQIMNFEVVDGGLVCSTEEMAEKNDDCYIVNAAVYVGY

SEQ ID NO: 16277 - protein, 117 aa, Glycine max
MKLLFVEMGVGYDLHGQDITAAAMRACRDAISANSIPAFRKGSIPGVTSDHMKLHVKLGVPHPLQQNLNKDKIKSVFPYGQIMNFEVVDGGLVCSTEEMAEKNDDCYIVNAAVYVGY

SEQ ID NO: 16278 - protein, 110 aa, Glycine max
MGVGYDLHGQDITAAAMRACRDAISANSIPAFRKGSIPGVTSDHMKLHVKLGVPHPLQQNLNKDKIKSVFPYGQIMNFEVVDGGLVCSTEEMAEKNDDCYIVNAAVYVGY

SEQ ID NO: 16279 - DNA, 1542 bp, Glycine max
aatagcagctcagaaagaaacgcaagttttggcatgggtgtgagctctggaactccactcgtgatccaacacgatagagagagaaaaagggtcttgcctttttttctgcttttgatttgactctttacaaatacaaataaataataaaatcccatcaagaagaaataaatatcaagcccaacccagtgcagtgctgcagggactgtcactgaactcaaaaatgaactgtcttcggaatctttctcgattctctgttttgcccttcgaaacacctgttacgcgccaccgcaagaaccttcccctttccctgggtttcgtcaacaattctcgtcaatatccaactatggccctcaaggctgcctcaggttctataccaagtgcagacacaagtagtgccgataaggaggaagaaaagtctgagacatatagtcataacatgacagaagccatgggtgctgttttgacttataggcatgaattaggaatgaactataatttcatccgtccagacttgattgtgggatcatgcctacagactcctgaagatgtagacaagttgcgtagaattggagtgaaaactatattttgcttacaacaagattcagaccttgaatattttggagttgatattaatgccatacgagaatatgccaagacatgcaatgacattcaacacttgcgtgctgagataagggactttgatgcatttgatctacggaggcggcttccagctgtagttagcaaattatacaaggcaataaattccaatggaggtgtaacatatatacattgcactgctggacttggaagagctccagctgttgcgttggcttatatgttttgggttctgggttataaacttaacgaggctcatacactacttcagagcaaaaggtcgtgctttccaaaactggatgccattaaaagtgcaacagctgatattcttacaggcctcagtaagaagtctgtcactttgtcatgggaagacaaaaattgctctaccgtggaaatttcaggacttgatattggatgggggcagagaatacccctaaattttgatgacaaagagggtttgtggtttctcaagagggaattgcctgaaggactctacgagtacaagtacattgttgatggggaatggacatgcaacagcgatgagcttataacctctcccaacaaagatggccatgtcaacaattttattcaagtccttgatgatacaagcagtgttcgtgcctctcttcggaagagattgacggctgatgatcctgatctcacaacagatgaacaactcagaataaaggagtttcttgaagcttgtcctgatgaggattagtgaaccatcaattcacgtggttgttgatatgaaaaatactagatgcgcgcatacatgttacctaataagattaatctaaaccttacaatatgttgggttcctgcggtttattgagttccatagtaatcaaatgtcttggaaattatttaaatagcaccatgaccttcaaatttcaatgtaccatgaaatagaatgtggctataaaa

SEQ ID NO: 16280 - protein, 371 aa, Glycine max
MNCLRNLSRFSVLPFETPVTRHRKNLPLSLGFVNNSRQYPTMALKAASGSIPSADTSSADKEEEKSETYSHNMTEAMGAVLTYRHELGMNYNFIRPDLIVGSCLQTPEDVDKLRRIGVKTIFCLQQDSDLEYFGVDINAIREYAKTCNDIQHLRAEIRDFDAFDLRRRLPAVVSKLYKAINSNGGVTYIHCTAGLGRAPAVALAYMFWVLGYKLNEAHTLLQSKRSCFPKLDAIKSATADILTGLSKKSVTLSWEDKNCSTVEISGLDIGWGQRIPLNFDDKEGLWFLKRELPEGLYEYKYIVDGEWTCNSDELITSPNKDGHVNNFIQVLDDTSSVRASLRKRLTADDPDLTTDEQLRIKEFLEACPDED

SEQ ID NO: 16281 - protein, 330 aa, Glycine max
MALKAASGSIPSADTSSADKEEEKSETYSHNMTEAMGAVLTYRHELGMNYNFIRPDLIVGSCLQTPEDVDKLRRIGVKTIFCLQQDSDLEYFGVDINAIREYAKTCNDIQHLRAEIRDFDAFDLRRRLPAVVSKLYKAINSNGGVTYIHCTAGLGRAPAVALAYMFWVLGYKLNEAHTLLQSKRSCFPKLDAIKSATADILTGLSKKSVTLSWEDKNCSTVEISGLDIGWGQRIPLNFDDKEGLWFLKRELPEGLYEYKYIVDGEWTCNSDELITSPNKDGHVNNFIQVLDDTSSVRASLRKRLTADDPDLTTDEQLRIKEFLEACPDED

SEQ ID NO: 16282 - protein, 299 aa, Glycine max
MTEAMGAVLTYRHELGMNYNFIRPDLIVGSCLQTPEDVDKLRRIGVKTIFCLQQDSDLEYFGVDINAIREYAKTCNDIQHLRAEIRDFDAFDLRRRLPAVVSKLYKAINSNGGVTYIHCTAGLGRAPAVALAYMFWVLGYKLNEAHTLLQSKRSCFPKLDAIKSATADILTGLSKKSVTLSWEDKNCSTVEISGLDIGWGQRIPLNFDDKEGLWFLKRELPEGLYEYKYIVDGEWTCNSDELITSPNKDGHVNNFIQVLDDTSSVRASLRKRLTADDPDLTTDEQLRIKEFLEACPDED

SEQ ID NO: 16283 - DNA, 593 bp, Glycine max
cccactttattgtgtttaaacatctctctctcaaagccaaataaacattttagattttttcttcagtttcttagagaagatgtcttgctgtggaggaaactgtagctgcggagctgactgcaagtgtgatggctgcaaaggttgcaagatgtacccagacttgggcttctcaggggagactaccaccacccagactcttgtcctcggcgttgctccgtcgatgaactctcagtatgaggcttctggcgagactttcttcgccgagaatgatggatgcaagtgcggatctgactgcaagtgcgacaacccttgcacttgtaaatgaacaaccccaataaacccaaaccccaagtatttaaagtaaaacctgatgttatgtttgctagtatgtaataatgacttatttcgccggttgtttggctggctatgtgagtcctgttgtttttcgtcttcttctgtgtgtgtgtttaaggtttggtcataagatatctctgcatgttgtatctgtgtgactatatatgattcgaaagtgttatgtggtttgtaatttgaagtttcagtcatatctttttaaggttgcttcatttttgctc

SEQ ID NO: 16284 - protein, 81 aa, Glycine max
MSCCGGNCSCGADCKCDGCKGCKMYPDLGFSGETTTTQTLVLGVAPSMNSQYEASGETFFAENDGCKCGSDCKCDNPCTCK

SEQ ID NO: 16285 - protein, 58 aa, Glycine max
MYPDLGFSGETTTTQTLVLGVAPSMNSQYEASGETFFAENDGCKCGSDCKCDNPCTCK

SEQ ID NO: 16286 - DNA, 1032 bp, Glycine max
taaccgcatcattcctcctcatccgtcggcgatcggcataaggcagcgctccaccccgttggcatacccagactaactcatcgcgtgccggatcagctccagccatggcgtcgatgcaggctcccgcgccggggccgtcagggtacccgccgcacggcggccaggccgcgcgcccgcagtccacggccgtcgccgtcacggcggccagcaacggcgccggaaacccctacgtgcaggtcaccccggccagcgcgtccccctccacctgccagtccatcatgaaggcgctggggcggtacggcaagctgctggaggacggcacccgcaaggccgccgacaccaccggcaacatctggaaccacctccggacggcgccgaacatggcggacgcggcggtggcgcggctggcgcaggggaccaaggtgtacgcggagggcgggcacgagagggtgttccatcaggtgttcggcgccgtgcccggggagcagctccgcaaggcctacgcctgctacctctccacctcatccggccccgtcatcggcacgctctacctctccacggggcgcctcgccttctgcagcgactcccccgtctcctaccacgccccctccggcagccagccgccggagcccatgtactacaaggtggtgcttccgctgaaccaggtgaggacggtgagcccgtccgccagcatgtggaggccgtcggagcggtacatccaggtggccaccaccgacaaccacgagttctggttcatgggcttcgtctcctacgacaaggcgctcaagcacctctccgacgccctgcagcgccgtccctgaccgatccccgtccgtccgtccgtctgcaccatcgcagctgctaggagtataagctccagttcttcggcagtggcactatcctgtcactgactgatcagtgtttgtactcttcattcctgtaccgcaactcgccccatcagcagttcttgctctggaataatttataagacaccaataaagctccgttgcctgccgtcggtatcaccaacct

SEQ ID NO: 16287 - protein, 238 aa, Glycine max
MASMQAPAPGPSGYPPHGGQAARPQSTAVAVTAASNGAGNPYVQVTPASASPSTCQSIMKALGRYGKLLEDGTRKAADTTGNIWNHLRTAPNMADAAVARLAQGTKVYAEGGHERVFHQVFGAVPGEQLRKAYACYLSTSSGPVIGTLYLSTGRLAFCSDSPVSYHAPSGSQPPEPMYYKVVLPLNQVRTVSPSASMWRPSERYIQVATTDNHEFWFMGFVSYDKALKHLSDALQRRP

SEQ ID NO: 16288 - protein, 235 aa, Glycine max
MQAPAPGPSGYPPHGGQAARPQSTAVAVTAASNGAGNPYVQVTPASASPSTCQSIMKALGRYGKLLEDGTRKAADTTGNIWNHLRTAPNMADAAVARLAQGTKVYAEGGHERVFHQVFGAVPGEQLRKAYACYLSTSSGPVIGTLYLSTGRLAFCSDSPVSYHAPSGSQPPEPMYYKVVLPLNQVRTVSPSASMWRPSERYIQVATTDNHEFWFMGFVSYDKALKHLSDALQRRP

SEQ ID NO: 16289 - protein, 180 aa, Glycine max
MKALGRYGKLLEDGTRKAADTTGNIWNHLRTAPNMADAAVARLAQGTKVYAEGGHERVFHQVFGAVPGEQLRKAYACYLSTSSGPVIGTLYLSTGRLAFCSDSPVSYHAPSGSQPPEPMYYKVVLPLNQVRTVSPSASMWRPSERYIQVATTDNHEFWFMGFVSYDKALKHLSDALQRRP

SEQ ID NO: 16290 - DNA, 783 bp, Glycine max
aagaaaaacaattccacagaacaatagtaagtcctatcagtttccacgtaagtctccaaaatcagaaacactcgaagcttttcaatggagatagatggcaacgttctcgcggccaagtcgctggtgcgcttcggtgtgcagcacatgttcggcgtggtggggattccggtgacgtcgctggccaaccgcgccgtctcgctcggtgtcagattcattgcttttcacaacgagcagtccgcgggctacgccgcctccgcctacggctacctcaccggccgccccggcgtgttcctcaccgtctccggccccggctgcgtccacggcctcgccggcctctccaacgcctccgtcaacacctggcccaccgtcatgatctccggctcctgcgaccaaaacgacgtcggccgcggcgattttcaagaactcaaccagatcgaagccaccaaacccttcaccaaactctccgtcaaagcctcgcatatctccgaaatcccggcccgcgtggcccaggttctcgattgggcccaatcggcccggcccggtggctgctacttagatctccccaccgacgtcttacatcaaaaaatctccgagtccgaagcagagaaactcttatccgaagcagaaaataaccgttcgatttccaatcctaaacccgaacctcctcttttcaattcaaagattgaacaagcggtttctcttctcagacacgcggagaggccgttgatagtgttcggaaaaggagcggcgtatgcacgtgcggagcacgtgcttacgaagctg

SEQ ID NO: 16291 - protein, 233 aa, Glycine max
MEIDGNVLAAKSLVRFGVQHMFGVVGIPVTSLANRAVSLGVRFIAFHNEQSAGYAASAYGYLTGRPGVFLTVSGPGCVHGLAGLSNASVNTWPTVMISGSCDQNDVGRGDFQELNQIEATKPFTKLSVKASHISEIPARVAQVLDWAQSARPGGCYLDLPTDVLHQKISESEAEKLLSEAENNRSISNPKPEPPLFNSKIEQAVSLLRHAERPLIVFGKGAAYARAEHVLTKL

SEQ ID NO: 16292 - protein, 213 aa, Glycine max
MFGVVGIPVTSLANRAVSLGVRFIAFHNEQSAGYAASAYGYLTGRPGVFLTVSGPGCVHGLAGLSNASVNTWPTVMISGSCDQNDVGRGDFQELNQIEATKPFTKLSVKASHISEIPARVAQVLDWAQSARPGGCYLDLPTDVLHQKISESEAEKLLSEAENNRSISNPKPEPPLFNSKIEQAVSLLRHAERPLIVFGKGAAYARAEHVLTKL

SEQ ID NO: 16293 - protein, 209 aa, Glycine max
EKQFHRTIVSPISFHVSLQNQKHSKLFNGDRWQRSRGQVAGALRCAAHVRRGGDSGDVAGQPRRLARCQIHCFSQRAVRGLRRLRLRLPHRPPRRVPHRLRPRLRPRPRRPLQRLRQHLAHRHDLRLLRPKRRRPRRFSRTQPDRSHQTLHQTLRQSLAYLRNPGPRGPGSRLGPIGPARWLLLRSPHRRLTSKNLRVRSRETLIRSRK

SEQ ID NO: 16294 - DNA, 645 bp, Glycine max
ccatcgccaccggctgacatcctctccatcgctccctgctaagctgccactgaccattgcatacacatccttatcccaaggcgacaatggccggacgcgtggcgctggcggcggtcctgctgtgcacagcggcggccatggccgcagcgcaatcggcgtccaacgtgcgtgccacctacaacttctacaacccggagaagatcaactgggacctcaacaccgccagcgcctactgcgccacatgggacgccggcatgtccttggcctggcgctccaagtatggctggactgccttttgcgggcccgctgggcccaccggccaggcatcctgcggcaagtgcctccaggtgacgaacacggctaccggcgcacagattacggcgaggatcgttgaccagtgcagcaacggtggcctggacctggactatgacacggtgttcagcaagatcgacaccaacggggtgggtatgcagcagggccacctcaccgtcaactaccagttcgtcgactgtggcgataactaaggaagaaataattggtgctccgatgctatgcaaggaaaaaaaagattctggattacaaataatgatgcatgtctgtgaattataatgaagtggaataaattttactgtgatgaatggattc

SEQ ID NO: 16295 - protein, 145 aa, Glycine max
MAGRVALAAVLLCTAAAMAAAQSASNVRATYNFYNPEKINWDLNTASAYCATWDAGMSLAWRSKYGWTAFCGPAGPTGQASCGKCLQVTNTATGAQITARIVDQCSNGGLDLDYDTVFSKIDTNGVGMQQGHLTVNYQFVDCGDN

SEQ ID NO: 16296 - protein, 130 aa, Glycine max
HRHRLTSSPSLPAKLPLTIAYTSLSQGDNGRTRGAGGGPAVHSGGHGRSAIGVQRACHLQLLQPGEDQLGPQHRQRLLRHMGRRHVLGLALQVWLDCLLRARWAHRPGILRQVPPGDEHGYRRTDYGEDR

SEQ ID NO: 16297 - protein, 128 aa, Glycine max
MAAAQSASNVRATYNFYNPEKINWDLNTASAYCATWDAGMSLAWRSKYGWTAFCGPAGPTGQASCGKCLQVTNTATGAQITARIVDQCSNGGLDLDYDTVFSKIDTNGVGMQQGHLTVNYQFVDCGDN

SEQ ID NO: 16298 - DNA, 1156 bp, Glycine max
acttcttcgctggaaacccctttctctctcttaaatcttctcattcttcttcttcttctccctcccgccacctcacttaccctcttcctaaaccctagcctcgccggaccaccaacaccaccgcgtcaatctgacccaaatctccgcgtccttatccaccaacaactccggtgcaccacctagccagcgccgacaacatctgcggcgtaccaccactacgtcgtcaagatcagcacaaccacacctagcaccgaatccagccaacaacctgcggccccgaactttccgcaaacccaaggcccaccacctccgaccaaacaccgcgcgccctcgtcaccatcaaaactccaccaccatagcccacctcaacccaaacacctaagcgcccacatcaaaaccctcgtgctacccttcaccctcacctcgtttggcatcagaatagcaccgcacgtgccggggtcgagccggacgagggcggcaaagcctccggcgtcgccatgattggagatttctggtttgggggttagggatttcaaatttgggggtggggttctgactttgagtaaaaaatgacacatttacaggttttagagcttgatagtagaaatgtaaaagcactctatcggagggcacaggcatatcttcatcttgtggacttagatctagctgagatggatattaagaaagcccttgagattgagccaaacaacagggatgtcaagatggagtacaaaattttgaagcagaaggtgagagaacacaacaagaaggacgcacagttttacggcagcatatttgcaaaaatgaataaactagaacaagcaagaacagcaacagcgaagcaggagccggtgccaatgactattgacagcaaaggcttaaatttaaatttgagagatatctctgtctgtggtcgtctctgcatagtacgatattccaattgttgtgtcgtaagtcttggtaacataaatagctttgctctctgtctgtggtcgtctctacatactagtaccttaatagtacgatattccaattttaagtcttggtaacataaatagctttgctcgtatcttgtgtgattttcatatgaagaatgcatatggtcaagctatgtatactgatggctaataagaaatgaagtaaagcaagttttggc

SEQ ID NO: 16299 - protein, 159 aa, Glycine max
MTHLQVLELDSRNVKALYRRAQAYLHLVDLDLAEMDIKKALEIEPNNRDVKMEYKILKQKVREHNKKDAQFYGSIFAKMNKLEQARTATAKQEPVPMTIDSKGLNLNLRDISVCGRLCIVRYSNCCVVSLGNINSFALCLWSSLHTSTLIVRYSNFKSW

SEQ ID NO: 16300 - protein, 125 aa, Glycine max
MDIKKALEIEPNNRDVKMEYKILKQKVREHNKKDAQFYGSIFAKMNKLEQARTATAKQEPVPMTIDSKGLNLNLRDISVCGRLCIVRYSNCCVVSLGNINSFALCLWSSLHTSTLIVRYSNFKSW

SEQ ID NO: 16301 - protein, 108 aa, Glycine max
MEYKILKQKVREHNKKDAQFYGSIFAKMNKLEQARTATAKQEPVPMTIDSKGLNLNLRDISVCGRLCIVRYSNCCVVSLGNINSFALCLWSSLHTSTLIVRYSNFKSW

SEQ ID NO: 16302 - DNA, 931 bp, Glycine max
  misc_feature (167)..(167): n is a, c, g, or t
  misc_feature (321)..(321): n is a, c, g, or t
  misc_feature (575)..(575): n is a, c, g, or t
atcctttgtattctattcttcaagattcaggtactgcgtttcggaagcagacacagatggctcgtacgaagcaaaccgctcgtaagtccacaggaggaaaggctcctaggaagcagcttgcaaccaaggctgcacgtaagtctgcaccaactactggtggtgtgaanaagccccaccgttatcgtcctggtaccgttgctcttcgtgaaattaggaaataccagaagagtaccgagcttttgatccggaagctccccttccagaggctggttcgtgaaattgctcaggacttcaagactgatctgcgtttccagagccacnccgtgcttgcattgcaagaagctgctgaggcataccttgttgggctctttgaggacactaacctgtgtgccattcacgccaagcgtgtaaccattatgcccaaggatattcagctggcaagaaggattcgtggtgagcgtgcttgagttggtggttggaaagatgaagatgattggtggctgcggttggtgtttttgtttttcagattcctttttttattcaatagatggggttgttagggagggtaggttttntgctggtagtagcattaattgggatataggcaaatactgccgagtgtccgtgactgtgttttcttcctttaagaaaattggcttgtaattgatttttggacatatgtatgtgttagaatgcttctgttttagtttttacctgcgggatgttgcagccactttagaaactgtattggacaacattcagttgccatctaatctcgtttaagttagtttgttgggttgcctcgttcttactcgggatttccatcccagtttggttactgggtttcttatttattgttcactgtacattatttatggattacctccataaaagaaaagagcgttaatcgaagctgtcagatttaaaagtt

SEQ ID NO: 16303 - protein, 154 aa, Glycine max
  misc_feature (55)..(55): Xaa can be any naturally occurring amino acid
  misc_feature (107)..(107): Xaa can be any naturally occurring amino acid
PLYSILQDSGTAFRKQTQMARTKQTARKSTGGKAPRKQLATKAARKSAPTTGGVXKPHRYRPGTVALREIRKYQKSTELLIRKLPFQRLVREIAQDFKTDLRFQSHXVLALQEAAEAYLVGLFEDTNLCAIHAKRVTIMPKDIQLARRIRGERA

SEQ ID NO: 16304 - protein, 136 aa, Glycine max
  misc_feature (37)..(37): Xaa can be any naturally occurring amino acid
  misc_feature (89)..(89): Xaa can be any naturally occurring amino acid
MARTKQTARKSTGGKAPRKQLATKAARKSAPTTGGVXKPHRYRPGTVALREIRKYQKSTELLIRKLPFQRLVREIAQDFKTDLRFQSHXVLALQEAAEAYLVGLFEDTNLCAIHAKRVTIMPKDIQLARRIRGERA

SEQ ID NO: 16305 - DNA, 1256 bp, Glycine max
ctttattgtgtttaaacagcaaacttgagtttggcctcattagtaacaaatgcaacggttctataaattttgcagatgatagtatcatggagatattacaaaagggtgagacagattctaatcgcattgaagcacaaatttactctttgaggtctgcaatagagagtgctgaaactaagcaccaggaagaacagatcgagtgttctgtgaagattaggaaagcctatgagttgattgaacagataaaatcagaatcaagcaagagggaatctcagctagaggctgaattaaaaagaaagaatgccgatattgaagagttgaaggctaacctaatggacaaggaaactgagttgcagtgcattgtggaggagaatgagaagttgaatttgaagcttgaaaaaaggatgtcatcacaaagagaacatgaacttcaaaaggagcttcgaaaactagatgaatgcgtggctggattgaaggccgacctgatggaaaagaaaacaacgttgcaaagcatatctgaagagaatgaaatgctgaagttggagatcagtaagaggtttgcacatggtggtaaggtgatggaggaagttgctgcacaactagaggcagctaaggcttcggaacgcgaggcggttatgaagcttggtattgtgatggaagattcagacagaagcaaccgaaaggcggcgagggtggccgagcaactggaagcatctcaagcagcaaattcaataatagaagctgaactaagaaggttgaagatacagtctgatcaatggagaaaggctgcagaggcagctgctgcaatgctctcagcagggaacaatgggaaacttagtgagagatcaatgtctttggacaacaactataactctataatgaacaagtactcacctttttgtgaagagcttgatgatgatgattttcagaccaagaaaaatggcaacatgctcaagaagattggggtcttgtggaggaaacctaaaaaatagtcaatgttggctgtttacgagttatgacccgcttctaatgttatgattatgttaactgtaatgtttatgttatgcaattttgtctgaccgctaccctcctttttgtttggtgaaacgttgtctacagatgcttagtagtttgaatgaattaagcgcttttataattcaaggacgtgtaggtagagattagagattgtcaatgtttaacccaaaagggttggggtaaggttttctttccatcagtgaaaatcgtgtttgatttct

SEQ ID NO: 16306 - protein, 329 aa, Glycine max
LLCLNSKLEFGLISNKCNGSINFADDSIMEILQKGETDSNRIEAQIYSLRSAIESAETKHQEEQIECSVKIRKAYELIEQIKSESSKRESQLEAELKRKNADIEELKANLMDKETELQCIVEENEKLNLKLEKRMSSQREHELQKELRKLDECVAGLKADLMEKKTTLQSISEENEMLKLEISKRFAHGGKVMEEVAAQLEAAKASEREAVMKLGIVMEDSDRSNRKAARVAEQLEASQAANSIIEAELRRLKIQSDQWRKAAEAAAAMLSAGNNGKLSERSMSLDNNYNSIMNKYSPFCEELDDDDFQTKKNGNMLKKIGVLWRKPKK

SEQ ID NO: 16307 - protein, 301 aa, Glycine max
MEILQKGETDSNRIEAQIYSLRSAIESAETKHQEEQIECSVKIRKAYELIEQIKSESSKRESQLEAELKRKNADIEELKANLMDKETELQCIVEENEKLNLKLEKRMSSQREHELQKELRKLDECVAGLKADLMEKKTTLQSISEENEMLKLEISKRFAHGGKVMEEVAAQLEAAKASEREAVMKLGIVMEDSDRSNRKAARVAEQLEASQAANSIIEAELRRLKIQSDQWRKAAEAAAAMLSAGNNGKLSERSMSLDNNYNSIMNKYSPFCEELDDDDFQTKKNGNMLKKIGVLWRKPKK

SEQ ID NO: 16308 - protein, 219 aa, Glycine max
MDKETELQCIVEENEKLNLKLEKRMSSQREHELQKELRKLDECVAGLKADLMEKKTTLQSISEENEMLKLEISKRFAHGGKVMEEVAAQLEAAKASEREAVMKLGIVMEDSDRSNRKAARVAEQLEASQAANSIIEAELRRLKIQSDQWRKAAEAAAAMLSAGNNGKLSERSMSLDNNYNSIMNKYSPFCEELDDDDFQTKKNGNMLKKIGVLWRKPKK

SEQ ID NO: 16309 - DNA, 1016 bp, Glycine max
tatattaatatcattctgttatagtacctctgggactcattaatgaatatattatattttggctgataaaaaaaataaaaaaattctgttttcactttaggttggattagctatgtcaccacttagcaataattctcttttcttgaactataaacgcaatccattaccaatgtttttccagctaggtctaaatgtgtctctctctaccgatgatcctttgcaaattcatttgacaaaagagccactgctcgaagaatataatgttgcagcaaaggtatggaagctctctgcatgtgacctgtgtgagatagctagaaattctgtctaccaatctggattttcacaccaagcaaagtcacactggcttggggataaatatttgttgagaggttccgaaggaattgatattcacaagacaaatgttcccaatttgaggatttctttccgatatgaggtgaaaaaacttaagacaaatcatatataagtgcagtttaatttgtattgattctttcatgataaccattcttgcatttattctttcttacttacgattgttggtgtttatgctggtcaagctgtctttcctgaagatttagacccatgaagcaagtctagtgaaattcatcattcatcccatgataacgctaacgtcggtactgtggtcaattttcttttgtgcagcagcagctttgatagtaagaagttatcgtaaccttgaagtaaccctcggttgtttcttaacataatcacaaactctaaaatgacatgctatcttaacacacttggttactattagtatttgcccctatttgtaccatataataaattatgtacggaagcgctggcatttgtagttgtctttttaggtggtaggaagtagggacgcttatgctagcctagttatttattagaagtaaattagcagtttgtataataaaatttgctcttcatgaatatacagaatgaaagatcatcttgaaactactttatttaatttcgcgtgtctatttgatgct

SEQ ID NO: 16310 - protein, 123 aa, Glycine max
MSPLSNNSLFLNYKRNPLPMFFQLGLNVSLSTDDPLQIHLTKEPLLEEYNVAAKVWKLSACDLCEIARNSVYQSGFSHQAKSHWLGDKYLLRGSEGIDIHKTNVPNLRISFRYEVKKLKTNHI

SEQ ID NO: 16311 - protein, 104 aa, Glycine max
MFFQLGLNVSLSTDDPLQIHLTKEPLLEEYNVAAKVWKLSACDLCEIARNSVYQSGFSHQAKSHWLGDKYLLRGSEGIDIHKTNVPNLRISFRYEVKKLKTNHI

SEQ ID NO: 16312 - DNA, 1387 bp, Glycine max
ttgggtagcgctcgaaggagaggtgaatggaaagtaaagtagttgttccggcacaaggcaagaagatcaccctgcaaaacggcaaactcaacgttcctgaaaatccgattatcccttacattgaaggtgatggaatcggtgtagatgtaaccccagccatgctgaaagtggtcgacgctgcagtcgagaaagcctataaaggcgagcgtaaaatctcctggatggaaatttacaccggtgaaaaatccacacaggtttatggtcaggacgtctggctgcctgctgaaactcttgatctgattcgtgaatatcgcgttgccattaaaggtccgctgaccactccggttggtggcggtattcgctctctgaacgttgccctgcgccaggaactggatctctacatctgcctgcgtccggtacgttactatcagggcactccaagcccggttaaacaccctgaactgaccgatatggttatcttccgtgaaaactcggaagacatttatgcgggtatcgaatggaaagcagactctgccgacgccgagaaagtgattaaattcctgcgtgaagagatgggggtgaagaaaattcgcttcccggaacattgtggtatcggtattaagccgtgttcggaagaaggcaccaaacgtctggttcgtgcagcgatcgaatacgcaattgctaacgatcgtgactctgtgactctggtgcacaaaggcaacatcatgaagttcaccgaaggagcgtttaaagactggggctaccagctggcgcgtgaagagtttggcggtgaactgatcgacggtggcccgtggctgaaagttaaaaacccgaacactggcaaagagatcgtcattaaagacgtgattgctgatgcattcctgcaacagatcctgctgcgtccggctgaatatgatgttatcgcctgtatgaacctgaacggtgactacatttctgacgccctggcagcgcaggttggcggtatcggtatcgcccctggtgcaaacatcggtgacgaatgcgccctgtttgaagccacccacggtactgcgccgaaatatgccggtcaggacaaagtaaatcctggctctattattctctccgctgagatgatgctgcgccatatgggttggactgaagcggctgacctgattgttaaaggtatggaaggcgcaatcaatgccaagaccgtaacttatgacttcgaacgtctgatggaaggcgctaagctgctgaaatgttcagagtttggtgaagcgatcatcgaaaacatgtaatctctccatgtgttaaatattgaaacgggcgtataacaggccactgtagacacgaacacagccgttcgccatcgcccatgcgttgacgtcgctggtcatataaaccttat

SEQ ID NO: 16313 - protein, 416 aa, Glycine max
MESKVVVPAQGKKITLQNGKLNVPENPIIPYIEGDGIGVDVTPAMLKVVDAAVEKAYKGERKISWMEIYTGEKSTQVYGQDVWLPAETLDLIREYRVAIKGPLTTPVGGGIRSLNVALRQELDLYICLRPVRYYQGTPSPVKHPELTDMVIFRENSEDIYAGIEWKADSADAEKVIKFLREEMGVKKIRFPEHCGIGIKPCSEEGTKRLVRAAIEYAIANDRDSVTLVHKGNIMKFTEGAFKDWGYQLAREEFGGELIDGGPWLKVKNPNTGKEIVIKDVIADAFLQQILLRPAEYDVIACMNLNGDYISDALAAQVGGIGIAPGANIGDECALFEATHGTAPKYAGQDKVNPGSIILSAEMMLRHMGWTEAADLIVKGMEGAINAKTVTYDFERLMEGAKLLKCSEFGEAIIENM

SEQ ID NO: 16314 - protein, 372 aa, Glycine max
MLKVVDAAVEKAYKGERKISWMEIYTGEKSTQVYGQDVWLPAETLDLIREYRVAIKGPLTTPVGGGIRSLNVALRQELDLYICLRPVRYYQGTPSPVKHPELTDMVIFRENSEDIYAGIEWKADSADAEKVIKFLREEMGVKKIRFPEHCGIGIKPCSEEGTKRLVRAAIEYAIANDRDSVTLVHKGNIMKFTEGAFKDWGYQLAREEFGGELIDGGPWLKVKNPNTGKEIVIKDVIADAFLQQILLRPAEYDVIACMNLNGDYISDALAAQVGGIGIAPGANIGDECALFEATHGTAPKYAGQDKVNPGSIILSAEMMLRHMGWTEAADLIVKGMEGAINAKTVTYDFERLMEGAKLLKCSEFGEAIIENM

SEQ ID NO: 16315 - protein, 351 aa, Glycine max
MEIYTGEKSTQVYGQDVWLPAETLDLIREYRVAIKGPLTTPVGGGIRSLNVALRQELDLYICLRPVRYYQGTPSPVKHPELTDMVIFRENSEDIYAGIEWKADSADAEKVIKFLREEMGVKKIRFPEHCGIGIKPCSEEGTKRLVRAAIEYAIANDRDSVTLVHKGNIMKFTEGAFKDWGYQLAREEFGGELIDGGPWLKVKNPNTGKEIVIKDVIADAFLQQILLRPAEYDVIACMNLNGDYISDALAAQVGGIGIAPGANIGDECALFEATHGTAPKYAGQDKVNPGSIILSAEMMLRHMGWTEAADLIVKGMEGAINAKTVTYDFERLMEGAKLLKCSEFGEAIIENM

SEQ ID NO: 16316 - DNA, 1106 bp, Glycine max
  misc_feature (427)..(427): n is a, c, g, or t
  misc_feature (445)..(445): n is a, c, g, or t
aaattttaacgaacaagttcaaaaatgagtctgtgaattggtatgcaccaaccaattcgtggttttatgaagtgagtgaattttgtaacttaggatcaaatatttgatagcatgaaaaaataccatgcatatcaacaaatggccataggtgtttagtccaatttcacacaatttctttgttgaacaggaacaaatatgaatacaagtttattaaggagatagttgaatcggtgtcaaacaagtttaatcatgatcatttacatgtttcggatgtcctggttgggctagagtcaccagtgctagaagtaaagtcgcttctggatgttggacgtgatgatgtcgtccacatggtagggatccatggactcgccggagtgggtaaacaacacttgctatcgcggtctataattctattgctggccatttngaagcttcttgctttctngaaaatgtgaaaagaacttccaacacgataaatgggttagaaaaactccaaagcttccttctttctaaaaccgctggagaaattaagttaacaaattggagagaaggaattcccattataaagcgtaagctcaagcaaaaaaaggttcttcttattctagatgatgttgatgaagataaacagttacaagcacttattggcagccctgattggtttggtcttggcagtagaatcatcataaccactcgagacgaacatttgttagctctacacaatgttaaaataacatataaggtgagagagttgaatgagaaacatgctcttcaattacttactcagaaggcttttgagttggaaaaaggaattgatccaagttatcatgatattttgaatcgagcggtaacttatgcttcaggtcttccatttgttttagaagtaataggttccaacttatttggaaaaagtatagaagaatggaaatctgctctagatggatatgaaagaattcctcataaaaaaatctatgcatacttaaagtaagttatgatgctttgaatgaagatgagaaaagtatttttctagcttgatattgcacccttgcgatttggagcagcccaatacaagcggatctccaattaatgtattactagtcacaatagca

SEQ ID NO: 16317 - protein, 35 aa, Glycine max
  misc_feature (27)..(27): Xaa can be any naturally occurring amino acid
  misc_feature (33)..(33): Xaa can be any naturally occurring amino acid
MVGIHGLAGVGKQHLLSRSIILLLAIXKLLAFXKM

SEQ ID NO: 16318 - protein, 34 aa, Glycine max
ILTNKFKNESVNWYAPTNSWFYEVSEFCNLGSNI

SEQ ID NO: 16319 - DNA, 1263 bp, Glycine max
gtaccgggccccccctcgagtcagctacgtaggccccccccccagagcacttgttttcttttccacttaggataacagtatttgggatttgtacctgctgaggaaaacggaagtgatgatattgagaaacctggaggcatttgtgcctattattaaagcaggatggaggttttctaagatctactgttttatacacgttacccaaacctatttgatcgcccctgctgtggtaagcatgatttctatgtcaacctgtcttaaattctattttatcaagtaaacacttctagtgctgctgcagacctatggtcctagcatgcttcctactatcgatttgaaaacaggtgtgttcttaatggaaaagatctcaccccggtttggtaaagttacttgtggagatattgtagtcttgcgcaatcctcaacaccctaggcactttatgaccaaacgtgtggttggattggagggtgatagcgttacatacatttccaatcctgagaccaatgaatatgagggtgatagttttacacacatttcctctcctgataacggtgataagtctaagacgattgtggtatggtcaaattcttatgaaaattaaattcccattttttgtgatcattttgattatgggttttgctttgccagtattttaattgttatttttgggatgactggtatctagcatccttgcttcttcacattaagaattggcatgatattcgatggcctttggtctagaaaattctgacaataattaattttttccatcgctgaatgtgttttggagatttcattgtctaagtatgccttccctctataggtgccaaagggtgccgtttgggttgagggagataacaagtataacagcaatgattcaagaaaatttggtcctgttccttatgaccttattgatggcaagatgttctggaggataacgccacttaaaaaatttggacctttctggaataaatgatctgaagcaaagcattctgtcatggaagctacaatcttttgcagcatggctttgtatgtttaattttgaaaggcaaaaccctacctatctgtagttaattccctagactggtgcactttgctcaccaaagattcaaattgccacattttgttataagggcagttttgttttttttttttttttttgacgaagcagtttatcttttatgcatgaagtaaatgacaagtagtagatgatcataagaatctactcagatattagaaatggaacatagaattttctgttgt

SEQ ID NO: 16320 - protein, 94 aa, Glycine max
MLPTIDLKTGVFLMEKISPRFGKVTCGDIVVLRNPQHPRHFMTKRVVGLEGDSVTYISNPETNEYEGDSFTHISSPDNGDKSKTIVVWSNSYEN

SEQ ID NO: 16321 - protein, 81 aa, Glycine max
MEKISPRFGKVTCGDIVVLRNPQHPRHFMTKRVVGLEGDSVTYISNPETNEYEGDSFTHISSPDNGDKSKTIVVWSNSYEN

SEQ ID NO: 16322 - protein, 54 aa, Glycine max
MILRNLEAFVPIIKAGWRFSKIYCFIHVTQTYLIAPAVVSMISMSTCLKFYFIK

SEQ ID NO: 16323 - DNA, 598 bp, Glycine max
  misc_feature (123)..(123): n is a, c, g, or t
  misc_feature (130)..(130): n is a, c, g, or t
  misc_feature (589)..(589): n is a, c, g, or t
taggataagggaatacttctatggcctttcaaatgatctttctccacattctaatattgcaaattttagtgatttgtttgtttatcgagttggtggtgggccacaggccccacgctcagcctngcccatnggagcagaacctgctgcagatccaacaagagttgtacctgtaaatataaatcgtgatttgctccatttagtccttgctgtttcatttgccaaggaacctgatgagatcatttccagcaatgttgctgggtttatttatgtaacagacgttgacattcagagaaagaagataacatatcttgctccatctgctggagaacttccaagcaagtatttgataatgggatccttgacatggcttgaaacatgagctaatgaacagttttgtactggaaaatctcgctaaattcgttgctctggtttgtgtcgtgatcaaatgtaaatactaaatgtagtttacaacactgttgtgatggggattgtttgtcgtagtgagagaggctgacctttgtaacggaatatctaatattctgatttaaaatcttattatactcgttgagtagcaagttacttatgattnttgaagttg

SEQ ID NO: 16324 - protein, 125 aa, Glycine max
  misc_feature (41)..(41): Xaa can be any naturally occurring amino acid
  misc_feature (43)..(43): Xaa can be any naturally occurring amino acid
RIREYFYGLSNDLSPHSNIANFSDLFVYRVGGGPQAPRSAXPXGAEPAADPTRVVPVNINRDLLHLVLAVSFAKEPDEIISSNVAGFIYVTDVDIQRKKITYLAPSAGELPSKYLIMGSLTWLET

SEQ ID NO: 16325 - DNA, 1440 bp, Glycine max
agatgtttctataatggaggttggattaggtggaaaatatgatgcaacgaatgtggtcccaacacctattgtgtgtggtataacctcccttgggtatgaccacatggagattcttgggaatactcttggagaaattgctggtgagaaagctggtatcttcaagcatcggattccagcatttactgtgcctcaacctgatgaagcaatgcatgtactcagagagaaggcttctcagttaaatgtacctcttcaagtggtaaccccattagatgccaaattgctaaatggttcaagactagcgcttggaggtgaacaccaatatataaatgctggtcttgctattgcattatgctctacgtggctgaaaatgaatgggcatcttgaagactcgtacttgaaacatatatgactcatctgcctgtatgaagcaacacactttaccagagaagttcataaaagggttaacaactgcaagtttgcaaggaagggctcagattgttcctgatcagttcatcaatgatgaaataccaaatgaacttgtcttctttttagatggggctcatagtcctgaaagcatggaagcatgtgccaggtggttttctcttgctattaaagatcaagaccagattttgtttcatcagaaacttgataattctaacttctcaaaccaagtagtgaagatgcacaatggtgaaactgtacagaagaaatccacacagattttgctgttcaattgtatgtctgagcgaaaccctcagttgcttcttccccacttgatgaaaacatgtgctgatcatggtgtctacttcaagaaggcactctttgtacctggtttatcagtgtatcacaaagttggatcccatgctttaccagcgacagattctgatgttgacctgtcgtggcagcttactctacaaagagtgtgggaaaatctcatgcaagggaacaaagaaggcaagagtaataattctgctcctgaagaattaaacatggaaatgagtgccagcaattgtgaacacagtgccgtgttttcctcattgccactggttctcaaatggcttagggacacggtgcaacaaaaccagtcaactcgttttcaggtccttgttactggttctatacatcttattggtgacatgttgaaattagtcaagaagtgattcgttgggctacttgaaagattggctttcattcagattttttaagtaccactatttgagtccatgaaagtgctgttacacttggttcaaaagctgttgacagaaggttatcaatataataactacattcttgattgtagacattgatgcatccattacattggtttaaatcagcatcactctggctacttcgtgggtctttcaactttcatttcactgtaattgaaaataaaggtggattaagggacatgaataaagaataacatctatcaattttctt

SEQ ID NO: 16326 - protein, 245 aa, Glycine max
MKQHTLPEKFIKGLTTASLQGRAQIVPDQFINDEIPNELVFFLDGAHSPESMEACARWFSLAIKDQDQILFHQKLDNSNFSNQVVKMHNGETVQKKSTQILLFNCMSERNPQLLLPHLMKTCADHGVYFKKALFVPGLSVYHKVGSHALPATDSDVDLSWQLTLQRVWENLMQGNKEGKSNNSAPEELNMEMSASNCEHSAVFSSLPLVLKWLRDTVQQNQSTRFQVLVTGSIHLIGDMLKLVKK

SEQ ID NO: 16327 - protein, 194 aa, Glycine max
MEACARWFSLAIKDQDQILFHQKLDNSNFSNQVVKMHNGETVQKKSTQILLFNCMSERNPQLLLPHLMKTCADHGVYFKKALFVPGLSVYHKVGSHALPATDSDVDLSWQLTLQRVWENLMQGNKEGKSNNSAPEELNMEMSASNCEHSAVFSSLPLVLKWLRDTVQQNQSTRFQVLVTGSIHLIGDMLKLVKK

SEQ ID NO: 16328 - protein, 159 aa, Glycine max
MHNGETVQKKSTQILLFNCMSERNPQLLLPHLMKTCADHGVYFKKALFVPGLSVYHKVGSHALPATDSDVDLSWQLTLQRVWENLMQGNKEGKSNNSAPEELNMEMSASNCEHSAVFSSLPLVLKWLRDTVQQNQSTRFQVLVTGSIHLIGDMLKLVKK

SEQ ID NO: 16329 - DNA, 1398 bp, Glycine max
aaacgcatagcgcgaatttacaaaactagccaggaacaggccctgtctttccgatattcaccatctctttctctctaatccaaaaaaaaatctgttgtgaacaaacacacattattgtttgttttcatcccacggaaaaatcgatcaggcaaaacaaacaaaggtgaaactgaataggtgcgtgtttgtgttgatgggctaagaggacagagaaaaagaaagaaagagtataaaatcaaatctggcaaatctcgtggggttgagggctcggtcttcgtcgaagcaagcttcccctgatttgcaggacgacgaggaggagtgcaggccttggcgtcgaaggttaataatgtctttctcctggtcctccacccttaggatcaccatcctcctcctcctcctcgccgcggtcatcgtcgcgtgcttcactctccccatcgaaaagatgatgaaggacttcttattatgggtcgatcacgatcttggcccctggggcccacttgttctggctgttgcttacattcctttgactgtcttggctgttccagcttcagtgcttactcttggtggaggttatctttttgggcttccggtgggatttgttgttgactctataggtgcaactgttggtgccggagctgcatttcttcttggtagaacaattgggagatcatttgtcgtttctaggttgaaggattatccacaattcagatcagtggcaattgcaattcgaagatctggttttaagattgtattactgcttcggcttgttccactcctaccgtttaacatgctaaattatctcttgtcggtgactcctgtttcaataggggaatacatgctggcttcctggttaggaatgatgccaataacactggcacttgtatatgttggaacaactcttaaagatctttctgatgttacacatggttggggcgagttctcaaagactcgttgggcgtttatcattcttggtcttgtgatatcggttgttctgatgatatgtgttactagagttgccaaggctgctttagataaagccttggccgaaaatgaagatattgatgggattacttcctcgccagatttacctattgttgctgaaccatcagcagatcttaaccaacctctcataattaagatagattcttctgaagacagtcatgaaaagtgaattctattttgtgtaaattctttcttcactctaccttttataaaggctatggttttaattttaagctttagcggtagctggttgcttctatttattcgcgatttgtacagtttcaacattagaaatatagtttgtgacaggagtgtttaatcctaattcctacaaccaacatgacattatggactttgtgttttatttcttttgacagcagaaaagttcatgctatg

SEQ ID NO: 16330 - protein, 274 aa, Glycine max
MSFSWSSTLRITILLLLLAAVIVACFTLPIEKMMKDFLLWVDHDLGPWGPLVLAVAYIPLTVLAVPASVLTLGGGYLFGLPVGFVVDSIGATVGAGAAFLLGRTIGRSFVVSRLKDYPQFRSVAIAIRRSGFKIVLLLRLVPLLPFNMLNYLLSVTPVSIGEYMLASWLGMMPITLALVYVGTTLKDLSDVTHGWGEFSKTRWAFIILGLVISVVLMICVTRVAKAALDKALAENEDIDGITSSPDLPIVAEPSADLNQPLIIKIDSSEDSHEK

SEQ ID NO: 16331 - protein, 242 aa, Glycine max
MMKDFLLWVDHDLGPWGPLVLAVAYIPLTVLAVPASVLTLGGGYLFGLPVGFVVDSIGATVGAGAAFLLGRTIGRSFVVSRLKDYPQFRSVAIAIRRSGFKIVLLLRLVPLLPFNMLNYLLSVTPVSIGEYMLASWLGMMPITLALVYVGTTLKDLSDVTHGWGEFSKTRWAFIILGLVISVVLMICVTRVAKAALDKALAENEDIDGITSSPDLPIVAEPSADLNQPLIIKIDSSEDSHEK

SEQ ID NO: 16332 - protein, 241 aa, Glycine max
MKDFLLWVDHDLGPWGPLVLAVAYIPLTVLAVPASVLTLGGGYLFGLPVGFVVDSIGATVGAGAAFLLGRTIGRSFVVSRLKDYPQFRSVAIAIRRSGFKIVLLLRLVPLLPFNMLNYLLSVTPVSIGEYMLASWLGMMPITLALVYVGTTLKDLSDVTHGWGEFSKTRWAFIILGLVISVVLMICVTRVAKAALDKALAENEDIDGITSSPDLPIVAEPSADLNQPLIIKIDSSEDSHEK

SEQ ID NO: 16333 - DNA, 937 bp, Glycine max
taattcttttgctacttataaggccaaattaaatgcaatcagacaatcagaaatggacaaatcaatagaaaaagctttgaaagatgctggcttgggaagtagacaagtcacaccttttatgaggttacgggtagttggattaacttataaaactagacaagacaaacctaaagaaggcatagtagcaatctggaatccaactgagacacagcgtcaggagttggtggaaggaggagcatatgccatttcaggactcatgccatcaagttctgattctgatatccttcacttggatactagaggatcttctaccaagtggttgccattatcttataattcaaggaaacagtttaagccatttttctgcaatagaaaatcgatcccattgactagcttgggtgacatccctctttccaacgagtttgacattactgcatatgttgtgcatgtgggaggggtttatatatcaaatcaacaaaagaagcaatgggtttttgtgactgatggatccatcatgaatggtttacagtcagaaaagttaatcgactccttgcttgctatctgcttttgctctccattgattgatcatgattcatttcctccaatcaattataaccttgcaggatctacggttggcttctgtaatcttataaaaaaggaaaaggaccatacaaaccatatctgggttgctgatgctaatgaaaactctgcttattatttgaattttgattccacgaactgttctcacctcagaaatgctgccagctccgtcagagcttgggcaaatcattctagtttgataatagagaaactcaaggaaaaggttatgtatgtagttggtgaagattgtaaagcataggaaaaaaaaagcggagctatggatgtaccttttttgctctattgtctttaaacctttaccttagctcaatttcctctc

SEQ ID NO: 16334 - protein, 285 aa, Glycine max
NSFATYKAKLNAIRQSEMDKSIEKALKDAGLGSRQVTPFMRLRVVGLTYKTRQDKPKEGIVAIWNPTETQRQELVEGGAYAISGLMPSSSDSDILHLDTRGSSTKWLPLSYNSRKQFKPFFCNRKSIPLTSLGDIPLSNEFDITAYVVHVGGVYISNQQKKQWVFVTDGSIMNGLQSEKLIDSLLAICFCSPLIDHDSFPPINYNLAGSTVGFCNLIKKEKDHTNHIWVADANENSAYYLNFDSTNCSHLRNAASSVRAWANHSSLIIEKLKEKVMYVVGEDCKA

SEQ ID NO: 16335 - protein, 268 aa, Glycine max
MDKSIEKALKDAGLGSRQVTPFMRLRVVGLTYKTRQDKPKEGIVAIWNPTETQRQELVEGGAYAISGLMPSSSDSDILHLDTRGSSTKWLPLSYNSRKQFKPFFCNRKSIPLTSLGDIPLSNEFDITAYVVHVGGVYISNQQKKQWVFVTDGSIMNGLQSEKLIDSLLAICFCSPLIDHDSFPPINYNLAGSTVGFCNLIKKEKDHTNHIWVADANENSAYYLNFDSTNCSHLRNAASSVRAWANHSSLIIEKLKEKVMYVVGEDCKA

SEQ ID NO: 16336 - protein, 246 aa, Glycine max
MRLRVVGLTYKTRQDKPKEGIVAIWNPTETQRQELVEGGAYAISGLMPSSSDSDILHLDTRGSSTKWLPLSYNSRKQFKPFFCNRKSIPLTSLGDIPLSNEFDITAYVVHVGGVYISNQQKKQWVFVTDGSIMNGLQSEKLIDSLLAICFCSPLIDHDSFPPINYNLAGSTVGFCNLIKKEKDHTNHIWVADANENSAYYLNFDSTNCSHLRNAASSVRAWANHSSLIIEKLKEKVMYVVGEDCKA

SEQ ID NO: 16337 - DNA, 1235 bp, Glycine max
gtcactacagagccatattcataaaccactgacacacacacaagacaacttctttaactagaggtcaacgagtcctcccatggcagaaatgcagatacaacatcaagaagaccataactataaccctaatcacatccctcgccctagccctagccctaaccctacccaatacacacaataccgtttccctggcaaagttccccaccaccaacaccaagtccacaacatggacaaagccacaccttctcgcttcaaacctaatgcccccaaacgtcaacactgcatttgcataaccgttttcctcctcttactcggcatcatactcctcgttctctggctggcctaccaccctaacaagccgcgcttcacggtggccagcgcctccgtctacagcctcaacgccacgtcgccgccactaatgtccatcgccatgcagttcaatgtggtcataaaaaaccctaacaggcgcgtctccatttcctttgacaggctctcggcctacgtgtcctaccgcaaccagcccgtgacgccgcacgtcatgcttccgccgctcttcatagagaagaacagcgccgtgtcgctgtccccggagatcggaggagtggcggtgccggtgtcggaggacttgaccaatggaatggccatggacgagaattatggggtggtgggcgtgaaacttgtgttgtccggaaggttgaggtggagagctggtgacatcaactctgcacattatggtttctatgtcaagtgtgatgttttgatgggtttgagaaaaggttttgtgggtcaggttcctcttcttggagctccagtttgtgatgtcaatacatgaaccactatatatgttacaatttgaccatcccgatacaaaaacattaattaaacatcaaactatatatatatatatatatatatatatatatatatatatatatatatatatatatatatatatgtatatgtatatattatgcttttatctgattaataaactacaatctgtgcaggcatggatgtgtgatcttaattattcctactacattttaatattttttgtcaaaaattaaaccagatattacatatagaaagttggattttgtattttggggacttggattttgtgtttgagtgatatgtaatatgtaaaagaaaagtagagattttgattatttgaagtattttgagtcgcaagtcacaatattgtatgtcatgttatggatatagaaaaattaagc

SEQ ID NO: 16338 - protein, 250 aa, Glycine max
MAEMQIQHQEDHNYNPNHIPRPSPSPNPTQYTQYRFPGKVPHHQHQVHNMDKATPSRFKPNAPKRQHCICITVFLLLLGIILLVLWLAYHPNKPRFTVASASVYSLNATSPPLMSIAMQFNVVIKNPNRRVSISFDRLSAYVSYRNQPVTPHVMLPPLFIEKNSAVSLSPEIGGVAVPVSEDLTNGMAMDENYGVVGVKLVLSGRLRWRAGDINSAHYGFYVKCDVLMGLRKGFVGQVPLLGAPVCDVNT

SEQ ID NO: 16339 - protein, 247 aa, Glycine max
MQIQHQEDHNYNPNHIPRPSPSPNPTQYTQYRFPGKVPHHQHQVHNMDKATPSRFKPNAPKRQHCICITVFLLLLGIILLVLWLAYHPNKPRFTVASASVYSLNATSPPLMSIAMQFNVVIKNPNRRVSISFDRLSAYVSYRNQPVTPHVMLPPLFIEKNSAVSLSPEIGGVAVPVSEDLTNGMAMDENYGVVGVKLVLSGRLRWRAGDINSAHYGFYVKCDVLMGLRKGFVGQVPLLGAPVCDVNT

SEQ ID NO: 16340 - protein, 201 aa, Glycine max
MDKATPSRFKPNAPKRQHCICITVFLLLLGIILLVLWLAYHPNKPRFTVASASVYSLNATSPPLMSIAMQFNVVIKNPNRRVSISFDRLSAYVSYRNQPVTPHVMLPPLFIEKNSAVSLSPEIGGVAVPVSEDLTNGMAMDENYGVVGVKLVLSGRLRWRAGDINSAHYGFYVKCDVLMGLRKGFVGQVPLLGAPVCDVNT

SEQ ID NO: 16341 - DNA, 1358 bp, Glycine max
gctctttctctcttagaaaacaccctctaccgcctctaagtcctacaagaacccatcccctccccagccgctcccaaaatctcactcttcttactcttcttcctccaagagaagtaaacaaccctcacattcaccacagcagcacacacagacaaagacaaccttgtttgtctccaatcaaaacctttcaagctggcgttcgaaaaccaagacaaccctgtccgagaaatcaagcccaagaataggagaatcatgggtgctggaggccctgatgatgaggacaacaacaggtggccaccgtggctgaagcctctgctaaaagaaagtttctttgttcaatgcaagcttcacgctgattcgcacaagagcgagtgcaacatgtactgcttggattgtatgaacggtgctctctgctctctctgcctcgcttaccataaagatcatcgtgctattcagataaggaggtcctcataccatgatgtgattagggtgaatgagattcagaaggtgttggacatcacaggggtccaaacctacattatcaacagcgcgagggttgttttcttgaatgagaggccgcagccaaggcctggtaaaggtgtcaccaacacttgtgaagtctgcgagcgtagccttcttgattcctaccgattctgttctctaggttgtaagattgttgggacttcaaggaacttcctgaagaaaaagtcagcggcaatggtatcagactcagaggattcttacagcagcaacagcagccatgggaagaagaacagcttcacaccttccacaccgccaccaacttttgttaattacagaacggccaagagaagaaagggaattccacaccgtgccccaatgggagggctagtcatagaatactagaaagttagtaacttttggttatttgctataatgcccctgatatattttacctcaaaatgcaactttctccgtgcagtttcacccgttccaacatacgtgagctttttgctgaaaaaggccggtgctggaagtgtttccttctctgttccttacttgttaatagcgtttgtctatatgggaaaattccaatagaagtgggaaaaaaggttgagaaagtagaaaaaataagacatctgtgaaatagtttgagaaaaagaatggtgtagcaaaataagcaaagttcctttcaaccaaagtacaagaagatgaggaacattataggtttggtttctagagctattatacctaagttttgggtggtgggtgtaaatagtggcttggggaagaagacagtgacaatgtactctttacaaataggtggattgtctatatatggaatggtgaaataataaatagtactaatagtttttctc

SEQ ID NO: 16342 - protein, 210 aa, Glycine max
MGAGGPDDEDNNRWPPWLKPLLKESFFVQCKLHADSHKSECNMYCLDCMNGALCSLCLAYHKDHRAIQIRRSSYHDVIRVNEIQKVLDITGVQTYIINSARVVFLNERPQPRPGKGVTNTCEVCERSLLDSYRFCSLGCKIVGTSRNFLKKKSAAMVSDSEDSYSSNSSHGKKNSFTPSTPPPTFVNYRTAKRRKGIPHRAPMGGLVIEY

SEQ ID NO: 16343 - protein, 168 aa, Glycine max
MYCLDCMNGALCSLCLAYHKDHRAIQIRRSSYHDVIRVNEIQKVLDITGVQTYIINSARVVFLNERPQPRPGKGVTNTCEVCERSLLDSYRFCSLGCKIVGTSRNFLKKKSAAMVSDSEDSYSSNSSHGKKNSFTPSTPPPTFVNYRTAKRRKGIPHRAPMGGLVIEY

SEQ ID NO: 16344 - protein, 162 aa, Glycine max
MNGALCSLCLAYHKDHRAIQIRRSSYHDVIRVNEIQKVLDITGVQTYIINSARVVFLNERPQPRPGKGVTNTCEVCERSLLDSYRFCSLGCKIVGTSRNFLKKKSAAMVSDSEDSYSSNSSHGKKNSFTPSTPPPTFVNYRTAKRRKGIPHRAPMGGLVIEY

SEQ ID NO: 16345 - DNA, 1179 bp, Glycine max
ctccgtactactataaatctcctcccccaccaccttactactacaaatctccccctcctccatccccaactccttactactacaagtctcctcccccaccaccttactattacaaatctcctcctcctccatccccaactccatactactataaatctcctcccccaccaccttactactacaaatctcccccacctccacctaaagagcatgtacaccctccctactactaccactcaccaccaccaccatccccatctccaccacctccttattattataaatcccctccaccaccatccccttctcctcctcccccctactactatcactctccaccaccaccatctccttctcctcctcctccctactactaccactctccaccaccaccatccccatcaccgccgtctccatattattacaaatcccctccacctccatctccatctccaccacctccttactactatcaaagtcctcctccaccatctcccacttctcatcctccctattactacaaatcccctccaccaccaacgtcatatcctccacctccttaccactacgtgagccctccaccaccttctccatctcctcccccaccataccattacacatcaccacctcctccttccccagctcctgctcccaagtacatttacaaatcacctccacctccggtttatatctatgcttccccacctccacctatctacaagtaagctcaaattgtgaaagcaccattcatgatgaatcatgttctagttttcatcgaggaataaaggcaagctctattttgagccaagtgaaacatctatcttcctgtctaagttctttgaataaaagtctgaatgtgtcatctctatgctacaatgtttatgattcagatcaggttgattctatttgtttgatggccatcttgcacgtcctgatcttattgtgttcaagtgacggacaaacccaaacaggaaagagagatttgaaatgtaaatgccaagtaaatgtgaaaagtacagttcatttttagtgatctctttaatttatttgttcatagattaatatggtcgtgtatgattgcttttctatttattgtggcatttttgtgttgtaccctgttgttgtgtttgcaataattattagtaataaagcagcaaattcaatttgtgttcatgcacc

SEQ ID NO: 16346 - protein, 240 aa, Glycine max
PYYYKSPPPPPYYYKSPPPPSPTPYYYKSPPPPPYYYKSPPPPSPTPYYYKSPPPPPYYYKSPPPPPKEHVHPPYYYHSPPPPSPSPPPPYYYKSPPPPSPSPPPPYYYHSPPPPSPSPPPPYYYHSPPPPSPSPPSPYYYKSPPPPSPSPPPPYYYQSPPPPSPTSHPPYYYKSPPPPTSYPPPPYHYVSPPPPSPSPPPPYHYTSPPPPSPAPAPKYIYKSPPPPVYIYASPPPPIYK

SEQ ID NO: 16347 - protein, 190 aa, Glycine max
LRTTINLLPHHLTTTNLPLLHPQLLTTTSLLPHHLTITNLLLLHPQLHTTINLLPHHLTTTNLPHLHLKSMYTLPTTTTHHHHHPHLHHLLIIINPLHHHPLLLLPPTTITLHHHHLLLLLLPTTTTLHHHHPHHRRLHIITNPLHLHLHLHHLLTTIKVLLHHLPLLILPITTNPLHHQRHILHLLTTT

SEQ ID NO: 16348 - protein, 120 aa, Glycine max
MYTLPTTTTHHHHHPHLHHLLIIINPLHHHPLLLLPPTTITLHHHHLLLLLLPTTTTLHHHHPHHRRLHIITNPLHLHLHLHHLLTTIKVLLHHLPLLILPITTNPLHHQRHILHLLTTT

SEQ ID NO: 16349 - DNA, 1050 bp, Glycine max
accgggccccccctcgagtcagctacgtaggcctcccccccaggaatggatgcccaagtggcttatggtttccatcatctacgcaatgaaaaaccttaccttgccagtggtccaatttcaaataagattatatactcgggttacagttgcacacagggctggtttttcacaccttgcgttagtgatccaggtctaaggggacttaaaaacattttgcggatgcatatcaaaagggtcaatagctcagagtgggagcagattgcaattcctacaaggtacatttctcatcctacagtacagttgctgctggtgcctattattaactggtaaacaaaagacaggctgaaagatacccattagtgatcagttaggtgtctgttagtgagggagttagtttggttagttggacaggcccagactcattgtagaagaaaaaaacattttgcctataaataaagagggggaggttgagagagaaatcatattgtcatttgagaaagtattagacacttagaaagtggggagagctgtagtgtctcgcgaatatccagggaaatcattcattttttatcttttaaccatagcagccttctaccacattggcacaacaattgggatttaggttcatcaataaaaattcattatttcctttagattctgaaccagttctatcacaggaagtttccttttaccatttttagttgctggcaagtgtgcatatcttccttgttaatatttgacttcttgttgtagttcttggaagttctaattacttgaaatttactgcctagtgaatgtagtaagagtcacaactcagtctctttcgtgaagtttttggtttggtccattttgcatgatatggttatgttatttcctttcagtgtaagggcaatagttgctttgaaccttcatagctatggaagtggaagaaatccatggggtaaaccaaaaccagattatttggaaaagagaggctttgttgaagctgatgttgccgatgggctcttggaagtatttggtttaaaacaaggatggcatgcatcatttgtt

SEQ ID NO: 16350 - protein, 94 aa, Glycine max
MDAQVAYGFHHLRNEKPYLASGPISNKIIYSGYSCTQGWFFTPCVSDPGLRGLKNILRMHIKRVNSSEWEQIAIPTRYISHPTVQLLLVPIINW

SEQ ID NO: 16351 - protein, 64 aa, Glycine max
PGPPSSQLRRPPPQEWMPKWLMVSIIYAMKNLTLPVVQFQIRLYTRVTVAHRAGFSHLALVIQV

SEQ ID NO: 16352 - protein, 64 aa, Glycine max
MVMLFPFSVRAIVALNLHSYGSGRNPWGKPKPDYLEKRGFVEADVADGLLEVFGLKQGWHASFV

SEQ ID NO: 16353 - DNA, 1205 bp, Glycine max
aaaaacagtttcatttttgcgttatcgtggagttcaacttcgagggtttccttcacatctctgtaatttccatttccacagttactcttgtgaattagcgagatttgaagcgagtgatggctgcgaaggaagagaatcgaatatttgttggaggtttatcctgggacgttacggagcgtcaactcgagcatgcctttgctcgttacggcaaaattctcgaatgccagatcatgatggaaagggatacaggccgtccacgtggatttgggtttatcacatttgcagaccgtaggggaatggaggatgcaatcaaggaaatgcatggacgggaaattggtgatcgtatcatctcagtcaacaaagcacagcccaagatggggggtgatgatgcagaccaaggttacagaggtggctactcatcaggtggtaggggaagctatggtgctggagatagggtaggacaggatgactgcttcaaatgtgggcgtccagggcattgggcccgagattgtcctttggcaggaggtggtcgtggtcggggtggtagttcatttccttcacgtcctaggtttggagctgctggtggacatggggatcgcctgggtggtgaacgtgatcgatacgttgatgatcggtatgatggaggacgttatggagatagggatcgttttgataaccgtgactacaaatatggcagccgcgaccgctatgctggtgacaggtatccaaccagtggagatcgatttgcaagtgatcgatatggcgctggctcagactacccacaaaatggttatggcaaggaaagagggtatgaccggtacagtggtccacgaggaggtgctgataggtatggaagtggaatgggaggtcgagatgaaggaaggagttataggggtagacctggtccatatgaccgcccaagcaggggttctcgttcatcacttgatcgctactgatttctactgctgatgtttttaacgggaaatccaaatgcagaagccacattagagacctagttcttgttcttgttacgtaggacatcctgtttgggacaactgctactgctagattgtagtttcatagattgtggatttcatagtttgtttccttatttagatcgtgccaatccctgttgatttttcccccgcgtttgcttgacgctttgactaacttccctaatgcaagtaagcatgatttatcgctgc

SEQ ID NO: 16354 - protein, 279 aa, Glycine max
MAAKEENRIFVGGLSWDVTERQLEHAFARYGKILECQIMMERDTGRPRGFGFITFADRRGMEDAIKEMHGREIGDRIISVNKAQPKMGGDDADQGYRGGYSSGGRGSYGAGDRVGQDDCFKCGRPGHWARDCPLAGGGRGRGGSSFPSRPRFGAAGGHGDRLGGERDRYVDDRYDGGRYGDRDRFDNRDYKYGSRDRYAGDRYPTSGDRFASDRYGAGSDYPQNGYGKERGYDRYSGPRGGADRYGSGMGGRDEGRSYRGRPGPYDRPSRGSRSSLDRY

SEQ ID NO: 16355 - protein, 241 aa, Glycine max
MMERDTGRPRGFGFITFADRRGMEDAIKEMHGREIGDRIISVNKAQPKMGGDDADQGYRGGYSSGGRGSYGAGDRVGQDDCFKCGRPGHWARDCPLAGGGRGRGGSSFPSRPRFGAAGGHGDRLGGERDRYVDDRYDGGRYGDRDRFDNRDYKYGSRDRYAGDRYPTSGDRFASDRYGAGSDYPQNGYGKERGYDRYSGPRGGADRYGSGMGGRDEGRSYRGRPGPYDRPSRGSRSSLDRY

SEQ ID NO: 16356 - protein, 240 aa, Glycine max
MERDTGRPRGFGFITFADRRGMEDAIKEMHGREIGDRIISVNKAQPKMGGDDADQGYRGGYSSGGRGSYGAGDRVGQDDCFKCGRPGHWARDCPLAGGGRGRGGSSFPSRPRFGAAGGHGDRLGGERDRYVDDRYDGGRYGDRDRFDNRDYKYGSRDRYAGDRYPTSGDRFASDRYGAGSDYPQNGYGKERGYDRYSGPRGGADRYGSGMGGRDEGRSYRGRPGPYDRPSRGSRSSLDRY

SEQ ID NO: 16357 - DNA, 879 bp, Glycine max
ggtgcagcggcgttttccggaactggaaaaccgacatgttgatttcctgaaacgggatatcatcaaagccatgaacaaagcagccgcgctggatgaactgataccggggctgctgagtgaatatatcgaacagtcaggttaacaggctgcggcattttgtccgcgccgggcttcgctcactgttcaggccggagccacagaccgccgttgaatgggcgtttactggatgaaaacgcctcgccttataccttcaataaatatgctgaatacgccgatttcaccagtgacatgttggtctacgaaaaaacctatacggctgaactttcgtccattccaggcacccccatcgaggctggccccttcgatacagtggtgctttttaagattaactataactgatttaccatgatgccctttgccgccggaaagggcatctctttcagaaaattgctgattttccccttttccttgattgctgttattttttcctggcccagctttctttatgctgtatcgatacaccaaagagaaaataatgagggagcgaaggatgccagttttgcagtggggaatgttatgtgtgctatcacttctcctttctattggtttcctcgcggtacatctcccggcggcgctattacttgggccgatgatcgccgggatcatctttagtatgcgcggaattactctgcaacttccccgctctgcttttctcgccgcccaggccattcttggctgcatgattgcgcaaaacctcactggttcgattctcaccaccctggccgtcaactggccgatcgtgcttgcaattttactggtaacgctgctttccagcgccattgtgggttggttattggtgcgctatagctcattgcctgg

SEQ ID NO: 16358 - protein, 124 aa, Glycine max
MLYRYTKEKIMRERRMPVLQWGMLCVLSLLLSIGFLAVHLPAALLLGPMIAGIIFSMRGITLQLPRSAFLAAQAILGCMIAQNLTGSILTTLAVNWPIVLAILLVTLLSSAIVGWLLVRYSSLP

SEQ ID NO: 16359 - protein, 114 aa, Glycine max
MRERRMPVLQWGMLCVLSLLLSIGFLAVHLPAALLLGPMIAGIIFSMRGITLQLPRSAFLAAQAILGCMIAQNLTGSILTTLAVNWPIVLAILLVTLLSSAIVGWLLVRYSSLP

SEQ ID NO: 16360 - protein, 109 aa, Glycine max
MPVLQWGMLCVLSLLLSIGFLAVHLPAALLLGPMIAGIIFSMRGITLQLPRSAFLAAQAILGCMIAQNLTGSILTTLAVNWPIVLAILLVTLLSSAIVGWLLVRYSSLP

SEQ ID NO: 16361 - protein, 88 aa, Glycine max
MMPFAAGKGISFRKLLIFPFSLIAVIFSWPSFLYAVSIHQRENNEGAKDASFAVGNVMCAITSPFYWFPRGTSPGGAITWADDRRDHL

SEQ ID NO: 16362 - DNA, 1455 bp, Glycine max
tcctaatcgaaaaaaaacctaatagtaatagtagcaagtttctttcttttttgctctctctctctccatggacttccatctgaagcaatggagaaaccagcacgagtcagaggaacaacattctacaaagatgccaaaacttctccctgaatcccatcaacaacaacagccatcagcctctgcactccctttgtttgtacctgaacccaacagcagcaaagtcagcaccctgtcagattcaacattagcttctgctacaatgacttctaccaccactaacagattatttcccaggatggggagctacttcagcttgtctcagtggcaggagcttgagttgcaggctttgatattcaggtacatgttggctggtgctgctgttcctcctgaactccttcaaccaatcaagaaaagccttcttcattctccacactattacctccatcaccctctccaacattaccaaccttctgctttgttgcaatcagggtattggggtagaggagcgatggatccggagccagggcggtgccggagaaccgacggcaagaagtggcgctgttcgagggacgtggtggctgggcaaaagtactgtgagcgccacatgcaccgtggaagaaaccgttcaagaaagcctgtggaactacccacaccaactagtgctattaacaattgtggtgtaactggagttggatccctaggaccaggtgcttcatcatcttccatttgttcaccacccttagcttctgcttcattcaaatctccttttgatcttcatcttgatgaacgttcctctgggaccaagaatgaagacgaagatcatgtgggtggggatggcagatcaggtggaggtggtggccatatgctgaggcatttcttcgatgattggccacgatcactccaagactctgacaacgttgaaaacaatgctgctgctggccgtagcctctctatttcaatgcccggtgcttcctcggatgtgtcattgaaattgtccacgggctatggagaggactcgggcccaggaaatgagaatgtaagcctcgagccagagcagctgcagttgaattgggccggaggatgggcctcgtctaatcaagtggcttcgatgggaggtccacttgctgaggcactcagatcatctacttcaacctcatctcccactagtgttttgcatcgtcacttgcctcgtggatctgagaccagctttattagcacctgaatttagttatagtgggtgccccgattatttttctgtttcttgtttcgaggtttaagttccacttttggagcattcttggaccacggttatgttcttttcaaactgtgtagactacttttgtttctaagtgggcgatgaaaggatatggtcggtccctggttggattaattcgaagtaatactaaattgtcaattaacaatcacattttctttatgaaagtactttagttcctc

SEQ ID NO: 16363 - protein, 384 aa, Glycine max
MDFHLKQWRNQHESEEQHSTKMPKLLPESHQQQQPSASALPLFVPEPNSSKVSTLSDSTLASATMTSTTTNRLFPRMGSYFSLSQWQELELQALIFRYMLAGAAVPPELLQPIKKSLLHSPHYYLHHPLQHYQPSALLQSGYWGRGAMDPEPGRCRRTDGKKWRCSRDVVAGQKYCERHMHRGRNRSRKPVELPTPTSAINNCGVTGVGSLGPGASSSSICSPPLASASFKSPFDLHLDERSSGTKNEDEDHVGGDGRSGGGGGHMLRHFFDDWPRSLQDSDNVENNAAAGRSLSISMPGASSDVSLKLSTGYGEDSGPGNENVSLEPEQLQLNWAGGWASSNQVASMGGPLAEALRSSTSTSSPTSVLHRHLPRGSETSFIST

SEQ ID NO: 16364 - protein, 363 aa, Glycine max
MPKLLPESHQQQQPSASALPLFVPEPNSSKVSTLSDSTLASATMTSTTTNRLFPRMGSYFSLSQWQELELQALIFRYMLAGAAVPPELLQPIKKSLLHSPHYYLHHPLQHYQPSALLQSGYWGRGAMDPEPGRCRRTDGKKWRCSRDVVAGQKYCERHMHRGRNRSRKPVELPTPTSAINNCGVTGVGSLGPGASSSSICSPPLASASFKSPFDLHLDERSSGTKNEDEDHVGGDGRSGGGGGHMLRHFFDDWPRSLQDSDNVENNAAAGRSLSISMPGASSDVSLKLSTGYGEDSGPGNENVSLEPEQLQLNWAGGWASSNQVASMGGPLAEALRSSTSTSSPTSVLHRHLPRGSETSFIST

SEQ ID NO: 16365 - protein, 320 aa, Glycine max
MTSTTTNRLFPRMGSYFSLSQWQELELQALIFRYMLAGAAVPPELLQPIKKSLLHSPHYYLHHPLQHYQPSALLQSGYWGRGAMDPEPGRCRRTDGKKWRCSRDVVAGQKYCERHMHRGRNRSRKPVELPTPTSAINNCGVTGVGSLGPGASSSSICSPPLASASFKSPFDLHLDERSSGTKNEDEDHVGGDGRSGGGGGHMLRHFFDDWPRSLQDSDNVENNAAAGRSLSISMPGASSDVSLKLSTGYGEDSGPGNENVSLEPEQLQLNWAGGWASSNQVASMGGPLAEALRSSTSTSSPTSVLHRHLPRGSETSFIST

SEQ ID NO: 16366 - DNA, 949 bp, Glycine max
aaagataatgtctagacacaaactgctacgccaaaatactagcttcaacgcagcttgtctttgactcttctttcttggatcttgaagagccatttagttagctagatctgagtttaggaaacctaacaaactacacataactacttcactcacttgtgtttgagcctttccaccatcaaaatgctgagtgaaagttccaacacccacaactcatctaaaatgtccttcagaataacgaaggaggatgggttcttctctaggctaatagccaaggaaactaccacccccaactcttcttcaaggatcttctactacggagaaacttcggttgcggttcctttcacatgggaggcacaacctggtaccccgaaacaccctttgtcagagacatctttgccacctcttacacccccaccttcctacttttcaagccccaaaaagtcccacaacaccaagagaagaaactactactcaaataaggccagcaacatattttcaagcatttttctgaggcttgtaggatcaagaaagtctcttcataatcatcatcatgtgtcaccatcgtcatcttggtcgtcaccttcttcatcgtcttcatcttcttcttcgtggtctttggcgcattataataataataataataactcatcgccctcgttttccatgagagacaaaggtcgaggtcaaggaggaagaagcagcaaacacaacaaatgttctaatggatttagaggctgctatccctttggcaacatgaggaacgcaaatgtaagccatggtagtgtggactaattaattagttagtttaatttgatctattttggaaattaactattctgcatgattttaatatttttgtagagatcttcgaaagtttatatagctgctaagtgctaagtgtatttattggaagatgttagtgttggcctgggatgtcccccccttttcc

SEQ ID NO: 16367 - protein, 203 aa, Glycine max
MLSESSNTHNSSKMSFRITKEDGFFSRLIAKETTTPNSSSRIFYYGETSVAVPFTWEAQPGTPKHPLSETSLPPLTPPPSYFSSPKKSHNTKRRNYYSNKASNIFSSIFLRLVGSRKSLHNHHHVSPSSSWSSPSSSSSSSSSWSLAHYNNNNNNSSPSFSMRDKGRGQGGRSSKHNKCSNGFRGCYPFGNMRNANVSHGSVD

SEQ ID NO: 16368 - protein, 190 aa, Glycine max
MSFRITKEDGFFSRLIAKETTTPNSSSRIFYYGETSVAVPFTWEAQPGTPKHPLSETSLPPLTPPPSYFSSPKKSHNTKRRNYYSNKASNIFSSIFLRLVGSRKSLHNHHHVSPSSSWSSPSSSSSSSSSWSLAHYNNNNNNSSPSFSMRDKGRGQGGRSSKHNKCSNGFRGCYPFGNMRNANVSHGSVD

SEQ ID NO: 16369 - DNA, 943 bp, Glycine max
atcctaatcgaaaaatacattctcttgtcacagttttctgtgtcaccggaactcgtttctttcaaaacacttcaaacatctcaaacgctctctttccggcaactaggttaaagttcatcaatggcaggtcgcggcaaaaccctaggatctagcgccgccaagaaggctacctcaaggagcagcaaagccggcctccaattccccgtcggccgtatcgcccgtttcctcaaggccggaaaatacgctgagcgtgtcggcgccggcgcccctgtctacctcgccgccgtactcgaatatctcgcggctgaggtaattgccgcaattagtcgttcatttcgaattcgattttgaaattatctccctatgtgattagatctagggtttcgtaatttcgattagattcatttgccctaattgaatggtttgaacattgttttaggttttggaattggctggaaacgctgcgagagacaacaagaagactcgaattgtgccgcgccacattcaattggcggtgaggaacgacgaggagttgagcaagctactcggtgacgtcaccatcgctaacggtggcgtcatgcctaacattcacaatcttctccttcccaagaaggctggtggatcatccaaggctgctgctgcagacgatgactcttaaataggggttttttttccgtgaaaagttatcgaatttattctctttggattctctctgtttttgtagtttttcagtttttgataattgtgttctgtagatgtagttaggttttcagtcactgatgtgaatagagaacgctctttttcttcaagaaagattgttggaaatttaaatcattttaattcgtaacctttcagtcttgatctaacatttgaatcctaattgcaatctataacgctcgattgcaacaaattcgagaaagttaaacttttgtttcctattgcc

SEQ ID NO: 16370 - protein, 76 aa, Glycine max
MAGRGKTLGSSAAKKATSRSSKAGLQFPVGRIARFLKAGKYAERVGAGAPVYLAAVLEYLAAEVIAAISRSFRIRF

SEQ ID NO: 16371 - protein, 49 aa, Glycine max
PNRKIHSLVTVFCVTGTRFFQNTSNISNALFPATRLKFINGRSRQNPRI

SEQ ID NO: 16372 - DNA, 757 bp, Glycine max
aacaaacatgggaagcaagaaaacctacgaggaagaagaaagcacggctctattttcccattcccaaacacaaacagacttgctgttacccttcaacgagaacgacccacaggacatggtcatataccaagtcctccacgaagccaatgctctcaccaacacattcctccctcagcccaccagaaacataacaaagaagcactacagaggagtccgccgccgtccttggggaaaatacgccgctgagattcgcgactcggcgcgccacggcgccaggatatggctcggcaccttccaaaccgctgaagaggctgccatggcttatgaccgagccgcgttcaagatgaggggctccaaggctttgctcaatttcccagctgaaattgttgctgctgctactgcaacagagttatctttcaaaagtagtagtaataataataataataataataataacaatcccgatgctgtttctgattccagtgctggtagctcttgcacgaacaattccacttgggtaaataggaatcagtcagaaatcacaagtggcacaggttagctaaatggtgttgaagttgaacaattaattgtagaaatctttttttgtttctttttctcaatcgttttggtttgttataactattataattatttgtatctgtctgtccaactggacaacaaaaattaattaattgaatgtgataccatgatcatgcatgggttaaaattataatggttagtgatttttcttcttctt

SEQ ID NO: 16373 - protein, 185 aa, Glycine max
TNMGSKKTYEEEESTALFSHSQTQTDLLLPFNENDPQDMVIYQVLHEANALTNTFLPQPTRNITKKHYRGVRRRPWGKYAAEIRDSARHGARIWLGTFQTAEEAAMAYDRAAFKMRGSKALLNFPAEIVAAATATELSFKSSSNNNNNNNNNNPDAVSDSSAGSSCTNNSTWVNRNQSEITSGTG

SEQ ID NO: 16374 - protein, 183 aa, Glycine max
MGSKKTYEEEESTALFSHSQTQTDLLLPFNENDPQDMVIYQVLHEANALTNTFLPQPTRNITKKHYRGVRRRPWGKYAAEIRDSARHGARIWLGTFQTAEEAAMAYDRAAFKMRGSKALLNFPAEIVAAATATELSFKSSSNNNNNNNNNNPDAVSDSSAGSSCTNNSTWVNRNQSEITSGTG

SEQ ID NO: 16375 - protein, 147 aa, Glycine max
MVIYQVLHEANALTNTFLPQPTRNITKKHYRGVRRRPWGKYAAEIRDSARHGARIWLGTFQTAEEAAMAYDRAAFKMRGSKALLNFPAEIVAAATATELSFKSSSNNNNNNNNNNPDAVSDSSAGSSCTNNSTWVNRNQSEITSGTG

SEQ ID NO: 16376 - DNA, 1553 bp, Glycine max
gaatcagaatcacctggcttggcctagcgcttattctctcgcattccgtggagatctagtgcttctgctgcaagacctcgctgaaaattagggtttcgattcggaggtagacgaagatgttcggaagggctccgaagaaaagcgacagcaccaggtactacgaaatcctcggcgtttccaagaacgcttcgccggatgacttaaagaaggcttacaagaaagccgccattaagaaccatcctgacaaaggcggggatcccgagaagtttaaagagcttgctcaagcctatgaggttctgagtgaccctgagaagcgcgagatttatgatacatatggagaagatgctcttaaggaaggaatgggtggtggtggcggtggccatgatccatttgatatcttcagttcattctttggtggaagtccgtttgggtcaggtggtagcagtagaggacggaggcagaggcggggagaagatgtggttcatcccctgaaggtctctctggaggatctttacctcggaacttcaaagaaactctctctttcacgaaacgtgttgtgctcaaaatgcaatgggaagggctcaaagtctggggcttcaatgacctgtgctggttgccagggtactggcatgaaggtgtctattaggcaccttggtccttctatgattcagcaaatgcagcatccttgcaatgagtgtaagggtactggagagacaatcaatgacagagacaggtgccaacagtgcaagggagagaaggttgttcaggagaagaaagtacttgaagttgttgtggagaagggaatgcagaatggacagaagattacattccctggtgaagctgatgaagcgcctgatacagtcacaggggatattgtctttgtcctacaacagaaggaacacccaaagttcaaacgaaaggcagatgacctttttgtagaacacacattgtctcttactgaggctctatgtggcttccagtttgtgctgactcacctggatagcaggcagcttctgatcaaatcaaaccctggggaggttgttaagcctgagtcattcaaggcaataaatgatgagggaatgccaaactaccagaggcacttcctgaagggaaagctttacattcatttctcagtggaatttcctgataccctgagtcttgatcaggtgaaggctttggaggctgttctgccatcaaagccaacatcacagttgtcagacatggagctggatgagtgtgaggagaccacactccatgatgtgaacatggaggaagagacaaggaggaggcaacaagctcagcaggaggcatatgatgaggatgaggatatgcatggtggtgctcagagagtgcagtgcgctcagcagtaatgagccacaggagcgctagagtagacatgtgatgatctcgatcatcttattttttagccgtttgtgcgggtctaaacatatttagtgtttgatatctcagacgattttagcaaccaaacactgtagcattattgtccaagaaattatttcacaagacatcctaatacaattttttttccttct

SEQ ID NO: 16377 - protein, 417 aa, Glycine max
MFGRAPKKSDSTRYYEILGVSKNASPDDLKKAYKKAAIKNHPDKGGDPEKFKELAQAYEVLSDPEKREIYDTYGEDALKEGMGGGGGGHDPFDIFSSFFGGSPFGSGGSSRGRRQRRGEDVVHPLKVSLEDLYLGTSKKLSLSRNVLCSKCNGKGSKSGASMTCAGCQGTGMKVSIRHLGPSMIQQMQHPCNECKGTGETINDRDRCQQCKGEKVVQEKKVLEVVVEKGMQNGQKITFPGEADEAPDTVTGDIVFVLQQKEHPKFKRKADDLFVEHTLSLTEALCGFQFVLTHLDSRQLLIKSNPGEVVKPESFKAINDEGMPNYQRHFLKGKLYIHFSVEFPDTLSLDQVKALEAVLPSKPTSQLSDMELDECEETTLHDVNMEEETRRRQQAQQEAYDEDEDMHGGAQRVQCAQQ

SEQ ID NO: 16378 - protein, 336 aa, Glycine max
MGGGGGGHDPFDIFSSFFGGSPFGSGGSSRGRRQRRGEDVVHPLKVSLEDLYLGTSKKLSLSRNVLCSKCNGKGSKSGASMTCAGCQGTGMKVSIRHLGPSMIQQMQHPCNECKGTGETINDRDRCQQCKGEKVVQEKKVLEVVVEKGMQNGQKITFPGEADEAPDTVTGDIVFVLQQKEHPKFKRKADDLFVEHTLSLTEALCGFQFVLTHLDSRQLLIKSNPGEVVKPESFKAINDEGMPNYQRHFLKGKLYIHFSVEFPDTLSLDQVKALEAVLPSKPTSQLSDMELDECEETTLHDVNMEEETRRRQQAQQEAYDEDEDMHGGAQRVQCAQQ

SEQ ID NO: 16379 - protein, 256 aa, Glycine max
MTCAGCQGTGMKVSIRHLGPSMIQQMQHPCNECKGTGETINDRDRCQQCKGEKVVQEKKVLEVVVEKGMQNGQKITFPGEADEAPDTVTGDIVFVLQQKEHPKFKRKADDLFVEHTLSLTEALCGFQFVLTHLDSRQLLIKSNPGEVVKPESFKAINDEGMPNYQRHFLKGKLYIHFSVEFPDTLSLDQVKALEAVLPSKPTSQLSDMELDECEETTLHDVNMEEETRRRQQAQQEAYDEDEDMHGGAQRVQCAQQ

SEQ ID NO: 16380 - DNA, 1362 bp, Glycine max
attcttcataatgattaaagaacttgtgaaatttatgtcaatcctactcttatcccgtggaaagtttttatagccagtctacatcgattaagatttgcttttgcctacagcgctcaaaagcttaagcaaatcttcacacttcctggagaaaacatgggtgcagcactagagaagtttttcttcagcactttggaaaggaatggaaaaggagaaagggcagatgttggggttccggttgctccatttggtactggaagattcgaagagcctgtccttaatggagattgtgaaaattactgtggtggctcacaatatgttcagttgtatcataattatgccatgccagtaattgtagattccagttctctagctttgcctgatgatatccttgcatcatcaacgcagcaaaactggagtctgttttatcatggtggtaccgatgtatatatcccgagacatacactctatcatccaacttacaaccttgaaggaggagggaaatcacgtggaacaggcacatacatacctgacttgaattacaattcctactgggatatgagcaccaaggcacctaggccaaggagatttccttcttcaaagcacaatgcatttcccagatcacgtctgaaaaagaaacaagtggaagaggttcattctgagatagacataaatgctaattcagattcaaggttgtttgagttcttaaatgaagatttccccgttcttccatgcaattccaaggctataccgccaacacaagccgaagagtctacgccattagaaaagtttcattctgagacagacatggatggtacttctcggtcatttgagttctcaaatgaagatttcccccttcttccaaaggtttgttctgagacacacatggatggtaattcaaggtcatttgggctttcaaagaaagattccccccttcttcaaagcgctcgcaagaccatcctgtcagggtctgctaatttaactaagcaagccaagagtttcccattctctaaagtgtctaaactgaaaaatattgagtttggaactttcaagaaatcacaatcattgacagaaccaagtgtgtcaacaaaggatgagaaagaagattccgatatttcattatctaaaaaaaactgtgcttgtattttcgaaggtggcgatagagaggaaagattaatctcttgaaagcaatgaaaagatggatcaacaatgttaacatagatattttgagggatattaaggatgtgtgtgtgtgtttgtttaagagagactggttgctagtgatagcctcaaacttctaggaacataatgatatcttgaacttgtacatttgtttaagttaaatcttttaatcatgtatgggtc

SEQ ID NO: 16381 - protein, 342 aa, Glycine max
MGAALEKFFFSTLERNGKGERADVGVPVAPFGTGRFEEPVLNGDCENYCGGSQYVQLYHNYAMPVIVDSSSLALPDDILASSTQQNWSLFYHGGTDVYIPRHTLYHPTYNLEGGGKSRGTGTYIPDLNYNSYWDMSTKAPRPRRFPSSKHNAFPRSRLKKKQVEEVHSEIDINANSDSRLFEFLNEDFPVLPCNSKAIPPTQAEESTPLEKFHSETDMDGTSRSFEFSNEDFPLLPKVCSETHMDGNSRSFGLSKKDSPLLQSARKTILSGSANLTKQAKSFPFSKVSKLKNIEFGTFKKSQSLTEPSVSTKDEKEDSDISLSKKNCACIFEGGDREERLIS

SEQ ID NO: 16382 - protein, 280 aa, Glycine max
MPVIVDSSSLALPDDILASSTQQNWSLFYHGGTDVYIPRHTLYHPTYNLEGGGKSRGTGTYIPDLNYNSYWDMSTKAPRPRRFPSSKHNAFPRSRLKKKQVEEVHSEIDINANSDSRLFEFLNEDFPVLPCNSKAIPPTQAEESTPLEKFHSETDMDGTSRSFEFSNEDFPLLPKVCSETHMDGNSRSFGLSKKDSPLLQSARKTILSGSANLTKQAKSFPFSKVSKLKNIEFGTFKKSQSLTEPSVSTKDEKEDSDISLSKKNCACIFEGGDREERLIS

SEQ ID NO: 16383 - protein, 208 aa, Glycine max
MSTKAPRPRRFPSSKHNAFPRSRLKKKQVEEVHSEIDINANSDSRLFEFLNEDFPVLPCNSKAIPPTQAEESTPLEKFHSETDMDGTSRSFEFSNEDFPLLPKVCSETHMDGNSRSFGLSKKDSPLLQSARKTILSGSANLTKQAKSFPFSKVSKLKNIEFGTFKKSQSLTEPSVSTKDEKEDSDISLSKKNCACIFEGGDREERLIS

SEQ ID NO: 16384 - DNA, 1003 bp, Glycine max
acttttgatgcattatcacactcgacaatcctcaaaaaccactttcatcgcaactcagccagccagagcttaggcgagagagacagagacagaagatggcgtacagcgcgtgtttcctacatcagagcgcactggcctcctccgccgctcgatcatcatcttcctcctcatcccagcgctacgtttcactctccaaacccgtccaggtagtgtgtaaagctcaacagtctcatgaagacgataatcccgccgtctctcgccgtctcgccctcacactcctcgtcggcgccgccgccgttgattccaaagtgtctcctgccgatgccgcctatggtgaagctgcaaatgtgtttgggaagccaaagaaaaacacagacttcacgccatacaatggagatggattccaagtgcaggttccagctaaatggaacccaagcagagaggtagagtatccaggacaagtccttaggtacgaagacaactttgatgctactagcaatctcaatgtcatggtcactcctaccgacaagaagtccatcactgattacggctctcctgaagagttcctctctcaggtcaactaccttcttgggaaacaagcttacttcggtgagactgcctccgagggaggctttgacaacaatgcagtggcaacagcaaacattctggagacaaatgttcaggacgttggtgggaaaccatactactacttgtccgtgttgacaagaacggccgatggagatgaaggtggtaagcatcagctgatcacagccaccgtgaacggaggcaagctttacatctgcaaagcacaagctggagacaagaggtggttcaagggagccaacaaatttgtcgagaaagcagccacttctttcagtgttgcttgaatcaaagcaacacaaacagaacaatgctctgctttctttttttttcatttgtctcttgtaaaaaaatggaaaatgaaactaagcttttgagaaactatcaagatgatgatgatgct

SEQ ID NO: 16385 - protein, 263 aa, Glycine max
MAYSACFLHQSALASSAARSSSSSSSQRYVSLSKPVQVVCKAQQSHEDDNPAVSRRLALTLLVGAAAVDSKVSPADAAYGEAANVFGKPKKNTDFTPYNGDGFQVQVPAKWNPSREVEYPGQVLRYEDNFDATSNLNVMVTPTDKKSITDYGSPEEFLSQVNYLLGKQAYFGETASEGGFDNNAVATANILETNVQDVGGKPYYYLSVLTRTADGDEGGKHQLITATVNGGKLYICKAQAGDKRWFKGANKFVEKAATSFSVA

SEQ ID NO: 16386 - DNA, 894 bp, Glycine max
atcaattttcagtgcgttaaagatattgaaacagagacgattcttgtttgtcaattatctctgtgtttctgtgattcttctgttccattcgattcaaccctgaagccaaagaacaacaaggataagccttttaactagttttgtgcgttggatcatctgtttaagctcggcttaatcttaccttcaacacttcacaaggctgctcttgcgttagactgtgtttgaagaagaaccaaagatgtcatcggatgagaagaaccttatagagatcttggaggaaggccacaaagtcgatatagtcaagtacatcgattacgtcagtgcccctcaagccggcgccatagccacattctctggcactacgagagacatgttcgaaggcaaagcagtcttggagctaaggtacgaagcgtacgtaccaatggccacgcgaaccctcacctccatctgcacatccgctagatcaaactgggacatccacaagatcgctgtcgctcaccgtctagggccagttcccgttggagaaaccagcgtgttcattgcggtttcatctgttcaccgtggggatggtttagacgcttgtaagttcttgatcgatgagctaaaggcaacggttccgatttggaagaaggaggtgtacactaatggagagatctggaaggagaatagtgagtttctggagaagagagacggtctagtgaagaaagaacataaaagaagttgctgtggaagtaaagttagagtacaagaagatgaagaagagcataaagataacagttcttgattacttatagcaaagagcaatgtttttttttttttttctactctcgataagcaaattgtcttaaaacacacattgttgaatctaaagacttcaaattccaattcagttgc

SEQ ID NO: 16387 - protein, 181 aa, Glycine max
MSSDEKNLIEILEEGHKVDIVKYIDYVSAPQAGAIATFSGTTRDMFEGKAVLELRYEAYVPMATRTLTSICTSARSNWDIHKIAVAHRLGPVPVGETSVFIAVSSVHRGDGLDACKFLIDELKATVPIWKKEVYTNGEIWKENSEFLEKRDGLVKKEHKRSCCGSKVRVQEDEEEHKDNSS

SEQ ID NO: 16388 - protein, 137 aa, Glycine max
MFEGKAVLELRYEAYVPMATRTLTSICTSARSNWDIHKIAVAHRLGPVPVGETSVFIAVSSVHRGDGLDACKFLIDELKATVPIWKKEVYTNGEIWKENSEFLEKRDGLVKKEHKRSCCGSKVRVQEDEEEHKDNSS

SEQ ID NO: 16389 - protein, 120 aa, Glycine max
MATRTLTSICTSARSNWDIHKIAVAHRLGPVPVGETSVFIAVSSVHRGDGLDACKFLIDELKATVPIWKKEVYTNGEIWKENSEFLEKRDGLVKKEHKRSCCGSKVRVQEDEEEHKDNSS

SEQ ID NO: 16390 - DNA, 538 bp, Glycine max
aagaggaggaagaggaagagaagagcgcaacgcaaagaggcaaagaatggcgatggcgaggaggagggccctcgcgctcgtgtcccagctcctccagaggcgggttctccccgcgccgcgcttcctctcgtcggcggccggcggcgctctagaccgcctcaattcgccgcccttcgcacgcccggccgcgcccaggaatcccgcttccccttccccatgggatcggctcggagggcagaagaggaccatgttcatccagacgcagtcgacccccaacccgcagtcgctcatgttccatcctggaaagccggttatggaagttgggagctctgatttccctaatgctcggactgcgatgacatcacctttggcgaaggcactgtttgcgatcgaaggagttacaagagtattctttggatctgattttgtaactgtgacaaaatctgatgagacttcatgggactatcttaagcctgaggtctttgctgcgataatggatttctactcatctggacagccacttttcctggactcaaat

SEQ ID NO: 16391 - protein, 179 aa, Glycine max
RGGRGREERNAKRQRMAMARRRALALVSQLLQRRVLPAPRFLSSAAGGALDRLNSPPFARPAAPRNPASPSPWDRLGGQKRTMFIQTQSTPNPQSLMFHPGKPVMEVGSSDFPNARTAMTSPLAKALFAIEGVTRVFFGSDFVTVTKSDETSWDYLKPEVFAAIMDFYSSGQPLFLDSN

SEQ ID NO: 16392 - protein, 164 aa, Glycine max
MAMARRRALALVSQLLQRRVLPAPRFLSSAAGGALDRLNSPPFARPAAPRNPASPSPWDRLGGQKRTMFIQTQSTPNPQSLMFHPGKPVMEVGSSDFPNARTAMTSPLAKALFAIEGVTRVFFGSDFVTVTKSDETSWDYLKPEVFAAIMDFYSSGQPLFLDSN

SEQ ID NO: 16393 - protein, 162 aa, Glycine max
MARRRALALVSQLLQRRVLPAPRFLSSAAGGALDRLNSPPFARPAAPRNPASPSPWDRLGGQKRTMFIQTQSTPNPQSLMFHPGKPVMEVGSSDFPNARTAMTSPLAKALFAIEGVTRVFFGSDFVTVTKSDETSWDYLKPEVFAAIMDFYSSGQPLFLDSN

SEQ ID NO: 16394 - DNA, 1285 bp, Glycine max
ctccttccacaaatggagaattccccatctcatccttcttctcttcaatgtcctccttcaaccctttctcccctccaccacccaccccttacctcaccaacctcggcttcggctactccatcgccatcgccctcggcgtcctcttcctcctctccaccctcatcctctcctcctacctctgctgccgcaccctccgccaccgcaacaacaaccgccacaccccccgtaacaacacctccgatggcatcgtcctcccgcgcgtgatcttcgtcgccgaggacgacgacgatgacgccacccgccagaacgacgccgtcaccggcctcgaccaggccgtaataaactcctaccccaagtttccttacgttaaggaaggtaattacgacagcacctgctcgatctgtctgtgcgagtacaaggattcggagatgctgaggatgatgccagagtgtcgacactactttcacttgtgttgtctcgacccgtggctcaagcttaacgggtcatgccccgtttgccggaactctcccatgccaacgccgctgtcgacgccgctgcaggaggtcgtgccgctctcacagtacgccgatgccagggcgaggaggtgaattcgaattttcttctccggtgtggctcgggttgctgggttcagtgggaaaagcataaaggacaaaacttagatcagttatttacatgtttttgcatgctgttattatcccatcaaaattggagttttacctttaatagttactggttagttttactcagattatccaagtaaaacttcagtttttgacgagagaacagcggtaaaaacacttgaataattgtatttaagttctttgtaagtgtaaatcttctcccgtgatggtagatgatggggagtttttgttttttgattatgtggttgtatggtgtcagcaagcgtgttgctggttactgaattattattggtaatgcactgaaagtctgaaactatgcagaatgtcacttttaggggaaattgtccgcgacttcgttttgttagtaccatgatttgacattggatataatggatagtagtactattatttttatttttgttctagttttgttggtttgacccactgtggagtctcttggtgagacttgagagcattagactctgttgtttttcgggggatttttttatattttatttttaactttctctaagaaattggttgtggtacctttttgtttcccgtttttcaattcatggacccattgggttgtcgtcattagtagacagcttgcatttggtgct

SEQ ID NO: 16395 - protein, 201 aa, Glycine max
PSTNGEFPISSFFSSMSSFNPFSPPPPTPYLTNLGFGYSIAIALGVLFLLSTLILSSYLCCRTLRHRNNNRHTPRNNTSDGIVLPRVIFVAEDDDDDATRQNDAVTGLDQAVINSYPKFPYVKEGNYDSTCSICLCEYKDSEMLRMMPECRHYFHLCCLDPWLKLNGSCPVCRNSPMPTPLSTPLQEVVPLSQYADARARR

SEQ ID NO: 16396 - protein, 186 aa, Glycine max
MSSFNPFSPPPPTPYLTNLGFGYSIAIALGVLFLLSTLILSSYLCCRTLRHRNNNRHTPRNNTSDGIVLPRVIFVAEDDDDDATRQNDAVTGLDQAVINSYPKFPYVKEGNYDSTCSICLCEYKDSEMLRMMPECRHYFHLCCLDPWLKLNGSCPVCRNSPMPTPLSTPLQEVVPLSQYADARARR

SEQ ID NO: 16397 - DNA, 1004 bp, Glycine max
aaaaacacatgtataactaagcgccacaaaatctcacgaaccagatcctcatcatgccacatcggcatatgcaatcttaagtctcgtagatttgcttatttcttcatcacatactgaagtcgttttgatttttgtttctcaaaaacaatggcagcaagtgcatctccaatggcgagccagctaaggagcagcttatcctccacttcaattgctaggcgtctagccgtccctaagggaatctccggcccttctttcggcgtatatccgaccaagagaatctcttccttcaccgtccgagctgttcagtccgacaagccaacatttcaagtggtccaaccaatcaacggcgatccattcatcggaagtttggagactcctgtaacgtcaagccccattgattgcgtggtatctttccaacctcccggcttaccgcaccgccgtcaaccctctcctccgtggtgtcgaagtgggcttggcacatggtttcctcttagtgggcccattcgtcaaagctggcccattaaggaacactgcttacgctggttctgccggctccttagccgccgctgggcttgtagtcatcctcagcatgtgcctcactatctacggaatctcttcgttcaaggaaggagagccttcgattgctccgagtttgacgttgactgggcggaagaagcagcccgatcagcttcagacagctgagggatgggcaaaattcacgggagggttcttcttcggagggatctctggtgtgacttgggcttactttctcctctacgttcttgaccttccttattacgtcaaatgaatgtagttcaaaatatgagcttcaccagtatgttatctacagagactctcttgcaccattgtttcttttttacttttgtctgagcaagaatcttgaatctcagggtcgtctttgtataatactatggatctcctcttaaatatttcttggtctttattcacataaaaaaaaaaaaaaaaaagcttatcgataccgt

SEQ ID NO: 16398 - protein, 184 aa, Glycine max
MAASASPMASQLRSSLSSTSIARRLAVPKGISGPSFGVYPTKRISSFTVRAVQSDKPTFQVVQPINGDPFIGSLETPVTSSPIDCVVSFQPPGLPHRRQPSPPWCRSGLGTWFPLSGPIRQSWPIKEHCLRWFCRLLSRRWACSHPQHVPHYLRNLFVQGRRAFDCSEFDVDWAEEAARSASDS

SEQ ID NO: 16399 - protein, 177 aa, Glycine max
MASQLRSSLSSTSIARRLAVPKGISGPSFGVYPTKRISSFTVRAVQSDKPTFQVVQPINGDPFIGSLETPVTSSPIDCVVSFQPPGLPHRRQPSPPWCRSGLGTWFPLSGPIRQSWPIKEHCLRWFCRLLSRRWACSHPQHVPHYLRNLFVQGRRAFDCSEFDVDWAEEAARSASDS

SEQ ID NO: 16400 - DNA, 750 bp, Glycine max
accggtaaagtaactagtggcaagtggtactgtaaaacatcacatcgtcgcaccgtgacggtgttcggccgagccggtcgatcgacacggcagccagcatgaaggcgtcctgcttactggtcgtgcttctgctcgccgtcgccacggggagcaggctctcgctcgccgcccgcgagggcagcaccctgggcggcgagctcggcgagctcatcgccaaggccggcagcttcctcacgtcggcgcgccgcgcgggagcagacggctggcactccgccacggccgcggaggtggacgcctcggcgaagaaggggcacggccatccggcggggccgaggaagcgtctgaagaagtcgtcggtgaactgcatcccggccgacatgtgccggaagaagaaggtgctgtgcggcaagcggtgctacaagacgtcgcacgctgccggcgccggcctcgaccacgtcccctccaaccggtgcgtcgtcaggtgcaagaagtgcgtgcccacctgctagatcgatcgttggttgctcctacccttccctcttctgggttacgtgtcgtgtcgtgtcgtggtgctcgatccgtgcatgctagctacatttgcttttccttccatagggttcatgcatcagttgaataagcaggcgggcttcccgccatcatgcatgcagtataggtagtggatgggttctactctaaaagaaatgcaccacggttgtgtgctaagtttgaacgtgatctcatctcatcttt

SEQ ID NO: 16401 - protein, 136 aa, Glycine max
MKASCLLVVLLLAVATGSRLSLAAREGSTLGGELGELIAKAGSFLTSARRAGADGWHSATAAEVDASAKKGHGHPAGPRKRLKKSSVNCIPADMCRKKKVLCGKRCYKTSHAAGAGLDHVPSNRCVVRCKKCVPTC

SEQ ID NO: 16402 - DNA, 926 bp, Glycine max
ggcatcaactttgtgtttgcgaccggtcgtcaccacgttgatgtggggcaaattcgcgataatctggagattaagtcttacatgattacctccaatggtgcgcgcgttcacgatctggatggtaatctgatttttgctcataacctggatcgcgacattgccagcgatctgtttggcgtagtcaacgacaatccggacatcattactaacgtttatcgcgacgacgaatggtttatgaatcgccatcgcccggaagagatgcgcttttttaaagaagcggtgttccaatatgcgctgtatgagcctggattactggagccggaaggcgtcagcaaagtgttcttcacctgcgattcccatgaacaactgctgccgctggagcaggcgattaacgctcgttggggcgatcgcgtcaacgtcagtttctctaccttaacctgtctggaagtgatggcgggcggcgtttcaaaaggccatgcgctggaagcggtggcgaagaaactgggctacagcctgaaggattgtattgcgtttggtgacgggatgaacgacgccgaaatgctgtcgatggcggggaaaggctgcattatgggcagtgcgcaccagcgtctgaaagaccttcatcccgagctggaagtgattggtactaatgccgacgacgcggtgccgcattatctgcgtaaactctatttatcgtaatcgttctttatttggtcagttgtcaacctgatacttcgctacaatggatacccgttaatcaaagagttttccattgtggcgctacttatcatcaccacgattctgtgggccttctcctttagcttttatggcgagtaccttgcggggcacgtcgatagctattttgcggtgctggtgcgcgttggcctggcggcactcgtttttctgccgtttctgcgtacccgtgg

SEQ ID NO: 16403 - protein, 232 aa, Glycine max
GINFVFATGRHHVDVGQIRDNLEIKSYMITSNGARVHDLDGNLIFAHNLDRDIASDLFGVVNDNPDIITNVYRDDEWFMNRHRPEEMRFFKEAVFQYALYEPGLLEPEGVSKVFFTCDSHEQLLPLEQAINARWGDRVNVSFSTLTCLEVMAGGVSKGHALEAVAKKLGYSLKDCIAFGDGMNDAEMLSMAGKGCIMGSAHQRLKDLHPELEVIGTNADDAVPHYLRKLYLS

SEQ ID NO: 16404 - protein, 205 aa, Glycine max
MITSNGARVHDLDGNLIFAHNLDRDIASDLFGVVNDNPDIITNVYRDDEWFMNRHRPEEMRFFKEAVFQYALYEPGLLEPEGVSKVFFTCDSHEQLLPLEQAINARWGDRVNVSFSTLTCLEVMAGGVSKGHALEAVAKKLGYSLKDCIAFGDGMNDAEMLSMAGKGCIMGSAHQRLKDLHPELEVIGTNADDAVPHYLRKLYLS

SEQ ID NO: 16405 - protein, 154 aa, Glycine max
MNRHRPEEMRFFKEAVFQYALYEPGLLEPEGVSKVFFTCDSHEQLLPLEQAINARWGDRVNVSFSTLTCLEVMAGGVSKGHALEAVAKKLGYSLKDCIAFGDGMNDAEMLSMAGKGCIMGSAHQRLKDLHPELEVIGTNADDAVPHYLRKLYLS

SEQ ID NO: 16406 - DNA, 505 bp, Glycine max
tttccttgttctcattttctgaataataattcaattactcctaaattaaacaagatttcaattctagttcgttcatagggatttcccaatccctattccatggacgtcgaaaacgaggaagctccactccaacaacactctgattcacaatgccacaccgacctgccaaatctcccctacgcctctgccgttgaccttgaagaggcggcggcaacgacgacggaggctgtggcggttgaacccgatgcgctggcggtgtccgacgatggcgccgaaacgcaagtgacggacgtagcgggtgacgagatgattgaggagaaggcgaacgaaggaattgatgtggatgacgtggctttggagacggatatggtggaagaggaaccgaatttggcaattgatgccgaagacgacgaaattgaggacaggaacacaaatgaagacgctttgatggaagacgaacaacaacaagaagaagaggacgtagagcaagaaggagagggggagg

SEQ ID NO: 16407 - protein, 135 aa, Glycine max
MDVENEEAPLQQHSDSQCHTDLPNLPYASAVDLEEAAATTTEAVAVEPDALAVSDDGAETQVTDVAGDEMIEEKANEGIDVDDVALETDMVEEEPNLAIDAEDDEIEDRNTNEDALMEDEQQQEEEDVEQEGEGE

SEQ ID NO: 16408 - DNA, 1466 bp, Glycine max
acactccgaagtcaccctacaacaacacatacactcacacaataatggaagaagggcaaagaaaaacaacaacactacttctatgctcccacattgtggttcttcttttactctccctagtggccgagactagtgccaaggtttcagcagtgatcgtcttcggcgactcctccgtcgacgccggcaacaacaacttcatccccaccattgcacggagcaattttcagccatatgggcgtgactttgaaggtggaaaagccactgggaggttttgcaatgggagaataccgacggattttatatctgagtcttttgggctgaaaccttatgtgccagcatacttggatcctaagtataatatttcagattttgcaagtggggtcacttttgcttctgcagcaactggttatgataatgcaacctcggatgtgctgtctgtgataccactatggaagcaattagagtactacaagggataccaaaagaatttgagtgcatatcttggtgaaagcaaagcaaaggagaccgtagctgaagcattacacctcatgagtcttggaacaaatgacttcctagagaactactacaccatgcctggtagagcatctcaatacacaccccaacagtaccaaatttttctggctggcatagctgagaacttcataaggagcctctatggtcttggtgctaggaagatttccctaggagggttacctcccatgggatgcttgccacttgaaagaaccacaaatattgttggtgggaatgactgtgttgccagatacaataacatagcattggagttcaatgataagctcaagaatttgaccattaagctaaaccaagagctccctggactcaaattggtgttttctaatccttattacattatgttgaacatcataaaaagacctcaactttatggatttgaatcgacctcagtggcatgttgtgctactggaatgtttgagatgggttatgcatgcagcaggggccaaatgttcagttgcactgatgcttccaaatatgtgttttgggactcttttcatccaactgagatgacaaatagtatcgttgcaaagtacgtggtgctgcgtgttttatatcaattcttacaataaacaaatagctactagtgaaattttatttatgtacggctatctcttcatgtctgcacattcgccataaagtgccatttgggctttctatgaatgactgcatgtcgatgtgtacatatataaaaatgtcaatacagcacattcaccatataatgtgctgataattagaaataagtcgttttgtttagaacaatatatatatagtatttatactttttaggcactttactagattcggtgtcctccatatgtatgtcctattatgttgggtctatagtttgtaatatctatccatggtttggaaatgtcaaattccaagagagaattttctggtttttctttggttgc

SEQ ID NO: 16409 - protein, 372 aa, Glycine max
TPKSPYNNTYTHTIMEEGQRKTTTLLLCSHIVVLLLLSLVAETSAKVSAVIVFGDSSVDAGNNNFIPTIARSNFQPYGRDFEGGKATGRFCNGRIPTDFISESFGLKPYVPAYLDPKYNISDFASGVTFASAATGYDNATSDVLSVIPLWKQLEYYKGYQKNLSAYLGESKAKETVAEALHLMSLGTNDFLENYYTMPGRASQYTPQQYQIFLAGIAENFIRSLYGLGARKISLGGLPPMGCLPLERTTNIVGGNDCVARYNNIALEFNDKLKNLTIKLNQELPGLKLVFSNPYYIMLNIIKRPQLYGFESTSVACCATGMFEMGYACSRGQMFSCTDASKYVFWDSFHPTEMTNSIVAKYVVLRVLYQFLQ

SEQ ID NO: 16410 - protein, 358 aa, Glycine max
MEEGQRKTTTLLLCSHIVVLLLLSLVAETSAKVSAVIVFGDSSVDAGNNNFIPTIARSNFQPYGRDFEGGKATGRFCNGRIPTDFISESFGLKPYVPAYLDPKYNISDFASGVTFASAATGYDNATSDVLSVIPLWKQLEYYKGYQKNLSAYLGESKAKETVAEALHLMSLGTNDFLENYYTMPGRASQYTPQQYQIFLAGIAENFIRSLYGLGARKISLGGLPPMGCLPLERTTNIVGGNDCVARYNNIALEFNDKLKNLTIKLNQELPGLKLVFSNPYYIMLNIIKRPQLYGFESTSVACCATGMFEMGYACSRGQMFSCTDASKYVFWDSFHPTEMTNSIVAKYVVLRVLYQFLQ

SEQ ID NO: 16411 - protein, 190 aa, Glycine max
MSLGTNDFLENYYTMPGRASQYTPQQYQIFLAGIAENFIRSLYGLGARKISLGGLPPMGCLPLERTTNIVGGNDCVARYNNIALEFNDKLKNLTIKLNQELPGLKLVFSNPYYIMLNIIKRPQLYGFESTSVACCATGMFEMGYACSRGQMFSCTDASKYVFWDSFHPTEMTNSIVAKYVVLRVLYQFLQ

SEQ ID NO: 16412 - DNA, 1668 bp, Glycine max
tcattcttcttacataataggggaaggagaagaaaaaaaatgaaataagaaaaactcaactttgtaattcgtggagggaatacttttccattacgcacgcactttaattacagacgagaaaattataattaatagtaatacagacagcagcatgcgcccaccggttattctcaaaactaccacctctcttttggattcttcttcttcttcaccaccctgtgatcgcagactcaacactctcgctagacacttccttccgcaaatggcttctcacgacagcatctccgcttctccaacctccgcttctgattccgtcttcaatcacctcgttcgtgctcccgaagatcctatcctcggggtaactgtcgcttataacaaagatccaagtccagttaagctcaacttgggagttggtgcttaccgaactgaggaaggaaaacctcttgttttgaatgtagtgaggcgagttgaacagcaactcataaatgacgtgtcacgcaacaaggaatatattccgatcgttgggcttgctgattttaataaattgagtgctaagcttatttttggggctgacagccctgctattcaagacaacagggttaccactgttcaatgcttgtctggaactggttctttaagagttgggggtgaatttttggctaaacactatcaccaacggactatatacttgccaacaccaacttggggcaatcacccgaaggttttcaacttagcaggcttgtctgtcaaaacataccgctactatgctccagcaacacgaggacttgactttcaaggacttctggaagaccttggttctgctccatctggatctattgttttgctacatgcatgcgcacataaccccactggtgtggatccaacccttgagcaatgggagcagattaggcagctaataagatcaaaagctttgttacctttctttgacagtgcttatcagggttttgctagtggaagtctagatgcagatgcccaacctgttcgtttgtttgttgctgatggaggcgaattgctggtagcacaaagctatgcaaagaatctgggtctttatggggaacgtgttggcgccttaagcattgtctgcaagtcagctgatgttgcaagcagggttgagagccagctgaagctagtgattaggcccatgtactcaagtcctcccattcatggtgcatccattgtggctgccattctcaaggaccggaatttgttcaatgactggactattgagttgaaggcaatggctgatcgcatcatcagtatgcgccaagaacttttcgatgctttatgttccagaggcacacctggcgattggagtcacattatcaaacagattggaatgtttactttcactggattgaatgcggaacaagtttccttcatgactaaagagttccatatatacatgacatctgatgggaggattagcatggctggtctgagttccaaaactgtcccacttctggcggatgcgatacatgcagctgtaacccgagttgtctaaaacatgttgacaacagttttcaacatgctccctagtccctataggagaacttccattatttttgtttaataattgtcaacatcaacaatgaaaccttttatttgatgtgagatttttaaaggaaacttttctgcctaccgggctcc

SEQ ID NO: 16413 - protein, 456 aa, Glycine max
MRPPVILKTTTSLLDSSSSSPPCDRRLNTLARHFLPQMASHDSISASPTSASDSVFNHLVRAPEDPILGVTVAYNKDPSPVKLNLGVGAYRTEEGKPLVLNVVRRVEQQLINDVSRNKEYIPIVGLADFNKLSAKLIFGADSPAIQDNRVTTVQCLSGTGSLRVGGEFLAKHYHQRTIYLPTPTWGNHPKVFNLAGLSVKTYRYYAPATRGLDFQGLLEDLGSAPSGSIVLLHACAHNPTGVDPTLEQWEQIRQLIRSKALLPFFDSAYQGFASGSLDADAQPVRLFVADGGELLVAQSYAKNLGLYGERVGALSIVCKSADVASRVESQLKLVIRPMYSSPPIHGASIVAAILKDRNLFNDWTIELKAMADRIISMRQELFDALCSRGTPGDWSHIIKQIGMFTFTGLNAEQVSFMTKEFHIYMTSDGRISMAGLSSKTVPLLADAIHAAVTRVV

SEQ ID NO: 16414 - protein, 419 aa, Glycine max
MASHDSISASPTSASDSVFNHLVRAPEDPILGVTVAYNKDPSPVKLNLGVGAYRTEEGKPLVLNVVRRVEQQLINDVSRNKEYIPIVGLADFNKLSAKLIFGADSPAIQDNRVTTVQCLSGTGSLRVGGEFLAKHYHQRTIYLPTPTWGNHPKVFNLAGLSVKTYRYYAPATRGLDFQGLLEDLGSAPSGSIVLLHACAHNPTGVDPTLEQWEQIRQLIRSKALLPFFDSAYQGFASGSLDADAQPVRLFVADGGELLVAQSYAKNLGLYGERVGALSIVCKSADVASRVESQLKLVIRPMYSSPPIHGASIVAAILKDRNLFNDWTIELKAMADRIISMRQELFDALCSRGTPGDWSHIIKQIGMFTFTGLNAEQVSFMTKEFHIYMTSDGRISMAGLSSKTVPLLADAIHAAVTRVV

SEQ ID NO: 16415 - DNA, 487 bp, Glycine max
aacaccaaagtctctgatggagaatctgcttggccttttgagggttcgcgtgaagcgtggtgtcaaccttgccttcgtgatgttcgaagcagcgacccttatgttgtcatcaagatgtacaaccagaaactaaagactcgtgtgattaaaaaggatgtgaatcctgagtggaatgaagaccttactctttctgttataaatccgaatcacaaaattaaactgactgtgtatgaccatgacacttttagcaaagatgacaaaatgggagatgcagaatttgacatctttccctttatagaggccttgaagatgaacttaactggccttccaaatggtatttgtgtatgctacaatgtgtctttggggttgtattattgacatttttttacgtggatttgaggatttaaaattaatcattatgaggtgttttactcctgtttggccaaaaaaaaaaaaaaaatcaagaattcgcacgagaccattaccc

SEQ ID NO: 16416 - protein, 125 aa, Glycine max
NTKVSDGESAWPFEGSREAWCQPCLRDVRSSDPYVVIKMYNQKLKTRVIKKDVNPEWNEDLTLSVINPNHKIKLTVYDHDTFSKDDKMGDAEFDIFPFIEALKMNLTGLPNGICVCYNVSLGLYY

SEQ ID NO: 16417 - protein, 87 aa, Glycine max
MYNQKLKTRVIKKDVNPEWNEDLTLSVINPNHKIKLTVYDHDTFSKDDKMGDAEFDIFPFIEALKMNLTGLPNGICVCYNVSLGLYY

SEQ ID NO: 16418 - DNA, 1062 bp, Glycine max
  misc_feature (759)..(759): n is a, c, g, or t
aaggcaaagaaagaaggataatccaacagaggcagaaccaataaggataatccaactcagcttcttcactcccctcaccttatcaagaatccccttatagttaaccaccaccaatcttcaatctcctcctcactgaatctaaaaaccttcccttctcttctcacccccacactcccatctcacacacccctcgcatccaacaatgtctctcaccattccctccaacctctccaagcccgccgccctccgccccaaactaagcccaaagctaaggtccgccgccacaaccaccatcgtctgcagcaccaccaacaacaacaacaacaacaacgtgtcctccgacctgaaggcgttctccgccgcgctggccctctcctccatcctcctctccgcccctctccccgccggcgccgacatctcggggctcaccccatgcaaggagtcgaagcagttcgcgaagcgtgagaagcagtcgataaagaagctggagtcgtcgctgaagctctacgaggcgggcagcgcccccgcactgggccattaaggcgagcgtggagaagacgaagaggaggttcgacaactacgcgaagcaggggttgctgtgcggcggcgatgggttgccgcacctgatcgtgagcggagaccagaggcactggggtgagttcatcacacccggaatactattcctgtacatctcgggatggatcggctgggtgggtcggagctacctgattgcgatcagggacgagaagaaacccaccntgaaggagatcatcatcgatgttcctctggcttctcgcttgctcttcaggggtttcagctggcccgttgctgcctacagagaactcatcaacggcgacctcattgccaaggatgtctagataagagagggtggatggctacattggaggaaagcctggagaatttgtatgtggatgggatctttacgcgctctttttgtaattactttttttataaatggtacatgatatgatgtaatctaatgcatgtgaaccacaatcaacctcatcttccaattcaattaatgtaagaagagttcttgct

SEQ ID NO: 16419 - protein, 112 aa, Glycine max
MSLTIPSNLSKPAALRPKLSPKLRSAATTTIVCSTTNNNNNNNVSSDLKAFSAALALSSILLSAPLPAGADISGLTPCKESKQFAKREKQSIKKLESSLKLYEAGSAPALGH

SEQ ID NO: 16420 - protein, 97 aa, Glycine max
  misc_feature (21)..(21): Xaa can be any naturally occurring amino acid
MDRLGGSELPDCDQGREETHXEGDHHRCSSGFSLALQGFQLARCCLQRTHQRRPHCQGCLDKRGWMATLEESLENLYVDGIFTRSFCNYFFYKWYMI

SEQ ID NO: 16421 - DNA, 897 bp, Glycine max
aaggaccacatgaagatggttacaactggagaaaatatggtcagaaagacatccttggagccaaatatcccagaagttactataggtgcaccttccgcagcactcagggctgttgggcaacaaagcaagtgcagagatcagatgaagatcccacaatgtttgacataacttacagaggaaatcatacctgttctcagggaaacaatgccgttctgccacccaagtcaccagaaaaacatgagaaaccagcacacagtcataacattgacattcaccatgcacaggcatcacaagaaagccttgcaaagttcagaagtatcttgtctgtcaacacagataatctggacaatggagatatggcatatgctttcactttcccttccacttcatttggatgcatgaaacaagaaaaccacagcttgattcctatggccctggagaatgactccttcttaagcgacctataccaaacacacctgttatccccaacaacaccagaatcaaattatttcccatctccaactttccagatgaatgagtttgatgggatctacaacaggtcacattcgaaatccgatatcaatgagatcatttccaccaacacatcagcaaccaattctccaattcctgatttcaatttctcacttgatccggtggaaattgatccaaatttccctttcaataccccaggatttttgtgctgattgcactataaatggaatactataagaatgtagtcttcataaaacgggacaatttcagacagcagtagaattgtagaataaagaatgagcaactgcagcacttatgaacgtccttgtagtcaatatcagaattgcaattttggctccgtgttagcaattagcagtatgcactttcaaataaaatagtttctgc

SEQ ID NO: 16422 - protein, 233 aa, Glycine max
GPHEDGYNWRKYGQKDILGAKYPRSYYRCTFRSTQGCWATKQVQRSDEDPTMFDITYRGNHTCSQGNNAVLPPKSPEKHEKPAHSHNIDIHHAQASQESLAKFRSILSVNTDNLDNGDMAYAFTFPSTSFGCMKQENHSLIPMALENDSFLSDLYQTHLLSPTTPESNYFPSPTFQMNEFDGIYNRSHSKSDINEIISTNTSATNSPIPDFNFSLDPVEIDPNFPFNTPGFLC

SEQ ID NO: 16423 - protein, 182 aa, Glycine max
MFDITYRGNHTCSQGNNAVLPPKSPEKHEKPAHSHNIDIHHAQASQESLAKFRSILSVNTDNLDNGDMAYAFTFPSTSFGCMKQENHSLIPMALENDSFLSDLYQTHLLSPTTPESNYFPSPTFQMNEFDGIYNRSHSKSDINEIISTNTSATNSPIPDFNFSLDPVEIDPNFPFNTPGFLC

SEQ ID NO: 16424 - DNA, 2084 bp, Glycine max
  misc_feature (244)..(244): n is a, c, g, or t
cgactggagcacgaggacactgacatggactgaaggagtagaaaaggaaagaagagagagaacaaagcacttagtgctattcaataattacgaaaaaccaacagcgagtgttgtttttgtttggtccaggctggaccagggaatgaatagagatgagaggctttcggttgaagagaactgagttaagcggcgaagcaaacgcagaatcggcggcagaaattgccaccggaagcacgtcgaagangggtgaaccaaacacaaaattccatccaccacttctcttttcaatccccaactcaaatctgtgaagaaaatctcaatttctaaattgtaattcttagcactactgctagtagtagtaaaaaaaaacaattagaaagtagtagagtgtttttttttctttttttcgtttgttttacttttaagatgggtgagaagagcaacgttggcggcgacgcgattaacacgacactgcttcacgggaagtacgagctgggccggctgttaggccacggaaccttcgcgaaggtgtaccacgcgcgccacctgaagacgggaaagagcgtggcgatgaaggtggtgggcaaagagaaggtggtgaaggtaggcatgatggagcagatcaagagagagatctcagccatgaacatggtgaagcacccaaacatcgtgcagcttcacgaggtcatggcgagcaagtccaagatctacatcgccatggagctcgtccgcggcggcgagctcttcaacaagatcgccagaggccgtctccgggaggagatggccagactttacttccaacaactcatctctgctgtggacttctgccacagccgcggcgtctaccaccgtgacctcaagccagagaaccttctcctcgacgacgacggcaacctcaaggtcaccgacttcggcctcagcactttctccgagcacctccggcacgacggcctgctgcacactacgtgcggcacgccggcctatgtcgcgcccgaggtgattgggaaaagaggctacgacggcgccaaggccgatatttggtcttgtggcgtaatcctctacgtacttcttgctggttttttacccttccaggatgacaacctggtggccttgtacaagaaaatttaccgcggtgacttcaagtgtccgccgtggttctcctccgaggcgcggaggctcatcaccaagctcctcgaccccaacccgaacacgcgaatcacaatttcaaaaatcatggactcgtcgtggttcaagaaacccgtgccgaagaacttgatgggaaagaaaagagaggaattggatctggaggagaagattaaacagcatgagcaggaggtttctactacgatgaatgcttttcacatcatttcgctctcggaggggttcgatttgtcgccgttgttcgaggaaaagaagagagaagagaaagagttacggtttgcgaccacgcgccccgcgagcagcgtgatttcgagattggaagatttggcgaaggcggtgaagttcgacgtgaagaagagcgagactaaggtgaggttgcagggtcaagaaaaagggcgaaaaggtaaactcgctattgctgcggacttgtacgccgtgacgccgtcgtttttggtggtggaggttaagaaggacaacggtgacaccttggagtataaccagttctgtagcaaggagcttcgtccagctcttaaagatatcgtgtggaggacttctcctgcagagaatcctacactcgcttgaagaacaaccaagactcccatgctaattgtcgttcctttgtagttgtttttgttaattcttgtttcaggactgagatattttagttatttgcttacttctttgttatgttttggcctctggggtgtgtcgtcttttaccccgaaaggggaattgttgaaaaggtgaatgcagtaatgaaccgaaatggacatcgaggagttgttgtcgatgatgattcaggtacatgtgctgcgtgttgttgtgctcgtgggtgatgttgttgctatgttggcgtgattgtgaatatgtttgcaaattgattggtgtggctcatgggtcattcatggctgcgtttaattttg

SEQ ID NO: 16425 - protein, 438 aa, Glycine max
MGEKSNVGGDAINTTLLHGKYELGRLLGHGTFAKVYHARHLKTGKSVAMKVVGKEKVVKVGMMEQIKREISAMNMVKHPNIVQLHEVMASKSKIYIAMELVRGGELFNKIARGRLREEMARLYFQQLISAVDFCHSRGVYHRDLKPENLLLDDDGNLKVTDFGLSTFSEHLRHDGLLHTTCGTPAYVAPEVIGKRGYDGAKADIWSCGVILYVLLAGFLPFQDDNLVALYKKIYRGDFKCPPWFSSEARRLITKLLDPNPNTRITISKIMDSSWFKKPVPKNLMGKKREELDLEEKIKQHEQEVSTTMNAFHIISLSEGFDLSPLFEEKKREEKELRFATTRPASSVISRLEDLAKAVKFDVKKSETKVRLQGQEKGRKGKLAIAADLYAVTPSFLVVEVKKDNGDTLEYNQFCSKELRPALKDIVWRTSPAENPTLA

SEQ ID NO: 16426 - protein, 390 aa, Glycine max
MKVVGKEKVVKVGMMEQIKREISAMNMVKHPNIVQLHEVMASKSKIYIAMELVRGGELFNKIARGRLREEMARLYFQQLISAVDFCHSRGVYHRDLKPENLLLDDDGNLKVTDFGLSTFSEHLRHDGLLHTTCGTPAYVAPEVIGKRGYDGAKADIWSCGVILYVLLAGFLPFQDDNLVALYKKIYRGDFKCPPWFSSEARRLITKLLDPNPNTRITISKIMDSSWFKKPVPKNLMGKKREELDLEEKIKQHEQEVSTTMNAFHIISLSEGFDLSPLFEEKKREEKELRFATTRPASSVISRLEDLAKAVKFDVKKSETKVRLQGQEKGRKGKLAIAADLYAVTPSFLVVEVKKDNGDTLEYNQFCSKELRPALKDIVWRTSPAENPTLA

SEQ ID NO: 16427 - protein, 377 aa, Glycine max
MMEQIKREISAMNMVKHPNIVQLHEVMASKSKIYIAMELVRGGELFNKIARGRLREEMARLYFQQLISAVDFCHSRGVYHRDLKPENLLLDDDGNLKVTDFGLSTFSEHLRHDGLLHTTCGTPAYVAPEVIGKRGYDGAKADIWSCGVILYVLLAGFLPFQDDNLVALYKKIYRGDFKCPPWFSSEARRLITKLLDPNPNTRITISKIMDSSWFKKPVPKNLMGKKREELDLEEKIKQHEQEVSTTMNAFHIISLSEGFDLSPLFEEKKREEKELRFATTRPASSVISRLEDLAKAVKFDVKKSETKVRLQGQEKGRKGKLAIAADLYAVTPSFLVVEVKKDNGDTLEYNQFCSKELRPALKDIVWRTSPAENPTLA

SEQ ID NO: 16428 - DNA, 1909 bp, Glycine max
  misc_feature (1903)..(1903): n is a, c, g, or t
gggaagagtagcgatagacagaggagagagaaagagagggagtaagtgggtaaaggaaagaaaactaaagaaacaaacctaacacaacacaaatccttgaaacgacgacggaaatggccgtttcgagctcgcacatgcgtttcacctttgagtgccgctccgatcccgatttctcgccccccccgccgtccttcgacaacctccgccgccgaaacttccgctcctccgcagattccggcgcggcgtttcacggcatctcctccctcatcctccgcttccctcccaacttccagcgccagctaagcaccaaggcgcgccgcaactgcagcaacatcggcgtcgcgcaaatcgtcgccgcttcgtggtcgaacaacagcgacaactctccggccgccggggctccggcgccgcccgcggccaccgccacggacgccgctacggtgcctctccccgtcgtcgtcgccgccaacgaggacgtcgttgtctccgccgcggcagacgagaacggggctgtacagttaaacagtagttcttattcttcatttttgaaatccgatgcaagcaaaacgattcatgccgctgaaagactgggtaggggtattgagactgatggaattaccacccctgtggttaacacttctgcctacttttttaagaaaaccgctgatctcattgatttcaaggagaatcgtcaagtgagttatgaatacgggcgctatggaaacccaacgacggtggttctggaggagaagataagtgcattggagggggccgaatcaactgtgataatggcgtctgggatgtgtgctagcgtagtcctgtttatggcactggttccagctggtggacatcttgtgaccactacggattgttataggaagactagaatattcattgagacttttcttcctaagatggggatcacgaccactgtaattgatccagcagatgttggagccttggaatctgcattggagcagcacaatgtgtctctattcttcactgagtctcctaccaatccattcctgagatgtgttgatattaagctggtttcagagctttgccacaagaaggggactttgctctgtattgatggtacatttgcaactccattgaaccagaaggcccttgcccttggcgctgatctgattctgcactccttaacaaaatacatgggtggacatcatgatgtccttggtggttgcataagtggttcaattaaggtggtttcgcaaattcggactttgcaccatgttttgggtggtacacttaacccgaatgctgcatacctattcatcagaggcatgaaaacgctgcatctccgtgtacagcagcagaattcaacaggaatgaggatggccaaacttttagaggcacatcccaaggtgaagcgggtctactatccaggcttgccgagtcaccctgaacatgagcttgccaagaggcagatgactggtttcggtggtgttgtcagttttgagattgatggagatctacataccacaataaaatttattgattcattgaaaatcccatatattgcggcctcgtttggtggctgtgagagcattgtggatcaacctgctattttgtcttactgggatcttcctcagtcagaaagggccaagtacaagatttatgacaacctggttcgcttcagctttggagttgaagattttgaggatttgaaggctgatgtcctgcaagctctggaagctatatagacagttttcctgattcacccaagtttttttcttttataattgtgctatttgtttgttatcacatctggcgattcaattgaattttgatcgtctaatgttctgttggaattgtgttaagatgaatggtctctaatttggatgttatgaaacttgtgatgaattgttgaaattgaaacctntatttg

SEQ ID NO: 16429 - protein, 536 aa, Glycine max
MAVSSSHMRFTFECRSDPDFSPPPPSFDNLRRRNFRSSADSGAAFHGISSLILRFPPNFQRQLSTKARRNCSNIGVAQIVAASWSNNSDNSPAAGAPAPPAATATDAATVPLPVVVAANEDVVVSAAADENGAVQLNSSSYSSFLKSDASKTIHAAERLGRGIETDGITTPVVNTSAYFFKKTADLIDFKENRQVSYEYGRYGNPTTVVLEEKISALEGAESTVIMASGMCASVVLFMALVPAGGHLVTTTDCYRKTRIFIETFLPKMGITTTVIDPADVGALESALEQHNVSLFFTESPTNPFLRCVDIKLVSELCHKKGTLLCIDGTFATPLNQKALALGADLILHSLTKYMGGHHDVLGGCISGSIKVVSQIRTLHHVLGGTLNPNAAYLFIRGMKTLHLRVQQQNSTGMRMAKLLEAHPKVKRVYYPGLPSHPEHELAKRQMTGFGGVVSFEIDGDLHTTIKFIDSLKIPYIAASFGGCESIVDQPAILSYWDLPQSERAKYKIYDNLVRFSFGVEDFEDLKADVLQALEAI

SEQ ID NO: 16430 - protein, 529 aa, Glycine max
MRFTFECRSDPDFSPPPPSFDNLRRRNFRSSADSGAAFHGISSLILRFPPNFQRQLSTKARRNCSNIGVAQIVAASWSNNSDNSPAAGAPAPPAATATDAATVPLPVVVAANEDVVVSAAADENGAVQLNSSSYSSFLKSDASKTIHAAERLGRGIETDGITTPVVNTSAYFFKKTADLIDFKENRQVSYEYGRYGNPTTVVLEEKISALEGAESTVIMASGMCASVVLFMALVPAGGHLVTTTDCYRKTRIFIETFLPKMGITTTVIDPADVGALESALEQHNVSLFFTESPTNPFLRCVDIKLVSELCHKKGTLLCIDGTFATPLNQKALALGADLILHSLTKYMGGHHDVLGGCISGSIKVVSQIRTLHHVLGGTLNPNAAYLFIRGMKTLHLRVQQQNSTGMRMAKLLEAHPKVKRVYYPGLPSHPEHELAKRQMTGFGGVVSFEIDGDLHTTIKFIDSLKIPYIAASFGGCESIVDQPAILSYWDLPQSERAKYKIYDNLVRFSFGVEDFEDLKADVLQALEAI

SEQ ID NO: 16431 - protein, 311 aa, Glycine max
MASGMCASVVLFMALVPAGGHLVTTTDCYRKTRIFIETFLPKMGITTTVIDPADVGALESALEQHNVSLFFTESPTNPFLRCVDIKLVSELCHKKGTLLCIDGTFATPLNQKALALGADLILHSLTKYMGGHHDVLGGCISGSIKVVSQIRTLHHVLGGTLNPNAAYLFIRGMKTLHLRVQQQNSTGMRMAKLLEAHPKVKRVYYPGLPSHPEHELAKRQMTGFGGVVSFEIDGDLHTTIKFIDSLKIPYIAASFGGCESIVDQPAILSYWDLPQSERAKYKIYDNLVRFSFGVEDFEDLKADVLQALEAI

SEQ ID NO: 16432 - DNA, 1316 bp, Glycine max
  misc_feature (262)..(262): n is a, c, g, or t
aagccaggtgagaggttctcagaaattgttggaagtccatattatatggctccagaagtgctcaagcggaattatggaccagaaatagatatatggagtgcaggagtaattctctacatcttattgtgtggtgttcccccattttgggctgaatctgagcaaggagttgcacaggccattcttcgaggacttatagattttaaaagggaaccatggcccagtatttctgaaagtgctaaaagccttgttaggcaaatgttanaaccagaccccaagcttcgattaactgccaaacaagtgcttgagcatccctggattcaaaatgctaagaaggctcctaatgttccacttggagatgttgtcaagtcaaggcttaagcaattttcgatgatgaacagattcaaaagaaaagcccttagggtcattgctgatttcttatccaatgaagaagttgaagacatcaaagatatgttcaagaagatggataatgataatgatggcattgtctccattgaagaactaaaagctggattccgaaactttgggtctctactggctgactctgaagttcagttgcttattgaagctgtagatagtaatggtaagggaacactagactacggggaattcgttgctgtttcccttcatttaagaaggatggctaatgacgatcatcttcacaaggccttctcctattttgacaaagatgggaatggatatattgaaccagatgagctacggaatgctttgatggaagatggagcagatgactgtacagatgtagcgaatgacattttcctagaagtagacacggacaaggatggacgtatcagttacgatgaatttgttgctatgatgaaaactggaacagattggagaaaagcatcaaggcattactcacgtggaagattcaatagcttgagcttaaagttgatgaaagacggttctttaaacttaggaaatgagtagagttgtctaagtgtttgcctatattcgatctgtgtttccaaatagtgtaatattcctcctacaatgtggacttggcttctttgtgataattatttggttccactttagatgggttcctttccacttggtgctgtgcgagtcacgaaggattgggtacgccaattatgcatgcggtttgttacttgtgtaaaacatggtgccttggagccaatggtgtgacatgtatgatgatgattccactcgttttaaccactcctgccttctcttctggtttgacaatgttgaaatcaaaactgtttagtgcagtcagaatatgtttatcaaagtgtgaatatcttgtagttcgt

SEQ ID NO: 16433 - protein, 322 aa, Glycine max
  misc_feature (88)..(88): Xaa can be any naturally occurring amino acid
KPGERFSEIVGSPYYMAPEVLKRNYGPEIDIWSAGVILYILLCGVPPFWAESEQGVAQAILRGLIDFKREPWPSISESAKSLVRQMLXPDPKLRLTAKQVLEHPWIQNAKKAPNVPLGDVVKSRLKQFSMMNRFKRKALRVIADFLSNEEVEDIKDMFKKMDNDNDGIVSIEELKAGFRNFGSLLADSEVQLLIEAVDSNGKGTLDYGEFVAVSLHLRRMANDDHLHKAFSYFDKDGNGYIEPDELRNALMEDGADDCTDVANDIFLEVDTDKDGRISYDEFVAMMKTGTDWRKASRHYSRGRFNSLSLKLMKDGSLNLGNE

SEQ ID NO: 16434 - protein, 307 aa, Glycine max
  misc_feature (73)..(73): Xaa can be any naturally occurring amino acid
MAPEVLKRNYGPEIDIWSAGVILYILLCGVPPFWAESEQGVAQAILRGLIDFKREPWPSISESAKSLVRQMLXPDPKLRLTAKQVLEHPWIQNAKKAPNVPLGDVVKSRLKQFSMMNRFKRKALRVIADFLSNEEVEDIKDMFKKMDNDNDGIVSIEELKAGFRNFGSLLADSEVQLLIEAVDSNGKGTLDYGEFVAVSLHLRRMANDDHLHKAFSYFDKDGNGYIEPDELRNALMEDGADDCTDVANDIFLEVDTDKDGRISYDEFVAMMKTGTDWRKASRHYSRGRFNSLSLKLMKDGSLNLGNE

SEQ ID NO: 16435 - protein, 237 aa, Glycine max
  misc_feature (3)..(3): Xaa can be any naturally occurring amino acid
MLXPDPKLRLTAKQVLEHPWIQNAKKAPNVPLGDVVKSRLKQFSMMNRFKRKALRVIADFLSNEEVEDIKDMFKKMDNDNDGIVSIEELKAGFRNFGSLLADSEVQLLIEAVDSNGKGTLDYGEFVAVSLHLRRMANDDHLHKAFSYFDKDGNGYIEPDELRNALMEDGADDCTDVANDIFLEVDTDKDGRISYDEFVAMMKTGTDWRKASRHYSRGRFNSLSLKLMKDGSLNLGNE

SEQ ID NO: 16436 - DNA, 1521 bp, Glycine max
gccgttttcttcttcatcatagtcgtggccgtgtcgcagcaaaaccaaaccacatattaacttgtttgctctaagtcatggctctgatcttgcacgcaaccaaagcaaacaagaatgctttcaagactctgattgcggcagagtacagtggcgtccaagtggaattggcccctaatttcgagatgggtgtctctaatagaactcctgaattccttaaaatgaatcccataggaaaggttcctgtcttggaaacgcccgatggtccagtctttgagagcaatgccattgctcgttacgttgctcgactcaagggtgacaacgctttgttctcatcttctgccattgataatgcccacattgaccagtggattgacttttcatccttggagatcgatgctaatctcatgaaattgctcctaccaagacttggatttgccccataccttcctccagttgaggagggtgcaaattctgcgttgaagagagcatttgaggccttgaacactcatcttgcctccaatacttaccttgttggccattctgttacccttgctgacatcataacaacatgcaacttgtatttaggattcagccagctcttagttaagagcttcacctctgagttccctcacgttgaacgatacttttggaccttggtcaaccagcctaacttcagaaagattctaggtcaggttaagcaaactgaggctgttccacctattccatcggcaaagaagccttcccagtctaaggaatctaagcccaagcctaaggatgaaccaaagaaagtggctaaaccagagcccaaagaagtagcagaaccagaggaggaggcacccaagcccaagcccaagaatcctcttgatcttcttcctccaagcaagatgatcttggatgagtggaaaagactctactcaaacaccaagaccaacttccgggaggttgcaatcaaaggattttgggacatgtacgatccagagggatattctctgtggttctgtgattacaaatacaatgatgagaactcagtttcctttgttacattaaacaaggttggtggatttcttcagaggatggacctggctcgcaagtatgcgtttggaaagatgctggtgattggatcacaggcaccatttaaggtgaaggggttgtggctcttccgcggccaagagattccacaatttgtgattgatgaatgctatgatatggagctctatgactggaccaaggttgatatctctgatgaaactcagaaagagcgcgtcaatcagatgatcgaggattatgaaccatttgagggagaacctcttttggatgctaagtgcttcaagtgagaaacaaaattttagtccctagtcaaaatgctgatttttgtcgtgtgtctttttcttatgtctttggtttctatcctatttctgttatagctgttttggttgggatcttcaacactgaaacttaatgcttgattttgttacacattatcttttatgactatagcaagaccagtatacaaatttattt

SEQ ID NO: 16437 - protein, 418 aa, Glycine max
MALILHATKANKNAFKTLIAAEYSGVQVELAPNFEMGVSNRTPEFLKMNPIGKVPVLETPDGPVFESNAIARYVARLKGDNALFSSSAIDNAHIDQWIDFSSLEIDANLMKLLLPRLGFAPYLPPVEEGANSALKRAFEALNTHLASNTYLVGHSVTLADIITTCNLYLGFSQLLVKSFTSEFPHVERYFWTLVNQPNFRKILGQVKQTEAVPPIPSAKKPSQSKESKPKPKDEPKKVAKPEPKEVAEPEEEAPKPKPKNPLDLLPPSKMILDEWKRLYSNTKTNFREVAIKGFWDMYDPEGYSLWFCDYKYNDENSVSFVTLNKVGGFLQRMDLARKYAFGKMLVIGSQAPFKVKGLWLFRGQEIPQFVIDECYDMELYDWTKVDISDETQKERVNQMIEDYEPFEGEPLLDAKCFK

SEQ ID NO: 16438 - protein, 383 aa, Glycine max
MGVSNRTPEFLKMNPIGKVPVLETPDGPVFESNAIARYVARLKGDNALFSSSAIDNAHIDQWIDFSSLEIDANLMKLLLPRLGFAPYLPPVEEGANSALKRAFEALNTHLASNTYLVGHSVTLADIITTCNLYLGFSQLLVKSFTSEFPHVERYFWTLVNQPNFRKILGQVKQTEAVPPIPSAKKPSQSKESKPKPKDEPKKVAKPEPKEVAEPEEEAPKPKPKNPLDLLPPSKMILDEWKRLYSNTKTNFREVAIKGFWDMYDPEGYSLWFCDYKYNDENSVSFVTLNKVGGFLQRMDLARKYAFGKMLVIGSQAPFKVKGLWLFRGQEIPQFVIDECYDMELYDWTKVDISDETQKERVNQMIEDYEPFEGEPLLDAKCFK

SEQ ID NO: 16439 - protein, 371 aa, Glycine max
MNPIGKVPVLETPDGPVFESNAIARYVARLKGDNALFSSSAIDNAHIDQWIDFSSLEIDANLMKLLLPRLGFAPYLPPVEEGANSALKRAFEALNTHLASNTYLVGHSVTLADIITTCNLYLGFSQLLVKSFTSEFPHVERYFWTLVNQPNFRKILGQVKQTEAVPPIPSAKKPSQSKESKPKPKDEPKKVAKPEPKEVAEPEEEAPKPKPKNPLDLLPPSKMILDEWKRLYSNTKTNFREVAIKGFWDMYDPEGYSLWFCDYKYNDENSVSFVTLNKVGGFLQRMDLARKYAFGKMLVIGSQAPFKVKGLWLFRGQEIPQFVIDECYDMELYDWTKVDISDETQKERVNQMIEDYEPFEGEPLLDAKCFK

SEQ ID NO: 16440 - DNA, 1820 bp, Glycine max
  misc_feature (501)..(501): n is a, c, g, or t
  misc_feature (706)..(706): n is a, c, g, or t
  misc_feature (778)..(778): n is a, c, g, or t
  misc_feature (919)..(919): n is a, c, g, or t
  misc_feature (927)..(927): n is a, c, g, or t
  misc_feature (955)..(955): n is a, c, g, or t
acaccaagccaatagccaagttatatgcttgctatcagaactcagaagaggttgaatcatggagatgaaagtaaaggagaggattggtacagtattctgtaaactgtagttgattgaataatatgatagtacctatttataaaacaagagtgatagtcttctaattgctcacctaactaacatctaagttctaactaactcttctaaaagaatgacagctgcatgagttgagtatgttctctgatactatatataactataaattgcctaattacatgtataatttccacttatttatcaatgaaacggcatgcagaaaaaataaaagaccacagtaatgcagatgtaacggtagacgaatatccatcggtataaggtatagggtatatatatatatatatatatatacatggtttcaataatagtaatccaattgtttttatatgaatacaaaatagaactaatatgtagagtcatgatagactggttcacatgttttangaggatattggaatcatgaagtacatgaatttggatgcttatagattctccattgcttggtctagggtactaccaaaaggaaagcttagtgcaggtgtaaacaaagaaggaataaactactacaacaacctcatcaatgagctactggctaatggtctgcaaccatatgtgaccctttttcattgggacgttccccaagccttanaggatgagtatggtggtcttttaagccctcacattgtagatgattttagggactatgctgaactttgcttcnaggaatttggtgatagggtgaaacattggattactttgaacgaaccgagcactgtaagcatgaatggctatgcagtgggaagccatgcaccaggtcggtgttctgattggttaaaaatgaattgcacaggtggtgattcangaactganccttatttgagttcacactatcaacttntttctcatgctgctgctgccaatctgtataagaccaagtatcagacatctcaaaaaggtataatagggattaccttgaatactgactggtttttgccggcctcagaaaagataacagatcgagacgctgcgcgtcgagcccttgactttaggtttggatggtatatggatccaatcacctttggtgactatccaaaaagcatgcgatctttggtgggaaaccggctaccaaagttctccaaagaagaaaccaggcaacttaaggggtcatttgattttctgggcctaaaccattacgcaaccgtttatgctggccatgcgcctcacctacgtggtcccagaccaaccctactaactgatcctctaatttatgttacaaatcagcgtgacggcagggtcctttgtccatacgctgcttctaactggttatgcgtttatccacgaggactccgacaactgctgctttacatcaagaagcaatacaacagccccgtaatttacattactgaaagtggttatgatgagctcaacgatccaacactatcacttgaagaaagcatgatagatacttacagagttgattacttttatcgttatctttattatcttcaaatggcaatcagggatggtgtaaatgtcaagggatactttgtatggtcattgctggataacatggagtggagtgctggctatactgtgcgatttggattggtctttgtggattacaaagatggcttgaaaagatacctcaaactctcggcacaatggttcaagaattttctcaacaaatcttagtagttacacatatatgttcagcatggttccaagtaaaataagatatgaagttgatgttttaaaataaagtg

SEQ ID NO: 16441 - protein, 418 aa, Glycine max
  misc_feature (3)..(3): Xaa can be any naturally occurring amino acid
  misc_feature (72)..(72): Xaa can be any naturally occurring amino acid
  misc_feature (96)..(96): Xaa can be any naturally occurring amino acid
  misc_feature (143)..(143): Xaa can be any naturally occurring amino acid
  misc_feature (145)..(145): Xaa can be any naturally occurring amino acid
  misc_feature (155)..(155): Xaa can be any naturally occurring amino acid
MFXEDIGIMKYMNLDAYRFSIAWSRVLPKGKLSAGVNKEGINYYNNLINELLANGLQPYVTLFHWDVPQALXDEYGGLLSPHIVDDFRDYAELCFXEFGDRVKHWITLNEPSTVSMNGYAVGSHAPGRCSDWLKMNCTGGDSXTXPYLSSHYQLXSHAAAANLYKTKYQTSQKGIIGITLNTDWFLPASEKITDRDAARRALDFRFGWYMDPITFGDYPKSMRSLVGNRLPKFSKEETRQLKGSFDFLGLNHYATVYAGHAPHLRGPRPTLLTDPLIYVTNQRDGRVLCPYAASNWLCVYPRGLRQLLLYIKKQYNSPVIYITESGYDELNDPTLSLEESMIDTYRVDYFYRYLYYLQMAIRDGVNVKGYFVWSLLDNMEWSAGYTVRFGLVFVDYKDGLKRYLKLSAQWFKNFLNKS

SEQ ID NO: 16442 - protein, 410 aa, Glycine max
  misc_feature (64)..(64): Xaa can be any naturally occurring amino acid
  misc_feature (88)..(88): Xaa can be any naturally occurring amino acid
  misc_feature (135)..(135): Xaa can be any naturally occurring amino acid
  misc_feature (137)..(137): Xaa can be any naturally occurring amino acid
  misc_feature (147)..(147): Xaa can be any naturally occurring amino acid
MKYMNLDAYRFSIAWSRVLPKGKLSAGVNKEGINYYNNLINELLANGLQPYVTLFHWDVPQALXDEYGGLLSPHIVDDFRDYAELCFXEFGDRVKHWITLNEPSTVSMNGYAVGSHAPGRCSDWLKMNCTGGDSXTXPYLSSHYQLXSHAAAANLYKTKYQTSQKGIIGITLNTDWFLPASEKITDRDAARRALDFRFGWYMDPITFGDYPKSMRSLVGNRLPKFSKEETRQLKGSFDFLGLNHYATVYAGHAPHLRGPRPTLLTDPLIYVTNQRDGRVLCPYAASNWLCVYPRGLRQLLLYIKKQYNSPVIYITESGYDELNDPTLSLEESMIDTYRVDYFYRYLYYLQMAIRDGVNVKGYFVWSLLDNMEWSAGYTVRFGLVFVDYKDGLKRYLKLSAQWFKNFLNKS

SEQ ID NO: 16443 - protein, 407 aa, Glycine max
  misc_feature (61)..(61): Xaa can be any naturally occurring amino acid
  misc_feature (85)..(85): Xaa can be any naturally occurring amino acid
  misc_feature (132)..(132): Xaa can be any naturally occurring amino acid
  misc_feature (134)..(134): Xaa can be any naturally occurring amino acid
  misc_feature (144)..(144): Xaa can be any naturally occurring amino acid
MNLDAYRFSIAWSRVLPKGKLSAGVNKEGINYYNNLINELLANGLQPYVTLFHWDVPQALXDEYGGLLSPHIVDDFRDYAELCFXEFGDRVKHWITLNEPSTVSMNGYAVGSHAPGRCSDWLKMNCTGGDSXTXPYLSSHYQLXSHAAAANLYKTKYQTSQKGIIGITLNTDWFLPASEKITDRDAARRALDFRFGWYMDPITFGDYPKSMRSLVGNRLPKFSKEETRQLKGSFDFLGLNHYATVYAGHAPHLRGPRPTLLTDPLIYVTNQRDGRVLCPYAASNWLCVYPRGLRQLLLYIKKQYNSPVIYITESGYDELNDPTLSLEESMIDTYRVDYFYRYLYYLQMAIRDGVNVKGYFVWSLLDNMEWSAGYTVRFGLVFVDYKDGLKRYLKLSAQWFKNFLNKS

SEQ ID NO: 16444 - DNA, 1856 bp, Glycine max
  misc_feature (1477)..(1477): n is a, c, g, or t
  misc_feature (1624)..(1624): n is a, c, g, or t
  misc_feature (1653)..(1653): n is a, c, g, or t
  misc_feature (1696)..(1696): n is a, c, g, or t
gggagcacatacaaccttgtgagttgtttatccacacacactcaaacatgggaacctatgtggaaaatttcgcaagtgaggaggaacatgtctttcgtagccaacactcacctgttcctgtccctgacaacgtgacattgccggaatttgtgctccaaaatgctgaattgtatgctgataaggttgcatttgtggatgctgtgaccggaaaaggggttacttttagtgaggtggtgacgggtgtacacaggttttctaaggccttaagaactcttggtctgaggaaagggcatgttgtgattgtagtgcttccaaatgtggtagagtatgccattgttgctttggggataatggctgctggtggggtgttctcaggtgcaaatccaacatcacatgtatcagaaattaagaaacaggcagagtctgctgatgccaaattgattgtcacaaatgtcacaaactatgaaaaggtaaaggctttggagctacctattattttgctaggagatgaagttgttgaaggtgccatgaattggaacaagttgcttgaagcagcagaccgtgcaggggatgatttgacaaaggagcctattcagcagaatgatctttgtgccatgccattctcatcaggcaccacaggaatgtcaaagggtgtgatgctcactcatagaaatctagtggccaatctttgctctacactctttggtgtgaccaaagaaatggagggtctggtcaccacactaggcttgattcccttctttcacatttatggcatcacaggaatatgttgtgccactcttaagagcaaagggaaagttgtggtgatgggaaggtttgagttgaaaacttttctcaatgccttgatcacacatgaggtcacatttgcacccattgtgccccctatcattctcaccttggtgaaaaatccaatagtggatgaatttgacctcagcaagctaaaactccaggccattatgactgcagcagctccacttgcaccagaactccttaatgcttttgaacataagttccctggcgttgctgtccaagaggcatatggactaactgagcatagctgcatcaccctcacttatgcacaaaaaggattgggaagtactcatagaaactcagtggggttcatcctcccaaatttggaagttaagtttgttgatcctgacactggtcgatccctcccaaggaacacacctggggaactctgtgtaagaagccaatgtgtgatgcaaggttactataaacaggaggatgagactgcccaaaccattgacaagaatggatggcttcacacaggtgacattggattcatagatgatgaagaaaatgtatttatcattgatcgtatcaaggagttgattaagtacaaaggcttccaagttgctcctgcagagttagaggccattttgctgagtcattcatcagttgaagatgcagctgtggtgccattaccagatgaagaggntggggaaatcccagctgcaagtgttgttttgagcccaggtgaaaaagagagtgaggaggacatcatgaactatgttgcctccaatgctgcacattacaagaaagtgagagtggtgcactttgtggaagccataccaaagtcaccctntgggaaaatcatgaggaggcttgtcaaanagaggatggtggaaaagatgaagacagagtccttaacaaaatntaagaatatttaaatcactagcaaatattatgtactttgctttaatgtcttctagtttgtcatggttgcactgttgttaagtgacgactaatttgacatgggatttattcttttactacttgttgaagagatatattaaaaataaaatttgacactttgg

SEQ ID NO: 16445 - protein, 568 aa, Glycine max
  misc_feature (492)..(492): Xaa can be any naturally occurring amino acid
  misc_feature (541)..(541): Xaa can be any naturally occurring amino acid
  misc_feature (551)..(551): Xaa can be any naturally occurring amino acid
  misc_feature (565)..(565): Xaa can be any naturally occurring amino acid
EHIQPCELFIHTHSNMGTYVENFASEEEHVFRSQHSPVPVPDNVTLPEFVLQNAELYADKVAFVDAVTGKGVTFSEVVTGVHRFSKALRTLGLRKGHVVIVVLPNVVEYAIVALGIMAAGGVFSGANPTSHVSEIKKQAESADAKLIVTNVTNYEKVKALELPIILLGDEVVEGAMNWNKLLEAADRAGDDLTKEPIQQNDLCAMPFSSGTTGMSKGVMLTHRNLVANLCSTLFGVTKEMEGLVTTLGLIPFFHIYGITGICCATLKSKGKVVVMGRFELKTFLNALITHEVTFAPIVPPIILTLVKNPIVDEFDLSKLKLQAIMTAAAPLAPELLNAFEHKFPGVAVQEAYGLTEHSCITLTYAQKGLGSTHRNSVGFILPNLEVKFVDPDTGRSLPRNTPGELCVRSQCVMQGYYKQEDETAQTIDKNGWLHTGDIGFIDDEENVFIIDRIKELIKYKGFQVAPAELEAILLSHSSVEDAAVVPLPDEEXGEIPAASVVLSPGEKESEEDIMNYVASNAAHYKKVRVVHFVEAIPKSPXGKIMRRLVKXRMVEKMKTESLTKXKNI

SEQ ID NO: 16446 - protein, 553 aa, Glycine max
  misc_feature (477)..(477): Xaa can be any naturally occurring amino acid
  misc_feature (526)..(526): Xaa can be any naturally occurring amino acid
  misc_feature (536)..(536): Xaa can be any naturally occurring amino acid
  misc_feature (550)..(550): Xaa can be any naturally occurring amino acid
MGTYVENFASEEEHVFRSQHSPVPVPDNVTLPEFVLQNAELYADKVAFVDAVTGKGVTFSEVVTGVHRFSKALRTLGLRKGHVVIVVLPNVVEYAIVALGIMAAGGVFSGANPTSHVSEIKKQAESADAKLIVTNVTNYEKVKALELPIILLGDEVVEGAMNWNKLLEAADRAGDDLTKEPIQQNDLCAMPFSSGTTGMSKGVMLTHRNLVANLCSTLFGVTKEMEGLVTTLGLIPFFHIYGITGICCATLKSKGKVVVMGRFELKTFLNALITHEVTFAPIVPPIILTLVKNPIVDEFDLSKLKLQAIMTAAAPLAPELLNAFEHKFPGVAVQEAYGLTEHSCITLTYAQKGLGSTHRNSVGFILPNLEVKFVDPDTGRSLPRNTPGELCVRSQCVMQGYYKQEDETAQTIDKNGWLHTGDIGFIDDEENVFIIDRIKELIKYKGFQVAPAELEAILLSHSSVEDAAVVPLPDEEXGEIPAASVVLSPGEKESEEDIMNYVASNAAHYKKVRVVHFVEAIPKSPXGKIMRRLVKXRMVEKMKTESLTKXKNI

SEQ ID NO: 16447 - protein, 452 aa, Glycine max
  misc_feature (376)..(376): Xaa can be any naturally occurring amino acid
  misc_feature (425)..(425): Xaa can be any naturally occurring amino acid
  misc_feature (435)..(435): Xaa can be any naturally occurring amino acid
  misc_feature (449)..(449): Xaa can be any naturally occurring amino acid
MAAGGVFSGANPTSHVSEIKKQAESADAKLIVTNVTNYEKVKALELPIILLGDEVVEGAMNWNKLLEAADRAGDDLTKEPIQQNDLCAMPFSSGTTGMSKGVMLTHRNLVANLCSTLFGVTKEMEGLVTTLGLIPFFHIYGITGICCATLKSKGKVVVMGRFELKTFLNALITHEVTFAPIVPPIILTLVKNPIVDEFDLSKLKLQAIMTAAAPLAPELLNAFEHKFPGVAVQEAYGLTEHSCITLTYAQKGLGSTHRNSVGFILPNLEVKFVDPDTGRSLPRNTPGELCVRSQCVMQGYYKQEDETAQTIDKNGWLHTGDIGFIDDEENVFIIDRIKELIKYKGFQVAPAELEAILLSHSSVEDAAVVPLPDEEXGEIPAASVVLSPGEKESEEDIMNYVASNAAHYKKVRVVHFVEAIPKSPXGKIMRRLVKXRMVEKMKTESLTKXKNI

SEQ ID NO: 16448 - DNA, 1248 bp, Glycine max
  misc_feature (1031)..(1031): n is a, c, g, or t
  misc_feature (1049)..(1049): n is a, c, g, or t
  misc_feature (1119)..(1119): n is a, c, g, or t
gttggctaaatgtcacacattacttactaatatctatgaatcaattcttgaacaggaatctagtccaattcctttcacaaatgcaacgtactacagggttggattttatggtgttagatttgggaaacttgataaaaaggagtatgtatatcgtgagcctcgtgatgtacgtctaggtgacataatggaaaaacttagtcacacatacgagtctagaatggatggtaatcacactttgcatattattccagattctagacaagtgaaggcagaggagttgcagcctggtgtctgttaccttcagattactgccgttgatccagtaatggaagatgaggatttaggaagtaggagagaaagaattttctctctctctactggaagcgtccgagcccgcgtatttgaccgattcttgtttgacaccccatttaccaaaaatggcaagactcaaggtggattggaagatcaatggaagagacgcactgttcttcggactgagggttcttttcctgcattagtaaataggttattggtaatcaaatccgagtcccttgagttctctcctgtagaaaatgcaatcggaatgattgaaacacgaaccgctgccttaagaaatgagcttgaagagcctcgaagttcagagggggatcaacttccaagactccagagtctacaaagaatcctacaaggcagtgttgcagtacaagtgaatagtggagtcttgagtgtctgcactgccttcttgtccggggagcctgcgaccaggttacgatcacaggaactgcagcaacttatagctgcccttcttgagttcatggctgtttgtaaacgtgccatccgtgtacatttcagattgattggtgaggaagatcaggatttccacacacaacttgtaaatggtttccagtcactgacagcagagttatcacattacattcctgccattctctcagagctatgacaagtgtttgcctcttaatattttgcttcgatttgttcatattgtagtctcctcattccctttcaccctntttctatcgcttgcaaanatgtgtaattgaatttgcatcatggttcgtatacttagaattatgcgaaccaggtgattcaggaaaaacncgaatcgtcctgtttgtgtatcatgatgtttctagtttccccactttcccctttttagtttgtggtgcggggaatgtcatttgtgtaatattttaattgtttaagttgtttagccatacagctattgtg

SEQ ID NO: 16449 - protein, 319 aa, Glycine max
LAKCHTLLTNIYESILEQESSPIPFTNATYYRVGFYGVRFGKLDKKEYVYREPRDVRLGDIMEKLSHTYESRMDGNHTLHIIPDSRQVKAEELQPGVCYLQITAVDPVMEDEDLGSRRERIFSLSTGSVRARVFDRFLFDTPFTKNGKTQGGLEDQWKRRTVLRTEGSFPALVNRLLVIKSESLEFSPVENAIGMIETRTAALRNELEEPRSSEGDQLPRLQSLQRILQGSVAVQVNSGVLSVCTAFLSGEPATRLRSQELQQLIAALLEFMAVCKRAIRVHFRLIGEEDQDFHTQLVNGFQSLTAELSHYIPAILSEL

SEQ ID NO: 16450 - protein, 258 aa, Glycine max
MEKLSHTYESRMDGNHTLHIIPDSRQVKAEELQPGVCYLQITAVDPVMEDEDLGSRRERIFSLSTGSVRARVFDRFLFDTPFTKNGKTQGGLEDQWKRRTVLRTEGSFPALVNRLLVIKSESLEFSPVENAIGMIETRTAALRNELEEPRSSEGDQLPRLQSLQRILQGSVAVQVNSGVLSVCTAFLSGEPATRLRSQELQQLIAALLEFMAVCKRAIRVHFRLIGEEDQDFHTQLVNGFQSLTAELSHYIPAILSEL

SEQ ID NO: 16451 - protein, 247 aa, Glycine max
MDGNHTLHIIPDSRQVKAEELQPGVCYLQITAVDPVMEDEDLGSRRERIFSLSTGSVRARVFDRFLFDTPFTKNGKTQGGLEDQWKRRTVLRTEGSFPALVNRLLVIKSESLEFSPVENAIGMIETRTAALRNELEEPRSSEGDQLPRLQSLQRILQGSVAVQVNSGVLSVCTAFLSGEPATRLRSQELQQLIAALLEFMAVCKRAIRVHFRLIGEEDQDFHTQLVNGFQSLTAELSHYIPAILSEL

SEQ ID NO: 16452 - DNA, 1699 bp, Glycine max
ccattctcatcctcttctttctctctctaccattgccatggatccctacaagcaccggccatccagcgccttcaattctcccttctggactacaaattctggtgctcctatttggaacaacaactcctctttaaccgttggagctagaggtccaattctgctggaggattatcatcttgtggagaagcttgcaaattttgatagggaacgtatcccagaacgtgttgtccatgccaggggcgctagtgcaaagggtttctttgaggtcacccatgacatttctcacctgacatgtgcagatttccttcgagcccctggagttcagacgcctgtaattgttcgtttctcaactgtcattcatgagcgtggtagccctgaaaccttgagggaccctcgaggttttgccgtgaagttttacaccagagaaggtaactttgaccttgttggaaacaaccttcccgtcttctttgtacgtgatggcatgaagtttccagatatggttcatgctcttaaacccaatcccaagaaccacatccaggagaattggaggatccttgacttcttctctcactttccagaaagccttcacatgttcacctttttatttgatgatttgggtgttccacaagattacaggcatatggatggttttggagttaacacatacacactgatcaacaaggctgggaaagcagtgtatgtgaaatttcactggaagaccactagtggtataaagtgtctattggaggaagaggccattaaggtgggaggagccaaccacagccatgccactcaagaccttcatgattcaattgctgctggtaactatcctgagtggaaactgttcgttcagacaatagatcctgagcatgaagacaaatttgactttgaccctcttgatgttactaagacttggcctgaggacattatacccttgcagcctgttggtcgcttggtcctgaataaaaacatagataatttctttgctgagaatgaacaacttgcattttgccctgccattgtggttcctggtgtatactactcagatgataagatgcttcagaccaggatattctcttatgctgattcacaaaggcacagacttggaccaaactatctgcaacttcctgctaatgctcccaagtgtgctcaccacaataatcatcatgaaggtttcatgaatttcattcacagggatgaggaggtcaattacttcccttcaaggtatgatcctgttcgtcatgcagaaaggttccccatacctcctgctatctgcagtggaaggcgtgaaaagtgtggaattgagaaggagaacaacttcaagcagcccggagagagataccggtcttgggcacctgacaggcaagatagatttgctcgccgatgggttgatgctttatctgacccacgggtcacccatgagatccgcagtgtctggatatcatactggtctcaggctgaccgttctctaggccaaaagatagcttctcatctcagcacgaggccaaatatttaatgttgttgccaactccagaatgattgttagagttgcagacgtgcaaagagtacgataaggatgtgattttggattacctgaaagaactaatccttttcttgcaatattatgttgtgtgtacccataactccatgaatgcaactcgttgacctatctcaataaatgccgtttgtatttgttagt

SEQ ID NO: 16453 - protein, 504 aa, Glycine max
HSHPLLSLSTIAMDPYKHRPSSAFNSPFWTTNSGAPIWNNNSSLTVGARGPILLEDYHLVEKLANFDRERIPERVVHARGASAKGFFEVTHDISHLTCADFLRAPGVQTPVIVRFSTVIHERGSPETLRDPRGFAVKFYTREGNFDLVGNNLPVFFVRDGMKFPDMVHALKPNPKNHIQENWRILDFFSHFPESLHMFTFLFDDLGVPQDYRHMDGFGVNTYTLINKAGKAVYVKFHWKTTSGIKCLLEEEAIKVGGANHSHATQDLHDSIAAGNYPEWKLFVQTIDPEHEDKFDFDPLDVTKTWPEDIIPLQPVGRLVLNKNIDNFFAENEQLAFCPAIVVPGVYYSDDKMLQTRIFSYADSQRHRLGPNYLQLPANAPKCAHHNNHHEGFMNFIHRDEEVNYFPSRYDPVRHAERFPIPPAICSGRREKCGIEKENNFKQPGERYRSWAPDRQDRFARRWVDALSDPRVTHEIRSVWISYWSQADRSLGQKIASHLSTRPNI

SEQ ID NO: 16454 - protein, 492 aa, Glycine max
MDPYKHRPSSAFNSPFWTTNSGAPIWNNNSSLTVGARGPILLEDYHLVEKLANFDRERIPERVVHARGASAKGFFEVTHDISHLTCADFLRAPGVQTPVIVRFSTVIHERGSPETLRDPRGFAVKFYTREGNFDLVGNNLPVFFVRDGMKFPDMVHALKPNPKNHIQENWRILDFFSHFPESLHMFTFLFDDLGVPQDYRHMDGFGVNTYTLINKAGKAVYVKFHWKTTSGIKCLLEEEAIKVGGANHSHATQDLHDSIAAGNYPEWKLFVQTIDPEHEDKFDFDPLDVTKTWPEDIIPLQPVGRLVLNKNIDNFFAENEQLAFCPAIVVPGVYYSDDKMLQTRIFSYADSQRHRLGPNYLQLPANAPKCAHHNNHHEGFMNFIHRDEEVNYFPSRYDPVRHAERFPIPPAICSGRREKCGIEKENNFKQPGERYRSWAPDRQDRFARRWVDALSDPRVTHEIRSVWISYWSQADRSLGQKIASHLSTRPNI

SEQ ID NO: 16455 - protein, 344 aa, Glycine max
MKFPDMVHALKPNPKNHIQENWRILDFFSHFPESLHMFTFLFDDLGVPQDYRHMDGFGVNTYTLINKAGKAVYVKFHWKTTSGIKCLLEEEAIKVGGANHSHATQDLHDSIAAGNYPEWKLFVQTIDPEHEDKFDFDPLDVTKTWPEDIIPLQPVGRLVLNKNIDNFFAENEQLAFCPAIVVPGVYYSDDKMLQTRIFSYADSQRHRLGPNYLQLPANAPKCAHHNNHHEGFMNFIHRDEEVNYFPSRYDPVRHAERFPIPPAICSGRREKCGIEKENNFKQPGERYRSWAPDRQDRFARRWVDALSDPRVTHEIRSVWISYWSQADRSLGQKIASHLSTRPNI

SEQ ID NO: 16456 - DNA, 1446 bp, Glycine max
aagcgaaacgatcatggagccatctgtgactctcagattccgatcacacaccctctccctcttccctcacgcaccaatctcttccatagaccacccacacaatcatcttctcatacccatttcacccaaattcagttcaaacactacgctgtcggtggcagcaacagcgaagaaaaagccaagcatcgaaggtgtgagcgaagagttgaacgccatggcctctcagaaccttgacttcgcaccctcccggagacgggtccgtgcagctttcaccgaggtgcaccagcagctcgaccatttcttgttcaaggggtatgaaaggaattccaggggattggaaattttctgcaaaagctggatgcctgaatcgggcgtcccactcaaggctgctttgtgtttctgccatggttatggcagcacttgcactttcttctttgaaggtattgccaaaagaatagctgcttctgggtatggtgtttatgctatggactatccaggttttggtctatctgaaggtttacatggttacataccaaattttgatgatttggttgatgacgttatagaacattttacaaaaatcaaagcaaggcctgaggtgagagggttgccacgattcatattggggcagtcaatgggtggagcaattgctcttaaggttcatttgaaggaacaaaacacttgggatggagtaatccttgttgcaccaatgtgtaaaatcgcagagggcatgttgccacctactgcacttttaagggtattaaatcttttgtctaaggtgatgccaaaggcaaaactgtttccacacaaagatctatctgcgctgactttccgagaacctggcaagagaaaagtggctggttacaatgttatttcttatgatcatccaacacgattgaaaactggcatggagcttttaagtgctactcaagaaatcgagtcacaattacacaaggtttctgctccattattgattctccatggagcagcagatcaggtgacagatccattagtgagccaatttctttatgagaaagcttctagtaaagataagacactaaagatctatgaaggaagttaccacggcattttggaaggggaacctgatgacagaatttttgctgtgcacaatgacatcatctcatggcttgattttaggtgctcacttaaatgaggttcatggtattgtattgttgacctcgccaagatatttttgatcttatagtgaacaaagaacacccttcacaaaagttacctcacaggaatggcacctctattgcctcttatcatggtagttacatgtacatgtcaatttagctttctacttttattataggctcatttatgagtttaatattactattcgcttattggattttcaaaccagatgtaatccattggctccctttattgtgaggtctgaccagtaataaagtttcattatcc

SEQ ID NO: 16457 - protein, 390 aa, Glycine max
SETIMEPSVTLRFRSHTLSLFPHAPISSIDHPHNHLLIPISPKFSSNTTLSVAATAKKKPSIEGVSEELNAMASQNLDFAPSRRRVRAAFTEVHQQLDHFLFKGYERNSRGLEIFCKSWMPESGVPLKAALCFCHGYGSTCTFFFEGIAKRIAASGYGVYAMDYPGFGLSEGLHGYIPNFDDLVDDVIEHFTKIKARPEVRGLPRFILGQSMGGAIALKVHLKEQNTWDGVILVAPMCKIAEGMLPPTALLRVLNLLSKVMPKAKLFPHKDLSALTFREPGKRKVAGYNVISYDHPTRLKTGMELLSATQEIESQLHKVSAPLLILHGAADQVTDPLVSQFLYEKASSKDKTLKIYEGSYHGILEGEPDDRIFAVHNDIISWLDFRCSLK

SEQ ID NO: 16458 - protein, 386 aa, Glycine max
MEPSVTLRFRSHTLSLFPHAPISSIDHPHNHLLIPISPKFSSNTTLSVAATAKKKPSIEGVSEELNAMASQNLDFAPSRRRVRAAFTEVHQQLDHFLFKGYERNSRGLEIFCKSWMPESGVPLKAALCFCHGYGSTCTFFFEGIAKRIAASGYGVYAMDYPGFGLSEGLHGYIPNFDDLVDDVIEHFTKIKARPEVRGLPRFILGQSMGGAIALKVHLKEQNTWDGVILVAPMCKIAEGMLPPTALLRVLNLLSKVMPKAKLFPHKDLSALTFREPGKRKVAGYNVISYDHPTRLKTGMELLSATQEIESQLHKVSAPLLILHGAADQVTDPLVSQFLYEKASSKDKTLKIYEGSYHGILEGEPDDRIFAVHNDIISWLDFRCSLK

SEQ ID NO: 16459 - protein, 319 aa, Glycine max
MASQNLDFAPSRRRVRAAFTEVHQQLDHFLFKGYERNSRGLEIFCKSWMPESGVPLKAALCFCHGYGSTCTFFFEGIAKRIAASGYGVYAMDYPGFGLSEGLHGYIPNFDDLVDDVIEHFTKIKARPEVRGLPRFILGQSMGGAIALKVHLKEQNTWDGVILVAPMCKIAEGMLPPTALLRVLNLLSKVMPKAKLFPHKDLSALTFREPGKRKVAGYNVISYDHPTRLKTGMELLSATQEIESQLHKVSAPLLILHGAADQVTDPLVSQFLYEKASSKDKTLKIYEGSYHGILEGEPDDRIFAVHNDIISWLDFRCSLK

SEQ ID NO: 16460 - DNA, 4461 bp, Glycine max
  misc_feature (4449)..(4449): n is a, c, g, or t
ctatggaccccccaagttttcctttcaaagcaattttgtgctttgctttgattgtattccttttccttccctacacttcaatttgtagcaagaggaatttgttgtttcctacttagcttgattatttatcaatggcttctttggtatcttcaccatttactcttccaagctctaaacctgaccagcttcattctcttgcccagaagcatctttatcttcattctttccttcccaagaaagccaattacaatggtagctcaaaatcctctctgagagtgaaatgtgctgtcattggcaatggcctattcacccaaaccacccaagaagttcgtagaatagttccagagaatgaccaaaacttgccaacagttaaaattgtgtatgtggtccttgaggctcagtaccaatcatccatcactgctgcagtgatagctctcaacagcaaaaggaagcatgcttcctttgaggttgtgggttacttggttgaggagcttcgtgacgcggcgacgtacaagaccttctgcaaggacttggaggatgctaacatcttcattggttccttgatttttgtggaggagctcgccctcaagatcaaggctgcagtggagaaagaaagggacaggcttgatgcagttttggtgttcccatcaatgcctgaagtgatgaggctcaacaagttgggttctttcagcatgtcacagcttgggcagtctaagagcccctttttccagctgttcaagagaaagaagcctcagtctgctggctttgctgatagcatgttgaagcttgtgaggacattgccaaaggttttgaagtatttgccaagtgataaagctcaggatgccaggctctacatactgagtctgcagttttggcttggggggtctcctgataacttgcagaatttcctgaaaatgatttctggatcgtatattccggcgctgaaagggacgaagatcgagtattcggagccggttttgtacttggatgtggggatttggcaccctttggctccttgtatgtatgatgatgtcaaggagtatttgaattggtatggaaccagaagggatgcaaatgagaagctgaagagtccgaatgcaccggtcattggtttggttttgcagaggagtcatattgtgactggtgatgatgggcactatgtggctgtgatcatggagctggaggctagaggggctaaggtcattcccatttttgccggcggacttgacttttcagggccagtggagaagttcttcattgatccgattacaaagaaaccgtttgtgaattctgtggtttccctcactggctttgctcttgttggaggccctgcaaggcaggaccatccaagggcggtcgaggctttgatgaaacttgatgttccttacattgttgccctgccactggtgttccagacaacagaagaatggctcaacagtactcttggtctgcatccaattcaggttgctcttcaagttgctctgccagagctagatggaggcatggagccaattgttttcgctggtcgagatcctaaaacaggaaaatctcatgctcttcataagagagtggaacagctctgcatcagggcaatcagatgggctgaattgaaaagaaaatcaaaggaagagaagaaactagcaatcactgtcttcagtttccctccagacaaaggaaacgtgggaactgctgcctatctcaatgtcttcgcctccatatactcagttatgaaagaactaaaaaaagatggttacaatgttgatggccttccggagacttcagaagctttgattgaagatgtacttcatgacaaagaagcccaattcagcagcccaaatctgaacattgcttacaaaatgaatgttcgcgagtaccaaaatttgactccctatgccacagcactggaggagaattggggaaaaccccctggcaatctgaatgcagatggagaaaatcttctggtatatgggaaacagtatggtaatgtcttcataggtgttcagcctacatttggctatgaaggggatccaatgaggctgcttttctccaaatctgcaagccctcatcatggatttgcagcatattattcctttgttgagaaaatcttcaaagctgatgctgtacttcattttgggacacatggttcccttgaattcatgcctgggaaacaggtggggatgagtgatgtatgttaccctgacagtctgattgggaatattccaaatgtatattactatgctgcaaacaacccttctgaggccaccattgccaagcgcaggagttatgcaaacaccattagctatctgactcctccagcggaaaatgctgggctatacaaaggtcttaagcagttaagtgagctcatctcctcatatcagtccctcaaagacaccggccgtggggcacaaattgtgagttcaattatcagcacagctaaacaatgcaatcttgacaaggatgtgactctgccagacgagggtgaggagatcccacctaaagagcgcgaccttgtggttggacaggtgtattccaagatcatggagatcgagtctcgtttgttaccttgtgggcttcatattattggtgagcctccctcagccttggaagcagttgctacactggtcaacattgctgcacttgatcgtcctgaagatggtatttcttctcttccatcaatattagctgacactgtaggaagagatatagaagatgtgtatagaggaagtaacaaaggaatattgaaggatgtagagcttcttagacaaataaccgaggcatcacgtggagcaatcactgcctttgtggagcgcactactaataataagggtcaagttgttgatgtagctgataagcttagttcaatccttggatttggcataaatgagccatggatacagtacttatcaaacaccaaattttaccgagctgatagggaaaaacttagaaccttgtttgtgttcctgggagaatgtttgaagttgattgtggctgataatgaagtgggaagtttaaaacaagccttggaaggtaaatatgtggagccagggcctggtggtgacccaataagaaatccaaaagtcttgccaacaggaaagaatattcatgccctggaccctcaatctattcctacaactgcagcgatgcagagtgccaaaatagtggtagataggttgattgagaggcagaaagctgagaatgggggaaaatatcctgagacaattgcacttgtattgtggggaactgataatattaaaacatatggtgaatccctggctcaagtcttgtggatgattggtgtggaaccagtggctgatacctttggcagggtaaaccgggtggaacctgtaagtcttgaagagcttggaaggcctaggattgatgttgttgttaattgctcaggagtgtttagagaccttttcatcaatcagatgaatcttctggatagagcagtgaagatggttgctgaattagatgaaccagcagagcaaaactatgtaaaaaagcatgcatcagaacaagctcaagcccttggagttgaagttcgagaggcagcaacaaggatcttctccaatgcttctggctcctactcctcaaacataaacttggctgtggagaattcttcatggaatgatgagaagcagctccaggacatgtatctaagcagaaagtcttttgcttttgattctgatgcccctggtgctggcatgactgagaaaagaaaagtcttcgagatggctctgagcacagcagatgccacattccaaaatcttgattcatcagaaatttccctcactgacgtcagtcattactttgactcagacccgactaatctggtacaaaatctaaggaaagatgggaagaagcctagtgcatacattgctgatacaaccacagccaatgctcaggtacgtacactttctgagacggttagacttgacgcaagaaccaagctgttgaatccaaagtggtatgaaggcatgttgtctactggatatgagggtgtacgcgagatcgagaagagactcaccaatacagtggggtggagtgcaacttcaggccaagttgataactgggtgtatgaagaagccaacacaactttcattcaagatgagcaaatgctgaacaagctcatgagcactaatccaaactccttcaggaaactggtgcagacattcttggaagccaatggacgtggttattgggaaacttcagaagataatattgagaagctcaggcagttgtattcagaagtggaagacaaaattgaaggcattgatcgctgaagttaatagctattattgaaaagagcacacaacagtgaagagaagagcatcctttaaatgtgatttttgttttccttttctcattttttgagatcaagtctcctttgtgcagttctgaactccaaccccggtgaacaaataaaggttcaagttcataattgatttnttagattatttt

SEQ ID NO: 16461 - protein, 1383 aa, Glycine max
MASLVSSPFTLPSSKPDQLHSLAQKHLYLHSFLPKKANYNGSSKSSLRVKCAVIGNGLFTQTTQEVRRIVPENDQNLPTVKIVYVVLEAQYQSSITAAVIALNSKRKHASFEVVGYLVEELRDAATYKTFCKDLEDANIFIGSLIFVEELALKIKAAVEKERDRLDAVLVFPSMPEVMRLNKLGSFSMSQLGQSKSPFFQLFKRKKPQSAGFADSMLKLVRTLPKVLKYLPSDKAQDARLYILSLQFWLGGSPDNLQNFLKMISGSYIPALKGTKIEYSEPVLYLDVGIWHPLAPCMYDDVKEYLNWYGTRRDANEKLKSPNAPVIGLVLQRSHIVTGDDGHYVAVIMELEARGAKVIPIFAGGLDFSGPVEKFFIDPITKKPFVNSVVSLTGFALVGGPARQDHPRAVEALMKLDVPYIVALPLVFQTTEEWLNSTLGLHPIQVALQVALPELDGGMEPIVFAGRDPKTGKSHALHKRVEQLCIRAIRWAELKRKSKEEKKLAITVFSFPPDKGNVGTAAYLNVFASIYSVMKELKKDGYNVDGLPETSEALIEDVLHDKEAQFSSPNLNIAYKMNVREYQNLTPYATALEENWGKPPGNLNADGENLLVYGKQYGNVFIGVQPTFGYEGDPMRLLFSKSASPHHGFAAYYSFVEKIFKADAVLHFGTHGSLEFMPGKQVGMSDVCYPDSLIGNIPNVYYYAANNPSEATIAKRRSYANTISYLTPPAENAGLYKGLKQLSELISSYQSLKDTGRGAQIVSSIISTAKQCNLDKDVTLPDEGEEIPPKERDLVVGQVYSKIMEIESRLLPCGLHIIGEPPSALEAVATLVNIAALDRPEDGISSLPSILADTVGRDIEDVYRGSNKGILKDVELLRQITEASRGAITAFVERTTNNKGQVVDVADKLSSILGFGINEPWIQYLSNTKFYRADREKLRTLFVFLGECLKLIVADNEVGSLKQALEGKYVEPGPGGDPIRNPKVLPTGKNIHALDPQSIPTTAAMQSAKIVVDRLIERQKAENGGKYPETIALVLWGTDNIKTYGESLAQVLWMIGVEPVADTFGRVNRVEPVSLEELGRPRIDVVVNCSGVFRDLFINQMNLLDRAVKMVAELDEPAEQNYVKKHASEQAQALGVEVREAATRIFSNASGSYSSNINLAVENSSWNDEKQLQDMYLSRKSFAFDSDAPGAGMTEKRKVFEMALSTADATFQNLDSSEISLTDVSHYFDSDPTNLVQNLRKDGKKPSAYIADTTTANAQVRTLSETVRLDARTKLLNPKWYEGMLSTGYEGVREIEKRLTNTVGWSATSGQVDNWVYEEANTTFIQDEQMLNKLMSTNPNSFRKLVQTFLEANGRGYWETSEDNIEKLRQLYSEVEDKIEGIDR

SEQ ID NO: 16462 - protein, 1210 aa, Glycine max
MPEVMRLNKLGSFSMSQLGQSKSPFFQLFKRKKPQSAGFADSMLKLVRTLPKVLKYLPSDKAQDARLYILSLQFWLGGSPDNLQNFLKMISGSYIPALKGTKIEYSEPVLYLDVGIWHPLAPCMYDDVKEYLNWYGTRRDANEKLKSPNAPVIGLVLQRSHIVTGDDGHYVAVIMELEARGAKVIPIFAGGLDFSGPVEKFFIDPITKKPFVNSVVSLTGFALVGGPARQDHPRAVEALMKLDVPYIVALPLVFQTTEEWLNSTLGLHPIQVALQVALPELDGGMEPIVFAGRDPKTGKSHALHKRVEQLCIRAIRWAELKRKSKEEKKLAITVFSFPPDKGNVGTAAYLNVFASIYSVMKELKKDGYNVDGLPETSEALIEDVLHDKEAQFSSPNLNIAYKMNVREYQNLTPYATALEENWGKPPGNLNADGENLLVYGKQYGNVFIGVQPTFGYEGDPMRLLFSKSASPHHGFAAYYSFVEKIFKADAVLHFGTHGSLEFMPGKQVGMSDVCYPDSLIGNIPNVYYYAANNPSEATIAKRRSYANTISYLTPPAENAGLYKGLKQLSELISSYQSLKDTGRGAQIVSSIISTAKQCNLDKDVTLPDEGEEIPPKERDLVVGQVYSKIMEIESRLLPCGLHIIGEPPSALEAVATLVNIAALDRPEDGISSLPSILADTVGRDIEDVYRGSNKGILKDVELLRQITEASRGAITAFVERTTNNKGQVVDVADKLSSILGFGINEPWIQYLSNTKFYRADREKLRTLFVFLGECLKLIVADNEVGSLKQALEGKYVEPGPGGDPIRNPKVLPTGKNIHALDPQSIPTTAAMQSAKIVVDRLIERQKAENGGKYPETIALVLWGTDNIKTYGESLAQVLWMIGVEPVADTFGRVNRVEPVSLEELGRPRIDVVVNCSGVFRDLFINQMNLLDRAVKMVAELDEPAEQNYVKKHASEQAQALGVEVREAATRIFSNASGSYSSNINLAVENSSWNDEKQLQDMYLSRKSFAFDSDAPGAGMTEKRKVFEMALSTADATFQNLDSSEISLTDVSHYFDSDPTNLVQNLRKDGKKPSAYIADTTTANAQVRTLSETVRLDARTKLLNPKWYEGMLSTGYEGVREIEKRLTNTVGWSATSGQVDNWVYEEANTTFIQDEQMLNKLMSTNPNSFRKLVQTFLEANGRGYWETSEDNIEKLRQLYSEVEDKIEGIDR

SEQ ID NO: 16463 - protein, 1206 aa, Glycine max
MRLNKLGSFSMSQLGQSKSPFFQLFKRKKPQSAGFADSMLKLVRTLPKVLKYLPSDKAQDARLYILSLQFWLGGSPDNLQNFLKMISGSYIPALKGTKIEYSEPVLYLDVGIWHPLAPCMYDDVKEYLNWYGTRRDANEKLKSPNAPVIGLVLQRSHIVTGDDGHYVAVIMELEARGAKVIPIFAGGLDFSGPVEKFFIDPITKKPFVNSVVSLTGFALVGGPARQDHPRAVEALMKLDVPYIVALPLVFQTTEEWLNSTLGLHPIQVALQVALPELDGGMEPIVFAGRDPKTGKSHALHKRVEQLCIRAIRWAELKRKSKEEKKLAITVFSFPPDKGNVGTAAYLNVFASIYSVMKELKKDGYNVDGLPETSEALIEDVLHDKEAQFSSPNLNIAYKMNVREYQNLTPYATALEENWGKPPGNLNADGENLLVYGKQYGNVFIGVQPTFGYEGDPMRLLFSKSASPHHGFAAYYSFVEKIFKADAVLHFGTHGSLEFMPGKQVGMSDVCYPDSLIGNIPNVYYYAANNPSEATIAKRRSYANTISYLTPPAENAGLYKGLKQLSELISSYQSLKDTGRGAQIVSSIISTAKQCNLDKDVTLPDEGEEIPPKERDLVVGQVYSKIMEIESRLLPCGLHIIGEPPSALEAVATLVNIAALDRPEDGISSLPSILADTVGRDIEDVYRGSNKGILKDVELLRQITEASRGAITAFVERTTNNKGQVVDVADKLSSILGFGINEPWIQYLSNTKFYRADREKLRTLFVFLGECLKLIVADNEVGSLKQALEGKYVEPGPGGDPIRNPKVLPTGKNIHALDPQSIPTTAAMQSAKIVVDRLIERQKAENGGKYPETIALVLWGTDNIKTYGESLAQVLWMIGVEPVADTFGRVNRVEPVSLEELGRPRIDVVVNCSGVFRDLFINQMNLLDRAVKMVAELDEPAEQNYVKKHASEQAQALGVEVREAATRIFSNASGSYSSNINLAVENSSWNDEKQLQDMYLSRKSFAFDSDAPGAGMTEKRKVFEMALSTADATFQNLDSSEISLTDVSHYFDSDPTNLVQNLRKDGKKPSAYIADTTTANAQVRTLSETVRLDARTKLLNPKWYEGMLSTGYEGVREIEKRLTNTVGWSATSGQVDNWVYEEANTTFIQDEQMLNKLMSTNPNSFRKLVQTFLEANGRGYWETSEDNIEKLRQLYSEVEDKIEGIDR

SEQ ID NO: 16464 - DNA, 752 bp, Glycine max
  misc_feature (516)..(516): n is a, c, g, or t
  misc_feature (578)..(578): n is a, c, g, or t
  misc_feature (729)..(729): n is a, c, g, or t
cgaaaaatcttaaggtaaaggtaacgttctctctctgtttttcaatcactcatataaataccaaatccactaatgacagtcaccgcttccttacacgcgtctttctcgtctccgattcatcgccaaaccccaacctttcctatctcctcattcaatcccctcccatttctctctcacccccaaaaccaagaaagcgaatcgattccgattcctctcaatggctgcggaacccaaggaatcgccttccaacaaccccggtctccatacaactcctgacgaagccaccaagggttacatcatgcaacaaactatgtttagaatcaaagaccccaaagtgagcctcgatttttattctcgagtcttgggcatgtctttgcttaagagattggattttccggagatgaagttcagcctgtacttcatgggctatgagaatacggcagaagctccaagtaatccaattgataaagtggtttgtctggcagtgctgttagagagagaatcattcgagctttnttggttgaagagcaaaagattgtgaaaaaggtattgaagatccaaaagacaaaggaaaagcnagctttgaagggctgagttttgagaaaagtgataaagatctttttggagggattttaggtttgggtgattaatgattatagtaatgcatgaaatttgttagagctgtttctgtgttaattttgtgcttatttggctttttaaaactcattntagtgcaactgttaactttgttg

SEQ ID NO: 16465 - protein, 111 aa, Glycine max
KNLKVKVTFSLCFSITHINTKSTNDSHRFLTRVFLVSDSSPNPNLSYLLIQSPPISLSPPKPRKRIDSDSSQWLRNPRNRLPTTPVSIQLLTKPPRVTSCNKLCLESKTPK

SEQ ID NO: 16466 - protein, 107 aa, Glycine max
  misc_feature (100)..(100): Xaa can be any naturally occurring amino acid
MAAEPKESPSNNPGLHTTPDEATKGYIMQQTMFRIKDPKVSLDFYSRVLGMSLLKRLDFPEMKFSLYFMGYENTAEAPSNPIDKVVCLAVLLERESFELXWLKSKRL

SEQ ID NO: 16467 - protein, 80 aa, Glycine max
  misc_feature (73)..(73): Xaa can be any naturally occurring amino acid
MQQTMFRIKDPKVSLDFYSRVLGMSLLKRLDFPEMKFSLYFMGYENTAEAPSNPIDKVVCLAVLLERESFELXWLKSKRL

SEQ ID NO: 16468 - DNA, 942 bp, Glycine max
  misc_feature (667)..(667): n is a, c, g, or t
  misc_feature (821)..(821): n is a, c, g, or t
acggacacacactactcacagcacaaaccataacagaaagaaacaaacaatgagaacccaacgtcttaaccatctccttctctccctcttcctcttcgcagccgcattctccagccttcacccgacggccaccgccggagacgaaggcgcaccctccccaggcgacggcgacggcgacgccgatttcatacgcactagctgcaacaccacgctctacccggacgtgtgcttcacctccctctctcgctacgccagtgcggtgcaacagaaccccggccagctggcgcgcgttgccatctccgtgagcctctccaaggtccaccgcgccggcaactggtgtgaacgattttcaagctgtagtgtttgagattgtaatcacatttgggttggtttacactgtgtatgcaactgcagcagacccaaagaaggggtcattgggtatcattgcacccattgctattgggttcgttgtgggtgccaacatcttagcagcaggcccattcagtggcggttcaatgaacccagctcgctcattcggcccagctgtggtcagtggagacttcgctgctaactggatctattgggttggcccattgattggaggaggtttggctggcttgatttatggagacgtcttcattggttcatatgcggctgtcccagcctntgaaacctacccttgagcttcaacttgaaaaatatgacttcttgttctattcacttgtgtgtcctgtcccttcaagtttcatctttgttccccgtttgatgtctcgagcttcatggctttttgcatttttaactgtacctttatctattattcnccgcttgtaataattatgtaaattataattcgaacttgatgcatggattgttggaaggtccccttgtttttcggttttcgtcctaccaataatgacatcgagctagtggtttttacggatc

SEQ ID NO: 16469 - protein, 121 aa, Glycine max
RTHTTHSTNHNRKKQTMRTQRLNHLLLSLFLFAAAFSSLHPTATAGDEGAPSPGDGDGDADFIRTSCNTTLYPDVCFTSLSRYASAVQQNPGQLARVAISVSLSKVHRAGNWCERFSSCSV

SEQ ID NO: 16470 - protein, 105 aa, Glycine max
MRTQRLNHLLLSLFLFAAAFSSLHPTATAGDEGAPSPGDGDGDADFIRTSCNTTLYPDVCFTSLSRYASAVQQNPGQLARVAISVSLSKVHRAGNWCERFSSCSV

SEQ ID NO: 16471 - protein, 68 aa, Glycine max
  misc_feature (15)..(15): Xaa can be any naturally occurring amino acid
  misc_feature (66)..(66): Xaa can be any naturally occurring amino acid
METSSLVHMRLSQPXKPTLELQLEKYDFLFYSLVCPVPSSFIFVPRLMSRASWLFAFLTVPLSIIXRL

SEQ ID NO: 16472 - DNA, 802 bp, Glycine max
  misc_feature (86)..(86): n is a, c, g, or t
ccccacacccagtctaccactctccaccacccccacctaagaagccctacaagtacccatctcctccacctccagtgaagaaaccntacccacacccacacccagtctaccactctccaccacccccacctaagaagccctacaagtaccatctcctcctcctccagtgaagaaaccctaccctcacccacacccagtgtaccactccccaccaccaacacctaagaagccctacaaatacccatcacctccgccaccagttcacacctaccctccccatgttcccaccccagtctaccactctcctccaccaccaccatacaagaagccttataagtacaagtctcctcctcccccagtccactctccacctccaccacactactactacaaatcaccccctccaccctaccactactagaatatagccctttcatatcacacccccacatggatgtatacagaaagtgtgaaaatgaaagccatggagggggaaggtgcagttgcagtttgcaaatccacaaagaagtataaatgtttgattattgttattgtttagaggactctgtctagttaaaatagttattgtgcttttgttttatcagacagttgtaaggcactgtgttctacatgtgtttgcagttgtctgcatgcattgttattttcaaagtccgctttatcaagctgacaagtcaaataaattattccctctctcctagtagtgggggaatagatttgttcctgtatctgatcgaggtttttataatcgtcataatataataacaatttacgttcatttgcc

SEQ ID NO: 16473 - protein, 55 aa, Glycine max
  misc_feature (28)..(28): Xaa can be any naturally occurring amino acid
PHPVYHSPPPPPKKPYKYPSPPPPVKKXYPHPHPVYHSPPPPPKKPYKYHLLLLQ

SEQ ID NO: 16474 - protein, 49 aa, Glycine max
MFPPQSTTLLHHHHTRSLISTSLLLPQSTLHLHHTTTTNHPLHPTTTRI

SEQ ID NO: 16475 - protein, 49 aa, Glycine max
MCLQLSACIVIFKVRFIKLTSQINYSLSPSSGGIDLFLYLIEVFIIVII

SEQ ID NO: 16476 - DNA, 1258 bp, Glycine max
cttgtctttcaaaaaggaaaacaaaaggatgagaagcctttgcgcataatcttcagagtgtcactttcattctgttttatctatcttgatgtaaagtctttgaaagtctggcacgtgatgttattatataactcaacttgagttctccactacctcccgatttgtgtttccttcctctcattttttttattttcttcttgtacctgtattttaccatcatgttatatgatgatttctccactttcaaacccccctcttttgctgcatcagaggagttgtaaattaagagcatggctgcacaagctcttgtatcatcatcttctcttaccttctcagcggaggctgcaagacaaagtcttggaccaagatcactccaatctccatttggcttctccagaaaagcctcctttcttgttaaggcagctgctaccccccctgtcaagcaaggatcagacaggcctttgtggtttgcatcaaagcaaagtctttcttacttggatggcagccttccgggtgactatggatttgaccctctgggactttcagaccctgaaggaacaggagggttcattgagccgaaatggctagcatatggtgagataatcaatggtcgttatgcaatgttgggtgcagttggtgcaatagcacctgaaattctaggcaaggctggtctgatccctcaggagacagcactcccatggttcagaacgggtgtgttcccacctgcaggaacctacaactactgggcagactcctacacactgttcgtgtttgagatggcactgatgggatttgcagagcacagaagattccaagactgggccaaaccaggctctatgggcaaacaatacttcctaggactagagaaggggcttggaggttctggtgagccagcttatccaggaggacctttcttcaacccactaggctttggtaaggatgagaagtccttgaaggatttgaagctcaaggaagtgaagaatggaaggttggctatgttggcaatcttgggttactttgttcaagctcttgtcacaggtgttggcccataccaaaacctcctagatcatttggctgaccccgtgcacaacaacatcttgaccagtctcaagttccactgaatgtattatatgttattttacatattctttacgttgccaaaactcaactacctttctacctttctatatcatgtggacattttgttccttgatgtggcgctgtaagaaatgacatgtaaaacaactagaaacattcg

SEQ ID NO: 16477 - protein, 276 aa, Glycine max
MAAQALVSSSSLTFSAEAARQSLGPRSLQSPFGFSRKASFLVKAAATPPVKQGSDRPLWFASKQSLSYLDGSLPGDYGFDPLGLSDPEGTGGFIEPKWLAYGEIINGRYAMLGAVGAIAPEILGKAGLIPQETALPWFRTGVFPPAGTYNYWADSYTLFVFEMALMGFAEHRRFQDWAKPGSMGKQYFLGLEKGLGGSGEPAYPGGPFFNPLGFGKDEKSLKDLKLKEVKNGRLAMLAILGYFVQALVTGVGPYQNLLDHLADPVHNNILTSLKFH

SEQ ID NO: 16478 - protein, 166 aa, Glycine max
MLGAVGAIAPEILGKAGLIPQETALPWFRTGVFPPAGTYNYWADSYTLFVFEMALMGFAEHRRFQDWAKPGSMGKQYFLGLEKGLGGSGEPAYPGGPFFNPLGFGKDEKSLKDLKLKEVKNGRLAMLAILGYFVQALVTGVGPYQNLLDHLADPVHNNILTSLKFH

SEQ ID NO: 16479 - DNA, 1517 bp, Glycine max
aactagcgagaacaactcagctcaactttgaatgataattttaagtgtctcctacagaaaatgattaaaacaagaaggatggtccaaaagtatctaataggccatctcgatctcatctgaccaagcttcctggttaattcctttgaattgaataatataaaaaaaagaagatgatggatgtgggtagagctcagtataacccacctacctccaattgctgacttttcaaaggccaaacatgaagaaatgttgcagtataaaaaggggtgcccttcagttatgtccatcaacaaatattggaatactacactatacttgtcaaccctttgagagttagaatggctgctgctattgaaatccccacaatagtgtttccaaactcctctgcccaacagaggatgccagtggttggaatgggatctgcccctgacttcacatgcaagaaagacacaaaggaggctatcattgaggccgtgaaacagggttacagacacttcgacactgctgctgcttatggctctgaacaggctctcggtgaagctctcaaggaagctatccatcttggcctcgtctcccgccaagacctctttgtcacttccaagctttgggtcaccgaaaatcatcctcatcttgtccttcctgctttgcgcaaatcacttaaaactcttcaactagagtacttggacctgtatctcatccactggcccctgagttctcagccagggaagttctcatttccaattgaagtagaagatctcttgccttttgacgtgaagggtgtgtgggaatccatggaagagtgccagaaacttggcctcaccaaagccattggagtcagcaacttctctgtcaagaagcttcagaatctgctctctgttgctaccatccgtcccgtggtcgatcaagtggagatgaaccttgcatggcaacagaagaagctaagagagttctgcaaagaaaatgggataatagtgactgcgttctctccactgaggaaaggtgcgagcaggggcccaaatgaagtgatggagaatgatgtgctgaaggagattgcagaggctcatgggaaatccatagcccaggtgagtctgagatggttgtacgaacaaggtgtgacatttgtgccaaagagctacgataaggagaggatgaaccagaatctgcacatctttgactgggcattgactgaacaagatcatcacaaaataagtcaaatcagccagagccgtttgatcagcggacccaccaaaccacaactcgctgatctctgggatgatcaaatataaactatttactactatgcagctcccactctatttttataatccatctttttacctcttgtttcattttacgtttaaataattcatgccatgccacttcttattttagatttcacaatcaataaactaggcacgcgcggcacatgatatgaataaactatgttcaatttttttttcttctcttagtccttctatttattaaaagaaaaaaaaatcttgattaattgaaattcg

SEQ ID NO: 16480 - protein, 315 aa, Glycine max
MAAAIEIPTIVFPNSSAQQRMPVVGMGSAPDFTCKKDTKEAIIEAVKQGYRHFDTAAAYGSEQALGEALKEAIHLGLVSRQDLFVTSKLWVTENHPHLVLPALRKSLKTLQLEYLDLYLIHWPLSSQPGKFSFPIEVEDLLPFDVKGVWESMEECQKLGLTKAIGVSNFSVKKLQNLLSVATIRPVVDQVEMNLAWQQKKLREFCKENGIIVTAFSPLRKGASRGPNEVMENDVLKEIAEAHGKSIAQVSLRWLYEQGVTFVPKSYDKERMNQNLHIFDWALTEQDHHKISQISQSRLISGPTKPQLADLWDDQI

SEQ ID NO: 16481 - protein, 295 aa, Glycine max
MPVVGMGSAPDFTCKKDTKEAIIEAVKQGYRHFDTAAAYGSEQALGEALKEAIHLGLVSRQDLFVTSKLWVTENHPHLVLPALRKSLKTLQLEYLDLYLIHWPLSSQPGKFSFPIEVEDLLPFDVKGVWESMEECQKLGLTKAIGVSNFSVKKLQNLLSVATIRPVVDQVEMNLAWQQKKLREFCKENGIIVTAFSPLRKGASRGPNEVMENDVLKEIAEAHGKSIAQVSLRWLYEQGVTFVPKSYDKERMNQNLHIFDWALTEQDHHKISQISQSRLISGPTKPQLADLWDDQI

SEQ ID NO: 16482 - protein, 290 aa, Glycine max
MGSAPDFTCKKDTKEAIIEAVKQGYRHFDTAAAYGSEQALGEALKEAIHLGLVSRQDLFVTSKLWVTENHPHLVLPALRKSLKTLQLEYLDLYLIHWPLSSQPGKFSFPIEVEDLLPFDVKGVWESMEECQKLGLTKAIGVSNFSVKKLQNLLSVATIRPVVDQVEMNLAWQQKKLREFCKENGIIVTAFSPLRKGASRGPNEVMENDVLKEIAEAHGKSIAQVSLRWLYEQGVTFVPKSYDKERMNQNLHIFDWALTEQDHHKISQISQSRLISGPTKPQLADLWDDQI

SEQ ID NO: 16483 - DNA, 403 bp, Glycine max
gtattatacgtccccttgtcctgcccctgcccctataccatagaacattagtacccccacacacacccctcctctatctttcactattattgccacacaaatcaattaactgaatgcttagagagagaaagaggagaaggagtagtgataaggtgatcatagagcatattataagagagtgaaaactaatggaggttggcctcaagaaggagaacatggggtttgaggaaactgagttaaggcttggactgcctggaaacggaggcactgaagaagtgctcatcaggaagaggggtttccttttttaatttcaatttctgtaatattgtaagacgctttaagcctgtgctatggatattgtttcgagcaagcccgtgaatgtggtaatgtgattgatttggtg

SEQ ID NO: 16484 - protein, 39 aa, Glycine max
MEVGLKKENMGFEETELRLGLPGNGGTEEVLIRKRGFLF

SEQ ID NO: 16485 - protein, 36 aa, Glycine max
IIRPLVLPLPLYHRTLVPPHTPLLYLSLLLPHKSIN

SEQ ID NO: 16486 - protein, 30 aa, Glycine max
MGFEETELRLGLPGNGGTEEVLIRKRGFLF

SEQ ID NO: 16487 - DNA, 2836 bp, Glycine max
gggtttccaccctctctctccatgcatttttgctctcacgagttcttctttgccgttgccctcttattctttgctgtatttggagccttcttttgtgtggaacagagcagatttcacctccctgggttttttgaaccgtgcccatgtctaaagttttcagctttaccggaaatgatgatttctaccatgggggcccctatttatcctaacccgaaggaacatgtctcttcttgtctcttggccgtcaagttgatgtttaccttcctcttcagaagaggtctcgcttcagtgttccatttgatatcagcggagaatggtttgagcagaagcagaagccaaaggacatctattgaatctttgccagatgaatgcctctttgagatccttagaaggctgcctgcaggccaagataggagtgtctgtgcttctgtatccaagcgctggcttatgcttctgagcagtatttgcaagactgaaatccacagctacggaagtactggaaatgaaaaccaggaaattagtgacgaaggatacctatcccgaagcttggagggaaagaaggcaacagatgttagacttgctgccattgccgttgggacagcctctcgaggagggttggggaagcttacaattcgtggatgcaattcagatcgtggggtgactaatgtaggtctcaaggcaattgctcatgggtgtccttctctaaaggtttgctctctatgggatgtcgctactgttggtgatgtaggcctgattgagattgctagtgggtgccatcagttagagaagcttgacctatgcaagtgtcctaatatttctgacaagactttaatagcagttgcgaagaactgtccgaatctggctgagttatccatagagtcatgtcccaacattggtaatgaaggtctacaagctattgggaagtgtcccaatctgaggtcaatctcaatcaagaattgctccggggttggtgatcagggagttgctggcctcttgtcttcagcttcttttgctctaacaaaggtgaagcttgagtcactgactgtttctgatctctctctagcagtgattgggcattatggtgttgcagttaccgatcttgtcctaatttgcctcccaaatgtcagcgagaaagggttctgggttatgggtaatgcccacggactgcagaaactaacttcaatcacaatcaattgctgccaaggagtgacagatgttgggcttgaacctattggaaggggttgtccaaatgtgcaaaacttgaagcttcgtaagagtgcttttctgtcagacaagggattagtatcatttgccagggctgctccatcagttgagagcctgcaattggccaagagtgcccacagaattacccaaattgggctctttggtgtcttttttaactgtggtgcaaaattgaaggttcttactctgattagctgctatgggatcaaagatctcaatatggatttgccagcaatatctccttctgaatcaatttggtcattaacaatccatgactgccctggatttggcaatgctaaccttgccttacttggaaagctgtgtcctcggcttcagcatgttgaattgagtggacttcagggagtaacagatgcagggtttcttccattgctggagagctctgaggctggtctggttaaagttaatctaaatggctgtgtaaatctttcagacagagtagttttgtccatggtcaactcacatggatggactctcgaggtgctaagccttgatggttgtaaaagagttggtgatgctagcttgatggcaattgcaggcagttgcccattgcttgctgatctcgatgtttccaggtgtgcaatcactgatacaggtatcgcagcccttgcacgcggaaagcagattaaccttgaggtactttctttggcaggttgtgccattggtttcagacaagagcgtgcctgccttgaaaaaaatgggctgttcccttgctggattaaatatcaagcgttgcaaaggaatcagcagccgctctgtcaacaagcttcaggaacatctctggcatgtgtgacatcctctactgaacaggaaatgcctcagcagcttttatagttagtgttgctcgttagtgtttttgggttcattcacgatggatcttggtcgtctaaggtagtcggttctctttttccagaggataacagttatatttaaacctcttttttgcaggtttccattaattggaaatctgttacaaattttttggcactcccgttggatgagatgcccacttttaaaaatatggctgtttttatctctgcgagcataagttaccgagttctggagttaggtatctttttttcctagtgttggcacctgattgtttttagctctgctttgtatcggttttggccaccatgtgtttccttgtcctcgtttctttgcagcagtacatttatcgagtctgtccagtggtgtttacccaatttttcacgtatttgagcttatgttctttacgtgatttttgggtcttaagttttagtcaaggggcatgttgaagttccagtttatgtggtgttgtcttggtttactttggcagttcttcagagttatgaagcctttgtcctcaggggcgttggtcatggcagcaagttatcctggtctgtcatcacaatcttttcccgttgggatgggttgttttatactaccaaagcccaagctttttaagcttcattttttttttgtgaactagtcatggtaaccttgtatatcatgtaatgatactgagatatgccctttgtactgttatgtttattttatgaaaaaataataaataaaaaattgtagtcccctgtcc

SEQ ID NO: 16488 - protein, 697 aa, Glycine max
GFPPSLSMHFCSHEFFFAVALLFFAVFGAFFCVEQSRFHLPGFFEPCPCLKFSALPEMMISTMGAPIYPNPKEHVSSCLLAVKLMFTFLFRRGLASVFHLISAENGLSRSRSQRTSIESLPDECLFEILRRLPAGQDRSVCASVSKRWLMLLSSICKTEIHSYGSTGNENQEISDEGYLSRSLEGKKATDVRLAAIAVGTASRGGLGKLTIRGCNSDRGVTNVGLKAIAHGCPSLKVCSLWDVATVGDVGLIEIASGCHQLEKLDLCKCPNISDKTLIAVAKNCPNLAELSIESCPNIGNEGLQAIGKCPNLRSISIKNCSGVGDQGVAGLLSSASFALTKVKLESLTVSDLSLAVIGHYGVAVTDLVLICLPNVSEKGFWVMGNAHGLQKLTSITINCCQGVTDVGLEPIGRGCPNVQNLKLRKSAFLSDKGLVSFARAAPSVESLQLAKSAHRITQIGLFGVFFNCGAKLKVLTLISCYGIKDLNMDLPAISPSESIWSLTIHDCPGFGNANLALLGKLCPRLQHVELSGLQGVTDAGFLPLLESSEAGLVKVNLNGCVNLSDRVVLSMVNSHGWTLEVLSLDGCKRVGDASLMAIAGSCPLLADLDVSRCAITDTGIAALARGKQINLEVLSLAGCAIGFRQERACLEKNGLFPCWIKYQALQRNQQPLCQQASGTSLACVTSSTEQEMPQQLL

SEQ ID NO: 16489 - protein, 690 aa, Glycine max
MHFCSHEFFFAVALLFFAVFGAFFCVEQSRFHLPGFFEPCPCLKFSALPEMMISTMGAPIYPNPKEHVSSCLLAVKLMFTFLFRRGLASVFHLISAENGLSRSRSQRTSIESLPDECLFEILRRLPAGQDRSVCASVSKRWLMLLSSICKTEIHSYGSTGNENQEISDEGYLSRSLEGKKATDVRLAAIAVGTASRGGLGKLTIRGCNSDRGVTNVGLKAIAHGCPSLKVCSLWDVATVGDVGLIEIASGCHQLEKLDLCKCPNISDKTLIAVAKNCPNLAELSIESCPNIGNEGLQAIGKCPNLRSISIKNCSGVGDQGVAGLLSSASFALTKVKLESLTVSDLSLAVIGHYGVAVTDLVLICLPNVSEKGFWVMGNAHGLQKLTSITINCCQGVTDVGLEPIGRGCPNVQNLKLRKSAFLSDKGLVSFARAAPSVESLQLAKSAHRITQIGLFGVFFNCGAKLKVLTLISCYGIKDLNMDLPAISPSESIWSLTIHDCPGFGNANLALLGKLCPRLQHVELSGLQGVTDAGFLPLLESSEAGLVKVNLNGCVNLSDRVVLSMVNSHGWTLEVLSLDGCKRVGDASLMAIAGSCPLLADLDVSRCAITDTGIAALARGKQINLEVLSLAGCAIGFRQERACLEKNGLFPCWIKYQALQRNQQPLCQQASGTSLACVTSSTEQEMPQQLL

SEQ ID NO: 16490 - protein, 640 aa, Glycine max
MMISTMGAPIYPNPKEHVSSCLLAVKLMFTFLFRRGLASVFHLISAENGLSRSRSQRTSIESLPDECLFEILRRLPAGQDRSVCASVSKRWLMLLSSICKTEIHSYGSTGNENQEISDEGYLSRSLEGKKATDVRLAAIAVGTASRGGLGKLTIRGCNSDRGVTNVGLKAIAHGCPSLKVCSLWDVATVGDVGLIEIASGCHQLEKLDLCKCPNISDKTLIAVAKNCPNLAELSIESCPNIGNEGLQAIGKCPNLRSISIKNCSGVGDQGVAGLLSSASFALTKVKLESLTVSDLSLAVIGHYGVAVTDLVLICLPNVSEKGFWVMGNAHGLQKLTSITINCCQGVTDVGLEPIGRGCPNVQNLKLRKSAFLSDKGLVSFARAAPSVESLQLAKSAHRITQIGLFGVFFNCGAKLKVLTLISCYGIKDLNMDLPAISPSESIWSLTIHDCPGFGNANLALLGKLCPRLQHVELSGLQGVTDAGFLPLLESSEAGLVKVNLNGCVNLSDRVVLSMVNSHGWTLEVLSLDGCKRVGDASLMAIAGSCPLLADLDVSRCAITDTGIAALARGKQINLEVLSLAGCAIGFRQERACLEKNGLFPCWIKYQALQRNQQPLCQQASGTSLACVTSSTEQEMPQQLL

SEQ ID NO: 16491 - DNA, 839 bp, Glycine max
  misc_feature (648)..(648): n is a, c, g, or t
  misc_feature (791)..(791): n is a, c, g, or t
  misc_feature (793)..(793): n is a, c, g, or t
ccctgtcacaaacacagattcgcttcgaaactgaacgctgcagcagaaaatgttcaaaaaattttcaggtgaagatgtatctgcacagaaccaagtgaaggcatctgttcaacgaaaaatacggcaaagtattgctgaagagtatccgggtcttgaacctgtgttggatgatatacttcccaagaagtcccctctaatagttgctaaatgtcagaaccatctcaatctggttcttgtgaacaacgtgccactgtttttcagtgtccgtgatggaccatacatgcccaccttgcgacttctccatctatatccaaatataatgaaaaagttacaagttgaccgtggtgcaattagatttgtcttggcgggtgcaaacataatgtgtcctggtcttacatctcctgggggtgttttggatgaggaagtaggggcagaatgtcctgtggccatcatggctgaaggaaaacagcatgctcttgctattggctttacaaaaatgtcagcaaaagacataaaagcaatcaataagggcattggggttgacaacttgcattatctcaatgatggtctttggaagatggagaagcttgattaaagatgtcgtggaagcttcagtgcttactaatgattgatgaattcctgtgtttntggaccttgatccagatcttaggaatcgtatgtgaacttgtggatttgttttgttataccatgtaaacagtgaagaaatgaattttgttgcatagagtgctctcttttagtaactatgtagatttcatgtaacatggaatacncnctctgcgtgttgacaaatacgaagttttgcttatttttggactccg

SEQ ID NO: 16492 - protein, 181 aa, Glycine max
MFKKFSGEDVSAQNQVKASVQRKIRQSIAEEYPGLEPVLDDILPKKSPLIVAKCQNHLNLVLVNNVPLFFSVRDGPYMPTLRLLHLYPNIMKKLQVDRGAIRFVLAGANIMCPGLTSPGGVLDEEVGAECPVAIMAEGKQHALAIGFTKMSAKDIKAINKGIGVDNLHYLNDGLWKMEKLD

SEQ ID NO: 16493 - protein, 104 aa, Glycine max
MPTLRLLHLYPNIMKKLQVDRGAIRFVLAGANIMCPGLTSPGGVLDEEVGAECPVAIMAEGKQHALAIGFTKMSAKDIKAINKGIGVDNLHYLNDGLWKMEKLD

SEQ ID NO: 16494 - protein, 91 aa, Glycine max
MKKLQVDRGAIRFVLAGANIMCPGLTSPGGVLDEEVGAECPVAIMAEGKQHALAIGFTKMSAKDIKAINKGIGVDNLHYLNDGLWKMEKLD

SEQ ID NO: 16495 - DNA, 1351 bp, Glycine max
  misc_feature (897)..(897): n is a, c, g, or t
tttgtaccatgctaacagtgctgactgtatatgcctttctatatgggaaagcatatttggcactgtctggtgttggtgaaatccttgaagaaagggccaggataaataagaacactgcactgagtgctgctttgaatacacaatttctctttcaaattggtatcttcactgctgtgccaatgatcttgggcttcattcttgagcaaggtttcttgaaggccattgtcagttttgtcacaatgcaattccagctttgcactgtctttttcacattttccttgggtacaagaacacattattttggtcggacaattcttcatggtggtgcaaggtatcaagcaactggccgcgggtttgttgttcgccatatcaaattttcagagaactacagactctactctcgtagtcattttgttaaagggttggaggttgcgcttttgttgatagtatatcttgcttatggctataatgaaggtggtgcactctcatatattcttttgagtataagcagttggtttatggctctatcctggttgtttgctccatatttattcaacccatctggatttgagtggcaaaaggtggtggaagatttcagagattggacaaattggctactctaccgaggtggaattggtgttaagggagaagaaagctgggaagcttggtgggaagaagaactggctcatatcaggagcttgggttcaaggatagcagaaaccattctgagtcttagatttttcatctttcaatatggtatcgtgtacaagcttaatgtgaaaggaacaagtacttcactgacggtttatggtctctcatgggtagttctggctgtgcttataattcttttcaaggtattcacctttagccagaagatatcggtcaatttccagcttnttttgcgctttatacaaggaatctcccttttagttgcactggctggtttagttgtagcagttatattgactgaactgtctttaccggacatatttgcttctatgttggctttcattcctactggttggggaattctgtcaattgctgctgcctggaagccggtgatgaagaggtttggactatggaaatctgttagatcaattgctcggctctatgatgctggtatgggaatgctcatctttgtacccattgccttcttttcgtggttcccatttgtatcaacattccaaactcgcctaatgtttaaccaggcttttagccgagggttagaaatttctctaattctagctgggaacaatcacaatactgggatatagttgtatttggttcatgccttgttcctaaacgtgatacgatctatggtgtctattaaattttgtggggttgagtcggt

SEQ ID NO: 16496 - protein, 423 aa, Glycine max
  misc_feature (299)..(299): Xaa can be any naturally occurring amino acid
CTMLTVLTVYAFLYGKAYLALSGVGEILEERARINKNTALSAALNTQFLFQIGIFTAVPMILGFILEQGFLKAIVSFVTMQFQLCTVFFTFSLGTRTHYFGRTILHGGARYQATGRGFVVRHIKFSENYRLYSRSHFVKGLEVALLLIVYLAYGYNEGGALSYILLSISSWFMALSWLFAPYLFNPSGFEWQKVVEDFRDWTNWLLYRGGIGVKGEESWEAWWEEELAHIRSLGSRIAETILSLRFFIFQYGIVYKLNVKGTSTSLTVYGLSWVVLAVLIILFKVFTFSQKISVNFQLXLRFIQGISLLVALAGLVVAVILTELSLPDIFASMLAFIPTGWGILSIAAAWKPVMKRFGLWKSVRSIARLYDAGMGMLIFVPIAFFSWFPFVSTFQTRLMFNQAFSRGLEISLILAGNNHNTGI

SEQ ID NO: 16497 - protein, 421 aa, Glycine max
  misc_feature (297)..(297): Xaa can be any naturally occurring amino acid
MLTVLTVYAFLYGKAYLALSGVGEILEERARINKNTALSAALNTQFLFQIGIFTAVPMILGFILEQGFLKAIVSFVTMQFQLCTVFFTFSLGTRTHYFGRTILHGGARYQATGRGFVVRHIKFSENYRLYSRSHFVKGLEVALLLIVYLAYGYNEGGALSYILLSISSWFMALSWLFAPYLFNPSGFEWQKVVEDFRDWTNWLLYRGGIGVKGEESWEAWWEEELAHIRSLGSRIAETILSLRFFIFQYGIVYKLNVKGTSTSLTVYGLSWVVLAVLIILFKVFTFSQKISVNFQLXLRFIQGISLLVALAGLVVAVILTELSLPDIFASMLAFIPTGWGILSIAAAWKPVMKRFGLWKSVRSIARLYDAGMGMLIFVPIAFFSWFPFVSTFQTRLMFNQAFSRGLEISLILAGNNHNTGI

SEQ ID NO: 16498 - protein, 364 aa, Glycine max
  misc_feature (240)..(240): Xaa can be any naturally occurring amino acid
MILGFILEQGFLKAIVSFVTMQFQLCTVFFTFSLGTRTHYFGRTILHGGARYQATGRGFVVRHIKFSENYRLYSRSHFVKGLEVALLLIVYLAYGYNEGGALSYILLSISSWFMALSWLFAPYLFNPSGFEWQKVVEDFRDWTNWLLYRGGIGVKGEESWEAWWEEELAHIRSLGSRIAETILSLRFFIFQYGIVYKLNVKGTSTSLTVYGLSWVVLAVLIILFKVFTFSQKISVNFQLXLRFIQGISLLVALAGLVVAVILTELSLPDIFASMLAFIPTGWGILSIAAAWKPVMKRFGLWKSVRSIARLYDAGMGMLIFVPIAFFSWFPFVSTFQTRLMFNQAFSRGLEISLILAGNNHNTGI

SEQ ID NO: 16499 - DNA, 1417 bp, Glycine max
cagttttcaatttctgagtttatggattccctttctccgtatgcatgtttcagctttgattactgagtctaacttaccctgccacagtttgccttgtttacctgagctctgtttttaactggtctttgatcaaggatggccataaaggcaattgagttgttgaaaggaagcggaaaccatgaagagatatttgaagttcttgcagcagtggctgcatctttgggggatgtaatagatgatgtgaacactttgcaggtaacacctttaaagggggcaatgaccaatgaggtttttgaggtaaattggccaaccaaaagtgatggtcatcaaagaagggttcttgttcgattatatggtgaaggtgttgaggttttcttcaacagggtggatgaaatccaaacctttgagtgcatgtcaaagcatggacagggtccacgccttcttgggaggttcaccactggcagagttgaggagttcattcatgccaaaacactctcagctgcggacctccgtgaccctgaaatatctgctttgatagcatctaagatgagggagtttcacaatcttcatatgcctggtgcaaagaaggctcagctttggcagagaatgaggaagtggcttagtcatgccaaaagtttgtgctcccctaaagaaaccaagaattttggcctggacaatctagatgctgaaataaatatgcttgtggagttgttatctcaaggaaatcaacagattggtttttgtcacaatgatctacaatatggtaacataatgatggatgaagatacaagagcaatcactttaattgactatgaatatgccagttacaatcctattggatatgatctggcaaatcatttctgtgaaatggtggcaaattaccatagtgacgaacctcatgttcttgactacagtaaatatcctggtctggaggagcgtcaaaggtttgtttataattatttgagttctgagggtaagaaaccaagcaatagtgaagtggatcagctagtgaatcttgcagaaaaatacactcttgcaaaccatctattttggggcttgtggggacttatttcgagtcatgtcaatacaattgactttgactacaaggagtatgcgaggcagagatttcagcaatactggttgaagaagcctactttattggactcaccaagtatcgtttcccaagatgggattgccaatggtgtgaaccattgacatggatgcttcttatgtatttagcatgttcagcttggtatgtgttgactaatatatagaaaggcatgatgtgatgcataaaatttgtaaataatatataactaaaaatgtgtgatttgagaatttttacaacagttatgttagtaatccctcctttttgtgataagttgaggaatggaaggtgtgaattctaggtttggtt

SEQ ID NO: 16500 - protein, 359 aa, Glycine max
MAIKAIELLKGSGNHEEIFEVLAAVAASLGDVIDDVNTLQVTPLKGAMTNEVFEVNWPTKSDGHQRRVLVRLYGEGVEVFFNRVDEIQTFECMSKHGQGPRLLGRFTTGRVEEFIHAKTLSAADLRDPEISALIASKMREFHNLHMPGAKKAQLWQRMRKWLSHAKSLCSPKETKNFGLDNLDAEINMLVELLSQGNQQIGFCHNDLQYGNIMMDEDTRAITLIDYEYASYNPIGYDLANHFCEMVANYHSDEPHVLDYSKYPGLEERQRFVYNYLSSEGKKPSNSEVDQLVNLAEKYTLANHLFWGLWGLISSHVNTIDFDYKEYARQRFQQYWLKKPTLLDSPSIVSQDGIANGVNH

SEQ ID NO: 16501 - protein, 312 aa, Glycine max
MTNEVFEVNWPTKSDGHQRRVLVRLYGEGVEVFFNRVDEIQTFECMSKHGQGPRLLGRFTTGRVEEFIHAKTLSAADLRDPEISALIASKMREFHNLHMPGAKKAQLWQRMRKWLSHAKSLCSPKETKNFGLDNLDAEINMLVELLSQGNQQIGFCHNDLQYGNIMMDEDTRAITLIDYEYASYNPIGYDLANHFCEMVANYHSDEPHVLDYSKYPGLEERQRFVYNYLSSEGKKPSNSEVDQLVNLAEKYTLANHLFWGLWGLISSHVNTIDFDYKEYARQRFQQYWLKKPTLLDSPSIVSQDGIANGVNH

SEQ ID NO: 16502 - protein, 267 aa, Glycine max
MSKHGQGPRLLGRFTTGRVEEFIHAKTLSAADLRDPEISALIASKMREFHNLHMPGAKKAQLWQRMRKWLSHAKSLCSPKETKNFGLDNLDAEINMLVELLSQGNQQIGFCHNDLQYGNIMMDEDTRAITLIDYEYASYNPIGYDLANHFCEMVANYHSDEPHVLDYSKYPGLEERQRFVYNYLSSEGKKPSNSEVDQLVNLAEKYTLANHLFWGLWGLISSHVNTIDFDYKEYARQRFQQYWLKKPTLLDSPSIVSQDGIANGVNH

SEQ ID NO: 16503 - DNA, 814 bp, Glycine max
  misc_feature (93)..(93): n is a, c, g, or t
  misc_feature (227)..(227): n is a, c, g, or t
  misc_feature (292)..(292): n is a, c, g, or t
  misc_feature (295)..(295): n is a, c, g, or t
  misc_feature (304)..(304): n is a, c, g, or t
  misc_feature (358)..(358): n is a, c, g, or t
  misc_feature (361)..(361): n is a, c, g, or t
  misc_feature (369)..(369): n is a, c, g, or t
  misc_feature (446)..(446): n is a, c, g, or t
  misc_feature (464)..(464): n is a, c, g, or t
  misc_feature (476)..(476): n is a, c, g, or t
  misc_feature (486)..(486): n is a, c, g, or t
  misc_feature (503)..(503): n is a, c, g, or t
  misc_feature (509)..(509): n is a, c, g, or t
  misc_feature (512)..(512): n is a, c, g, or t
  misc_feature (528)..(528): n is a, c, g, or t
cctgggaaggtgaagtggttcaatgatcagaaggggtttggattcataagccctgacgatggcagcgacgatctcttcgttcaccaatctcanatcaaatctgacggtttccgaagcctcgccgaaggagagtccgttgagttcgccattgaatctgaatctgacggacgcgcgaaggctgttgatgtcactggccccgacggcgccagcgtccagggaaccagacnaggcggtgatggtggccgaagctatggcgggggacgaggaggtggtggaggtggctacggtggangcngtggctacngtggtggtggtggctacggtggaggcggtggttacggtggtggtggaagaggcngtngaggcggngcttgctacaactgtggtgaatcgggacatctggctagggattgcagtggaggcggtggtggggacaggtacggagnaggtggtggtggtggcanatatggaggcgncggtggcggnaggtacgttggtggtgnaggcgncgncggcggcggaggaagntgctacagctgtggagagtctgggcattttgccagagattgcccatcaagtgctcgttgaatttactgttagggttgtttatgttttgcggattgttttaagtttttactttaatatgtcttagggattttaatggtttctgtccaaactatgggttcttatgagtagatgtgtgggatttttcttttttggttatttaaatgaagggtttctgtgttatcgttacaatctgcaaactaaaatctgtttgaacttacattttgctataatgaatcgtatgattgct

SEQ ID NO: 16504 - protein, 197 aa, Glycine max
  misc_feature (12)..(12): Xaa can be any naturally occurring amino acid
  misc_feature (57)..(57): Xaa can be any naturally occurring amino acid
  misc_feature (78)..(79): Xaa can be any naturally occurring amino acid
  misc_feature (82)..(82): Xaa can be any naturally occurring amino acid
  misc_feature (100)..(101): Xaa can be any naturally occurring amino acid
  misc_feature (104)..(104): Xaa can be any naturally occurring amino acid
  misc_feature (130)..(130): Xaa can be any naturally occurring amino acid
  misc_feature (136)..(136): Xaa can be any naturally occurring amino acid
  misc_feature (140)..(140): Xaa can be any naturally occurring amino acid
  misc_feature (143)..(143): Xaa can be any naturally occurring amino acid
  misc_feature (149)..(149): Xaa can be any naturally occurring amino acid
  misc_feature (151)..(152): Xaa can be any naturally occurring amino acid
  misc_feature (157)..(157): Xaa can be any naturally occurring amino acid
MAATISSFTNLXSNLTVSEASPKESPLSSPLNLNLTDARRLLMSLAPTAPASREPDXAVMVAEAMAGDEEVVEVATVXXVAXVVVVATVEAVVTVVVEEXXEAXLATTVVNRDIWLGIAVEAVVGTGTEXVVVVAXMEAXVAXGTLVVXAXXAAEEXATAVESLGILPEIAHQVLVEFTVRVVYVLRIVLSFYFNMS

SEQ ID NO: 16505 - protein, 195 aa, Glycine max
  misc_feature (31)..(31): Xaa can be any naturally occurring amino acid
  misc_feature (76)..(76): Xaa can be any naturally occurring amino acid
  misc_feature (98)..(99): Xaa can be any naturally occurring amino acid
  misc_feature (102)..(102): Xaa can be any naturally occurring amino acid
  misc_feature (120)..(121): Xaa can be any naturally occurring amino acid
  misc_feature (123)..(123): Xaa can be any naturally occurring amino acid
  misc_feature (149)..(149): Xaa can be any naturally occurring amino acid
  misc_feature (155)..(155): Xaa can be any naturally occurring amino acid
  misc_feature (159)..(159): Xaa can be any naturally occurring amino acid
  misc_feature (162)..(162): Xaa can be any naturally occurring amino acid
  misc_feature (168)..(168): Xaa can be any naturally occurring amino acid
  misc_feature (170)..(171): Xaa can be any naturally occurring amino acid
  misc_feature (176)..(176): Xaa can be any naturally occurring amino acid
PGKVKWFNDQKGFGFISPDDGSDDLFVHQSXIKSDGFRSLAEGESVEFAIESESDGRAKAVDVTGPDGASVQGTRXGGDGGRSYGGGRGGGGGGYGGXXGYXGGGGYGGGGGYGGGGRGXXGXACYNCGESGHLARDCSGGGGGDRYGXGGGGGXYGGXGGXRYVGGXGXXGGGGXCYSCGESGHFARDCPSSAR

SEQ ID NO: 16506 - protein, 155 aa, Glycine max
  misc_feature (15)..(15): Xaa can be any naturally occurring amino acid
  misc_feature (36)..(37): Xaa can be any naturally occurring amino acid
  misc_feature (40)..(40): Xaa can be any naturally occurring amino acid
  misc_feature (58)..(59): Xaa can be any naturally occurring amino acid
  misc_feature (62)..(62): Xaa can be any naturally occurring amino acid
  misc_feature (88)..(88): Xaa can be any naturally occurring amino acid
  misc_feature (94)..(94): Xaa can be any naturally occurring amino acid
  misc_feature (98)..(98): Xaa can be any naturally occurring amino acid
  misc_feature (101)..(101): Xaa can be any naturally occurring amino acid
  misc_feature (107)..(107): Xaa can be any naturally occurring amino acid
  misc_feature (109)..(110): Xaa can be any naturally occurring amino acid
  misc_feature (115)..(115): Xaa can be any naturally occurring amino acid
MSLAPTAPASREPDXAVMVAEAMAGDEEVVEVATVXXVAXVVVVATVEAVVTVVVEEXXEAXLATTVVNRDIWLGIAVEAVVGTGTEXVVVVAXMEAXVAXGTLVVXAXXAAEEXATAVESLGILPEIAHQVLVEFTVRVVYVLRIVLSFYFNMS

SEQ ID NO: 16507 - DNA, 820 bp, Glycine max
  misc_feature (596)..(596): n is a, c, g, or t
  misc_feature (778)..(778): n is a, c, g, or t
atctcttaattcagagtttaattcatcaatgggtgtttccctttgagattcaatctcaccatggtggacgttttcaaactttgcatcttccttcttgcactcttctgtgctttcctagtcttttctaatccagtgctgtgtagtgataaggaggacagtgtattcaagggaatcaacagctacaggcagacacggaacctggcacccctgaaccaagtttcaaaggcaacatgtttggctgatgaggttgcagaagaaatagataacatgccctgtgaaaacgtgaatcaatactacccttcatctgttcctggaagtgggaacctcaaaatcccaaacttgcagaagcatatagataaatgtgacattaacttcaacagcactacagatggagtcattcttcccgtttgtgtctccaaattggaaccaaccattgtgctctccaattacactcattctggtagctacgcacagtttctcaacaattccaagtacacaggggcagggcttggttctgaggatgattggatggttcttgttctgaccaccaacactaccactggaagtttctctgctgctgcaacttctgttcgtgntaatgctgcttctgtggagttcttgctctttgttttgctgcttgtgctcatcaactaccttgattgagtgcttatgtctttcttctaatagcttcattgtgtggagtgcggacactttcgtttcattccttctcttgtataaatgtagtgcgaagtgaacttaattaggagttaatctgtgngctattaaatttgttatttatctcactcttctctaatttcgc

SEQ ID NO: 16508 - protein, 200 aa, Glycine max
  misc_feature (179)..(179): Xaa can be any naturally occurring amino acid
MVDVFKLCIFLLALFCAFLVFSNPVLCSDKEDSVFKGINSYRQTRNLAPLNQVSKATCLADEVAEEIDNMPCENVNQYYPSSVPGSGNLKIPNLQKHIDKCDINFNSTTDGVILPVCVSKLEPTIVLSNYTHSGSYAQFLNNSKYTGAGLGSEDDWMVLVLTTNTTTGSFSAAATSVRXNAASVEFLLFVLLLVLINYLD

SEQ ID NO: 16509 - protein, 131 aa, Glycine max
  misc_feature (110)..(110): Xaa can be any naturally occurring amino acid
MPCENVNQYYPSSVPGSGNLKIPNLQKHIDKCDINFNSTTDGVILPVCVSKLEPTIVLSNYTHSGSYAQFLNNSKYTGAGLGSEDDWMVLVLTTNTTTGSFSAAATSVRXNAASVEFLLFVLLLVLINYLD

SEQ ID NO: 16510 - DNA, 815 bp, Glycine max
tttgggttcgggcccccctccgcgtcgcacggtatcgcataagcttgatatcgcaattccgttgctgtcgcctctctctatattccattgccacccagttttgaatatatttttattccttctttgtttcttcactttcttccatacacataaccatgtcttctcagactgttgtcctcaaagttggtatgtcatgtcaagggtgtgctggagcaatgaacagggttttgggaaaaatggaaggtgttgagtcatttgacattgatctgaaggagcagaaggtgacagtgaaaggaaatgtggagccagatgaagttctgcaagccgtttccaaatctgggaagaagactgcattctgggtggatgaagcaccacaatctaaaaacaagcctttagaaagtgcacctgttgcctcagaaaacaagccttcagaagctgcaactgttgcctcagctgagcctgaaaacaagccttcagaagctgcaattgttgattcagctgagcctgaaaacaagccttcagatactgttgttgaaactgttgcttaaggcatttgtggttctatttttctatgtggaagtaggtctgtttcatatagtatttcatgtgctttgtgcatgtcagctattatatttggtgtgttgttactggtatctaagctacaataacttgtggcctatttttcacatgagatacatttcatgggtgctataatttagaatttgaacctgtcactcttgttactactgtttttgttcagtcttttatattcttaccacaacttgatcatattggaaagagcttattttccgctt

SEQ ID NO: 16511 - protein, 130 aa, Glycine max
MSSQTVVLKVGMSCQGCAGAMNRVLGKMEGVESFDIDLKEQKVTVKGNVEPDEVLQAVSKSGKKTAFWVDEAPQSKNKPLESAPVASENKPSEAATVASAEPENKPSEAAIVDSAEPENKPSDTVVETVA

SEQ ID NO: 16512 - protein, 119 aa, Glycine max
MSCQGCAGAMNRVLGKMEGVESFDIDLKEQKVTVKGNVEPDEVLQAVSKSGKKTAFWVDEAPQSKNKPLESAPVASENKPSEAATVASAEPENKPSEAAIVDSAEPENKPSDTVVETVA

SEQ ID NO: 16513 - protein, 110 aa, Glycine max
MNRVLGKMEGVESFDIDLKEQKVTVKGNVEPDEVLQAVSKSGKKTAFWVDEAPQSKNKPLESAPVASENKPSEAATVASAEPENKPSEAAIVDSAEPENKPSDTVVETVA

SEQ ID NO: 16514 - DNA, 1208 bp, Glycine max
  misc_feature (668)..(668): n is a, c, g, or t
atcatccactacttgtagctattagctaacatatagagagagagagagagagagagagatcacatttcctgagctataggctatagccttccataatcttataacaatggaggggaccaccagccaaagcacgtttaccttcatccctagcacaattgagacacctagtccaagcatccctgagatttcatcatcatcaccttcccctggcggctctcttgcaagagttgcacaaagttaccctcctggatttcccagaaaggtatttgcggaggttatagggacatttctgttagtgtttgtggggagtggttctgctgggcttagcaagattgatgaaagcatggtgtcaaagtttggagcttcacttgcaggaggactcatagtgacagtcatgatttactcaattggacacatctcaggggcacacatgaacccagctgtttcgcttgcttttaccgccgtgaggcatcttccgtggccacagctcccattttatgtagcagctcaactcactggagccatttctgcttcatacacattgcgagagctgttacggccatcagatgagattgggggaacttcacctgctggatcacacattcaagccctaatcatggaaatggtgagcacatacaccatggtgttcatttccatggccgtggccnccgactcaaacgcgacaggacagctatcaggagttgcagtaggttcttctgtttgcatagcaagcattgtagccggaccaatatcagggggatcaatgaacccagcaaggacattaggtcctgcaattgcaacatcatactacaagggactttgggtatattttgttggaccgattactggggcagttttagcagcatggtcttacaatgtgattagggacactgaacaccctggttttcccatttcactatcctccatttcatccaaggtgcgccaaagcattggtggaaccgaacaaaaaagcgaccaaagatgcttggtgtgaatgaaaataataaacatcaatgttttttctgacaccacacccttgaatgtcttgtcttggaggatctcaagtttccacatgtattatcatgtatatcaataataccatgccgagatcatatggtattattagctaggccatgtatcgagttagtttcagggctatgagctagccatgtataatgcaaaagtgtgtagtgtgattttcctacatt

SEQ ID NO: 16515 - protein, 295 aa, Glycine max
  misc_feature (188)..(188): Xaa can be any naturally occurring amino acid
MEGTTSQSTFTFIPSTIETPSPSIPEISSSSPSPGGSLARVAQSYPPGFPRKVFAEVIGTFLLVFVGSGSAGLSKIDESMVSKFGASLAGGLIVTVMIYSIGHISGAHMNPAVSLAFTAVRHLPWPQLPFYVAAQLTGAISASYTLRELLRPSDEIGGTSPAGSHIQALIMEMVSTYTMVFISMAVAXDSNATGQLSGVAVGSSVCIASIVAGPISGGSMNPARTLGPAIATSYYKGLWVYFVGPITGAVLAAWSYNVIRDTEHPGFPISLSSISSKVRQSIGGTEQKSDQRCLV

SEQ ID NO: 16516 - protein, 216 aa, Glycine max
  misc_feature (109)..(109): Xaa can be any naturally occurring amino acid
MVSKFGASLAGGLIVTVMIYSIGHISGAHMNPAVSLAFTAVRHLPWPQLPFYVAAQLTGAISASYTLRELLRPSDEIGGTSPAGSHIQALIMEMVSTYTMVFISMAVAXDSNATGQLSGVAVGSSVCIASIVAGPISGGSMNPARTLGPAIATSYYKGLWVYFVGPITGAVLAAWSYNVIRDTEHPGFPISLSSISSKVRQSIGGTEQKSDQRCLV

SEQ ID NO: 16517 - protein, 199 aa, Glycine max
  misc_feature (92)..(92): Xaa can be any naturally occurring amino acid
MIYSIGHISGAHMNPAVSLAFTAVRHLPWPQLPFYVAAQLTGAISASYTLRELLRPSDEIGGTSPAGSHIQALIMEMVSTYTMVFISMAVAXDSNATGQLSGVAVGSSVCIASIVAGPISGGSMNPARTLGPAIATSYYKGLWVYFVGPITGAVLAAWSYNVIRDTEHPGFPISLSSISSKVRQSIGGTEQKSDQRCLV

SEQ ID NO: 16518 - DNA, 766 bp, Glycine max
aaagctctttcccttcccctaaatccctcacactcattccatttttacctttctctctcgctcgcaaacgcaaataataaaaaacaaggttttagccatggcatcgaagcggatctgaaggaactcaaggatctccaaaaggatcctcctacctcatgcagcgccggtcctgttgctgaagacatgtttcactggcaagcaacaattatgggtcctccagacagtccttatgctggaggtgttttcctagtcactattcatttccctccagattatccctttaagccacccaaggttgcattcaggacgatgtatttcacccaaatataaatagcaatggaagcatttgccttgacatattgaaggagcagtggagccctgcgctaactatttcaaaggtgttgctctcaatttgttccctgttgacggaccctaatcctgacgatcctttggtccctgaaattgcccacatgtacaagacagacaggaacaagtacgagtcaactgccagaagctggacccagaaatatgccatgggttaagtgaccttgtggtatgtttgagggagagcctttctactctcagtgtttaggtctctcagcccttgtaggaatatttgtcgttttaaatcatgattaaggcccctccagttgaagatgaatgggggaaaacgtttctcctgctgtttgtattgcaaatgttcatggtaatttagaacagtgaaatgttgccccaattaaatgttatgctcaagtttttaaccgtc

SEQ ID NO: 16519 - protein, 109 aa, Glycine max
KALSLPLNPSHSFHFYLSLSLANANNKKQGFSHGIEADLKELKDLQKDPPTSCSAGPVAEDMFHWQATIMGPPDSPYAGGVFLVTIHFPPDYPFKPPKVAFRTMYFTQI

SEQ ID NO: 16520 - DNA, 862 bp, Glycine max
gatggaaccctaataccaatttttcttcctcagtagtgtcatttacgcttctcttctctgcagcaactatgcctaaccctaaggtcttcttcgacatgaccatcggcggtcaatctgctggccgcatcgtgatggagctctacgccgacgtcactccccgcaccgccgagaacttccgcgcgctttgcaccggcgagaagggcgtagggcggagcggcaagcccctccactacaagggctcgtccttccaccgcgtgatcccgagtttcatgtgtcagggtggcgacttcaccgccggaaacggaaccggcggcgagtcgatttatggcgccaagttcgccgacgagaacttcgtgaagaagcacaccggtcccggcatcctctccatggcgaacgccggtcccggaaccaacggatctcagttcttcatttgcacggagaagacagagtggctcgacggaaagcatgtcgtgttcggacaggtcatcgaaggattgaacgttgtcaaggacatcgagaaggtcggatccggctccggcaggacctccaagcccgttgtcatcgccaactgcggtcaaccctcttagacgacgttgacccgcggctttaatctgtcaatctgtgttatttctttcggtgtcgtttttgccttttttttctcttcttttctttctcgtgtcgtttaggggattgtggtgttaaggatatcatttcgaaacccttcccctttccttttcaatatcagtatcatgtggttggttggttggggttcatagagtgagtgaatggagtctgttatgagaagcataaaaaaaacatgatgagctaccttcaataaaattaggacatctataattcgcct

SEQ ID NO: 16521 - protein, 194 aa, Glycine max
WNPNTNFSSSVVSFTLLFSAATMPNPKVFFDMTIGGQSAGRIVMELYADVTPRTAENFRALCTGEKGVGRSGKPLHYKGSSFHRVIPSFMCQGGDFTAGNGTGGESIYGAKFADENFVKKHTGPGILSMANAGPGTNGSQFFICTEKTEWLDGKHVVFGQVIEGLNVVKDIEKVGSGSGRTSKPVVIANCGQPS

SEQ ID NO: 16522 - protein, 172 aa, Glycine max
MPNPKVFFDMTIGGQSAGRIVMELYADVTPRTAENFRALCTGEKGVGRSGKPLHYKGSSFHRVIPSFMCQGGDFTAGNGTGGESIYGAKFADENFVKKHTGPGILSMANAGPGTNGSQFFICTEKTEWLDGKHVVFGQVIEGLNVVKDIEKVGSGSGRTSKPVVIANCGQPS

SEQ ID NO: 16523 - protein, 163 aa, Glycine max
MTIGGQSAGRIVMELYADVTPRTAENFRALCTGEKGVGRSGKPLHYKGSSFHRVIPSFMCQGGDFTAGNGTGGESIYGAKFADENFVKKHTGPGILSMANAGPGTNGSQFFICTEKTEWLDGKHVVFGQVIEGLNVVKDIEKVGSGSGRTSKPVVIANCGQPS

SEQ ID NO: 16524 - DNA, 3486 bp, Glycine max
atgacctgtgtccgggagtccatttgatatttcattactgataacgaaggtagcaacaaaatattacagttcatagcaaagcatagtgtacgtgttgttattgttgttgaagggtgatggagagttatttaaatgagaattttgaagtgaagtccaaaaattctcccgaagaggttcttcaacgatggaggagactatgcgggatcgtcaagaaccccagaagacgctttcgtttcactgcaaatctctccaagagggacgaagctgctgctatgcgtcgtaccattcaggagaagttgaggattgcaattttggtttccaaagcagcacttcaatttatccaaagcgtgcaactaagcgattacaaactgccagaggaagttaaagatgcaggttttcaaatctgcggcgatgaattagggtctattgttgaagtccatgatgtaaagaagttcagacatcatggtggggttgatggcattgcagagaagctttctacatcaaccactgagggtcttaacagtgatactgagttactgaataggagacagcagatatatggaatcaacaaatttactgaaagtgcagctacaagtttctgggtttttgtttgggaagcctttcaagacatgactctgatgatacttggagtgtgtgctatcgtgtctctgctagttggcattgcaacagaaggatggccaaagggtgctcatgatggtcttggaattgttgcaagtatcttgcttgtagtctttgtgacagcaacaagcgattatcgccaatcgttacagttcagggatttagacaaggagaagaagaaaatttccattcaggtcacaagaaatggatacagacaaaaaatgtcaatatatgaattacttcctggtgacattgtgcaccttgccattggtgaccaagtccctgctgatggactatttgtctcaggattttctgtgttgattgatgagtcaagcttaacaggagagagtgagccagtgatggtgaattctgaaaatccatttcttctttctgggaccaaggtccaagacggatcatgcaagatgttggttactagtgttggcatgaggactcaatggggcaagttgatggctactctcagtgaaggtggagatgatgaaaccccactacaggtgaagttgaatggtgttgcaaccattattggtaagataggcctattctttgcagtggttacttttgcagttctagtgcaaggactcgtaagcctaaaactccaacaagggagcttacggagctggaccggggatgatgcattggagctgttggagttctttgcagttgcagttaccatagttgttgttgccgttccagagggtctgccattggctgtgacacttagtcttgcatttgcaatgaagaaaatgatgaatgacaaagccctgttgagacattatgcagcctgtgagaccatgggatcagccacaactatatgtagtgacaagactgggacactaacaaccaaccacatgactgttgtgaaaacatgcttttgcatgaacagcaaggaagtgagcaacaacaatgcttctagtttgtgttctgaactcccagaacctgctgtgaaactgctgctagagtcaatattcaataatacagggggagaggttgtggttaaccaaaatggaaaacgtgagattctagggactccaaccgaggctgcaatattggagtttggtttgtcattaggtggagattttcaaggagagaaacaagcatgtaaacttgttaaagttgagccattcaattccactaagaagaaaatgagtgtggtggttgagctccctggtggaggcttaagagcccactgcaaaggtgcttctgaaataattctggctgcttgtgacaaagttctcaactcaaatggtgaggttgtaccccttgatgaagaatcaactagccatcttaaggctacaataaatcagtttgcaagtgaggcacttaggacactatgccttgcctatgtggaattggaaaatgggttctctcctgaagaccctattcctgtttctggatatacatgcataggagttattggtatcaaagatcctgttcgtcctggtgttaaggaatctgtggcaatgtgtcgttcagctggaataacagttagaatggttactggtgacaacattaatactgcaaaggctatagccagggagtgtgggattttaactgatgatggcatagccattgaaggtccagaatttagagagaagagtcaggaagagttgcttgaactgattcccaaaattcaggttatggctcgatcctcacctttagacaaacacacactggtgaaacacttgcgtaccacttttggggaagtggtagctgtaacaggtgatggaactaatgatgccccagcacttcatgaagctgacattggacttgcaatgggcattgctggaactgaggttgcaaaagaaagtgcagatgtcataattctggatgataacttctccacgatagtaactgtggccaaatggggacgttcggtttacataaatattcagaaattcgtacagtttcagcttaccgttaatgtggttgcattaatagtgaatttcacatcagcctgcttgacaggaactgcacccctaacagctgttcaactcttgtgggtgaacatgataatggacacactgggagcacttgctcttgctactgaacctccaaatgatgatttaatgaaacgttcacctgttggaaggaagggaaatttcatcagcaatgtcatgtggaggaacatcttaggacaatcattgtatcagtttatggtgatatggtttcttcagtcaagagcaaaatcaatctttttacttgagggccccaattcagatctagtcttaaacacgcttattttcaactcatttgtcttctgtcaggttttcaatgagataaattcacgtgaaatggagaaaataaacgtttttaaaggaatattggataactatgttttcgtgggtgtcatcagtgctactgttttcttccaaatcataatagttgagtacttgggaacctttgcaaacacaacacctctcaccctgtcacagtggttcttttgcttattggttggatttatgggcatgcctattgctgctcgcttaaagaagattcctgtttgaagcacctgaatggataaaaaagttgtagttggttaccgttagttggttagttgttgcattgcttcaaggtccactattcctgtacattcactaactcacctggtattgctcgaggctttcttgggttggaatcagaaatggagcagcgaaataaatcactggagtctcggagcagtttgacaagctaccattaaccattttattttaatacgttgtttattttctaggcagcagaatgattaatgacttgctgtaaataagttactagccttcctcagtttgtttcaatttttatatttataaatcccatttgtttctttatgtt

SEQ ID NO: 16525 - protein, 1014 aa, Glycine max
MESYLNENFEVKSKNSPEEVLQRWRRLCGIVKNPRRRFRFTANLSKRDEAAAMRRTIQEKLRIAILVSKAALQFIQSVQLSDYKLPEEVKDAGFQICGDELGSIVEVHDVKKFRHHGGVDGIAEKLSTSTTEGLNSDTELLNRRQQIYGINKFTESAATSFWVFVWEAFQDMTLMILGVCAIVSLLVGIATEGWPKGAHDGLGIVASILLVVFVTATSDYRQSLQFRDLDKEKKKISIQVTRNGYRQKMSIYELLPGDIVHLAIGDQVPADGLFVSGFSVLIDESSLTGESEPVMVNSENPFLLSGTKVQDGSCKMLVTSVGMRTQWGKLMATLSEGGDDETPLQVKLNGVATIIGKIGLFFAVVTFAVLVQGLVSLKLQQGSLRSWTGDDALELLEFFAVAVTIVVVAVPEGLPLAVTLSLAFAMKKMMNDKALLRHYAACETMGSATTICSDKTGTLTTNHMTVVKTCFCMNSKEVSNNNASSLCSELPEPAVKLLLESIFNNTGGEVVVNQNGKREILGTPTEAAILEFGLSLGGDFQGEKQACKLVKVEPFNSTKKKMSVVVELPGGGLRAHCKGASEIILAACDKVLNSNGEVVPLDEESTSHLKATINQFASEALRTLCLAYVELENGFSPEDPIPVSGYTCIGVIGIKDPVRPGVKESVAMCRSAGITVRMVTGDNINTAKAIARECGILTDDGIAIEGPEFREKSQEELLELIPKIQVMARSSPLDKHTLVKHLRTTFGEVVAVTGDGTNDAPALHEADIGLAMGIAGTEVAKESADVIILDDNFSTIVTVAKWGRSVYINIQKFVQFQLTVNVVALIVNFTSACLTGTAPLTAVQLLWVNMIMDTLGALALATEPPNDDLMKRSPVGRKGNFISNVMWRNILGQSLYQFMVIWFLQSRAKSIFLLEGPNSDLVLNTLIFNSFVFCQVFNEINSREMEKINVFKGILDNYVFVGVISATVFFQIIIVEYLGTFANTTPLTLSQWFFCLLVGFMGMPIAARLKKIPV

SEQ ID NO: 16526 - protein, 962 aa, Glycine max
MRRTIQEKLRIAILVSKAALQFIQSVQLSDYKLPEEVKDAGFQICGDELGSIVEVHDVKKFRHHGGVDGIAEKLSTSTTEGLNSDTELLNRRQQIYGINKFTESAATSFWVFVWEAFQDMTLMILGVCAIVSLLVGIATEGWPKGAHDGLGIVASILLVVFVTATSDYRQSLQFRDLDKEKKKISIQVTRNGYRQKMSIYELLPGDIVHLAIGDQVPADGLFVSGFSVLIDESSLTGESEPVMVNSENPFLLSGTKVQDGSCKMLVTSVGMRTQWGKLMATLSEGGDDETPLQVKLNGVATIIGKIGLFFAVVTFAVLVQGLVSLKLQQGSLRSWTGDDALELLEFFAVAVTIVVVAVPEGLPLAVTLSLAFAMKKMMNDKALLRHYAACETMGSATTICSDKTGTLTTNHMTVVKTCFCMNSKEVSNNNASSLCSELPEPAVKLLLESIFNNTGGEVVVNQNGKREILGTPTEAAILEFGLSLGGDFQGEKQACKLVKVEPFNSTKKKMSVVVELPGGGLRAHCKGASEIILAACDKVLNSNGEVVPLDEESTSHLKATINQFASEALRTLCLAYVELENGFSPEDPIPVSGYTCIGVIGIKDPVRPGVKESVAMCRSAGITVRMVTGDNINTAKAIARECGILTDDGIAIEGPEFREKSQEELLELIPKIQVMARSSPLDKHTLVKHLRTTFGEVVAVTGDGTNDAPALHEADIGLAMGIAGTEVAKESADVIILDDNFSTIVTVAKWGRSVYINIQKFVQFQLTVNVVALIVNFTSACLTGTAPLTAVQLLWVNMIMDTLGALALATEPPNDDLMKRSPVGRKGNFISNVMWRNILGQSLYQFMVIWFLQSRAKSIFLLEGPNSDLVLNTLIFNSFVFCQVFNEINSREMEKINVFKGILDNYVFVGVISATVFFQIIIVEYLGTFANTTPLTLSQWFFCLLVGFMGMPIAARLKKIPV

SEQ ID NO: 16527 - protein, 843 aa, Glycine max
MTLMILGVCAIVSLLVGIATEGWPKGAHDGLGIVASILLVVFVTATSDYRQSLQFRDLDKEKKKISIQVTRNGYRQKMSIYELLPGDIVHLAIGDQVPADGLFVSGFSVLIDESSLTGESEPVMVNSENPFLLSGTKVQDGSCKMLVTSVGMRTQWGKLMATLSEGGDDETPLQVKLNGVATIIGKIGLFFAVVTFAVLVQGLVSLKLQQGSLRSWTGDDALELLEFFAVAVTIVVVAVPEGLPLAVTLSLAFAMKKMMNDKALLRHYAACETMGSATTICSDKTGTLTTNHMTVVKTCFCMNSKEVSNNNASSLCSELPEPAVKLLLESIFNNTGGEVVVNQNGKREILGTPTEAAILEFGLSLGGDFQGEKQACKLVKVEPFNSTKKKMSVVVELPGGGLRAHCKGASEIILAACDKVLNSNGEVVPLDEESTSHLKATINQFASEALRTLCLAYVELENGFSPEDPIPVSGYTCIGVIGIKDPVRPGVKESVAMCRSAGITVRMVTGDNINTAKAIARECGILTDDGIAIEGPEFREKSQEELLELIPKIQVMARSSPLDKHTLVKHLRTTFGEVVAVTGDGTNDAPALHEADIGLAMGIAGTEVAKESADVIILDDNFSTIVTVAKWGRSVYINIQKFVQFQLTVNVVALIVNFTSACLTGTAPLTAVQLLWVNMIMDTLGALALATEPPNDDLMKRSPVGRKGNFISNVMWRNILGQSLYQFMVIWFLQSRAKSIFLLEGPNSDLVLNTLIFNSFVFCQVFNEINSREMEKINVFKGILDNYVFVGVISATVFFQIIIVEYLGTFANTTPLTLSQWFFCLLVGFMGMPIAARLKKIPV

SEQ ID NO: 16528 - DNA, 1211 bp, Glycine max
  misc_feature (688)..(688): n is a, c, g, or t
  misc_feature (969)..(969): n is a, c, g, or t
  misc_feature (1200)..(1200): n is a, c, g, or t
acctatgcctccagccacactcgaccaccacaaacttctcttccgagtgttccattccaacttgggtgtggctatggatcgcgctcagcttcttttggtgggtgtgcctctcttcctcttctgctcagacctcttctcccttttcactcatcatccaccaccgccaccccaccaccatcacccccaccaccatccacctcaccaccaccaccacccgcctcaccacccaccccaccaccaccatcacccgccccaccaccatcagcagccggtgataatagagttccctcccgagaaacccatcagcaatattgcaactccgggtctcggcaacactgtctacatcaatttctgctcttcctgctcatacaagggaacagcagtgacaatgaagaatatgttggagattgctttacctggaactgaggttattcttgcaaattatcccccatcgcttccaaagcgtctgctaagcaaattggttccagttgttcagattggtgttgtaggggtggttgttgcaggggaacatatttttccaatgttgggttttgttgcacctcctccttggtattacaacttgcgtgctaatcggtttggaaccattgcaagtacttggcttcttgggaatgccttgcagtcattcttacagagctccggggctttcgaaatttacttcaatggtganctggttttctctaaattgaagtaaatttcgaaagcctcggagcagtccatgaaagatgcgatcggagcgatgaatggacagaacttggacggccgtaacatcactgtcaatgaagctcagtcccgcggtggcggcggcggcggcggaggaggaggatacaatcgtggtggcggtggatatggtggtcgtagtggcggtggcggtggtggataccgtagccgtgacggtggttatggcggtggctatggtggtggtggtggtggtggttatggcggtggcanagaccgtggttactctcgtggtggtgatggtggtgatggaggctggagaaactaaggcttgatgtcgtcaattagggtttatgattatgccccgtatttttagttgttgtggtttgagttcgagtttctttatggtttcgtgttaccgtggttcttgtttttgaccaatatatctggttgtttatagttgatttagtgaaatgataatcagtaattggagtatcgagtttntacaggttttt

SEQ ID NO: 16529 - protein, 236 aa, Glycine max
  misc_feature (229)..(229): Xaa can be any naturally occurring amino acid
PMPPATLDHHKLLFRVFHSNLGVAMDRAQLLLVGVPLFLFCSDLFSLFTHHPPPPPHHHHPHHHPPHHHHHPPHHPPHHHHHPPHHHQQPVIIEFPPEKPISNIATPGLGNTVYINFCSSCSYKGTAVTMKNMLEIALPGTEVILANYPPSLPKRLLSKLVPVVQIGVVGVVVAGEHIFPMLGFVAPPPWYYNLRANRFGTIASTWLLGNALQSFLQSSGAFEIYFNGXLVFSKLK

SEQ ID NO: 16530 - protein, 235 aa, Glycine max
  misc_feature (228)..(228): Xaa can be any naturally occurring amino acid
MPPATLDHHKLLFRVFHSNLGVAMDRAQLLLVGVPLFLFCSDLFSLFTHHPPPPPHHHHPHHHPPHHHHHPPHHPPHHHHHPPHHHQQPVIIEFPPEKPISNIATPGLGNTVYINFCSSCSYKGTAVTMKNMLEIALPGTEVILANYPPSLPKRLLSKLVPVVQIGVVGVVVAGEHIFPMLGFVAPPPWYYNLRANRFGTIASTWLLGNALQSFLQSSGAFEIYFNGXLVFSKLK

SEQ ID NO: 16531 - protein, 212 aa, Glycine max
  misc_feature (205)..(205): Xaa can be any naturally occurring amino acid
MDRAQLLLVGVPLFLFCSDLFSLFTHHPPPPPHHHHPHHHPPHHHHHPPHHPPHHHHHPPHHHQQPVIIEFPPEKPISNIATPGLGNTVYINFCSSCSYKGTAVTMKNMLEIALPGTEVILANYPPSLPKRLLSKLVPVVQIGVVGVVVAGEHIFPMLGFVAPPPWYYNLRANRFGTIASTWLLGNALQSFLQSSGAFEIYFNGXLVFSKLK

SEQ ID NO: 16532 - DNA, 517 bp, Glycine max
ctggctcctataacagttgaaatgccttctttataaaccatcttacttcttcatcctcttcaacaaattaaaacaaaacagtctccatttgacacagtcctagtggtgtactacttattatggccacaccagcatccatcactaatgtcactgtggagttccttcaattccccgcactggtgacacctcctggctctaccaaatcctatttccttggcggcgcaggggtgagagggttgaatattcaagaagaatttgtgaagttcacgggaataggtgtttatttggaagacaaggccgtgtcatcactcgctgccaaatggaagggcaagagtgcagctgaattgctcgactcccttgacttctacagagatatcatcaaaggcccctttgagaagttaattcgagggtcaaagttaagaacattggatggtcgtgaatacgtaaggaaggtatcagagaactgtgtggcacatatgcaatctgttgggacttacagtgatgaggaggaaaaagc

SEQ ID NO: 16533 - protein, 132 aa, Glycine max
MATPASITNVTVEFLQFPALVTPPGSTKSYFLGGAGVRGLNIQEEFVKFTGIGVYLEDKAVSSLAAKWKGKSAAELLDSLDFYRDIIKGPFEKLIRGSKLRTLDGREYVRKVSENCVAHMQSVGTYSDEEEK

SEQ ID NO: 16534 - DNA, 455 bp, Glycine max
atataccacttccattctctcacactcgttactctcatcacattattctatatcaattttggttaagagtcttgaaaaagcaagagaaaaaaaaataccaaccatggcaaccatttctgatcaacctagagggtcctactcctatggaacctcatatggagcaccctatggaaccacgtatgagaccaacaccagcattaacaacccgcctgtcacgccaaacagtgaagttcataactgctgccactattggcatcacactcttgctcctgtctggtgttgaccctcacaggcactgtcataggtttgatcattgcaacccctcttcttgttatcttcagccccatccttgtccctgctgcgtttgtgctgttcctagttgcttctggctttttgttctctgggggctgtggtgtggctgccattgctgctttgtcttggatttacaactatgt

SEQ ID NO: 16535 - protein, 151 aa, Glycine max
IPLPFSHTRYSHHIILYQFWLRVLKKQEKKKYQPWQPFLINLEGPTPMEPHMEHPMEPRMRPTPALTTRLSRQTVKFITAATIGITLLLLSGVDPHRHCHRFDHCNPSSCYLQPHPCPCCVCAVPSCFWLFVLWGLWCGCHCCFVLDLQLC

SEQ ID NO: 16536 - protein, 104 aa, Glycine max
MEPHMEHPMEPRMRPTPALTTRLSRQTVKFITAATIGITLLLLSGVDPHRHCHRFDHCNPSSCYLQPHPCPCCVCAVPSCFWLFVLWGLWCGCHCCFVLDLQLC

SEQ ID NO: 16537 - protein, 100 aa, Glycine max
MEHPMEPRMRPTPALTTRLSRQTVKFITAATIGITLLLLSGVDPHRHCHRFDHCNPSSCYLQPHPCPCCVCAVPSCFWLFVLWGLWCGCHCCFVLDLQLC

SEQ ID NO: 16538 - DNA, 701 bp, Glycine max
aaatcgtaaaacctaaataaatacatcactgccttcagaaaacgactgcgcctagcttctagccaccctttaatcttcgtcaacgttacttttccacctcagggattcaattgagagggaaagggactgatggcagacaacacacagtcttactgggaaggctacaaagcgttttggtcagagaggttttcctttttgagcaactattcgaggttcatcaaccgtgataaacccatcccttcctggtcaagctctgatgtcgaggagttcattgcttctgatcctgttcatggacccgtcctgaaaagtgctagagaagcagtgcaatttggcctcacaggaagtgctttgggagcattatttactgcaggctatgcctggaaatattcaaagagtttacatggcgctggactgacatttttagctggaggtatatttgggtggacttttgggcatgaaatcgcaaatcacacacttcaactttacagggtagacacattggctgctgaggccaagtttctggactggtggaataagaagactggagggtattaaaactgttggcttatgggaattaatgctacatttgttatcgtttctgaaaaatgaagaataatttttggtgttggcagtgcgatttatgctcactgaataagtatgttgtgaattaggttatgttttaaaactaatgcatcatcgcc

SEQ ID NO: 16539 - protein, 141 aa, Glycine max
MADNTQSYWEGYKAFWSERFSFLSNYSRFINRDKPIPSWSSSDVEEFIASDPVHGPVLKSAREAVQFGLTGSALGALFTAGYAWKYSKSLHGAGLTFLAGGIFGWTFGHEIANHTLQLYRVDTLAAEAKFLDWWNKKTGGY

SEQ ID NO: 16540 - DNA, 930 bp, Glycine max
ctagctagggtttcagtggtgttagatctgtacctgcctagccattgatttggaaaagtccaagcttcaaagatgagtaagcttcagagtgatgctcttagagaagctatctcaggaatcatgactgattccaaggaaaagaacaggaaatttgtggagaccattgaactccaaattgggctgaaaaactatgatccccagaaggacaagcgttttagtggctctgttaagttgcctcacattcctcgccccaagatgaagatttgtatgcttggagatgcccaacacgttgaagaggctgagaagataggattggactacatggatgtcgaggccttgaagaagcttaacaaaaacaagaaattggtgaaaaaactagccaaaaaatatcatgcctttttggcctctgaagcagtcatcaagcagattcctcgtctcttgggacctggtctcaacaaggcagggaagttccctacgcttgtgactcaccaagaatctctcgagtcaaaggttaatgagaccaaggccatggtgaagttccagcttaagaaggtgctttgcatgggagtagccgtggggaatgttagcatggaggaaaaagcaaatcttccaaaatgtacaactgaggtgttaacttccttgtctctttgttgaaaaagaattggcagaacgttcgctgcctgtatctgaagagtaccatggggaaatcgtaccgtgtcttttgagttgttcttaaattcagtgaatttctgatcgcacctaatatattgtctttcgataggtttgacagaatttttcatcgttctacagttttgttggatgagtattttttgggtagtatttgtttgttatttggcatttatgtttcaagtgcttttcgacatcggataattttagcgtgttaagtttaagcttctcgtgtttttactt

SEQ ID NO: 16541 - protein, 193 aa, Glycine max
MSKLQSDALREAISGIMTDSKEKNRKFVETIELQIGLKNYDPQKDKRFSGSVKLPHIPRPKMKICMLGDAQHVEEAEKIGLDYMDVEALKKLNKNKKLVKKLAKKYHAFLASEAVIKQIPRLLGPGLNKAGKFPTLVTHQESLESKVNETKAMVKFQLKKVLCMGVAVGNVSMEEKANLPKCTTEVLTSLSLC

SEQ ID NO: 16542 - protein, 177 aa, Glycine max
MTDSKEKNRKFVETIELQIGLKNYDPQKDKRFSGSVKLPHIPRPKMKICMLGDAQHVEEAEKIGLDYMDVEALKKLNKNKKLVKKLAKKYHAFLASEAVIKQIPRLLGPGLNKAGKFPTLVTHQESLESKVNETKAMVKFQLKKVLCMGVAVGNVSMEEKANLPKCTTEVLTSLSLC

SEQ ID NO: 16543 - protein, 132 aa, Glycine max
MKICMLGDAQHVEEAEKIGLDYMDVEALKKLNKNKKLVKKLAKKYHAFLASEAVIKQIPRLLGPGLNKAGKFPTLVTHQESLESKVNETKAMVKFQLKKVLCMGVAVGNVSMEEKANLPKCTTEVLTSLSLC

SEQ ID NO: 16544 - DNA, 937 bp, Glycine max
attccttcccagtctcgcactcgctctgcagtagcacctgcctctgtctcacactcgctatctcctacccacctatcccccgtccgtccgtccgtctaggtctggagaagcggcgatggcggcgcccgtgacggtctacgggccggcgatctcgccggcggtggcccgcgtggcggcgtgcctgctggagaaggacgtggccttccagctcgaggcggtggacatgtccaagggcgagcacaagtccccctccttcctcaagctccagcccttcggccaggtccccgccttcaaagaccacctcaccaccgtcttcgagtcaagggctatttgccgttacatctgtgaccagtactcggaccgtggcaaccggactctcctaggccggaaggaagacggcgcggtaggccgcgccgccatcgagcaatgggtagaatctgaaggccaggcatttaaccctccgagcttggccatcgcattccagctcaccttcgcgccgctcatgggtatggccaccgacatggccgtggtcgagcagaatgaggcgaagctcgccaaggtgcttgatgtatacgagcggcggctggcggagagccagtatttcgccggcgacgagttcacccttgccgaccttgtgcacatgcccaacactgatcttctcgtgagcaagaccggcaaggcgggtctgatcaccgagagaaagaacctgtccagatggtgggacgaggtctcggctcgtccgtcgtggaagaaggttgtcgagttgcagagtgtaccacgaccctctaaagcttgaggcccccttcatcttttagtcgagcagcttctggtggtaattagtcacattctgttatgtgttgccattgctgttaaagtgtgaattgtgaaagactcgggccgctttgtactactccttctatctatctctgctattatt

SEQ ID NO: 16545 - protein, 226 aa, Glycine max
MAAPVTVYGPAISPAVARVAACLLEKDVAFQLEAVDMSKGEHKSPSFLKLQPFGQVPAFKDHLTTVFESRAICRYICDQYSDRGNRTLLGRKEDGAVGRAAIEQWVESEGQAFNPPSLAIAFQLTFAPLMGMATDMAVVEQNEAKLAKVLDVYERRLAESQYFAGDEFTLADLVHMPNTDLLVSKTGKAGLITERKNLSRWWDEVSARPSWKKVVELQSVPRPSKA

SEQ ID NO: 16546 - protein, 190 aa, Glycine max
MSKGEHKSPSFLKLQPFGQVPAFKDHLTTVFESRAICRYICDQYSDRGNRTLLGRKEDGAVGRAAIEQWVESEGQAFNPPSLAIAFQLTFAPLMGMATDMAVVEQNEAKLAKVLDVYERRLAESQYFAGDEFTLADLVHMPNTDLLVSKTGKAGLITERKNLSRWWDEVSARPSWKKVVELQSVPRPSKA

SEQ ID NO: 16547 - DNA, 1150 bp, Glycine max
aacaatttattagaaacatccaactttaaacatatttgtgattcactcttgcagtgtgttttcaataggaaaagttagcttttgagtttcttacagcattcaattatattgaaatttatagattgccatgctaacctgttcaagtccactattctacagtgcaaagccaggattttttcatgaggaaaatcgtgccaccctatttgaggttgtgcctgagactggaatgctactcaatacagataatggctctcctataccccaggtgggtaatacctcagcaaggctattcacagaagcaaagaatcatgcttgtccagttttccagggaggcaatgtttctcatctgcataaactgctttccattgaatcaagttcacaggttctctatgttggggatcacatttatggagatatactacgcagcaaaaaggttcttggatggagaacaatgcttgtaatcccagagctggagaaggaggttaaactactctgggaatctagggatacccgcaaggaacttcaattcttgaggagtgagcgtgactgcattgaggatgaaatacatcatttgaaatggtctctcaaattcaagaatccagatgctgattccaagcagaagttatcttctgaacttgataaattaaagcttgaaagagagagagtgcgattaagtcatcaagaagctcagaaaaaattacatcaaaggtttcacgagccatggggacagcttatgaaaactggttatcagaattctcgctttgctcatcaggttgagagatttgcttgcctttatactagtcaagtatctaacctgggcttatactctccagacaagtattacagacctagtgaagatttcatgcaacatgaatttggcattatggcttgtgagacgccagacatttaagttgaggaatttggggtagtttggatttggaaaccgaattgccgaattctgctctgcccagtgttcagtgttcctggttctcatctcccttctctgttttgttggctttggacagagctccgtttagtaattgatctctccccctcccccccaaagaaaagaaaaagaaaaaattgctatatagtattatttttaacgtttgctacagtgggtaaaaaatactagattttagcgttgtat

SEQ ID NO: 16548 - protein, 260 aa, Glycine max
MLTCSSPLFYSAKPGFFHEENRATLFEVVPETGMLLNTDNGSPIPQVGNTSARLFTEAKNHACPVFQGGNVSHLHKLLSIESSSQVLYVGDHIYGDILRSKKVLGWRTMLVIPELEKEVKLLWESRDTRKELQFLRSERDCIEDEIHHLKWSLKFKNPDADSKQKLSSELDKLKLERERVRLSHQEAQKKLHQRFHEPWGQLMKTGYQNSRFAHQVERFACLYTSQVSNLGLYSPDKYYRPSEDFMQHEFGIMACETPDI

SEQ ID NO: 16549 - protein, 227 aa, Glycine max
MLLNTDNGSPIPQVGNTSARLFTEAKNHACPVFQGGNVSHLHKLLSIESSSQVLYVGDHIYGDILRSKKVLGWRTMLVIPELEKEVKLLWESRDTRKELQFLRSERDCIEDEIHHLKWSLKFKNPDADSKQKLSSELDKLKLERERVRLSHQEAQKKLHQRFHEPWGQLMKTGYQNSRFAHQVERFACLYTSQVSNLGLYSPDKYYRPSEDFMQHEFGIMACETPDI

SEQ ID NO: 16550 - protein, 152 aa, Glycine max
MLVIPELEKEVKLLWESRDTRKELQFLRSERDCIEDEIHHLKWSLKFKNPDADSKQKLSSELDKLKLERERVRLSHQEAQKKLHQRFHEPWGQLMKTGYQNSRFAHQVERFACLYTSQVSNLGLYSPDKYYRPSEDFMQHEFGIMACETPDI

SEQ ID NO: 16551 - DNA, 828 bp, Glycine max
atccccccgcaaaaaccagatctacaatctcacactgcgcctcgctcggccttggtgcttcttgggccgagccctagccactccgcgctccttcccgatcatctcctctcgctctccattttgggacttccagcatggctgatgaaactggcaatgacagtcagatgttcgaaggtaatgagattgttgaccctggtaatgaggcagtccatggtgatgaggcagtccaaggtggcgagctggtcgaagttgatgagctagctcaaggtgatgagttggctcaaggcgaggacttaacacagggtgacgaattgctccaagggaatgagatggccatcactgaggtggccactcctccaaccacgaggcgccggagaaagaagtccctggtgtgggagcacttcactatcgaagatgctgctggagaggccactcgggcttgctgcaaactttgcaagcaaaccttcgcgtacagctctggttcaaaaattgctgggactagccatctcaagaggcacatcaccttgggttcctgtcctaagataaaaggccaagggcataagctagcaattacaattgggactgacaatgatggtgatggtaccgtggagaggcggtcaaagaggcgttacagatatactggttatgcgaatgcggcttttgatcaagaccgcagttattcatacttggcaaagatgatcattttgcatgactacccgctccacattgttcaacaaccagccttcactgcttttattgatagtctgcagcctcgtttcagggtagttgatgttgatgcaatggaggtggaggtttatgctgtttacc

SEQ ID NO: 16552 - protein, 231 aa, Glycine max
MADETGNDSQMFEGNEIVDPGNEAVHGDEAVQGGELVEVDELAQGDELAQGEDLTQGDELLQGNEMAITEVATPPTTRRRRKKSLVWEHFTIEDAAGEATRACCKLCKQTFAYSSGSKIAGTSHLKRHITLGSCPKIKGQGHKLAITIGTDNDGDGTVERRSKRRYRYTGYANAAFDQDRSYSYLAKMIILHDYPLHIVQQPAFTAFIDSLQPRFRVVDVDAMEVEVYAVY

SEQ ID NO: 16553 - protein, 221 aa, Glycine max
MFEGNEIVDPGNEAVHGDEAVQGGELVEVDELAQGDELAQGEDLTQGDELLQGNEMAITEVATPPTTRRRRKKSLVWEHFTIEDAAGEATRACCKLCKQTFAYSSGSKIAGTSHLKRHITLGSCPKIKGQGHKLAITIGTDNDGDGTVERRSKRRYRYTGYANAAFDQDRSYSYLAKMIILHDYPLHIVQQPAFTAFIDSLQPRFRVVDVDAMEVEVYAVY

SEQ ID NO: 16554 - protein, 166 aa, Glycine max
MAITEVATPPTTRRRRKKSLVWEHFTIEDAAGEATRACCKLCKQTFAYSSGSKIAGTSHLKRHITLGSCPKIKGQGHKLAITIGTDNDGDGTVERRSKRRYRYTGYANAAFDQDRSYSYLAKMIILHDYPLHIVQQPAFTAFIDSLQPRFRVVDVDAMEVEVYAVY

SEQ ID NO: 16555 - DNA, 626 bp, Glycine max
aaacataccaaactctttcaacacctgtaaaatcggcaagcttcatcaaatcctcccaacacatccatggcgatttctcacgctcagcctctgcttcttctcctcttctcactcttcctcttaccttctctgcgcgccacttctttccacaactgcgataagaggctcgatcccgttaaggtcacaggtgtggagatctctcctgaccctgttgtgagtggcaaagccgcaacatttaagatcactggttctactgatgaagacatctctggaggagaagtagtcatcagtgtttcactctatggagttcatatccataccgaaactcatgatctctgcgatgagtcgtcctgcccgatcgcacctggcacctttgtcctttctcattcccaaacactgccttctattacaccacccggtacttatacgcttaagatgacgataaacgacaagaatggcgggcgactgacctgcatcagcttcaagttcaagatcacattgttttccacggtttctgctagttaagttttccggtgcaaatatgtttcctcttttgtaaaactctctcctagacttgtgtggtgtccaaataaaatgcccctttgaggcttgtctttgatctcctt

SEQ ID NO: 16556 - protein, 152 aa, Glycine max
MAISHAQPLLLLLFSLFLLPSLRATSFHNCDKRLDPVKVTGVEISPDPVVSGKAATFKITGSTDEDISGGEVVISVSLYGVHIHTETHDLCDESSCPIAPGTFVLSHSQTLPSITPPGTYTLKMTINDKNGGRLTCISFKFKITLFSTVSAS

SEQ ID NO: 16557 - DNA, 1743 bp, Glycine max
gattctccttgaaggcactgcagcataccacaaaaccccttgtccctctctcacgttaaacggcagagccactgcaacaagaagcagcagagttcgccgctgctccgcaaccttaccctatcaattttcgtccttgttttcgtaattgcagcgaagaatggggaagcgtaaggagcggattcagaacccggaacccttcgatccgtacggcgccgaccccgcgaaaacgaagaagcgctcgaaggcgccgaagcggcaccagcaggaggagcagttcatcgctcccaaactcagctccaagatcatgaagcaggcgctaatccagcagaaggaggaggagaaggaggaggcgcccgagaacaacgccgcaaatttattcgaagaggttccggatgtcgaggaagacggcggcgacgacatcgacgactttgccgggttctccgaaacgcagagtcagttcgccgaatatgatgaggaaattaatgaggaggatgagagactaatggaagcatttgcattgaaggagcctggtcagcagaaaacacttgctgacctcattgtccaaagaataaaagaaaaggatgcgtctgttgcttcagaaaatcgacccgttccaaaattggataactccataattgacatatacaagggggttgggactcatctcagcagatatacaataggcaaaatacccaaggcattcaaacacattccctctatgcaactttgggaggaggtcttgtatataaccgaacctgagaattggtctccaaatgctctttatcaagccactaggatttttgcttctaattttggtgcaaaaaaggcagagcgcttctacaagcttgtgttgcttccaagagtgagagaagatataaggaagaacaaacggctgcattttgctttatatcaaactctgaaaaaggctttgtacaaacctgctgcattctttaagggcatactgttttcactatgcgagtcacgcacttgcactcttagggaagcagtcatcataggaagcattatagaaaaggtttctattcctccacttcattcaagtgttgcgctattgaagctttctggaatggaatattgtggcaccacaagctatttcataaagcttcttctggagaaaaaatatgctttgccatatcgtgtggttgatgcagttgttgctcattttacaagatttctcaatgaaaccaggataatgcctgttatatggcaccagtcacttcttgcttttgtgcagaggtacaaaaatgagctgcagaaggaagataaggatagattaaggaatctactggaaaagcaaaaacataaattggttacacctgaaattagtagagagctagaccacagccgcaaccgaggtgaaaaggaggaagatcttatgtcaatttccagtccagtatatgtgataaacaagactattgaagaagatagatttgacattccagatgtaccaatggaggaggattaatttattgtggatttttcatcgctattcacttgggagggagaaaatgtttagagacatgtcctcgtttagtttcacaagggtgcagttttgagcgtcagcaatcttgtactgcaatgcatgggatttataattattatttggccattttatattttttcagtggttttttgacaaatgcaatctttttctgatgtattcttaccttaagtgccctaaaatacaattcaacttgctataatatttctagtgttttaaatgtg

SEQ ID NO: 16558 - protein, 441 aa, Glycine max
MGKRKERIQNPEPFDPYGADPAKTKKRSKAPKRHQQEEQFIAPKLSSKIMKQALIQQKEEEKEEAPENNAANLFEEVPDVEEDGGDDIDDFAGFSETQSQFAEYDEEINEEDERLMEAFALKEPGQQKTLADLIVQRIKEKDASVASENRPVPKLDNSIIDIYKGVGTHLSRYTIGKIPKAFKHIPSMQLWEEVLYITEPENWSPNALYQATRIFASNFGAKKAERFYKLVLLPRVREDIRKNKRLHFALYQTLKKALYKPAAFFKGILFSLCESRTCTLREAVIIGSIIEKVSIPPLHSSVALLKLSGMEYCGTTSYFIKLLLEKKYALPYRVVDAVVAHFTRFLNETRIMPVIWHQSLLAFVQRYKNELQKEDKDRLRNLLEKQKHKLVTPEISRELDHSRNRGEKEEDLMSISSPVYVINKTIEEDRFDIPDVPMEED

SEQ ID NO: 16559 - protein, 392 aa, Glycine max
MKQALIQQKEEEKEEAPENNAANLFEEVPDVEEDGGDDIDDFAGFSETQSQFAEYDEEINEEDERLMEAFALKEPGQQKTLADLIVQRIKEKDASVASENRPVPKLDNSIIDIYKGVGTHLSRYTIGKIPKAFKHIPSMQLWEEVLYITEPENWSPNALYQATRIFASNFGAKKAERFYKLVLLPRVREDIRKNKRLHFALYQTLKKALYKPAAFFKGILFSLCESRTCTLREAVIIGSIIEKVSIPPLHSSVALLKLSGMEYCGTTSYFIKLLLEKKYALPYRVVDAVVAHFTRFLNETRIMPVIWHQSLLAFVQRYKNELQKEDKDRLRNLLEKQKHKLVTPEISRELDHSRNRGEKEEDLMSISSPVYVINKTIEEDRFDIPDVPMEED

SEQ ID NO: 16560 - protein, 326 aa, Glycine max
MEAFALKEPGQQKTLADLIVQRIKEKDASVASENRPVPKLDNSIIDIYKGVGTHLSRYTIGKIPKAFKHIPSMQLWEEVLYITEPENWSPNALYQATRIFASNFGAKKAERFYKLVLLPRVREDIRKNKRLHFALYQTLKKALYKPAAFFKGILFSLCESRTCTLREAVIIGSIIEKVSIPPLHSSVALLKLSGMEYCGTTSYFIKLLLEKKYALPYRVVDAVVAHFTRFLNETRIMPVIWHQSLLAFVQRYKNELQKEDKDRLRNLLEKQKHKLVTPEISRELDHSRNRGEKEEDLMSISSPVYVINKTIEEDRFDIPDVPMEED

SEQ ID NO: 16561 - DNA, 572 bp, Glycine max
tttttctgataatctcccatcgatcgattttgttaatacttttctgagatttgtttgaattttctcttgaaaatgtcttgctgcggaggaaactgtggttgtggatccggctgcaaatgcggcagcggatgcggaggctgcaaaatgtacccggacttgggcttttccggcgagaaggccacaactgaggcgtttgtctttggcgttgcaccagtgatgaagaaccagtacgaggcttccggcgagggtaacgcagagaacgatgcatgcaagtgtggatctgactgcaagtgtgacccttgcacctgtaaatgaataaaaaaacctttttcaagaaggcagagataatcagagtctcaatttaagcaataatatagccctgccgaattgtattagctcagcttttatgtgtaatgctaaaaatggctgcagccttgtcctttaagcccataatgttcttcgtttgtgtttacgttgttcttagatgtctctgccatatgtgaccatagttgttgagtcagtttgtatatataataatactcaactaataatataaacctaaaaatgttttt

SEQ ID NO: 16562 - protein, 80 aa, Glycine max
MSCCGGNCGCGSGCKCGSGCGGCKMYPDLGFSGEKATTEAFVFGVAPVMKNQYEASGEGNAENDACKCGSDCKCDPCTCK

SEQ ID NO: 16563 - protein, 56 aa, Glycine max
MYPDLGFSGEKATTEAFVFGVAPVMKNQYEASGEGNAENDACKCGSDCKCDPCTCK

SEQ ID NO: 16564 - DNA, 782 bp, Glycine max
ccccaccctttcgcctagtgcccctaggccggcctccgggctcgaacccactgctctaacaaataataaatccgcgtacaaatctacccccactgacccagatcatcctcgtccccatccgcccccgccgccgatccgcgccacaattcacatctgacttcccccaattttatcttgcttcgattcgattctcttggttcgttcgtaggggctagggttgggagccgatcgcgcgccgccggagccggtcgatagggttagggttagagtggggaggggctgagatggagaagaagaaggcggcggtgccgctggtctgccacggccactcgcggccggtcgtcgacctgttctacagccccgtcacgcccgacggctacttcctcatcagcgccagcaaggactcaaatccaatgcttcgtaatggtgagactggagattggattgggacttttgaaggtcataaaggtgctgtttggagctgttgccttgacacaaatgctctgcgtgctgcctctggttcagcagacttttcagctaaagtatgggatgcactaacaggtgatgaactacattcatttgaacacaagcatatagtccgtgcgtgtgcgtgtccatgaataaatcttagcttgtctcggcaagctgggtgcgagtcccttgtttgttttttgtatgattattaccagtgtgcatgcgttgttgtttcttgttgggtttatgggattatcccggccggtcaatccttctctcatgtagtaagattttattttgggcaaatc

SEQ ID NO: 16565 - protein, 111 aa, Glycine max
MEKKKAAVPLVCHGHSRPVVDLFYSPVTPDGYFLISASKDSNPMLRNGETGDWIGTFEGHKGAVWSCCLDTNALRAASGSADFSAKVWDALTGDELHSFEHKHIVRACACP

SEQ ID NO: 16566 - protein, 68 aa, Glycine max
MLRNGETGDWIGTFEGHKGAVWSCCLDTNALRAASGSADFSAKVWDALTGDELHSFEHKHIVRACACP

SEQ ID NO: 16567 - DNA, 1147 bp, Glycine max
acacacgctccgcctccacctccgcttcccatttcccgccgcctcctttcctaaaaatctacacaaagattcgtaggaaaatcctgcccaaatcccccacctcccgtttctgctcccgttcccaccccaatcccctccaagaaaccctcgcccccctcgcctcgccgccatgggcagcgccgcctcgccgccgcgggccctcgacgcggcgacgcaggaggacctcaagcgcgtctccgcgcaccgcgccgtcgacatggtggagtccggcatgacgctggggctcggcaccggctccacggccgcgcacgcgctcgaccgcctcggggccctcctccgcaccggcgcgctgcgcgcggtcgccggggtgcccacctccctcaagacggaggcgcacgccgcgcgcgtcgggatccccatgctcgcgctcgccgacgccgccgagatccacctctccatcgacggcgccgacgaggtcgacccggacctcaacctcgtcaagggccgcggcggctcgctcctccgcgagaagatgatcgagggcgccggcgcccgcttcgtcgtcatcgtcgacgagtccaagctcgtcccccgcctcggctgcacgggctccgtgcccgtcgaggtcgtccccttcggcagcgcctacacgctcggcctcatccgcatggtgttcgacaaattgccgggcttccacgccaggctcaggaccgtcaagtccaaggccggcgacggccaggaggagctctttctcaccgacaacggcaaccacatcgtcgagatgttcttcgaggacggcatacacggcaacctgcgcgacataagcgacagcctgctgcgcatcacgggcgtcgtcgagcacggcatgttcctcggcatggccaccaaggtgatcgtcgccaagaaggacggcaccgtggcggtcctcagcaagaagtagcctggccgcctggggaagagtctgcagaggagatgacaataagcccagattcaagctgttcttgctcctgcggtgaacttgctctacgttactgttacagcgttttctcctattcatgggtaatgcgatggtgcccagcttaatgtggtgaagctaataaattttggacttcgctccataatgttatcaagtcagttttgtacttcc

SEQ ID NO: 16568 - protein, 256 aa, Glycine max
MGSAASPPRALDAATQEDLKRVSAHRAVDMVESGMTLGLGTGSTAAHALDRLGALLRTGALRAVAGVPTSLKTEAHAARVGIPMLALADAAEIHLSIDGADEVDPDLNLVKGRGGSLLREKMIEGAGARFVVIVDESKLVPRLGCTGSVPVEVVPFGSAYTLGLIRMVFDKLPGFHARLRTVKSKAGDGQEELFLTDNGNHIVEMFFEDGIHGNLRDISDSLLRITGVVEHGMFLGMATKVIVAKKDGTVAVLSKK

SEQ ID NO: 16569 - protein, 227 aa, Glycine max
MVESGMTLGLGTGSTAAHALDRLGALLRTGALRAVAGVPTSLKTEAHAARVGIPMLALADAAEIHLSIDGADEVDPDLNLVKGRGGSLLREKMIEGAGARFVVIVDESKLVPRLGCTGSVPVEVVPFGSAYTLGLIRMVFDKLPGFHARLRTVKSKAGDGQEELFLTDNGNHIVEMFFEDGIHGNLRDISDSLLRITGVVEHGMFLGMATKVIVAKKDGTVAVLSKK

SEQ ID NO: 16570 - protein, 222 aa, Glycine max
MTLGLGTGSTAAHALDRLGALLRTGALRAVAGVPTSLKTEAHAARVGIPMLALADAAEIHLSIDGADEVDPDLNLVKGRGGSLLREKMIEGAGARFVVIVDESKLVPRLGCTGSVPVEVVPFGSAYTLGLIRMVFDKLPGFHARLRTVKSKAGDGQEELFLTDNGNHIVEMFFEDGIHGNLRDISDSLLRITGVVEHGMFLGMATKVIVAKKDGTVAVLSKK

SEQ ID NO: 16571 - DNA, 819 bp, Glycine max
ctaattccagaaccatcccctccgacctaggctatggctttcatcgtgtccaagctcgcgcgggcagccctcgcatcccgccccgttggagatattgctggtggcatctccccgtgtctctcccggctctatctggcggctggtaccagccgtcgcatgtttgcagctgcaggcggtcccaagtcaaaagaagcaccccgaatatttccccttgttgatgagaattccattaagtcgaaggaatccctatgggccttgtatgaatgctggtgcaagtattggggggtatcccgtgaccgtgaagagatggtccgccggttcaagtcatttgaggctactgcacagtgggtttacaaaatgaacaactctgggtgttcgcaagtgtctcaactgggcccgcatgcagatttttcagagagtgagtttgctgaggtggtgtttcctccacttcctgatgatgatgatgaagacataaaagagatggtgccaggtcaagatttgggccaggagcttgaggagcccttaaataattaattcgagaaattatgaacttgtcttactccatccgttcccaaatataagtctttctagagattcaacaagtgactacatacggagcaaaatgagtgaatctgcactctaaaatatgtctacatgcatacgtatgttgtagtccatttgaaatgtctaaaaagacttatatgtaggaacggatgagtatttggttgtggtaatactgtggtactgggattattgttgttgtctggttgttctcatggaaccaaattagaattgaaataactttgtgttattgctctt

SEQ ID NO: 16572 - protein, 166 aa, Glycine max
MAFIVSKLARAALASRPVGDIAGGISPCLSRLYLAAGTSRRMFAAAGGPKSKEAPRIFPLVDENSIKSKESLWALYECWCKYWGVSRDREEMVRRFKSFEATAQWVYKMNNSGCSQVSQLGPHADFSESEFAEVVFPPLPDDDDEDIKEMVPGQDLGQELEEPLNN

SEQ ID NO: 16573 - protein, 125 aa, Glycine max
MFAAAGGPKSKEAPRIFPLVDENSIKSKESLWALYECWCKYWGVSRDREEMVRRFKSFEATAQWVYKMNNSGCSQVSQLGPHADFSESEFAEVVFPPLPDDDDEDIKEMVPGQDLGQELEEPLNN

SEQ ID NO: 16574 - DNA, 1309 bp, Glycine max
atcacatcgtctcaccaagcagcagctagctaagctaagcctagccaaagcttctctagcttcggtagtccaggaaacatgaggctcgcggtggttctcctctgcgccctggtggccgtccaggtcgcgctcctcgccgccccggcggaggccggcgagctggtggtcgggtactacgacaagaaatgcaggggcgtggagaacgtcgtccagtggcacgtcaggagggcgctcaagaccaaccgccgcgccggtgccgccctcgtccgcctcctcttccacgactgcttcgtcaggggttgcgatgcctctgtgctccttgacgcgtcccccgagaaccctcacccggagaaggaggcgccggtgaacatcgggctggccgccttcgacctcctggaggagatcaaggcggccgtcgaggacaggtgccccggcgtggtgtcctgctctgacatcctcatttacgcagcccgtgacgcggcccacgccctcagcaatggcaacatccacttcgacgtccctgccgggcgcctcgacggcctcgtctcctcggccgccgaggcccaggcggagctcccggactccaccttcaccgtgcagcagctcatcgacaacttcgcacgcaaggacttcgacgtggaggagctggtcatcctgtccggcgcgcactccatcggcgtcggccactgctcctccttcaccggccgcctcaccgcgccgccggagcagatcaacccggcctaccgcaaccttctcaaccacaagtgccaccagggcgccaacccggccgtcgtcaacaacgtccgcgatgaggactacgagacggtgtccaagttcatgcccgggttcaccagccgggtgcgcaagatcagcgacttcctcgacaacaccttctaccacaacaacctcgccaggatcgtcagcttcaactccgactggcagctcatgacccacaccgaggccaggggccacgtccacgagtacgccgacaacgccacgctctgggacggcgacttcgcggaatccctgctcaagctcagcaagctgtccatgcccgccgggagcaagggcggcatcaggaagaagtgcagcatcgccacccaccctctctactaaacaagtcgtatgcatgcatgaacaaggtcgatccaacgaagaagagaacctttgcccctggcggtgtgcggatttcttcaataatcatgtgatttttctggttcaatccattcttttgattcccattggttgtgtattttatttatggcaacatatatgtatcacggaaataaagttacggtctttcaaatgt

SEQ ID NO: 16575 - protein, 345 aa, Glycine max
MRLAVVLLCALVAVQVALLAAPAEAGELVVGYYDKKCRGVENVVQWHVRRALKTNRRAGAALVRLLFHDCFVRGCDASVLLDASPENPHPEKEAPVNIGLAAFDLLEEIKAAVEDRCPGVVSCSDILIYAARDAAHALSNGNIHFDVPAGRLDGLVSSAAEAQAELPDSTFTVQQLIDNFARKDFDVEELVILSGAHSIGVGHCSSFTGRLTAPPEQINPAYRNLLNHKCHQGANPAVVNNVRDEDYETVSKFMPGFTSRVRKISDFLDNTFYHNNLARIVSFNSDWQLMTHTEARGHVHEYADNATLWDGDFAESLLKLSKLSMPAGSKGGIRKKCSIATHPLY

SEQ ID NO: 16576 - DNA, 823 bp, Glycine max
tcactcccttccttcgtcctttgcactcccactcctacgcttcccaacctcgccattccgtcgagcacatcccgggcgacgcaggcggccatggaggacggcggcgcgagagcggcggcggtgcagaagctgatggcggccaaggccaagtccggcaagagcttctccgacatcggggccgagacggggctcaccaacgtgtacgtcgcgcagctgctgcgccgccaggcgcagctcaagcccgacacggcggccgcgctgcgggcggccatcccggcgctcaccgaagagctcgtggaactcatgatgcagccgcccttccgctcgtacaaccctgaaatggtccacgagcccgccatatacagactgaatgaagctatcatgcattttggagagagcatcaaggcaatcatcaatgaggactttggtgatggaatcatgtcagctatagacttctactgtaccgtcgacaaagttaaaggggctgatggaaaagaccgtgtggtgctcacatttgatgggaagtatctgcctcacactgaacagaaagccgcgaatatgatgtcgaagttgccctgcaaggcaccttgagataatgagatggctggtactgggagaaggggggtatgtagcttcactaatgtctgcttatacttcggacaaaaaaattgagcgtcccttttctagtctgaatgatcgaccaaataaagagtggtcatatagtatgtaatgtctgcttgtactttggacctggaacagcattcgacatgcttttcctcgtctgaatgatcgactaaataaagtggcaatatagtttgtaaat

SEQ ID NO: 16577 - protein, 196 aa, Glycine max
SLPSFVLCTPTPTLPNLAIPSSTSRATQAAMEDGGARAAAVQKLMAAKAKSGKSFSDIGAETGLTNVYVAQLLRRQAQLKPDTAAALRAAIPALTEELVELMMQPPFRSYNPEMVHEPAIYRLNEAIMHFGESIKAIINEDFGDGIMSAIDFYCTVDKVKGADGKDRVVLTFDGKYLPHTEQKAANMMSKLPCKAP

SEQ ID NO: 16578 - protein, 166 aa, Glycine max
MEDGGARAAAVQKLMAAKAKSGKSFSDIGAETGLTNVYVAQLLRRQAQLKPDTAAALRAAIPALTEELVELMMQPPFRSYNPEMVHEPAIYRLNEAIMHFGESIKAIINEDFGDGIMSAIDFYCTVDKVKGADGKDRVVLTFDGKYLPHTEQKAANMMSKLPCKAP

SEQ ID NO: 16579 - protein, 152 aa, Glycine max
MAAKAKSGKSFSDIGAETGLTNVYVAQLLRRQAQLKPDTAAALRAAIPALTEELVELMMQPPFRSYNPEMVHEPAIYRLNEAIMHFGESIKAIINEDFGDGIMSAIDFYCTVDKVKGADGKDRVVLTFDGKYLPHTEQKAANMMSKLPCKAP

SEQ ID NO: 16580 - DNA, 808 bp, Glycine max
acagcagttgttgagtcagcggttctgggttggagacagagagagagaagttttcagtttcagaaagaaagcaaaagcaatagcaatgggttggatcggtgagactgttgattccatcaaatctcttcagatccgccaggtcctcacccaggctgtgagcctaggcatgattgttacgtctgcactgataatatggaaggcattgatgtgcgttactggcagtgaatctcccgttgttgttgttctttctggaagcatggaacccggattcaagcggggagacatcttgttcttgcacatgagtaaagatcctattcgggcaggggagattgttgtgtttaatgttgatggacgtgagattccaattgttcatcgtgtaattaaggtacatgaaagggaagatactggggaggttgatgttctcacaaaaggagacaacaattatggggatgacaggctactgtatgctcatggtcaactttggctgcaaaggcaccacattatgggtagagccgtcgggttcttaccatacgtaggctgggtgaccatcattatgactgaaaagcctattatcaagtatattctcattggtgctttggggttgctcgtgataacttcgaaagattaaatgatgaatatgaagtcaaaactgcggtctaacttcggatggtagggtgagcagaatataatggtaagattaaaagatgaatctgaaatcattttgtaccattcatagtatatgggggacaatatgatgttaaggatttatgcaaaatagttgaattttggtatattcttacttcttcct

SEQ ID NO: 16581 - protein, 208 aa, Glycine max
QQLLSQRFWVGDREREVFSFRKKAKAIAMGWIGETVDSIKSLQIRQVLTQAVSLGMIVTSALIIWKALMCVTGSESPVVVVLSGSMEPGFKRGDILFLHMSKDPIRAGEIVVFNVDGREIPIVHRVIKVHEREDTGEVDVLTKGDNNYGDDRLLYAHGQLWLQRHHIMGRAVGFLPYVGWVTIIMTEKPIIKYILIGALGLLVITSKD

SEQ ID NO: 16582 - protein, 180 aa, Glycine max
MGWIGETVDSIKSLQIRQVLTQAVSLGMIVTSALIIWKALMCVTGSESPVVVVLSGSMEPGFKRGDILFLHMSKDPIRAGEIVVFNVDGREIPIVHRVIKVHEREDTGEVDVLTKGDNNYGDDRLLYAHGQLWLQRHHIMGRAVGFLPYVGWVTIIMTEKPIIKYILIGALGLLVITSKD

SEQ ID NO: 16583 - protein, 153 aa, Glycine max
MIVTSALIIWKALMCVTGSESPVVVVLSGSMEPGFKRGDILFLHMSKDPIRAGEIVVFNVDGREIPIVHRVIKVHEREDTGEVDVLTKGDNNYGDDRLLYAHGQLWLQRHHIMGRAVGFLPYVGWVTIIMTEKPIIKYILIGALGLLVITSKD

SEQ ID NO: 16584 - DNA, 845 bp, Glycine max
aacacctttcactctcattgacaaccaacaattaagatcaccaataccaccaagtcatgaagcaaagacagatctttgctcgagtggtgattttgttgctcatgttcttagttggagccaggtttgctaaagcaaaagaaggaggagaagaagctgctgataggattttgaaactccctggtcagccaaaagtatcatttaagcaattttctggctatgttactgtcaacaaggttgctggtagagctctcttttactggctcgctgaagctgcccaaaatcctctcaccaaacctttggtcatttggcttaatggaggtccaggatgttcatcagtggcatatggagcatctgaagagattggcccatttagaataaacaaaacagcttctggtctatacaaaaacaagttctcatggaactcagtggccaacctcttgttcttggaagctccggccggcgtcggcttctcctataccaaccgctcctccgacctcctcgacaccggtgaccgccgcaccgctcaagattctctggaatttgttatccaatggctagaacgattccctcgttacaaaactcgggagctctatatcactggagagagctatgcaggtcattatgttcctcaattagccaaggaaatcatgacctacaatgcaaaaaccaagcaccccatcaatctcaaaggaatcatggtaggaaatgcagtgacagacaactactatgataacttgggcacagtgacgtattggtggagccatgctatgatctccgaccagactttccggcaactaatgagtagatgtgattttcacaggcagaaggaatctgatgagtgtgag

SEQ ID NO: 16585 - protein, 263 aa, Glycine max
MKQRQIFARVVILLLMFLVGARFAKAKEGGEEAADRILKLPGQPKVSFKQFSGYVTVNKVAGRALFYWLAEAAQNPLTKPLVIWLNGGPGCSSVAYGASEEIGPFRINKTASGLYKNKFSWNSVANLLFLEAPAGVGFSYTNRSSDLLDTGDRRTAQDSLEFVIQWLERFPRYKTRELYITGESYAGHYVPQLAKEIMTYNAKTKHPINLKGIMVGNAVTDNYYDNLGTVTYWWSHAMISDQTFRQLMSRCDFHRQKESDECE

SEQ ID NO: 16586 - protein, 248 aa, Glycine max
MFLVGARFAKAKEGGEEAADRILKLPGQPKVSFKQFSGYVTVNKVAGRALFYWLAEAAQNPLTKPLVIWLNGGPGCSSVAYGASEEIGPFRINKTASGLYKNKFSWNSVANLLFLEAPAGVGFSYTNRSSDLLDTGDRRTAQDSLEFVIQWLERFPRYKTRELYITGESYAGHYVPQLAKEIMTYNAKTKHPINLKGIMVGNAVTDNYYDNLGTVTYWWSHAMISDQTFRQLMSRCDFHRQKESDECE

SEQ ID NO: 16587 - DNA, 990 bp, Glycine max
gcacagcttgttccttaattaaagcaaaaaaaaaatcacaatggttaaaacctctctccctctcaccgctttcttcttcctcctcctcatctcctcctccttagccgcagacaccggccggctctttctcaccgtcgtcaaccactgtcccttcaccgtctggccagccattcagcccaacgccggccaccccgtcctcgagaaaggtggcttcgctctcccaaccaacacccaccgctctttctccccaccaaccacccactggtccggtcgtatctggggtcgaaccggctgctcccactacaacggcaaattctcttgcgtcaccggagactgcggaaaccgtctcgagtgcaacggtctcggtggcgcaactccggcttctctcgctcagttcgacctccaccacggtggacacagagacttatcctcctacggtgtctctctagtcgacggtttcaacgttccgatgacagttactcctcacgaaggccgtggagtttgtcccgttgttggttgtcgcgaagacctcttgagaacgtgcccggctcatcttcagctccggtcgggacacggtggacacgtggtggcctgtaagagtgggtgtgaggcgttccgcacggatgagttgtgctgtaggaaccattacaatagtcctcaaacatgtcgtgcttcgagccattcgctgttctttaagcacgcgtgtccttcgactatgacgttcgctcatgatagtccatcgcttatgcatgattgttcttctcctagagagctcaaagtcatcttctgccactaatgtgtctctcttgttcggtttattctgtatggttgtactagtgatatcgcactaatctcttatctttctggtttgattggtttagtttgtgatttcccgcgtcagttatgttgttgttcaaaaactatgtagtccaactatgcgattatgtattattatcttttgaattgattctgcttagttatcttcttcat

SEQ ID NO: 16588 - protein, 251 aa, Glycine max
MVKTSLPLTAFFFLLLISSSLAADTGRLFLTVVNHCPFTVWPAIQPNAGHPVLEKGGFALPTNTHRSFSPPTTHWSGRIWGRTGCSHYNGKFSCVTGDCGNRLECNGLGGATPASLAQFDLHHGGHRDLSSYGVSLVDGFNVPMTVTPHEGRGVCPVVGCREDLLRTCPAHLQLRSGHGGHVVACKSGCEAFRTDELCCRNHYNSPQTCRASSHSLFFKHACPSTMTFAHDSPSLMHDCSSPRELKVIFCH

SEQ ID NO: 16589 - DNA, 659 bp, Glycine max
tcaaattctcttctgggtttcctaaattctcaacctttttctccaaattcggcttcttaaaatcatggttcgctgtagcaacaacctcgttggcatactcaacttcatcgtcttcctcctctctatccccatcttagctggaggaatctggcttagccaaaacgaaagtggaatccctaacctctacagcctccactcttggattggtattggtgtcatttctctttatggcttccaggtaaaccttagaagtgggttgcttccgtggcacgcaatcctaggcctatttgtttatatactcgcggttgggaacgcagctttagggtttctggagaagctgactttcctggagagtggtgctaagctcgacaagtacgggccagaagcgtttcttgtgaacttcacagccattgtcaccattctctttggtgccttggtggtactcactgcttctgctaagtctccctcctccattgacgatgctgataactacagctattctgctatatgaaaacgctttatacatttcttcagttcctcgcatatctttgctgctacttgtgctgtcaaaagattatataattatatgatgtatttgtagtgaaaacactttgtgtttgtgattccgctgattatgagtttgattacttctggtgtgc

SEQ ID NO: 16590 - protein, 148 aa, Glycine max
MVRCSNNLVGILNFIVFLLSIPILAGGIWLSQNESGIPNLYSLHSWIGIGVISLYGFQVNLRSGLLPWHAILGLFVYILAVGNAALGFLEKLTFLESGAKLDKYGPEAFLVNFTAIVTILFGALVVLTASAKSPSSIDDADNYSYSAI

SEQ ID NO: 16591 - DNA, 699 bp, Glycine max
aaatccttaacagcatccacgatctaagcgtgtgcacgtacgccgcagctccagaaccaggacacgcccactgtatacgcagtcgcacagctcgatcgcaatggcgtcgctcgtcgccgtccagccggtcgccgtgaggggcctggccggcagctccatctccggccgcaagctcgccgtccggccctcctccgccgccgtctcccgctccacccgcagggctcgcggggcggcggtggtggccaagtacggggagaagagcgtctacttcgacctggacgacatcgccaacacgacggggcagtgggacctgtacggcagcgacgccgcgtcgccctacaacggcctgcagagcaagttcttcaacaccttcgccgcgcccttcaccaagcgggggctgctgctcaaggtgctgctgctcggcggcggctcgctgctcgcctacgtcagcgccaccgcctcccccgacctgctccccatcaagaaggggccccagctgccgcccaccccgggaccacgcggcaagatctaaagctctgcaatcaaggccttcttcctcctcccgcctcgcctcgtgcttgtgtaccatggatctcgtcgattccccccttatctatgtgcttgctctgttgatacttgatctttgtactttgtatcagtaattggaaagatgctgcgtgcatggtgcatgcaattatc

SEQ ID NO: 16592 - protein, 143 aa, Glycine max
MASLVAVQPVAVRGLAGSSISGRKLAVRPSSAAVSRSTRRARGAAVVAKYGEKSVYFDLDDIANTTGQWDLYGSDAASPYNGLQSKFFNTFAAPFTKRGLLLKVLLLGGGSLLAYVSATASPDLLPIKKGPQLPPTPGPRGKI

SEQ ID NO: 16593 - DNA, 828 bp, Glycine max
acttccattgtatcttttctagggtttttaaggtttccgcacgaatcttcaatacacgtatcaatatcatcatgactaccgaagagaaagagatcctcgccgccaaattggaagagcagaagatcgatcttgataagcctgaggttgaggacgctgacgacaacgatgaggatgactccgaagacgatgataaggatgatgatgcagagggacaagatggagagggaggcaagtcaaaacaaagcaggagtgagaagaagagtcgcaaagccatgttgaagcttgggatgaaacccatcactggtgttagccgtgtcaccatcaaaaagagcaagaacatcatgttcgtcatatcgaaacccgatgtgttcaagagccctgcgtcagacacttatgtgatcttcggagaggcaaagattgaggatttgagctctcagatccagtcccaggccgcagagcagttcaaggctccggatctcagcaacgttgtctcgcaaggtgaatcttcgtccagcgctgcagtggttcaagacgatgatgaggagattgacgaggatggtgttgacgcaaaggacgttgagttggtgatgacccaagcgggagtgactaggccaaaggctgtgaaagcgcttaaggctgctgatggagatattgtcactgccatcatggaacttaccacctaaatctaaatcgtttcaactttaaatgtggtgcctgtcaaaaatgagttggaattttgtttttcatgtttcctttgaagtggttttcagtgttgtatcagtataaacctcatagattattgaatttcagtttgatttgattttgaat

SEQ ID NO: 16594 - protein, 226 aa, Glycine max
FHCIFSRVFKVSARIFNTRINIIMTTEEKEILAAKLEEQKIDLDKPEVEDADDNDEDDSEDDDKDDDAEGQDGEGGKSKQSRSEKKSRKAMLKLGMKPITGVSRVTIKKSKNIMFVISKPDVFKSPASDTYVIFGEAKIEDLSSQIQSQAAEQFKAPDLSNVVSQGESSSSAAVVQDDDEEIDEDGVDAKDVELVMTQAGVTRPKAVKALKAADGDIVTAIMELTT

SEQ ID NO: 16595 - protein, 203 aa, Glycine max
MTTEEKEILAAKLEEQKIDLDKPEVEDADDNDEDDSEDDDKDDDAEGQDGEGGKSKQSRSEKKSRKAMLKLGMKPITGVSRVTIKKSKNIMFVISKPDVFKSPASDTYVIFGEAKIEDLSSQIQSQAAEQFKAPDLSNVVSQGESSSSAAVVQDDDEEIDEDGVDAKDVELVMTQAGVTRPKAVKALKAADGDIVTAIMELTT

SEQ ID NO: 16596 - protein, 136 aa, Glycine max
MLKLGMKPITGVSRVTIKKSKNIMFVISKPDVFKSPASDTYVIFGEAKIEDLSSQIQSQAAEQFKAPDLSNVVSQGESSSSAAVVQDDDEEIDEDGVDAKDVELVMTQAGVTRPKAVKALKAADGDIVTAIMELTT

SEQ ID NO: 16597 - DNA, 1105 bp, Glycine max
atctccaaaaccatggatctctgcacttacttcaaatcccagccctcatggctcctcctcctcttcgccctcggctccctccaactcctcaaattcaccctctccctcctcaactccctctacatctacttcctccgccccgccaagaacctccgccgctacggctcctgggccatcatcaccggccccaccgacggcatcggcaaagccttcgcctttcagctcgcccgcaaggggctcaacctcgtcctcgtcgcccgcaaccccgacaagctcagagacgtctccgagtccatcagatccaagcactccaacgtcgagatcaagaccgtggtgatggacttctccggagatatcgatgatggagtgaggaggatcaaggagacgatcgaagggttggaggttgggattctgattaataacgcggggatgtcgtatccttacgcgaagtactttcacgaggtggatgaggagctgcttgggaacttgcttaagatcaatgttgaggggacgacgaaggttactcaggctgtgttggggaatatgctgaagaggaagcgaggggctattgttaatatgggttctggtgctgctgcgcttatcccttcgtatcctttctactctgtttacgccggtgctaaaacgtacgtggatcagttcacgaggtgtcttcatgttgagtacaagaagagtgggattgatgttcaatgccaggttcccttgtatgttgcgacaaagatgacatcaataagaagagcatcgttcttagtggcatctccagagggatacgcaaaggcagcactgcgttttgtagggtatgaagcacgctgcacaccttactggcctcacgccctcatgggttatgttgtctctgcattgcccgagagcgtctttgaatcctttaacattaagaggtgcctccagatcaggaagaaaggtatgcttaaagactcgaggaaaaaggaatgaaaacttttcgagggtgcatgattttcttctgcagcacttggtttcttgcaagtttctgtttagacttttgcaagacttgtacgctttagtttccgatgtttccaaggttgtttccttattttgaaaattaaaaacc

SEQ ID NO: 16598 - protein, 322 aa, Glycine max
ISKTMDLCTYFKSQPSWLLLLFALGSLQLLKFTLSLLNSLYIYFLRPAKNLRRYGSWAIITGPTDGIGKAFAFQLARKGLNLVLVARNPDKLRDVSESIRSKHSNVEIKTVVMDFSGDIDDGVRRIKETIEGLEVGILINNAGMSYPYAKYFHEVDEELLGNLLKINVEGTTKVTQAVLGNMLKRKRGAIVNMGSGAAALIPSYPFYSVYAGAKTYVDQFTRCLHVEYKKSGIDVQCQVPLYVATKMTSIRRASFLVASPEGYAKAALRFVGYEARCTPYWPHALMGYVVSALPESVFESFNIKRCLQIRKKGMLKDSRKKE

SEQ ID NO: 16599 - protein, 318 aa, Glycine max
MDLCTYFKSQPSWLLLLFALGSLQLLKFTLSLLNSLYIYFLRPAKNLRRYGSWAIITGPTDGIGKAFAFQLARKGLNLVLVARNPDKLRDVSESIRSKHSNVEIKTVVMDFSGDIDDGVRRIKETIEGLEVGILINNAGMSYPYAKYFHEVDEELLGNLLKINVEGTTKVTQAVLGNMLKRKRGAIVNMGSGAAALIPSYPFYSVYAGAKTYVDQFTRCLHVEYKKSGIDVQCQVPLYVATKMTSIRRASFLVASPEGYAKAALRFVGYEARCTPYWPHALMGYVVSALPESVFESFNIKRCLQIRKKGMLKDSRKKE

SEQ ID NO: 16600 - protein, 210 aa, Glycine max
MDFSGDIDDGVRRIKETIEGLEVGILINNAGMSYPYAKYFHEVDEELLGNLLKINVEGTTKVTQAVLGNMLKRKRGAIVNMGSGAAALIPSYPFYSVYAGAKTYVDQFTRCLHVEYKKSGIDVQCQVPLYVATKMTSIRRASFLVASPEGYAKAALRFVGYEARCTPYWPHALMGYVVSALPESVFESFNIKRCLQIRKKGMLKDSRKKE

SEQ ID NO: 16601 - DNA, 1064 bp, Glycine max
agcactttcgccgctgctctccgctttcatagggtttatctctttcctcttcccctctcgcgcacggcagccggattccctaccgcaggcgagccaccacgccggccggagctcggagataaggtagttgtttagcaagcaatcgagaatgtcgtcggtgcagctctccggtgccggtgttgccacggtggccttcaacaacactggtctgcgcccctctcaggcgtcagcagtcagagtgtgctcatcgaggcgctcatctcgtagcctcgttgtcagggctgccactgtcgtcaccccgaagtatacatcactcaagcctctgggagacagagtgcttgtgaagcttagcgcagctgaggagaagaccattggtggaattttgcttccatcctccgcgcagtccaagcctcagggaggcgagattgttgctgttggagggggtagaaccattggggataagaaggtggaggtcagcataccgactggatctcaagttgtatattcaaagtatgctggtactgaggttgaatacaacaactccaagcatcttattatgaaagaggatgacatcataggtattcttgaatctgatgatgtcaaagacatgaagcctctcaatgaccggattctcatcaaggttgcagaggcttcagacaagactgaagctggtcttatcctcaccgagacaaccaaggagaagccatccattggaacagtcgtagctgttggtccgggctctcttgacgaggaaggcaagaggcagccattgccagtgtcaccaggcagcaccgtgctgtactccaagtacgcaggcggcgagttcaagggagctgatggcacgaactacattgtgttgagagtgtctgatgtgatggctgagctctcttaagtgtgtggtttattactttgtttcagttttgagttcacgatataggctagcatgagtggtaagattgctatgtgataaccacttgatgctgtttcggatgattacggaattgtacgagcaaacctgttgtctgggataaaaacatttactgaatttgtttacaaagggagcc

SEQ ID NO: 16602 - protein, 247 aa, Glycine max
MSSVQLSGAGVATVAFNNTGLRPSQASAVRVCSSRRSSRSLVVRAATVVTPKYTSLKPLGDRVLVKLSAAEEKTIGGILLPSSAQSKPQGGEIVAVGGGRTIGDKKVEVSIPTGSQVVYSKYAGTEVEYNNSKHLIMKEDDIIGILESDDVKDMKPLNDRILIKVAEASDKTEAGLILTETTKEKPSIGTVVAVGPGSLDEEGKRQPLPVSPGSTVLYSKYAGGEFKGADGTNYIVLRVSDVMAELS

SEQ ID NO: 16603 - DNA, 789 bp, Glycine max
agttagctctatacacacaccttgaaaaccgccatggaactagccggtttaagcttcctcaagctctctttcctcctcagcctcctctccggcggttcagaccttctaaacccaatatccgaaccgagtcttctcgggaaattcccgccgacgtgtaacagaatcgagtgcccaaactacgaggtggttcacgcgggaaacgggtacgagattcgccggtacgatacaacggtctggatttccactgaaccgattcaagacatctctctcaaggatgccacaagaacagctttcttccagttgtttgcgtacatacaagggaagaacgagtatcatcagaaaattgagatgacagctccggtgatcagccaagtctcaccaagcgacggtcctctctgtgaatcttccttcactgtctccttctacgtccccaaaaagaaccagcctgatccagctccagctgagaatctccacatccagaaatggacccctaggcacgtggcggtgagacagttcagcggcttcgtctccgactataacgtcggagaagaagctgcagcgctgtctgctagcctcgaaggtacagcttgggccaatgccatagagaaaagcaaagaagacggtggtgttggggctgattcagcttacacggtggctcagtacaactcgccgttcgagttcattggtcgtgtcaatgagatttggttaccctttcaaatggatgattgattaagtgaaactctttttttttaattatgtaataaataaaaatcagacaagatgttgatt

SEQ ID NO: 16604 - protein, 231 aa, Glycine max
MELAGLSFLKLSFLLSLLSGGSDLLNPISEPSLLGKFPPTCNRIECPNYEVVHAGNGYEIRRYDTTVWISTEPIQDISLKDATRTAFFQLFAYIQGKNEYHQKIEMTAPVISQVSPSDGPLCESSFTVSFYVPKKNQPDPAPAENLHIQKWTPRHVAVRQFSGFVSDYNVGEEAAALSASLEGTAWANAIEKSKEDGGVGADSAYTVAQYNSPFEFIGRVNEIWLPFQMDD

SEQ ID NO: 16605 - protein, 126 aa, Glycine max
MTAPVISQVSPSDGPLCESSFTVSFYVPKKNQPDPAPAENLHIQKWTPRHVAVRQFSGFVSDYNVGEEAAALSASLEGTAWANAIEKSKEDGGVGADSAYTVAQYNSPFEFIGRVNEIWLPFQMDD

SEQ ID NO: 16606 - DNA, 1435 bp, Glycine max
aaagcactctcttctctgcttcaacttgctccctcagaagcgaagaagaagccacagagaactagtctcctactctcacccgcaagaaaaaaatggcatctcacatcgttggatacccccgtatgggtcccaagagagagctcaagttcgctctcgagtctttctgggatggcaagagcagcgccgaggatttgcagaaggtgtcttctgatctcagggcatccatctggaagcagatggctgatgctgggatcaagtacatccccagcaacactttctctcactatgaccaggttctcgacgccaccgccaccctcggtgccgttccaccaaggtacggctggaccggcggcgagattgggtttgatacctacttctccatggccagaggtaatgctaccgtgccagctatggagatgaccaagtggttcgacaccaactaccactttattgtccctgaattgggccctgatgtgaacttcacctatgcttctcacaaggctgttgatgaatacaaggaggccaaggcgcttggagtggataccgttccggtcctcgttggccctgttacatacctgttgctctccaagcctgccaagggagttgagaaatccttttctctcctctctctccttcccaaggttcttgctgtctacaaggaagttattgctgaccttaaggcagctggtgcttcatggattcagtttgatgagcctacccttgtcttggaccttgagtctcacaagttgcaagcattcactgacgcatatgcagaacttgcgcctgctttgtctggtttgaatgttcttgttgagacctactttgctgacatccctgctgaggcatacaagaccctcacatctctgaatggcgtcactgcatatggatttgatttggtccgtggaaccaacactcttgatttgatcaagggtggatttcccagcggaaaatacctctttgctggagtggttgatggaaggaacatctgggccaatgaccttgctgcttctctcactaccttgcagggtcttgagggcattgtgggcaaagataagcttgttgtgtccacctcctcctcccttcttcacactgctgttgatctagttaacgagaccaagttggatgatgagatcaagtcatggctagcttttgctgcccaaaaaattgttgaagttaacgcattggctaaagcattgtctggccacaaggatgaggccttcttctctggtaatgctgctgctctggcttcaaggaagtcttctccaagagtgaccaacgaggctgttcagaaggctgctgctgcattgaagggttcagatcatcgccgtgcaacaaatgtcagtgccagactggattctcaacaaaagaagctcaaccttccaatcctgccaaccaccactattggatccttccctcagactgtagaactgaggag

SEQ ID NO: 16607 - protein, 447 aa, Glycine max
MASHIVGYPRMGPKRELKFALESFWDGKSSAEDLQKVSSDLRASIWKQMADAGIKYIPSNTFSHYDQVLDATATLGAVPPRYGWTGGEIGFDTYFSMARGNATVPAMEMTKWFDTNYHFIVPELGPDVNFTYASHKAVDEYKEAKALGVDTVPVLVGPVTYLLLSKPAKGVEKSFSLLSLLPKVLAVYKEVIADLKAAGASWIQFDEPTLVLDLESHKLQAFTDAYAELAPALSGLNVLVETYFADIPAEAYKTLTSLNGVTAYGFDLVRGTNTLDLIKGGFPSGKYLFAGVVDGRNIWANDLAASLTTLQGLEGIVGKDKLVVSTSSSLLHTAVDLVNETKLDDEIKSWLAFAAQKIVEVNALAKALSGHKDEAFFSGNAAALASRKSSPRVTNEAVQKAAAALKGSDHRRATNVSARLDSQQKKLNLPILPTTTIGSFPQTVELR

SEQ ID NO: 16608 - protein, 437 aa, Glycine max
MGPKRELKFALESFWDGKSSAEDLQKVSSDLRASIWKQMADAGIKYIPSNTFSHYDQVLDATATLGAVPPRYGWTGGEIGFDTYFSMARGNATVPAMEMTKWFDTNYHFIVPELGPDVNFTYASHKAVDEYKEAKALGVDTVPVLVGPVTYLLLSKPAKGVEKSFSLLSLLPKVLAVYKEVIADLKAAGASWIQFDEPTLVLDLESHKLQAFTDAYAELAPALSGLNVLVETYFADIPAEAYKTLTSLNGVTAYGFDLVRGTNTLDLIKGGFPSGKYLFAGVVDGRNIWANDLAASLTTLQGLEGIVGKDKLVVSTSSSLLHTAVDLVNETKLDDEIKSWLAFAAQKIVEVNALAKALSGHKDEAFFSGNAAALASRKSSPRVTNEAVQKAAAALKGSDHRRATNVSARLDSQQKKLNLPILPTTTIGSFPQTVELR

SEQ ID NO: 16609 - protein, 399 aa, Glycine max
MADAGIKYIPSNTFSHYDQVLDATATLGAVPPRYGWTGGEIGFDTYFSMARGNATVPAMEMTKWFDTNYHFIVPELGPDVNFTYASHKAVDEYKEAKALGVDTVPVLVGPVTYLLLSKPAKGVEKSFSLLSLLPKVLAVYKEVIADLKAAGASWIQFDEPTLVLDLESHKLQAFTDAYAELAPALSGLNVLVETYFADIPAEAYKTLTSLNGVTAYGFDLVRGTNTLDLIKGGFPSGKYLFAGVVDGRNIWANDLAASLTTLQGLEGIVGKDKLVVSTSSSLLHTAVDLVNETKLDDEIKSWLAFAAQKIVEVNALAKALSGHKDEAFFSGNAAALASRKSSPRVTNEAVQKAAAALKGSDHRRATNVSARLDSQQKKLNLPILPTTTIGSFPQTVELR

SEQ ID NO: 16610 - DNA, 924 bp, Glycine max
aaccagtcaccgctctctttttcatttacagagatagccctaacttagtcactctctctcacacacactccagttcaaagttcaaacaatggctcctccacagaagctctttctcgccgccattgtcgctgccgtcattgtagccgccaccaccggatatgcacctaatagtgctgcggaagatattgtgcattcctcatgcgtgcacgcgagctatccatcgctatgcgtccgtacactctctacctactctggtccaaccatcacaaaccgtcgcgagctagctcaagccgccgtcaagataagcctctcccacgctcgagcagccgctaagaaactcgcggctgtgagagaaaccgtgggaaagaaacgggtgaaagcggcggttgtggactgcgtggagatgattggagactcggtggacgagctgagccgcacgctaggcgttttaaagcatctacacgtttcgggcgtttcggcgaacgagttcaggtggcagatgagcaacgcgcagacgtgggctagtgcggcgttgacggatgacgacacgtgtctcgatgggtttaaaggggtcgagggtaaggttaaaacggaggtgaagcattggatgacgaaagtggcgagggttacaagcaacgcgctttacatgatcaaccagctagatgaatcacgtggctagccccacgtagtacgttcttgatgttatgatgtgcttgtcctaatggacagttatgatttggtgttagtttttttcgtgtttgcttaattgcgagttatctactatttaaaaatgagaggcattgtccttttaagtagttctgataatggtatactaaataaatggtttatctcttttttcggacggtatgtcattgtatcgtattgtgttgttcccttcggattcgatagcatgtgattttgtct

SEQ ID NO: 16611 - protein, 196 aa, Glycine max
MAPPQKLFLAAIVAAVIVAATTGYAPNSAAEDIVHSSCVHASYPSLCVRTLSTYSGPTITNRRELAQAAVKISLSHARAAAKKLAAVRETVGKKRVKAAVVDCVEMIGDSVDELSRTLGVLKHLHVSGVSANEFRWQMSNAQTWASAALTDDDTCLDGFKGVEGKVKTEVKHWMTKVARVTSNALYMINQLDESRG

SEQ ID NO: 16612 - DNA, 728 bp, Glycine max
gttctcttctcttcaggaacaacacaaaacaaggatgatgtcgcagcaatggggctctccatgtggaagccaatgcaccaataaatacgctgccctcggcaaaatcccatggcgaatattctgcaaaaagggttgcgactcagatggagagacatgggaagaatgtttggaggactgcaatcaaatatgctacaaggatcccgtactaaaggaccagcagtggagtgcttatattgatcgttcccctggagctgccagttattcggaggaatgctttcatgcgtgtgtatctggctgcggttacaagtttgaggttaaatcagaggaagctgataaagtctgtcctaacaggcaaccaaagcctgaaaccaagcctactaagaagccaaagccacaacctgtacgccccatcgatctgcctggtgatatacctgacacttctgcatagtgaaaaacatcagcatatttgacaaaaatccagcatgtatgtatacttgatactttgttggttatattctctcaggaatttttttttctttctttttctttttttttctttttaccttgaaacatgctaattgttatcagcatgagttacttacattttgtggacaacaccatgagtggttgtgcctatttttgccttgagaatttggaggcatcgtgttgcctttaaactgggagcattgatagttggataattacagggcttccatgatttattaagg

SEQ ID NO: 16613 - protein, 148 aa, Glycine max
FSSLQEQHKTRMMSQQWGSPCGSQCTNKYAALGKIPWRIFCKKGCDSDGETWEECLEDCNQICYKDPVLKDQQWSAYIDRSPGAASYSEECFHACVSGCGYKFEVKSEEADKVCPNRQPKPETKPTKKPKPQPVRPIDLPGDIPDTSA

SEQ ID NO: 16614 - protein, 137 aa, Glycine max
MMSQQWGSPCGSQCTNKYAALGKIPWRIFCKKGCDSDGETWEECLEDCNQICYKDPVLKDQQWSAYIDRSPGAASYSEECFHACVSGCGYKFEVKSEEADKVCPNRQPKPETKPTKKPKPQPVRPIDLPGDIPDTSA

SEQ ID NO: 16615 - protein, 136 aa, Glycine max
MSQQWGSPCGSQCTNKYAALGKIPWRIFCKKGCDSDGETWEECLEDCNQICYKDPVLKDQQWSAYIDRSPGAASYSEECFHACVSGCGYKFEVKSEEADKVCPNRQPKPETKPTKKPKPQPVRPIDLPGDIPDTSA

SEQ ID NO: 16616 - DNA, 1198 bp, Glycine max
caagaggcctgtgccgctgtcgattgggtacatggcccagtacatgctgaagccgctgctgggggtgctaatcgcaagggtgttccggatgccatcagccttcttcgcgggtttcatgcttacatgctgtgtctcgggtgcgcagctttcgagctatgctagcttcctggggaaaggagatgttgcgttgagtattctgctcacaacctactccaccatatcttcggtgattgtgacacctattctcactggtttgttgattggttcagtggttccggttaatggaattgcaatggcgaaatcgattctccaggtggttcttctgcctgtgacactaggtctccttctgaatacctatgcaaaaccagtggttaatgtcatacaaccagtgatgccatttgttgctatggtgtgcacatcactctgtattgggagccctcttgctataaataggaccatgctcctctcatcacagggattcatgttacttctccccatagtgactttccacattgcggcctttgttgtgggttactgggtttccaagttgcctcagttgaggcaagaagaaccagtttgtaggactatatcagtgtgtactggaattcagagctccaccctagctgggcttcttgctacccagtttcttggaattagtcaggcagttcctgcagcatgttctgttgttgtcatggcaatatttggtttgactcttgcatcgtactggggaagtggtatgcgaataagggaccttcctttgagattctttccacaagcttccgctgatgcgagatcatgagaggctggatttagcattgaaattctttcaagggctcccggtttcagaaactcagctgccctttggggatgcagttacaggggtgtcctgcggctcatccagcaatcaggcatgccatagtagctacaaaaggcagaactacaaaccgcagattgtgcaagatgagcagcggctgaggataacctcgccacagaaaccacttgcatggctgcatacgatggaaggataatgagatgctagccatttaccacttatcataccatgtgcagtaggctccattagtggtgctcccttggccattttttttgtagatactagatagtagacacgttgacggttcctatttacaccactaagcatatgcatgtgcaatgccaatatcatcgacgcattcttcac

SEQ ID NO: 16617 - protein, 265 aa, Glycine max
KRPVPLSIGYMAQYMLKPLLGVLIARVFRMPSAFFAGFMLTCCVSGAQLSSYASFLGKGDVALSILLTTYSTISSVIVTPILTGLLIGSVVPVNGIAMAKSILQVVLLPVTLGLLLNTYAKPVVNVIQPVMPFVAMVCTSLCIGSPLAINRTMLLSSQGFMLLLPIVTFHIAAFVVGYWVSKLPQLRQEEPVCRTISVCTGIQSSTLAGLLATQFLGISQAVPAACSVVVMAIFGLTLASYWGSGMRIRDLPLRFFPQASADARS

SEQ ID NO: 16618 - protein, 255 aa, Glycine max
MAQYMLKPLLGVLIARVFRMPSAFFAGFMLTCCVSGAQLSSYASFLGKGDVALSILLTTYSTISSVIVTPILTGLLIGSVVPVNGIAMAKSILQVVLLPVTLGLLLNTYAKPVVNVIQPVMPFVAMVCTSLCIGSPLAINRTMLLSSQGFMLLLPIVTFHIAAFVVGYWVSKLPQLRQEEPVCRTISVCTGIQSSTLAGLLATQFLGISQAVPAACSVVVMAIFGLTLASYWGSGMRIRDLPLRFFPQASADARS

SEQ ID NO: 16619 - protein, 251 aa, Glycine max
MLKPLLGVLIARVFRMPSAFFAGFMLTCCVSGAQLSSYASFLGKGDVALSILLTTYSTISSVIVTPILTGLLIGSVVPVNGIAMAKSILQVVLLPVTLGLLLNTYAKPVVNVIQPVMPFVAMVCTSLCIGSPLAINRTMLLSSQGFMLLLPIVTFHIAAFVVGYWVSKLPQLRQEEPVCRTISVCTGIQSSTLAGLLATQFLGISQAVPAACSVVVMAIFGLTLASYWGSGMRIRDLPLRFFPQASADARS

SEQ ID NO: 16620 - DNA, 712 bp, Glycine max
gattactcaacttgtttggtcaaataatggaagcggcgacgaagcagagcgttacaaaccgccttctcaccgtcaagtcagcctccggcaagacttacagtcaattagcggcggagacagggctcaccaacgtctacgtggctcagctgctccgtcgccaagcccagctcaaacccgaaacagtccccaagctccgtgaagccttacctgctctgaccgaagaactcatcgccgccatgatgtctccgccgtggagatcgtatgatccaaacctcatccaagaacccaccgtctacaggttgaatgaagcagtgatgcatttcggtgagagtataaaggagatcatcaatgaagatttcggcgatggcatcatgtcggcaatagacttctattgctctgtggacaaagttaaaggagttgacggtaataaccgcgttgtcgtgacacttgatgggaagtatctttctcattccgaacagaggactgagaatatggtctcaaggctaaacctcaagggaagtacaagcgaatgatatgaaaatgtaagaataaaacgattcatatgaatgtaagcagcaatccatgaaggcttttatgtctaaagctgtaaacattgtaatatttatggtgtttgtttattctgtactctatgcaactccagcctcgagctgtttcaagttgaataacagtgaataaaataaaataaacaatg

SEQ ID NO: 16621 - protein, 176 aa, Glycine max
LLNLFGQIMEAATKQSVTNRLLTVKSASGKTYSQLAAETGLTNVYVAQLLRRQAQLKPETVPKLREALPALTEELIAAMMSPPWRSYDPNLIQEPTVYRLNEAVMHFGESIKEIINEDFGDGIMSAIDFYCSVDKVKGVDGNNRVVVTLDGKYLSHSEQRTENMVSRLNLKGSTSE

SEQ ID NO: 16622 - protein, 168 aa, Glycine max
MEAATKQSVTNRLLTVKSASGKTYSQLAAETGLTNVYVAQLLRRQAQLKPETVPKLREALPALTEELIAAMMSPPWRSYDPNLIQEPTVYRLNEAVMHFGESIKEIINEDFGDGIMSAIDFYCSVDKVKGVDGNNRVVVTLDGKYLSHSEQRTENMVSRLNLKGSTSE

SEQ ID NO: 16623 - protein, 98 aa, Glycine max
MMSPPWRSYDPNLIQEPTVYRLNEAVMHFGESIKEIINEDFGDGIMSAIDFYCSVDKVKGVDGNNRVVVTLDGKYLSHSEQRTENMVSRLNLKGSTSE

SEQ ID NO: 16624 - DNA, 729 bp, Glycine max
agctatattctgaaacagaagctatgaagctggtcaaagccactccttttgattatgggagtggacacgttaatcccagagctgccttggaccctggcctcatctttgatgcaggatacgaggattatctagggttcttgtgcacaacacctggcattgatgttcatgagataaagaactacacaaactccccatgtaacaacaccatgggccacccatcaaatctaaacactccctccattacaatttcccatctagtaagaagtcaaattgtcacacgcactgtgacaaatgttgctgatgaggaagaaacctacgtgatcacagccaggatgcaaccagcagttgccattgacgtgaaccctccagcaatgaccatcaaagccagtgcatcgcgtaggtttactgtgacactcactgttcgctcagtgacaggaacctatagttttggagaggtgctaatgaagggaagcagagggcacaaggtgaggatccctgttctggccaatggatactcaagatagctttagtttggtctgcaaagaaaagttatgcctgtaatattctttgtaatttgtggaaataaggaaggtacggcgttagatttattcatgaaaatataatatatggtgttgaatagatgtaaaggtaagcaggtgtaaggaggagactcctggtttattttattccacatataaagttttgctaataacatcttgttatttattg

SEQ ID NO: 16625 - protein, 173 aa, Glycine max
LYSETEAMKLVKATPFDYGSGHVNPRAALDPGLIFDAGYEDYLGFLCTTPGIDVHEIKNYTNSPCNNTMGHPSNLNTPSITISHLVRSQIVTRTVTNVADEEETYVITARMQPAVAIDVNPPAMTIKASASRRFTVTLTVRSVTGTYSFGEVLMKGSRGHKVRIPVLANGYSR

SEQ ID NO: 16626 - protein, 166 aa, Glycine max
MKLVKATPFDYGSGHVNPRAALDPGLIFDAGYEDYLGFLCTTPGIDVHEIKNYTNSPCNNTMGHPSNLNTPSITISHLVRSQIVTRTVTNVADEEETYVITARMQPAVAIDVNPPAMTIKASASRRFTVTLTVRSVTGTYSFGEVLMKGSRGHKVRIPVLANGYSR

SEQ ID NO: 16627 - protein, 105 aa, Glycine max
MGHPSNLNTPSITISHLVRSQIVTRTVTNVADEEETYVITARMQPAVAIDVNPPAMTIKASASRRFTVTLTVRSVTGTYSFGEVLMKGSRGHKVRIPVLANGYSR

SEQ ID NO: 16628 - DNA, 1041 bp, Glycine max
aacaccgattttcgttttcctaacgagaataaagaaaaggcgattactatagcaacaaactctttataaaagcacatcaaaggaaccataaacaacaacaacaacaacgtaggagaaagaaaagaaaagaaaaccatcgaggacgaaattacaacctagcacacagagatatatagcggaagcaaccaacagaagaaccttcaacagttcctccacacgtacaacaacgttgttataaaatcaccacttgcatgcttacaataatgtcgagcagaaagaaccacttcagttcacgaagccatcgttttctccctgtggcctcagacatagacgactctgcatccctaaccatggattcggaatccgcgttcgagttcgacgagtcagagctttacaactcggtccaagccaactcgttcgagttccagagatcgcttcacagccgaggctctaataattcctcggccaagaaaaaaccctcttcctcctccggcgcgccggcttcaatgccggtcaacatccccgactggtcgaagatcctcggggatgagtaccggaggaggaacagctttgacgacgacgacaacgacgacaacaacgagggttacgacgatgagaggagtggaagggtgccaccgcacgagtttcttgcgaggaatagggtagcttcgttctccgtgcacgagggtgttgggagaaccctaaagggaagggatctcagcacgctccgaaacgccatttgggccaaaaccggttttcaagactaaaaaaaaaaccccacaaccctcactcacccaaccgaatcgaatcgaatctttattatttttttttttcttaaccctttttggttctacttctgttactgttgtgattggtatgtatttttagttgagttttccttttgttaatttttggtggtggttacgttgacgtatatgaggtaattataagaggtttcggttattaattccgaaacctgaggctcgtgattttgtatctacgtacgtagtaccctcaaggaatatatatctttttttcaac

SEQ ID NO: 16629 - protein, 171 aa, Glycine max
MLTIMSSRKNHFSSRSHRFLPVASDIDDSASLTMDSESAFEFDESELYNSVQANSFEFQRSLHSRGSNNSSAKKKPSSSSGAPASMPVNIPDWSKILGDEYRRRNSFDDDDNDDNNEGYDDERSGRVPPHEFLARNRVASFSVHEGVGRTLKGRDLSTLRNAIWAKTGFQD

SEQ ID NO: 16630 - protein, 167 aa, Glycine max
MSSRKNHFSSRSHRFLPVASDIDDSASLTMDSESAFEFDESELYNSVQANSFEFQRSLHSRGSNNSSAKKKPSSSSGAPASMPVNIPDWSKILGDEYRRRNSFDDDDNDDNNEGYDDERSGRVPPHEFLARNRVASFSVHEGVGRTLKGRDLSTLRNAIWAKTGFQD

SEQ ID NO: 16631 - protein, 138 aa, Glycine max
MDSESAFEFDESELYNSVQANSFEFQRSLHSRGSNNSSAKKKPSSSSGAPASMPVNIPDWSKILGDEYRRRNSFDDDDNDDNNEGYDDERSGRVPPHEFLARNRVASFSVHEGVGRTLKGRDLSTLRNAIWAKTGFQD

SEQ ID NO: 16632 - DNA, 1137 bp, Glycine max
aaagaatccttcatcacattaatcagtccagacagagaactgagagaagaccctcacttcctgtttggctcgacgaagacctcacttcgcccaacctccgtctccggcggcgtctcttatcctaacggctccttccctcaccgtcactgaaacggcgtccctgaactcgcaacactgccctccctctgactctgatttcgttcgaacttcgaactcattcccacttcgcagtcctcgccatgcttcgttgtcggcgactcctcgcagtggcaaacctcaaacgacatagctagagatacagggtgcgatttgtttccattttccagtcaatcctatactccttaggctattgtaatcttctgctaataaggaggaattattattgggttctgaaaacatgttgaaacaagcaattggcagaatcttcagaaccggtgtttatgcttgtgaaggaaatagagttttgccttggatttatgtgccttcgagctttttccaccatggacaagcgcacatggcacctagaagcttttttggggtagaggatttccttgatgatgacaatagccgaccttacacataccaaaaagggaagaagtcaaagaatccaaataagcacatatcattcaaacaaagaacaattgcctacatggaaccttttacacttgatgtgtttatctcaaagcgctttgtatcggcttcactcactcatagggtaacaagcaaacaggttgcagttgccgggaccaactccaaggacataaaagctgttcttaggtctcgttcagacataccagcatgcatagcaattggtaggattttagctgaaagagcaaaagaagctgatgtttacactggttcttatactccaagggacagggacaagtttgaagggaaaatcagagctgtagttcaatcacttattgacaatgggattgatatcaaggtttatcttgattgagtttagtcactcaagtttgtgggactatcagttaaggtgttgatattttggttgaagcagtaggccccttgtgtgtttgaacatgtccatttagtttggttttgatgataatgggaatatcattattcgaattacagatttggtaatttagttttatgaatgagttatgttgtcgc

SEQ ID NO: 16633 - protein, 187 aa, Glycine max
MLKQAIGRIFRTGVYACEGNRVLPWIYVPSSFFHHGQAHMAPRSFFGVEDFLDDDNSRPYTYQKGKKSKNPNKHISFKQRTIAYMEPFTLDVFISKRFVSASLTHRVTSKQVAVAGTNSKDIKAVLRSRSDIPACIAIGRILAERAKEADVYTGSYTPRDRDKFEGKIRAVVQSLIDNGIDIKVYLD

SEQ ID NO: 16634 - protein, 148 aa, Glycine max
MAPRSFFGVEDFLDDDNSRPYTYQKGKKSKNPNKHISFKQRTIAYMEPFTLDVFISKRFVSASLTHRVTSKQVAVAGTNSKDIKAVLRSRSDIPACIAIGRILAERAKEADVYTGSYTPRDRDKFEGKIRAVVQSLIDNGIDIKVYLD

SEQ ID NO: 16635 - protein, 103 aa, Glycine max
MEPFTLDVFISKRFVSASLTHRVTSKQVAVAGTNSKDIKAVLRSRSDIPACIAIGRILAERAKEADVYTGSYTPRDRDKFEGKIRAVVQSLIDNGIDIKVYLD

SEQ ID NO: 16636 - DNA, 1159 bp, Glycine max
gacttctccatggaccatggttggtgtgctgtgatgaagaaactcttggacattatatttgagggtggtgttgatgcaggagagcatgcctccattgagcttgcattgttgaacatgggtcttctacacagagctgtaaagagaaactgtaggcctatggtagaactactgttaagatttgttccagttaaaacctcagatggtgcagacagtgaaatgaagcaagttgccgaagcccctgacagattcttatttagacctgatactgtcgggccagctgggttgactcctcttcatgttgcagcaagtatgagtggctcagagaatgtgttggatgcattaaccaatgatccacgaatggtgggaattgaagcatggaaaagtgcccgggacagtacaggtttgacccctaacgaccatgcttgccttaggggctattactcttacattcaactagtccagaacaagaccaacaaaaaaggtgaaagacaacatttggttgatatccctggaactgttgtagatagtaacacaacgcagaagcaatcagatggaaataggacatgtagagttccaagcttaaagactgagaagattgaaaccacagcaatgccccgtcaatgtagggcatgccagcagaaggtggcttatggtggcatgaaaacagcaatggtttataggccagtcatgctctccatggtgaccatagcagttgtgtgtgtctgtgtagctttgctcttcaaaagctcacctagagtttattatgtcttccagcccttcaactgggaatcattagagtatggggcaatgtaatgttgtatatcaggtgttttctgctgtaagcttccaccttttcttaatatattattttagaaactgggtaagtcttagattttgggtttagagtatagacatgttatacatccatagtaatagtagctgtcatcaatatatatggggaaaacccgaggttgacacttcacctgttcagaacagaatcttgattatgaaacctgtgaacctgttaaatatggggtcaatgctattaggccattatatatgtgataatagggataacgccataacagttttaagcaatttgaggaaattgccttgtattaattaatcaataaatacaagatatttacggttcagtttc

SEQ ID NO: 16637 - protein, 270 aa, Glycine max
DFSMDHGWCAVMKKLLDIIFEGGVDAGEHASIELALLNMGLLHRAVKRNCRPMVELLLRFVPVKTSDGADSEMKQVAEAPDRFLFRPDTVGPAGLTPLHVAASMSGSENVLDALTNDPRMVGIEAWKSARDSTGLTPNDHACLRGYYSYIQLVQNKTNKKGERQHLVDIPGTVVDSNTTQKQSDGNRTCRVPSLKTEKIETTAMPRQCRACQQKVAYGGMKTAMVYRPVMLSMVTIAVVCVCVALLFKSSPRVYYVFQPFNWESLEYGAM

SEQ ID NO: 16638 - protein, 267 aa, Glycine max
MDHGWCAVMKKLLDIIFEGGVDAGEHASIELALLNMGLLHRAVKRNCRPMVELLLRFVPVKTSDGADSEMKQVAEAPDRFLFRPDTVGPAGLTPLHVAASMSGSENVLDALTNDPRMVGIEAWKSARDSTGLTPNDHACLRGYYSYIQLVQNKTNKKGERQHLVDIPGTVVDSNTTQKQSDGNRTCRVPSLKTEKIETTAMPRQCRACQQKVAYGGMKTAMVYRPVMLSMVTIAVVCVCVALLFKSSPRVYYVFQPFNWESLEYGAM

SEQ ID NO: 16639 - protein, 259 aa, Glycine max
MKKLLDIIFEGGVDAGEHASIELALLNMGLLHRAVKRNCRPMVELLLRFVPVKTSDGADSEMKQVAEAPDRFLFRPDTVGPAGLTPLHVAASMSGSENVLDALTNDPRMVGIEAWKSARDSTGLTPNDHACLRGYYSYIQLVQNKTNKKGERQHLVDIPGTVVDSNTTQKQSDGNRTCRVPSLKTEKIETTAMPRQCRACQQKVAYGGMKTAMVYRPVMLSMVTIAVVCVCVALLFKSSPRVYYVFQPFNWESLEYGAM

SEQ ID NO: 16640 - DNA, 503 bp, Glycine max
aggttttgttttagtttttaagctcgtccgtccccttgtagcgccgctcttcctctgttcagtcaatctcttcaatggcaccgaagaaggataaagttccaccaccgtcctctaagcccgccaaatccggcggcggaaagcagaagaagaagaagtggagcaagggaaagcaaaaggagaaggtgaacaacatggttctcttcgatcaagctacttacgacaagcttctctccgaagctcccaagttcaaactcatcactccctccatcctctccgaccgtcttcggatcaatgggtcacttgctaggaaggccattagagatttgatggctaaaggaaccatcaggatggtctctactcactctagccagcagatttacactagggccacccacaactaagtttctcgtttcattatgtgtgtttcctctctctcttttgtctcaagtctttgactcgatgtttagatgttgaatcttttcccttcaatcaagattttcaag

SEQ ID NO: 16641 - protein, 108 aa, Glycine max
MAPKKDKVPPPSSKPAKSGGGKQKKKKWSKGKQKEKVNNMVLFDQATYDKLLSEAPKFKLITPSILSDRLRINGSLARKAIRDLMAKGTIRMVSTHSSQQIYTRATHN

SEQ ID NO: 16642 - protein, 69 aa, Glycine max
MVLFDQATYDKLLSEAPKFKLITPSILSDRLRINGSLARKAIRDLMAKGTIRMVSTHSSQQIYTRATHN

SEQ ID NO: 16643 - DNA, 684 bp, Glycine max
taatcacactccttccactgtccacaatcgcagagcaggtggtgaaggaaccagagggtgagcccagctgcggccgtggggggagaggtcaatcagcgagtcctgtagcaaggagctaagggggcatggcggactgggcgccggtgttcatcgggctggtgctcttcatcctcctctcgccggggctgctcttccagatccccggcaagggcaggatggtggagttcggcaacttccagacaagcggcatctccatcctcgtccacgccgtcatctacttcgccctcatcgccatcctcatcctcgccgtcaacgtccacgtcttcctcggctgaccacaggacgccgctagctgcttcctcctcgtcgctcaacagttaggtatcgtggtcgtggaggatcgagaggaatgcccagtcactgtcgcgttcatcttcaggcttcctgatggcttagcttctaggggcgcagggaggcaaagtatgatgtccatcgggcagtttagttgatgatttgatattttatcaggaatgtatagctccaactcttatgtgcgctgtttcgtctggtggtaactgagaatcaattgcaaactgaactatgtttaggaatctcatcttcagagagaaagcgtatatgggcattccacatgatgaacttcaatcattgatcaatgctcgtacc

SEQ ID NO: 16644 - protein, 69 aa, Glycine max
MADWAPVFIGLVLFILLSPGLLFQIPGKGRMVEFGNFQTSGISILVHAVIYFALIAILILAVNVHVFLG

SEQ ID NO: 16645 - protein, 39 aa, Glycine max
MVEFGNFQTSGISILVHAVIYFALIAILILAVNVHVFLG

SEQ ID NO: 16646 - protein, 38 aa, Glycine max
ITLLPLSTIAEQVVKEPEGEPSCGRGGRGQSASPVARS

SEQ ID NO: 16647 - DNA, 972 bp, Glycine max
accctctcggtctctagggttttgggactttagcctcctgcgccgccgccgccgccgcccagcgaattcgacaagcccccgagctcgccggatccgatggccgtcacgttctccgacctccacaccgccgacgggctcaaggccctcgaggcgcacctcgccggcaagacctacatctccggcgatgggatcaccaaggacgacgtcaaggtgttcgcggcggtgcccgtgaagcccagcgccgagttcccgaacgctgcccgctggtacgacaccgtcgccgcggctgttgcttcaaggttccctggccagtcctctggggtgagtgcatcatcggctcctgctgcagctgctcctgccgcttccaaggatgaagatgacgatgatgacatggatctgtttggcgatgagaccgaggaggacaagaaagctgcagctgagcgtgaggctgccaagcctgcaaagaagaaagaaagtggcaaatcctccgtcctcatggacatcaagccatgggacgatgagactgacatgaagaagttggaggaggctgtccgcagtgttcaaatggagggtctcacctggggtgcatataagcttatgcctgtgggttatggcatcaagaagctccagatcatgctgacgatcatcgatgaccttgtgtccgtcgacactcttattgaggaagtgctttgcgaggcgcccatcaacgaatatgtccagtcgtgtgacatcgttgccttcaacaagatctagaatctttgttctcccacctgctggattcttggtactgggattggtcgatctggaaaacattatgtcgtcccatttagttacccctcttacagaaatgctactggttttgtttttgagtgatgccctggtcttgaatgtctgctacctttaaatagttgaactgctgagcggtttgtaatggcgaaacatctatcatgtggagtaaaatcagtctttgat

SEQ ID NO: 16648 - protein, 218 aa, Glycine max
MAVTFSDLHTADGLKALEAHLAGKTYISGDGITKDDVKVFAAVPVKPSAEFPNAARWYDTVAAAVASRFPGQSSGVSASSAPAAAAPAASKDEDDDDDMDLFGDETEEDKKAAAEREAAKPAKKKESGKSSVLMDIKPWDDETDMKKLEEAVRSVQMEGLTWGAYKLMPVGYGIKKLQIMLTIIDDLVSVDTLIEEVLCEAPINEYVQSCDIVAFNKI

SEQ ID NO: 16649 - protein, 120 aa, Glycine max
MDLFGDETEEDKKAAAEREAAKPAKKKESGKSSVLMDIKPWDDETDMKKLEEAVRSVQMEGLTWGAYKLMPVGYGIKKLQIMLTIIDDLVSVDTLIEEVLCEAPINEYVQSCDIVAFNKI

SEQ ID NO: 16650 - DNA, 890 bp, Glycine max
accgcattcacctgatctagctcgacgccggccagtaaacccaagcagccactcactctcaggttatcactgacacagcaaccaagctcgggacaagggggaaatggaagccgctccggtctcggcgaagcccaccctccgcgtggccgctctcagcggctccctccgcagcaactcgtggcaccacggcctcatccgcgccgccgaggagctgtgcgaggagtgcatcccggggctgcgcatcgaccacgtggacatctccggcctgcccatggccaacccggacctggagaccgacggcggcgacggcttcccgccggccgtggaggccttccgcgacagggtcagcgccgccgactgcttcctcttcgcctcgcccgagtacaactactccgtcaccggctcgctgaagaacgcgctggactgggcgtccaggggcacgcacaaatgctgggccgacaaggcggcggcgatcgtctgcgcgggaggcgacttcggcgggggcagggcgtcgctccacctgcgcgagatcgggatatacctagacctgcacttcatcaacaagccggagctccacatcagggcgtacgaggacccgcccaagttcgacggcgaggggaacctcatcgacgccaaagccagggagcggctcaagaaggtgctcctctcgctgcaggtcttcgcgctcaggctgcaacgcagggagaattgactcgagatcgaataaatttggcaccagagctacctaaataatctgcatttccgctcagatgatcacttttagtttgggctatggccctggtttcgttagtctgagcaattttacttcgtattcgtgtaattgtattttgtacttccgtgaaataaaaagacgatgctgctactgtaac

SEQ ID NO: 16651 - protein, 202 aa, Glycine max
MEAAPVSAKPTLRVAALSGSLRSNSWHHGLIRAAEELCEECIPGLRIDHVDISGLPMANPDLETDGGDGFPPAVEAFRDRVSAADCFLFASPEYNYSVTGSLKNALDWASRGTHKCWADKAAAIVCAGGDFGGGRASLHLREIGIYLDLHFINKPELHIRAYEDPPKFDGEGNLIDAKARERLKKVLLSLQVFALRLQRREN

SEQ ID NO: 16652 - protein, 146 aa, Glycine max
MANPDLETDGGDGFPPAVEAFRDRVSAADCFLFASPEYNYSVTGSLKNALDWASRGTHKCWADKAAAIVCAGGDFGGGRASLHLREIGIYLDLHFINKPELHIRAYEDPPKFDGEGNLIDAKARERLKKVLLSLQVFALRLQRREN

SEQ ID NO: 16653 - protein, 101 aa, Glycine max
MLGRQGGGDRLRGRRLRRGQGVAPPARDRDIPRPALHQQAGAPHQGVRGPAQVRRRGEPHRRQSQGAAQEGAPLAAGLRAQAATQGELTRDRINLAPELPK

SEQ ID NO: 16654 - DNA, 1097 bp, Glycine max
atccagaaataatcactttctccattcgattcttcctcttgctcttgcacccaatctcctcgctacgtagttagctaatctaaccatcagtccaccaaagccaatccactgagtgcgagagctccatctccatctcgatctcgaccaaggagaggaagctagctagctagcaacaggcagcagcaatggcgggcgtgggtcgtaacatggtggcgccgctgctggtgctgaacctcatcatgtacctcattgtcatcggcttcgcaagctggaacctcaaccacttcatcaacggcctcaccaaccgccccggcgtcggcggcaacggagccaccttctacttcctcgtctttgccatcctcgcgggcgtcgtcggcgccgcatccaagctcgccggcgtgcaccacgtccgcacatggcgcggtgacagcctcgccacctccgcctcgtcctcgctcgtggcatgggccatcaccgccttggcgttcgggctggcgtgcaaggagatccacatcggcgggtaccgcgggtggcgcctcagggtgctggaggcgttcgtcattatcctggccttcacgcagctgctttacgtgctggcgctgcactccggcctcttcgggaaccagttgggtggcaaccatgctggtgggtacccggcggagcatgcgtacggcgcaggcggcgacccgcacaacaagggcatgggcatgggcaccggcggcgtcgccagggtctgaatcgggtagagacctcgccgtgctccatcgcttggcggttgacagtgacgggcggataataaggtgtgtgtgtgtgtgtgtgtgtgtgtgtgtgttccgtcccgtatggtgtgagcgtacgttgtatgcagacatggtgtgcacggtaggcatgtagtgacggcgtgcgtgcgtacatgtgtagtactgcaggatgggcccttcttcttagtgtgttttgtgtttattatgtagtccgagatcaagatggagatcgatcagtccatgctatgcttcttcattctccgaccagacaattgcaatgcatgtctgggtgtggatgaatggctgcacttgtttaatttagtactactactctac

SEQ ID NO: 16655 - protein, 183 aa, Glycine max
MAGVGRNMVAPLLVLNLIMYLIVIGFASWNLNHFINGLTNRPGVGGNGATFYFLVFAILAGVVGAASKLAGVHHVRTWRGDSLATSASSSLVAWAITALAFGLACKEIHIGGYRGWRLRVLEAFVIILAFTQLLYVLALHSGLFGNQLGGNHAGGYPAEHAYGAGGDPHNKGMGMGTGGVARV

SEQ ID NO: 16656 - protein, 176 aa, Glycine max
MVAPLLVLNLIMYLIVIGFASWNLNHFINGLTNRPGVGGNGATFYFLVFAILAGVVGAASKLAGVHHVRTWRGDSLATSASSSLVAWAITALAFGLACKEIHIGGYRGWRLRVLEAFVIILAFTQLLYVLALHSGLFGNQLGGNHAGGYPAEHAYGAGGDPHNKGMGMGTGGVARV

SEQ ID NO: 16657 - protein, 165 aa, Glycine max
MYLIVIGFASWNLNHFINGLTNRPGVGGNGATFYFLVFAILAGVVGAASKLAGVHHVRTWRGDSLATSASSSLVAWAITALAFGLACKEIHIGGYRGWRLRVLEAFVIILAFTQLLYVLALHSGLFGNQLGGNHAGGYPAEHAYGAGGDPHNKGMGMGTGGVARV

SEQ ID NO: 16658 - DNA, 1419 bp, Glycine max
ggtcagactattctagagcaattggaaggccttcctaggcataaagcaaatgccagatatgtgaactatgttgcagaaaaggacaaaaataatggtaatttatatgattcttcacttttagctaataataacatggagcttttctctgagcctgggcatgctaaggtgtttggtcatgttcgtaagctttcaaatgagagtgttgaaagcgatggaagctcaatacgaggtagtgacatgtctaattttgggattccaagttcatctggtgatggctctcatgaccttcctggatctgctttggtttcaagagagacagatattatgggccacacaaagtcgaagtctactggtgatactcaattagtccttccactagatcaacgcaataaattgaacaggattctttcaaccatgcagcgaaggctaggcactgcaaaaactgatatggaggaccttatagttagattaaatcaagaaatagctgcaaaggattttctcgcaacaaagctcaaggatttggaagtagaacttgaaactaccaaacagaaaaataaggagaacttgcagcaggctattctaattgagagagaaaggtttacccaaatgcagtgggatatggaggaacttagaagaaaatcattggaaatggagatgaaattaaagtctgaatcggggagaaattcttatcaggatttgactaaggaatcaattgttcagcagaatgatgtactgtatgagaatttagatgctactaaggaaaaaatgtgaagactgggcatactgaggaaaatagtgcactgtctgtttttcttgttgcaagtgttcttgagattaagaataggcggattttaaacgaggccaagggtgtggacgatgttgtcaagatcttgggcgacataacctcaaatcttgatgctaagaaagcacttaatgaagcactgaaaattcagaaaaaatacctaagcaaggccaagaaggcatgacaaagacaacaatagattttctgtaactatatgatggcagatggcagccgtggttgcatgatcttctgaggtttcagttgctcttgacagatcattgttttctttctttctttttagtcttagtgatggcaagcagtcccctgctcttcctgtgttaatcatttgaaaatcaaattataatcttatacttaggaaaaaaatacttcattattgatgtctggatatccagagaaccagaatacttcattttgtgggattctttgttggcgggatttcatgttgtagaaatattttataggtaaggaagatcttttcttcctgaatgaggggacatttatgctatcaaatcaaaactgataaaattgtaacgtatatatttttaaccgaagtacagttaaaaattcagagtgatatatagtacattcacaattcc

SEQ ID NO: 16659 - protein, 256 aa, Glycine max
GQTILEQLEGLPRHKANARYVNYVAEKDKNNGNLYDSSLLANNNMELFSEPGHAKVFGHVRKLSNESVESDGSSIRGSDMSNFGIPSSSGDGSHDLPGSALVSRETDIMGHTKSKSTGDTQLVLPLDQRNKLNRILSTMQRRLGTAKTDMEDLIVRLNQEIAAKDFLATKLKDLEVELETTKQKNKENLQQAILIERERFTQMQWDMEELRRKSLEMEMKLKSESGRNSYQDLTKESIVQQNDVLYENLDATKEKM

SEQ ID NO: 16660 - protein, 212 aa, Glycine max
MELFSEPGHAKVFGHVRKLSNESVESDGSSIRGSDMSNFGIPSSSGDGSHDLPGSALVSRETDIMGHTKSKSTGDTQLVLPLDQRNKLNRILSTMQRRLGTAKTDMEDLIVRLNQEIAAKDFLATKLKDLEVELETTKQKNKENLQQAILIERERFTQMQWDMEELRRKSLEMEMKLKSESGRNSYQDLTKESIVQQNDVLYENLDATKEKM

SEQ ID NO: 16661 - protein, 177 aa, Glycine max
MSNFGIPSSSGDGSHDLPGSALVSRETDIMGHTKSKSTGDTQLVLPLDQRNKLNRILSTMQRRLGTAKTDMEDLIVRLNQEIAAKDFLATKLKDLEVELETTKQKNKENLQQAILIERERFTQMQWDMEELRRKSLEMEMKLKSESGRNSYQDLTKESIVQQNDVLYENLDATKEKM

SEQ ID NO: 16662 - DNA, 913 bp, Glycine max
ccgtctctgatctcttatcactcactctctctctcccctaactcgccaagcagctacaatggccgttaccttctcagatctacacacagagcagggtgtcaagtccgtggaggagcacctcgccggaaaaacctacatctccggagatcagttgactgtggatgatgtgaaggtatacgctgccatcgtggagaaaccgagcgatgccttccctaatgctagcaagtggtacgattccgtcgcgtcccaccttgctaaaagtttccctggtaaggccgtaggagtttcaatcggtggctctgctgcttctgctcctgctcaagctgaggcacctgcagctgtagctgatgatgatgatgacatggatctgtttggtgacgagaccgaggaggaaaagaaagccgcagaggagagggaggcttctaagaaggacaccaagaagcccaaagagagtggaaagtcatctgtgctcatggaggtcaagccatgggatgacgagactgacatgaagaaacttgaggagtgtgtccgcgctgttgagatgcctggtcttctatggggagcttcaaaactggttccagttggttacgggatcaagaagctcactatcatgctcacaattgttgatgacctcgtgtccccggacaatctcatcgaagactacctcacctgtgagcctaacaacgagtacatccagagtgttgacatcgtcgcattcaacaagatctagagactttaagttgtctccctaccaaaagatacttgatttccttccaagttttgttctttttttttgtgttgttttgcttgagatgtttattttctagtagcaagacctctttcatgttgcagaaaacataaactatcaacgctttactattccttttgccattactaaaaaaaaaaaaaaaac

SEQ ID NO: 16663 - protein, 223 aa, Glycine max
MAVTFSDLHTEQGVKSVEEHLAGKTYISGDQLTVDDVKVYAAIVEKPSDAFPNASKWYDSVASHLAKSFPGKAVGVSIGGSAASAPAQAEAPAAVADDDDDMDLFGDETEEEKKAAEEREASKKDTKKPKESGKSSVLMEVKPWDDETDMKKLEECVRAVEMPGLLWGASKLVPVGYGIKKLTIMLTIVDDLVSPDNLIEDYLTCEPNNEYIQSVDIVAFNKI

SEQ ID NO: 16664 - protein, 122 aa, Glycine max
MDLFGDETEEEKKAAEEREASKKDTKKPKESGKSSVLMEVKPWDDETDMKKLEECVRAVEMPGLLWGASKLVPVGYGIKKLTIMLTIVDDLVSPDNLIEDYLTCEPNNEYIQSVDIVAFNKI

SEQ ID NO: 16665 - DNA, 1484 bp, Glycine max
atcgatctcacactccaagctagccacgccagctactgctccgtgaccagcagtgcactaccacgtacacggaaacaactcgtggtactgaactagtttggtagtacgtagcagctagcacgatggggcagcttagcaagaagcttctggtggcgtccatggtggcggccgtgctggccgtggcggcggtggagctctgcggcgccatcccgctggaggacaaggacctggagtcggaggaggcgctgtgggacctgtacgagcggtggcagaccgcgcaccgcgtgccccgccaccacgccgagaagcaccgccgcttcggcaccttcaagtccaacgcccacttcgtccactcccacaacaagcgcggcgaccgcccctatcgcctccacctcaaccgcttcggcgacatgagccaggccgagttccgcgccaccttcgtcggcgacctccgccgcgacaccccggccacgccgccgtccatccccggattcatgtacgccgcagtgaacgtgtccgaccttccgccgtccgtggactggcggcagaagggcgccgtgacgggcgtcaaggaccagggcaagtgcggcagctgctgggccttctccacggtggtgtccgtgaaaggcatcaacgccatccgcacgggcagcctcgtgtccctctcggagcaggagctcatcgactgcgacacggcggacaacgaagggttgccagggcgggctcatggacaacgccttcgagtacatcaagagcaacggcgggctcatcacagaggccgcgtacccgtaccgcgccgcccaagggcacctgcaacgtcgcgggagcggcccagaactcccccgtgggtggtgcacatcgacgggcaccaggacgtgccggccaacagcgaggaggctctggcccaggccgtggcgaaccagcccgtgtccgtggccgtcgaggccagcgggaaggcgttcatgttctactccgagggggtcttcaccggcagctgcggcacggagctggaccacggcgtcgcggtggtcgggtacggggtggcggaggacggcaaggcgtactggacggtaaagaactcatgggggccgtcgtggggggagcaggggtacatcagggtggagaaggattccggtgctgcgggcgggctctgcggcatcgccatggaggcgtcctaccccgtcaagaccgacagcaagcccaagcccacgcccgcgcccaggcgcgccctcggagccagggagtcacagtgatgactgatcgatccttctgcggatctgaattattactactactatcgttcctagttaaattaagggtgaaataaattaaagattgaattaagtggttctgcgtgggcacgcggcaagaattaggcgtgtgtaacgtcggaccaggtcgatcgatatctatttggattctgaatgtactgtaaaatataatgtaatgtaatacactgccagtaatagtgtatgaaaccttgc

SEQ ID NO: 16666 - protein, 376 aa, Glycine max
MGQLSKKLLVASMVAAVLAVAAVELCGAIPLEDKDLESEEALWDLYERWQTAHRVPRHHAEKHRRFGTFKSNAHFVHSHNKRGDRPYRLHLNRFGDMSQAEFRATFVGDLRRDTPATPPSIPGFMYAAVNVSDLPPSVDWRQKGAVTGVKDQGKCGSCWAFSTVVSVKGINAIRTGSLVSLSEQELIDCDTADNEGLPGRAHGQRLRVHQEQRRAHHRGRVPVPRRPRAPATSRERPRTPPWVVHIDGHQDVPANSEEALAQAVANQPVSVAVEASGKAFMFYSEGVFTGSCGTELDHGVAVVGYGVAEDGKAYWTVKNSWGPSWGEQGYIRVEKDSGAAGGLCGIAMEASYPVKTDSKPKPTPAPRRALGARESQ

SEQ ID NO: 16667 - protein, 364 aa, Glycine max
MVAAVLAVAAVELCGAIPLEDKDLESEEALWDLYERWQTAHRVPRHHAEKHRRFGTFKSNAHFVHSHNKRGDRPYRLHLNRFGDMSQAEFRATFVGDLRRDTPATPPSIPGFMYAAVNVSDLPPSVDWRQKGAVTGVKDQGKCGSCWAFSTVVSVKGINAIRTGSLVSLSEQELIDCDTADNEGLPGRAHGQRLRVHQEQRRAHHRGRVPVPRRPRAPATSRERPRTPPWVVHIDGHQDVPANSEEALAQAVANQPVSVAVEASGKAFMFYSEGVFTGSCGTELDHGVAVVGYGVAEDGKAYWTVKNSWGPSWGEQGYIRVEKDSGAAGGLCGIAMEASYPVKTDSKPKPTPAPRRALGARESQ

SEQ ID NO: 16668 - protein, 280 aa, Glycine max
MSQAEFRATFVGDLRRDTPATPPSIPGFMYAAVNVSDLPPSVDWRQKGAVTGVKDQGKCGSCWAFSTVVSVKGINAIRTGSLVSLSEQELIDCDTADNEGLPGRAHGQRLRVHQEQRRAHHRGRVPVPRRPRAPATSRERPRTPPWVVHIDGHQDVPANSEEALAQAVANQPVSVAVEASGKAFMFYSEGVFTGSCGTELDHGVAVVGYGVAEDGKAYWTVKNSWGPSWGEQGYIRVEKDSGAAGGLCGIAMEASYPVKTDSKPKPTPAPRRALGARESQ

SEQ ID NO: 16669 - DNA, 1427 bp, Glycine max
tctttccttctatctgacacacagagtcgccgactgactctgcactctgcaacagatgaagcacccaacatggcctcgcacctcctcttctcccttctcctctcttcctttctccaaccgttccgaattcttcaccacgcgcctctgcgcgcgtcctccgctgccgtcccctcccggcgccggcgacttctcggcgctcccctacgacgtgctggcgaagatcgccgcctccttcgacgaccccaacctccgcgcggcgtcactggtgtgccgcgcctggtgcgaggcgctgcggccgctgcgggaggccatggcgctgctcctctgggggaagcgcttcaagcacggccaccgtggcgtcggccccaaccccgatagggccctcgactccttcatcaaagccgccgcgcgcggctccgccctcgccatggtcgacgccggcctcatctactgggagcgaggcgagaagcccaaggccatggagttttatcataaggctgcggaactcggaaacccttctgcgcagtgcaatttgggactttcctatctccaagctgaacctccgaacactgagctagctgtcaaatggttacataaagcttctgtttgtgggaatgttcgtgcccagtaccagcttgcgctttgtctgcatcgcggtggtgggagggtccgtagcaatctgaaagaagctgctaaatggtatatgaaagctgcagagggtgggtatgtccgtgccatgtacaatatctccttgtgcttctcctttggggaaggactgacacgtaatcatcaactagcaagaaaatggatgaagcgggctgcggatcgtgggcatagtaaagctcaatttgagcatggacttgctctcttttctgagggagacatgatgaaggctgtggtttacttggaacttgctactcgtgctggtgaaaaaggtgctgctcatgtcaagaatgcagttcttcatcggctttcatcagcttcacgtgatcacgccatgcatctagctaacagttggcgtgcattgccatcaagttgagccaatccttatgttggtttgtgatgaagaagttgcatgaccttggtcggtggcatcagaagagtgaagtcaactaagaatacctaagcatagaaacaaggaaagcaggaggagctgactaagaaactacctttgcctgctaatcctgactatagtggttttcctataatataaagaaaactagttggtgggcgtttgtaaaagctagttgaatttgaatcctttgtaaaacgccccattgactagttgcaagttcctctcaagttccccttacaactgtgcagggtagaatgtggtgggcgttttttgtcataagtggcatctagaaaattgcaacgtcatatactcatattactccatattatataggatgaatgactgattaagt

SEQ ID NO: 16670 - protein, 327 aa, Glycine max
MKHPTWPRTSSSPFSSLPFSNRSEFFTTRLCARPPLPSPPGAGDFSALPYDVLAKIAASFDDPNLRAASLVCRAWCEALRPLREAMALLLWGKRFKHGHRGVGPNPDRALDSFIKAAARGSALAMVDAGLIYWERGEKPKAMEFYHKAAELGNPSAQCNLGLSYLQAEPPNTELAVKWLHKASVCGNVRAQYQLALCLHRGGGRVRSNLKEAAKWYMKAAEGGYVRAMYNISLCFSFGEGLTRNHQLARKWMKRAADRGHSKAQFEHGLALFSEGDMMKAVVYLELATRAGEKGAAHVKNAVLHRLSSASRDHAMHLANSWRALPSS

SEQ ID NO: 16671 - protein, 242 aa, Glycine max
MALLLWGKRFKHGHRGVGPNPDRALDSFIKAAARGSALAMVDAGLIYWERGEKPKAMEFYHKAAELGNPSAQCNLGLSYLQAEPPNTELAVKWLHKASVCGNVRAQYQLALCLHRGGGRVRSNLKEAAKWYMKAAEGGYVRAMYNISLCFSFGEGLTRNHQLARKWMKRAADRGHSKAQFEHGLALFSEGDMMKAVVYLELATRAGEKGAAHVKNAVLHRLSSASRDHAMHLANSWRALPSS

SEQ ID NO: 16672 - protein, 203 aa, Glycine max
MVDAGLIYWERGEKPKAMEFYHKAAELGNPSAQCNLGLSYLQAEPPNTELAVKWLHKASVCGNVRAQYQLALCLHRGGGRVRSNLKEAAKWYMKAAEGGYVRAMYNISLCFSFGEGLTRNHQLARKWMKRAADRGHSKAQFEHGLALFSEGDMMKAVVYLELATRAGEKGAAHVKNAVLHRLSSASRDHAMHLANSWRALPSS

SEQ ID NO: 16673 - DNA, 921 bp, Glycine max
attttcccaaattctcattatctctctctctctctgtttcgctttcaccgaagaataacttgactttcccgaactccacctgagaaaaagatacccttaattcgcaggcgcgtcttgtgttggacaacaaccacaagatgattaacttcgaagaaaccgagttgcgactcggcctccctggcaacgactcagcactcaagggaagtgctgccaagagaggcttctctgaaactgcttctgttgatttgaagcttaatctttcttcttgcattaacgactctgcctcggattcaccctcatctgtgtctacagagaagcccaaagagaacaagactaccactgctgaacctcctccagctaatgatccagcaaaaccacctgcaaaggcacaagtggtgggttggccaccagttaggtcatttagaaagaacatagttcaaaggaacagcaatgaagaagaggcagagaagagcacgaagaatgctttcgtgaaggtgagcatggatggtgcaccgtatctacgaaaggtggacataaagttgtacaagagctaccaggagctgtcagatgcgctggctaagatgttcagttccttcacgattgaaaagtgtgggtcccaagggatgaaggactttatgaatgagaccaatggctctgactatgtacccacatatgaagacaaggacggagactggatgctcgtcggtgatgtgccctgggagatgttcgttgaatcatgcaagcgtcttcgcataatgaaaggctccgaggcaatcggtcttgcgccaagagccgtggaaaagtgcaagaacagaagctgaagaagtgatttcatctgcgtcacaaggaagcaaattgactcgagcaagatcgagtctaatataggaataagagtttaattatcatgtgcctttgttatct

SEQ ID NO: 16674 - protein, 227 aa, Glycine max
MINFEETELRLGLPGNDSALKGSAAKRGFSETASVDLKLNLSSCINDSASDSPSSVSTEKPKENKTTTAEPPPANDPAKPPAKAQVVGWPPVRSFRKNIVQRNSNEEEAEKSTKNAFVKVSMDGAPYLRKVDIKLYKSYQELSDALAKMFSSFTIEKCGSQGMKDFMNETNGSDYVPTYEDKDGDWMLVGDVPWEMFVESCKRLRIMKGSEAIGLAPRAVEKCKNRS

SEQ ID NO: 16675 - DNA, 759 bp, Glycine max
aaactcaaagatgtcataaggtcactcaaggtatcatcaataggcatagttatattaatgtgtgatgtgttagaggatatgcgcattggtgaagattgaaattagaagcaagaatgaggagggcatgcaggaaaatatggcgatcggtgccttgcacgagcaggaaaagcttgcgaaatgactctaggaaggacatggaggagattctgagggctaagctttcaactattaaggaagagccagaattgtgtgatgagaacttagcatcaccaagacatgtgtgtatggccaagaaacaagggaagaaggttcaaggaagtattcaacatctcgggagataagtatgtcacatttgatggattagcaagagcatgtgctaaggctggtgggttcccagagccagagatcattcactacaaccctaaagattttgattttgggaaaaagaaatcatttccattccgtgaccagcatttctttgcatcagttgagaaagcaaagagcgtgcttggattggaacctgaatttggacttgtagagggtctagcagactcgtacaacctggactttggtagaggaacatatcggaaagaggctgatttctcaacagatgacataattcttggcaagagtcttgttagcgtataaacttttctatttcaattttaagtatttcacttgtatttagaaaagctgttcggatttgctacattatgaagtcgtgaaatattcatgagcttttcgttcagtattttttcc

SEQ ID NO: 16676 - protein, 123 aa, Glycine max
MCVWPRNKGRRFKEVFNISGDKYVTFDGLARACAKAGGFPEPEIIHYNPKDFDFGKKKSFPFRDQHFFASVEKAKSVLGLEPEFGLVEGLADSYNLDFGRGTYRKEADFSTDDIILGKSLVSV

SEQ ID NO: 16677 - protein, 75 aa, Glycine max
MRRACRKIWRSVPCTSRKSLRNDSRKDMEEILRAKLSTIKEEPELCDENLASPRHVCMAKKQGKKVQGSIQHLGR

SEQ ID NO: 16678 - DNA, 1055 bp, Glycine max
ctgcagcagagccctcgccgccgccgccgcccgcgcggagctagaagcgggagtggagggggcaaaacagtcccaccatggagtacgtcaaccctctcacgggcttccgcgtcgacggccgccgccccaacgagatgcggcagctcaagggcgaggtcggcgtcgtctccagggccgacggctcggcgctcttcgagatgggcaacaccagggtcatcgccgctgtctacgggccccgagagatccaaaacaggagtcagcaacaaaacagtaaagaggctttggtgcgttgtgagtatagaatggcagaatttagcactggggatcgaaggagaaagccaaaaggtgacaggcgatcaacagaaatttctcttgttattcgacaaacaatggaggcaagcatattaacacatttaatgccacactcacagattgacatatttgtccaagttcttcaagctgatggtggaaccaggtctgcatgcatcaatgctgcaactctagcacttgcagatgctgggattccaatgcgagacatagtcacttcttgcagtgctgggtatctgtgttctactcctttgcttgatctgaattatatagaagacagcgctggaggcgcggatgtcactgttggcattcttgcaaagatggacaaagtgactcttctgcagatggacgcgaaactaccaatggatacatttgagactgtgatggaccttgcaactgaagggtgcaaagccatcgcaacctacatccgagaggtgctattggagaacacgaagcagctggagtgtcagcgaggctagttaaacctagcaggtggaggctattgaacgagagcctgtggcacttgaaggcgggtctgttgtgtaacgctgattgatggcttatctgcctagcagagctagcattgagagaaaaaaatgacactgaacctgtcaaagatagctggaccatcattttccctcctaacgtacatgctgtagcgcgcaggagatgacatcttgattatgtaaaactttgatgttgaacttggtatccatgttgtacttttg

SEQ ID NO: 16679 - protein, 242 aa, Glycine max
MEYVNPLTGFRVDGRRPNEMRQLKGEVGVVSRADGSALFEMGNTRVIAAVYGPREIQNRSQQQNSKEALVRCEYRMAEFSTGDRRRKPKGDRRSTEISLVIRQTMEASILTHLMPHSQIDIFVQVLQADGGTRSACINAATLALADAGIPMRDIVTSCSAGYLCSTPLLDLNYIEDSAGGADVTVGILAKMDKVTLLQMDAKLPMDTFETVMDLATEGCKAIATYIREVLLENTKQLECQRG

SEQ ID NO: 16680 - protein, 223 aa, Glycine max
MRQLKGEVGVVSRADGSALFEMGNTRVIAAVYGPREIQNRSQQQNSKEALVRCEYRMAEFSTGDRRRKPKGDRRSTEISLVIRQTMEASILTHLMPHSQIDIFVQVLQADGGTRSACINAATLALADAGIPMRDIVTSCSAGYLCSTPLLDLNYIEDSAGGADVTVGILAKMDKVTLLQMDAKLPMDTFETVMDLATEGCKAIATYIREVLLENTKQLECQRG

SEQ ID NO: 16681 - protein, 202 aa, Glycine max
MGNTRVIAAVYGPREIQNRSQQQNSKEALVRCEYRMAEFSTGDRRRKPKGDRRSTEISLVIRQTMEASILTHLMPHSQIDIFVQVLQADGGTRSACINAATLALADAGIPMRDIVTSCSAGYLCSTPLLDLNYIEDSAGGADVTVGILAKMDKVTLLQMDAKLPMDTFETVMDLATEGCKAIATYIREVLLENTKQLECQRG

SEQ ID NO: 16682 - DNA, 615 bp, Glycine max
acaacaaaactcaaaacacacatattatctccactgagttctctcgtataataatcatctccttcgagaaatatggcgatttcaaaagcccttattgcttctcttctcatatctcttcttgttctccaactcgtccaggccgatgtggaaaactcaaacaaaaagaggggttaccgcaaaaaaattgattgtggaagtgcttgtgtagcaaggtgcaggctctcaagtagacctaacctttgccacagagcgtgcgggacttgttgcgcaagatgcaactgtgtgccacctggtacgtacggagactacgacaagtgccagtgctatgctaccctcaccacccacggtggtcgccgcaagtgcccttaagtaaacttaaaactctcaaattgcttcggatgttgaatttcaatactatgtcattttgtgtgttagtatttgtttgcatatatatgtatgtgggtcgaataagtcatgagagccgtacggcgtatttgtgtgtggtgctgtattattaattggtctatttgttgcaagttttttggtttttcattcgttgcgtgaaataatccccttgtattatttcattttctaaataaagttatgttcctttat

SEQ ID NO: 16683 - protein, 98 aa, Glycine max
MAISKALIASLLISLLVLQLVQADVENSNKKRGYRKKIDCGSACVARCRLSSRPNLCHRACGTCCARCNCVPPGTYGDYDKCQCYATLTTHGGRRKCP

SEQ ID NO: 16684 - protein, 81 aa, Glycine max
MQLCATWYVRRLRQVPVLCYPHHPRWSPQVPLSKLKTLKLLRMLNFNTMSFCVLVFVCIYMYVGRISHESRTAYLCVVLYY

SEQ ID NO: 16685 - protein, 61 aa, Glycine max
NKTQNTHIISTEFSRIIIISFEKYGDFKSPYCFSSHISSCSPTRPGRCGKLKQKEGLPQKN

SEQ ID NO: 16686 - DNA, 1268 bp, Glycine max
agaaaagagttgtttcagtttcgagcgcaaacaagaatgaagggagattggttggaattggagttggagaaggaaataggagacgccatttcccgaacccgattcgcgccccactctaacaccctcctcatctcttcttgggactccagtcttcgcctcttcgacgtcgacgcctctctcctcagactccaagctccctcgcaagctcccctcctcgattgctgcttccaggacgacgctgtggccttcgccgccgcctctgatggactaatccgaaggtatgacttgcattcaggacttgttgatacactgggtagtcacgatgatatggcaacatgtattggatattccaatgaaacatgtcagttggtcacatccggatttgacaaaaagttactgttatgggacatgcatatgaagaagacttctttatgtttgagaagtctagatgcagaggtggactccatgtctgtctctggatttaatgttaccgtagccattggagcatcaatgcttgtttatgatttacgttactttgaccaaccagttgagtcaaaagaggcattcaatggaacacacttaagatgtgtcagttcaattccagatgcagaaggattcgcagttgggtctgtagacggacgagtatcactgcagatttccaatccattcagttcaaacgacattagatatatattccggtgtcatccaaaatcaaaggatggacggcattatttggtatcagtgaacgacattgcattcagtccacttgtatctggtgcctttgccactggtgacaatgaaggttatgttaccatatgggatgctggaagtaggagaagactagttgagttgcccaggtatccaaatagtgttgcatccttatcatacaaccacacaggtcagcttctggctgtagcatcaagccatacttaccaagaagcaaaggaaatagaaaaaccacctcgtatattcatccatagagtggacaacattgatattggatcaatttctgctagtaagagaagttgaagcacttatgctatgcttgctgacgaagatttgtgtcatcagagacacaagtggaggcaccggtgaagaaaatagatgctctttaaaaagggatactgggagatcaagaaaaatattggaggaaaatattaaaagagtttgattgataaagtattatcattaagagtttgatttttggcggtgtttaataaaatcatgtactgtatttttatgtataaaaaattaagttatcatttttt

SEQ ID NO: 16687 - protein, 342 aa, Glycine max
RKELFQFRAQTRMKGDWLELELEKEIGDAISRTRFAPHSNTLLISSWDSSLRLFDVDASLLRLQAPSQAPLLDCCFQDDAVAFAAASDGLIRRYDLHSGLVDTLGSHDDMATCIGYSNETCQLVTSGFDKKLLLWDMHMKKTSLCLRSLDAEVDSMSVSGFNVTVAIGASMLVYDLRYFDQPVESKEAFNGTHLRCVSSIPDAEGFAVGSVDGRVSLQISNPFSSNDIRYIFRCHPKSKDGRHYLVSVNDIAFSPLVSGAFATGDNEGYVTIWDAGSRRRLVELPRYPNSVASLSYNHTGQLLAVASSHTYQEAKEIEKPPRIFIHRVDNIDIGSISASKRS

SEQ ID NO: 16688 - protein, 330 aa, Glycine max
MKGDWLELELEKEIGDAISRTRFAPHSNTLLISSWDSSLRLFDVDASLLRLQAPSQAPLLDCCFQDDAVAFAAASDGLIRRYDLHSGLVDTLGSHDDMATCIGYSNETCQLVTSGFDKKLLLWDMHMKKTSLCLRSLDAEVDSMSVSGFNVTVAIGASMLVYDLRYFDQPVESKEAFNGTHLRCVSSIPDAEGFAVGSVDGRVSLQISNPFSSNDIRYIFRCHPKSKDGRHYLVSVNDIAFSPLVSGAFATGDNEGYVTIWDAGSRRRLVELPRYPNSVASLSYNHTGQLLAVASSHTYQEAKEIEKPPRIFIHRVDNIDIGSISASKRS

SEQ ID NO: 16689 - protein, 233 aa, Glycine max
MATCIGYSNETCQLVTSGFDKKLLLWDMHMKKTSLCLRSLDAEVDSMSVSGFNVTVAIGASMLVYDLRYFDQPVESKEAFNGTHLRCVSSIPDAEGFAVGSVDGRVSLQISNPFSSNDIRYIFRCHPKSKDGRHYLVSVNDIAFSPLVSGAFATGDNEGYVTIWDAGSRRRLVELPRYPNSVASLSYNHTGQLLAVASSHTYQEAKEIEKPPRIFIHRVDNIDIGSISASKRS

SEQ ID NO: 16690 - DNA, 1160 bp, Glycine max
agaacagctcaagatagagcttaacaaggtaagagatactggtctgcctaccacctttgagacgcaaaggataataatggaagacttgaagccatgggaaattgatgaaaaattcaagcatggtagtgccataaatgatcttacaaaattctacaagagctacacagaaagaatgaggaaatttgatatcttaaattaccaaaagctgtttgccataggtgccctgaagaccaaggaccttgtgctatcattttcaagtcgtgagaactcttccacattgaagaagttcatgaggcgtaaaaaatctgattctgacccattgaaaaagttcgtgagagaattctacagtgacttggaaatggcatatgtgggacagttgtgcctttcttgggatttccttcagttggagtatgagaaggctttgcagttatgggaatctgatcaatgcaggtttcaaagttacaatgaagtagctgaggagttccagcattttcaagtgcttctgctaagatttatagagaatgaacgtttccaaggtccacgagttgaatactatgccaggaatcgttgtgctatgcaaaattttcttcaagttcctgtcataagagaggacaaaaccaaggaagaagagaaattcaaaacaagagatgcagataaagatgaaatcacaattgacatgctagtagagattttagaagaatcaattaagataatttcgcgtttcattagagctgataaagatgcatctagcttggctcataaaggtcctagagaaactcaagtaaagctccaagaccctgcagattcagaatttcttagggagattcaagcagaacttcgaaagaaggaaaagagacttaatgaacttttgaagagaagtagcataatgaagaagttccaaaagcatgaggaagatggaagagatcatttgctttacttttttcctcaagtggacatgaaactggtttggagagtgttgaacatgtcaaaaatatctagggatcaactagcatggtgtcataataaactaagtaacatcaattttgtaaacagaagtatacatatagaaccatctttcttgctttttccttgttaatagttatacgctagatttgttttttgtacatatgttactccacatttagaagaccattgtggat

SEQ ID NO: 16691 - protein, 364 aa, Glycine max
EQLKIELNKVRDTGLPTTFETQRIIMEDLKPWEIDEKFKHGSAINDLTKFYKSYTERMRKFDILNYQKLFAIGALKTKDLVLSFSSRENSSTLKKFMRRKKSDSDPLKKFVREFYSDLEMAYVGQLCLSWDFLQLEYEKALQLWESDQCRFQSYNEVAEEFQHFQVLLLRFIENERFQGPRVEYYARNRCAMQNFLQVPVIREDKTKEEEKFKTRDADKDEITIDMLVEILEESIKIISRFIRADKDASSLAHKGPRETQVKLQDPADSEFLREIQAELRKKEKRLNELLKRSSIMKKFQKHEEDGRDHLLYFFPQVDMKLVWRVLNMSKISRDQLAWCHNKLSNINFVNRSIHIEPSFLLFPC

SEQ ID NO: 16692 - protein, 339 aa, Glycine max
MEDLKPWEIDEKFKHGSAINDLTKFYKSYTERMRKFDILNYQKLFAIGALKTKDLVLSFSSRENSSTLKKFMRRKKSDSDPLKKFVREFYSDLEMAYVGQLCLSWDFLQLEYEKALQLWESDQCRFQSYNEVAEEFQHFQVLLLRFIENERFQGPRVEYYARNRCAMQNFLQVPVIREDKTKEEEKFKTRDADKDEITIDMLVEILEESIKIISRFIRADKDASSLAHKGPRETQVKLQDPADSEFLREIQAELRKKEKRLNELLKRSSIMKKFQKHEEDGRDHLLYFFPQVDMKLVWRVLNMSKISRDQLAWCHNKLSNINFVNRSIHIEPSFLLFPC

SEQ ID NO: 16693 - protein, 307 aa, Glycine max
MRKFDILNYQKLFAIGALKTKDLVLSFSSRENSSTLKKFMRRKKSDSDPLKKFVREFYSDLEMAYVGQLCLSWDFLQLEYEKALQLWESDQCRFQSYNEVAEEFQHFQVLLLRFIENERFQGPRVEYYARNRCAMQNFLQVPVIREDKTKEEEKFKTRDADKDEITIDMLVEILEESIKIISRFIRADKDASSLAHKGPRETQVKLQDPADSEFLREIQAELRKKEKRLNELLKRSSIMKKFQKHEEDGRDHLLYFFPQVDMKLVWRVLNMSKISRDQLAWCHNKLSNINFVNRSIHIEPSFLLFPC

SEQ ID NO: 16694 - DNA, 1440 bp, Glycine max
gcacgataggaggcactacgctgtcgtttgcggtgttagaagacgtagtcgggcgtgatggcgaagaagcgatcagccccgagtggcggtcgtcgggaaaaccgagccgaatcatcttcccgacggctcaactcagcttccggtcgcagaaaactcgttgcgttcttcatcgtatcgtccatcatcgctatcgtcacttatcgttatcgcttcagacaatcttctccttcgcaaggccttgtcacaactcatgctaattgccaacatatactcgccgaaaattcaaaagtatcaggaaattcgtctcagcgccattatacttatcctgtgcttggctacattactccctggaattctcgaggttatgaattggcaaaaaggttcaactctaagttcacacatttatcacccatttggtatgatctaaagagccaacagactagcttagttctagaggggagacataatgctgacagaggatggatctcagagcttaaaaaggcaggagaagctttgattttgcctagagttgttctggaagcatcaccagcagtgctgttgggaaaggaaaaacaaaggaacaaagccattaaccttatagtaacagagtgcaaggaaatgggatatgatggtattgttttggaatcttggtcaaggtgggcagcttatggtatcttgcatgatccaagcatgcggaatttggcattgcagtttgtaaaacagcttggagatgcactgcattctataagctcagagaaaattagtgggcagcagctgcagttggtctatgttataggtccaccttctgagaagttgcaagagcatgattttggtcctaaagatcttgagactttaagtgaagctgtggatggattctcgttaatgacatatgatttctctaatcctcataatcctggtcctaatgcacctttgaaatggattcaaattgttctacagctgcttctcggtacctctggcaatagagcccaaagccttgcccccaagatacttcttggtatcaacttctatggaaatgatttctccctttcaagggatgcagggggtggagctattattgggagagattacctggcacttttggagaagcactggcctgaactgcagtgggataagaatagtggggagcattttttcttttacactgacgacaaggatatcaggcatgtggtattttatccatctttgaagtcaatttctttgcggttagaggaagctcgttcatggggatgtggcatctcgatctgggaaattggccaaggtctggattatttttttgaccttctgtgatagcttgttatgtgtacttcttttgtggcccatgctaatgtttattcctacgtcgtaatgttgtgtattcagtataatcgaaacgtacttcagttaaattgggattttgtttttcagaaatctagtttgagg

SEQ ID NO: 16695 - protein, 416 aa, Glycine max
MAKKRSAPSGGRRENRAESSSRRLNSASGRRKLVAFFIVSSIIAIVTYRYRFRQSSPSQGLVTTHANCQHILAENSKVSGNSSQRHYTYPVLGYITPWNSRGYELAKRFNSKFTHLSPIWYDLKSQQTSLVLEGRHNADRGWISELKKAGEALILPRVVLEASPAVLLGKEKQRNKAINLIVTECKEMGYDGIVLESWSRWAAYGILHDPSMRNLALQFVKQLGDALHSISSEKISGQQLQLVYVIGPPSEKLQEHDFGPKDLETLSEAVDGFSLMTYDFSNPHNPGPNAPLKWIQIVLQLLLGTSGNRAQSLAPKILLGINFYGNDFSLSRDAGGGAIIGRDYLALLEKHWPELQWDKNSGEHFFFYTDDKDIRHVVFYPSLKSISLRLEEARSWGCGISIWEIGQGLDYFFDLL

SEQ ID NO: 16696 - protein, 229 aa, Glycine max
MGYDGIVLESWSRWAAYGILHDPSMRNLALQFVKQLGDALHSISSEKISGQQLQLVYVIGPPSEKLQEHDFGPKDLETLSEAVDGFSLMTYDFSNPHNPGPNAPLKWIQIVLQLLLGTSGNRAQSLAPKILLGINFYGNDFSLSRDAGGGAIIGRDYLALLEKHWPELQWDKNSGEHFFFYTDDKDIRHVVFYPSLKSISLRLEEARSWGCGISIWEIGQGLDYFFDLL

SEQ ID NO: 16697 - DNA, 1418 bp, Glycine max
taattgttatttttatataccagtgactgtccctgtaactcttgacatgctcttgcacatggaccgcagtagtaaatcatgcacgaccttgtacgtgttgtagaggttcctggtgtatcgatggaactttgtggtgggactcatgtccgtaatacttctgaaattcgtggttttaaaattatctcagaacagggtattgcatctggaatcagacgtatcgaagctgtagctggggaagctttcattgaatatatcaatgcccgagacttttatctgaagcagctatgttccactctcaaagttaaaccagaagaagtgacaacaaggatagaaaacctattagaggagttacgggtagtgagaaatgaaaattctgctgtgcgtgcaaaagcagcaatctacaaagcctcggtcattgcaagcaaagcattgttggtgggaaattcaaaacagtacagggtactagttgagtgctttgatgatgttgatgctgagtcacttaaaagtgccgcagaatatttactggaaacactaacagatccagcagctgtgatactaggctcatgtccaggtgaagggaaggttagtctagttgctgcttttactccaggggtggttgatcaggggattcaggcaggaaagtttattggacaaatagcaaaattatgtggtggtggaggaggtggaaggccaaattttgctcaggctggtgggaggaagcctgaaaatttggcaagtgcccttgataaggctcggtcagagcttatagccactctatgtgaaaaagggaattgaatttaagtacacttagcagatagatctttttatgctaaagcagcagaaaatattgattctctgttgtcgaagaattcatcacaaaacaattcacaagcaaaaggggcggaagctgctgaagttttaacgagttttcttgcaattccagggggcatgtaattgaagtttcaaaatagtatagagcatttgttcgtgtgactttattctcctgacaacctggcctgcattcacacattccaacttgtaaattttgacatgcgcatctcagattggttgcaggatgtaagtgcaaacactatatatatacacctgaaagatagttgagagtgaatgacggcggtggattcactcctttctcttttgattgccttggaggaagttgggaccccatagaattaaaagtgatagaactgaaggttaaactgtttggtgaaagtaagtgaatgatgttatgtctagcaacttgacggtcaagaaaattgtcaattgttgtgggtgaaacgctacttaaaaagaaagaaaaaatccatgattatcccggatgtgaaattgtgttatagaattatgtcactaaacggtagatgagaaattgtcacgtcccaaaatatggcctattttatgtc

SEQ ID NO: 16698 - protein, 238 aa, Glycine max
MHDLVRVVEVPGVSMELCGGTHVRNTSEIRGFKIISEQGIASGIRRIEAVAGEAFIEYINARDFYLKQLCSTLKVKPEEVTTRIENLLEELRVVRNENSAVRAKAAIYKASVIASKALLVGNSKQYRVLVECFDDVDAESLKSAAEYLLETLTDPAAVILGSCPGEGKVSLVAAFTPGVVDQGIQAGKFIGQIAKLCGGGGGGRPNFAQAGGRKPENLASALDKARSELIATLCEKGN

SEQ ID NO: 16699 - protein, 224 aa, Glycine max
MELCGGTHVRNTSEIRGFKIISEQGIASGIRRIEAVAGEAFIEYINARDFYLKQLCSTLKVKPEEVTTRIENLLEELRVVRNENSAVRAKAAIYKASVIASKALLVGNSKQYRVLVECFDDVDAESLKSAAEYLLETLTDPAAVILGSCPGEGKVSLVAAFTPGVVDQGIQAGKFIGQIAKLCGGGGGGRPNFAQAGGRKPENLASALDKARSELIATLCEKGN

SEQ ID NO: 16700 - DNA, 1269 bp, Glycine max
gtttataaacttgaaagaaaaaaaagaaaaagctaccctcaagcggaaagaatcaaccttcttccctttcatttctcactttcagtgttcactcactcatctccactgtgcttcttcttcatcatcattcatcttcttcttctccctctccctctcttcccttcccaatgtcctctctccaccttcttcccggcgccaccaccgcccccaactccgcattcctcctccgcccccattctcccctcttcccctccaaaaccctaacccccaaaaaacccaaacctccctccgccctcctccagtggaatcgcaagcccgagctctccggctccaccccccgcgtcgccgtcatcacctccggcaagggtggcgtgggcaagaccaccaccaccgccaacatcggcctctccctcgcccgtctcggcttctccgtggtcgccatcgacgccgacgtcggcctccgcaacctcgacctcctcctcggcctcgagaaccgcgtcaactacaccgtgatcgaggtcctgaatggcgaatgccgcctcgaccaagccctcgtccgcgacaagcgctggtccaacttcgaactcctctgcatctccaaaccccgatccaaactccccctcggattcggcggcaaggccctcacctggctcgtggacgcgctgaaagcacgttcacagggctgccccgacttcatcctcatcgactgccccgccggcattgacgccggcttcatcaccgccatcacgcccgccaacgaggccgtcctcatcactacccccgacatcaccagcctccgcgacgccgaccgcgtcaccggcctcctcgaatgcgacggaattcgggacatcaagatgatcgtcaaccgggttcggaccgacatgatcaaaggggaggacatgatgtcggtgttggacgtgcaagagatgttagggttgcctttgctcggggttattcctgaggatagtgaggttattagaagcaccaatagaggtttccctcttgtgctcaacaagcctcccactttggccggattggcgttcgaacaagccgcgtggaggctcgtggagcaagatagcatgcaggccgtggtggtggaagaacaacccaaacgtgggtttttctccttttttggtgggtaggatttaaacaaggttatgcgtaatggtgtgtatagttagttggttgggttagagcatgtttggatgagtgttgacaaaattgattttgaattgaattgatttgatttatgtttgaatggtttttatt

SEQ ID NO: 16701 - protein, 324 aa, Glycine max
MSSLHLLPGATTAPNSAFLLRPHSPLFPSKTLTPKKPKPPSALLQWNRKPELSGSTPRVAVITSGKGGVGKTTTTANIGLSLARLGFSVVAIDADVGLRNLDLLLGLENRVNYTVIEVLNGECRLDQALVRDKRWSNFELLCISKPRSKLPLGFGGKALTWLVDALKARSQGCPDFILIDCPAGIDAGFITAITPANEAVLITTPDITSLRDADRVTGLLECDGIRDIKMIVNRVRTDMIKGEDMMSVLDVQEMLGLPLLGVIPEDSEVIRSTNRGFPLVLNKPPTLAGLAFEQAAWRLVEQDSMQAVVVEEQPKRGFFSFFGG

SEQ ID NO: 16702 - protein, 240 aa, Glycine max
FINLKEKKEKATLKRKESTFFPFISHFQCSLTHLHCASSSSSFIFFFSLSLSSLPNVLSPPSSRRHHRPQLRIPPPPPFSPLPLQNPNPQKTQTSLRPPPVESQARALRLHPPRRRHHLRQGWRGQDHHHRQHRPLPRPSRLLRGRHRRRRRPPQPRPPPRPREPRQLHRDRGPEWRMPPRPSPRPRQALVQLRTPLHLQTPIQTPPRIRRQGPHLARGRAESTFTGLPRLHPHRLPRRH

SEQ ID NO: 16703 - DNA, 1651 bp, Glycine max
aatgcatctagagctagagacttggacaattttggttgctattgtgtgcatcttggtctttgttctgaaggagattgttatgggagggaagagctcaaaagggagtggtaggaggtatgattttggtgcttcttcatcttcacgggataataactatggtggataccatccacaatcaccatacccttcttatcaaacacctcagcacccgcgtgcatcagctccattttatgactatggacagccaaaaaggaagttggataagaagtattccaggatagctgataattaccgttctttggatgaggttacagctgcacttgcaaatgctgggctggaatcttctaatctcattgttggcattgatttcaccaagagcaatgagtggacagggaagaggtcattcaatcgaaaaagtttacatgacattagaagtggtcaaaacccttatgaacaagcaatttctattatcgggaaaactttatctgctttcgatgaagataacttgattccttgttttggatttggagatgcatctacacacgatcaagatgtatttagtttctattcagaagagaggttctgcaatgggtttgaggaagttctgacacgatacagacaaattattccttccctaaaactcgcaggacccacttcgtttgcccctattattgaaatggctatgactattgttgagcaaagtggtggccaatatcatgtcttgctaataattgcagatggacaggtgactagaagcgttgatacacaaaatggcaacttaagtccgcaagagcagaacacaatagatgcaatagtaaaagccagtgagtatccactgtcaatagttttggtgggagttggagatggaccatgggaaatgatgagggaatttgatgataacatcccttctcgggcatttgacaattttcagtttgtgaattttactgaaataatgacaaggaatgtagattcaaccagaaaagagacagattttgccctttcagctttgatggagataccttctcaatacaaggcaaccctagagcttggcatattgggttcacggagggggcattcaccagatagggttgctctacccccacctctttatagtagaacctcttccagcatcagcacaaaatctacaaggtctaacagttttcagcagaggacacctacacatactagctatgatagcagtgttcacacagagacatcatcaagttctttatatgataataaggtttgccccatttgtcttaccaatgcaaaggatatggcctttggttgtgggcatcagacttgttgcgagtgtggagaggacctccaattctgtcccatttgccggagcacaatccatactagaataaggctttactagttagctttgatgcagaagtcctgtcaatgaaaatttcgtcatttccagaataaggggctgcaaaaggatgtgcagagttggtctggctcttttcacagatggtttcttgtccataaaaactgcatttgcaatttcgaggcgaaacttgtattcccagttacacttaggaagagctctttacagaaagaattggccttccccgttgtatatatgtagttcatgtgtctcggaaggcgtcatgtttttaaatgaactgcttgcattaaaatt

SEQ ID NO: 16704 - protein, 459 aa, Glycine max
MHLELETWTILVAIVCILVFVLKEIVMGGKSSKGSGRRYDFGASSSSRDNNYGGYHPQSPYPSYQTPQHPRASAPFYDYGQPKRKLDKKYSRIADNYRSLDEVTAALANAGLESSNLIVGIDFTKSNEWTGKRSFNRKSLHDIRSGQNPYEQAISIIGKTLSAFDEDNLIPCFGFGDASTHDQDVFSFYSEERFCNGFEEVLTRYRQIIPSLKLAGPTSFAPIIEMAMTIVEQSGGQYHVLLIIADGQVTRSVDTQNGNLSPQEQNTIDAIVKASEYPLSIVLVGVGDGPWEMMREFDDNIPSRAFDNFQFVNFTEIMTRNVDSTRKETDFALSALMEIPSQYKATLELGILGSRRGHSPDRVALPPPLYSRTSSSISTKSTRSNSFQQRTPTHTSYDSSVHTETSSSSLYDNKVCPICLTNAKDMAFGCGHQTCCECGEDLQFCPICRSTIHTRIRLY

SEQ ID NO: 16705 - protein, 433 aa, Glycine max
MGGKSSKGSGRRYDFGASSSSRDNNYGGYHPQSPYPSYQTPQHPRASAPFYDYGQPKRKLDKKYSRIADNYRSLDEVTAALANAGLESSNLIVGIDFTKSNEWTGKRSFNRKSLHDIRSGQNPYEQAISIIGKTLSAFDEDNLIPCFGFGDASTHDQDVFSFYSEERFCNGFEEVLTRYRQIIPSLKLAGPTSFAPIIEMAMTIVEQSGGQYHVLLIIADGQVTRSVDTQNGNLSPQEQNTIDAIVKASEYPLSIVLVGVGDGPWEMMREFDDNIPSRAFDNFQFVNFTEIMTRNVDSTRKETDFALSALMEIPSQYKATLELGILGSRRGHSPDRVALPPPLYSRTSSSISTKSTRSNSFQQRTPTHTSYDSSVHTETSSSSLYDNKVCPICLTNAKDMAFGCGHQTCCECGEDLQFCPICRSTIHTRIRLY

SEQ ID NO: 16706 - protein, 234 aa, Glycine max
MAMTIVEQSGGQYHVLLIIADGQVTRSVDTQNGNLSPQEQNTIDAIVKASEYPLSIVLVGVGDGPWEMMREFDDNIPSRAFDNFQFVNFTEIMTRNVDSTRKETDFALSALMEIPSQYKATLELGILGSRRGHSPDRVALPPPLYSRTSSSISTKSTRSNSFQQRTPTHTSYDSSVHTETSSSSLYDNKVCPICLTNAKDMAFGCGHQTCCECGEDLQFCPICRSTIHTRIRLY

SEQ ID NO: 16707 - DNA, 1003 bp, Glycine max
gaagacaccgagcgacaaagatcgacgatgacggacgaaaccgaagaattggaaccgttgtttgattacagccgggttcagcctctgaaccccatcgacctcgatgatgattttgatgattacgaggatgtgatttgcgttgatagtaaaaagaggaagaattcccaggctgttgggaatgagaagactaatgggaaaggagtaacagtggtggacattgaggatgatgattggttgcctcctccaccaaagatcgcaagtaatgcacagaagaccacggacgaggactcaactttgaaaaaattgagattaaagaagcaggaacttgcctggtttgctgaatcagcaaaagaattgttaaaagatgttgaagagtcatcaaaattggaaattaataattcgttgcagtcttctgtggttggtgtagatgagaaaagtacagagcattctgaaagagcaaagattgtcatttccgttcaggacaaggatggaacaaagcagattcgtatgttcatggatgacaagtttgaaaggattgtcaaaatatatgcagagaaaatcaaatgtgacatgaaactgatagtattgtcctttgatggtgataaaataagtttgtctgaaacccctgcaagccttgggatggaagacgatgatattattgaagttcacttgaaatcaagttgatcgaggtcttcagtcatggattcatgaagctcaaactgacattttggggccacatttgggagttacgtaccctagaaggttgtttgtttttagcatctttagtacaagaaaaacagtgccagttcggccgaactgtatagcacattatttttttatgtaattgtctagtatcgctccttttggtggatgtttctttgtttatggtataggtttctgataatgcagaaaccctcctgtttttggatgtgcattattgcttttggttttctgcaatcagtttgcttgattgttcaaatagatgtaagtcaagatgaagctc

SEQ ID NO: 16708 - protein, 227 aa, Glycine max
EDTERQRSTMTDETEELEPLFDYSRVQPLNPIDLDDDFDDYEDVICVDSKKRKNSQAVGNEKTNGKGVTVVDIEDDDWLPPPPKIASNAQKTTDEDSTLKKLRLKKQELAWFAESAKELLKDVEESSKLEINNSLQSSVVGVDEKSTEHSERAKIVISVQDKDGTKQIRMFMDDKFERIVKIYAEKIKCDMKLIVLSFDGDKISLSETPASLGMEDDDIIEVHLKSS

SEQ ID NO: 16709 - protein, 218 aa, Glycine max
MTDETEELEPLFDYSRVQPLNPIDLDDDFDDYEDVICVDSKKRKNSQAVGNEKTNGKGVTVVDIEDDDWLPPPPKIASNAQKTTDEDSTLKKLRLKKQELAWFAESAKELLKDVEESSKLEINNSLQSSVVGVDEKSTEHSERAKIVISVQDKDGTKQIRMFMDDKFERIVKIYAEKIKCDMKLIVLSFDGDKISLSETPASLGMEDDDIIEVHLKSS

SEQ ID NO: 16710 - DNA, 1101 bp, Glycine max
gaacataatgatacacaatatttttctcctttcaactttaaatccttcccaatttatgtcatacccacttcgaggcttcaagtgctagctagcaacgtgcaaggaaactcactcttgaagtttgtgaatgtcctttgttggtaaggatgggaaggaagccatgttgtgacaagatggggttgaagaagggttcttggactgctgaagaggatgagattcttgttaattatatcaacaagaatggtggtcatggaagttggcgttctctccctaagttagcaggtcttcttcgttgtggcaagagttgccggctaagatggacaaactacctcagaccagatattaaacgtggttcctttacacttgaggaagaaaaactaatcatacagcttcatggtatccttggaaataggtgggctgctatagcctctcagctaccaggaagaacagacaatgagatcaagaacttatggaacacccacttaaagaaacgtctcatttgcatgggcctggacccacaaacccaccaaccactagcctctcctcataacctaaacgacaaggcccatgcatcatccacttcaacccgccacatggcccagtgggagactgcaaggcttgaagcagaggccaggctctcaagggagccacatttcaacaacaaaactgactctgactacttcctccgcatttggaactctgaagttggagaatcttttcgtgatgtccacaaatcagaatcttcaatcaaatgtgagtcattgtctgccaccactactactaccactacagatttggcttcctcaaccccagcaagcattgtcaaaaaggagtttttgtggggtgttaagaaaattgtctcttattcatcatcaagctctagtgaactagaacatgactcttgtgacacttcattgcagttcttgttggactttcctataaacaatgacatgagcttcttagaattatgagacaccaacccttccttacccttaattagtgcacgtatgatgttgttgatatgctgacatgtatccttctgttggctattttgtagacttatatcatgtttggataactataaaaattgattctgaaacc

SEQ ID NO: 16711 - protein, 274 aa, Glycine max
MGRKPCCDKMGLKKGSWTAEEDEILVNYINKNGGHGSWRSLPKLAGLLRCGKSCRLRWTNYLRPDIKRGSFTLEEEKLIIQLHGILGNRWAAIASQLPGRTDNEIKNLWNTHLKKRLICMGLDPQTHQPLASPHNLNDKAHASSTSTRHMAQWETARLEAEARLSREPHFNNKTDSDYFLRIWNSEVGESFRDVHKSESSIKCESLSATTTTTTTDLASSTPASIVKKEFLWGVKKIVSYSSSSSSELEHDSCDTSLQFLLDFPINNDMSFLEL

SEQ ID NO: 16712 - protein, 265 aa, Glycine max
MGLKKGSWTAEEDEILVNYINKNGGHGSWRSLPKLAGLLRCGKSCRLRWTNYLRPDIKRGSFTLEEEKLIIQLHGILGNRWAAIASQLPGRTDNEIKNLWNTHLKKRLICMGLDPQTHQPLASPHNLNDKAHASSTSTRHMAQWETARLEAEARLSREPHFNNKTDSDYFLRIWNSEVGESFRDVHKSESSIKCESLSATTTTTTTDLASSTPASIVKKEFLWGVKKIVSYSSSSSSELEHDSCDTSLQFLLDFPINNDMSFLEL

SEQ ID NO: 16713 - protein, 155 aa, Glycine max
MGLDPQTHQPLASPHNLNDKAHASSTSTRHMAQWETARLEAEARLSREPHFNNKTDSDYFLRIWNSEVGESFRDVHKSESSIKCESLSATTTTTTTDLASSTPASIVKKEFLWGVKKIVSYSSSSSSELEHDSCDTSLQFLLDFPINNDMSFLEL

SEQ ID NO: 16714 - DNA, 1321 bp, Glycine max
gtggcaacttgaatgttttcttcttaggaatattatgaccttatgcatgagtttatgactgctgtgaagcaaaactacggggaaaaagtccttgtacagtttgaagactttgcaaatcacaatgcttttgagttacttgctaaatatgggacaactcatctcgttttcaatgacgatatacaggggactgcatctgttgttctagctggagttgtagcagccctaaaactcattggtggtacattgcctgagcacacattcctcttccttggtgctggagaagcaggaactggtatagccgagctaatagctcttgagatgtcaaagcagactaaggcacccatagaagagagtcgcaagaagatatggcttgtagactcaaagggtttaattgttagttcacgaaagaattcacttcaacacttcaagaagccttgggctcatgaacatgagcctgttaacagtctcctagaggcagtcaaggtgatcaagccaacagttttgattggatcatcaggagtgggaagaacatttacaaaggaagtagttgaggctatgacttcaaacaatgataaacctctcattctggctctctccaatcctacctcacagtctgagtgtacagctgaagaggcttaccagtggagtgagggtcgtgcaatttttgctagtgggagtccatttgatcctgttgaatacaagggcaaagtttatgcttctggccaggccaacaatgcttacattttccctggctttggtttgggtttagtaatctcaggagcaattcgagtacatgacgatatgcttctagcagcttcggaatccttggctaaacaagtgagtgaggagaactacaaaaatggcttgatttacccaccattctctaatatcagaagaatttcggctaatatagctgcaaatgttgctgccaaggcatacgaactgggcttggctacccgtcttcctcgtcctcagaatcttgtgaagtgtgctgagagttgcatgtatactcccgtataccgcaactataggtgaatgaggcggcttctggctctaacaaggatgtgtttcgtgtatggtgtcttattgtgcttttatgcacattcacgaataaacaattttatgcttcaaccagtgtttttctattatgaaatccttatttcatctaatgttacttatgtcgatgacaatggttattaaaatccataatgactcaagtcgtttcatttgccctggctgactttggtttgttttaaccaattgcaccatgtacttgtaataagttagtaatatctcaaatctatctatccgaatagttcat

SEQ ID NO: 16715 - protein, 330 aa, Glycine max
MHEFMTAVKQNYGEKVLVQFEDFANHNAFELLAKYGTTHLVFNDDIQGTASVVLAGVVAALKLIGGTLPEHTFLFLGAGEAGTGIAELIALEMSKQTKAPIEESRKKIWLVDSKGLIVSSRKNSLQHFKKPWAHEHEPVNSLLEAVKVIKPTVLIGSSGVGRTFTKEVVEAMTSNNDKPLILALSNPTSQSECTAEEAYQWSEGRAIFASGSPFDPVEYKGKVYASGQANNAYIFPGFGLGLVISGAIRVHDDMLLAASESLAKQVSEENYKNGLIYPPFSNIRRISANIAANVAAKAYELGLATRLPRPQNLVKCAESCMYTPVYRNYR

SEQ ID NO: 16716 - protein, 326 aa, Glycine max
MTAVKQNYGEKVLVQFEDFANHNAFELLAKYGTTHLVFNDDIQGTASVVLAGVVAALKLIGGTLPEHTFLFLGAGEAGTGIAELIALEMSKQTKAPIEESRKKIWLVDSKGLIVSSRKNSLQHFKKPWAHEHEPVNSLLEAVKVIKPTVLIGSSGVGRTFTKEVVEAMTSNNDKPLILALSNPTSQSECTAEEAYQWSEGRAIFASGSPFDPVEYKGKVYASGQANNAYIFPGFGLGLVISGAIRVHDDMLLAASESLAKQVSEENYKNGLIYPPFSNIRRISANIAANVAAKAYELGLATRLPRPQNLVKCAESCMYTPVYRNYR

SEQ ID NO: 16717 - protein, 238 aa, Glycine max
MSKQTKAPIEESRKKIWLVDSKGLIVSSRKNSLQHFKKPWAHEHEPVNSLLEAVKVIKPTVLIGSSGVGRTFTKEVVEAMTSNNDKPLILALSNPTSQSECTAEEAYQWSEGRAIFASGSPFDPVEYKGKVYASGQANNAYIFPGFGLGLVISGAIRVHDDMLLAASESLAKQVSEENYKNGLIYPPFSNIRRISANIAANVAAKAYELGLATRLPRPQNLVKCAESCMYTPVYRNYR

SEQ ID NO: 16718 - DNA, 1317 bp, Glycine max
gatccactgtgaacagagttttgaagttgaacttgaaaagaagttgcgtggtgctgaaatagatcttccaaggataaaattgaactcagatgagcagatgtgctgcaatttctgtaggatacctattactgattatcatcgacgctgtccaagttgttcatatgatttgtgccttagttgctgtcgagatcttcgagaagcaactgcagatcacaataaagaaccccaaacagagcaagcaaaaacttctgatcgaaatatattaagtaaatttcctcattggagatccaatgacaatggaagtattccatgtccccctaaggagtgtggtggctgtggttattcttcactaaatttaagccggattttcaagatgaactgggttgcaaagttggtgaaaaatgtagaggaaatggttagtggctgcagaattagtaatgccgatggtccaccggaaaccgggctgaatgatctgaaactttgccaatattctcacagagaagccagtgatgataattatctttattgcccagcatccgacgatatcaaaactgatgggattgacaattttagaaagcattggaaaactggtgagcccattattgttaagcaagtatttgatgggtcatccatttcaagctgggatccaatggtcatatggagagggattctagagacaatagatgagaaagcgaaagatgaaaaccggatggttaaggccatagattgcttagatgggtctgagattgatattgagcttgctcagttcatgaaaggatactttgaagggcttattcttgaaaatggttggccacagttattgaaattgaaagattggccttcacctagtgcttctgaagaatttctgttgtaccaaagacctgagtttatcagcaaactacctttacttcagtatattcactccaagtggggccttctcaatgttgcagctaaattgcctcattactccttgcagaatgatgtaggacccaagatatatatatcttatgggattagtgatgaacttggtagaggtgattcagtgacaaatctccacttcaatatgcgtgacatggtgtaccttttggttcatacaaatgaagtaaagctgaaggactggcagagaactaaaattgaaatgatgcaaaaagctaaagctaataaggaatttgaggcaaaagaatcacatggggatcctcaaatatcttcaagggggagttcacctgattcctcacttggtacaaaaagtagtggactggaaatagactcaaaccagaataagtcaattatggatcaagggtttgaaatttattctag

SEQ ID NO: 16719 - protein, 438 aa, Glycine max
IHCEQSFEVELEKKLRGAEIDLPRIKLNSDEQMCCNFCRIPITDYHRRCPSCSYDLCLSCCRDLREATADHNKEPQTEQAKTSDRNILSKFPHWRSNDNGSIPCPPKECGGCGYSSLNLSRIFKMNWVAKLVKNVEEMVSGCRISNADGPPETGLNDLKLCQYSHREASDDNYLYCPASDDIKTDGIDNFRKHWKTGEPIIVKQVFDGSSISSWDPMVIWRGILETIDEKAKDENRMVKAIDCLDGSEIDIELAQFMKGYFEGLILENGWPQLLKLKDWPSPSASEEFLLYQRPEFISKLPLLQYIHSKWGLLNVAAKLPHYSLQNDVGPKIYISYGISDELGRGDSVTNLHFNMRDMVYLLVHTNEVKLKDWQRTKIEMMQKAKANKEFEAKESHGDPQISSRGSSPDSSLGTKSSGLEIDSNQNKSIMDQGFEIYS

SEQ ID NO: 16720 - protein, 406 aa, Glycine max
MCCNFCRIPITDYHRRCPSCSYDLCLSCCRDLREATADHNKEPQTEQAKTSDRNILSKFPHWRSNDNGSIPCPPKECGGCGYSSLNLSRIFKMNWVAKLVKNVEEMVSGCRISNADGPPETGLNDLKLCQYSHREASDDNYLYCPASDDIKTDGIDNFRKHWKTGEPIIVKQVFDGSSISSWDPMVIWRGILETIDEKAKDENRMVKAIDCLDGSEIDIELAQFMKGYFEGLILENGWPQLLKLKDWPSPSASEEFLLYQRPEFISKLPLLQYIHSKWGLLNVAAKLPHYSLQNDVGPKIYISYGISDELGRGDSVTNLHFNMRDMVYLLVHTNEVKLKDWQRTKIEMMQKAKANKEFEAKESHGDPQISSRGSSPDSSLGTKSSGLEIDSNQNKSIMDQGFEIYS

SEQ ID NO: 16721 - protein, 314 aa, Glycine max
MNWVAKLVKNVEEMVSGCRISNADGPPETGLNDLKLCQYSHREASDDNYLYCPASDDIKTDGIDNFRKHWKTGEPIIVKQVFDGSSISSWDPMVIWRGILETIDEKAKDENRMVKAIDCLDGSEIDIELAQFMKGYFEGLILENGWPQLLKLKDWPSPSASEEFLLYQRPEFISKLPLLQYIHSKWGLLNVAAKLPHYSLQNDVGPKIYISYGISDELGRGDSVTNLHFNMRDMVYLLVHTNEVKLKDWQRTKIEMMQKAKANKEFEAKESHGDPQISSRGSSPDSSLGTKSSGLEIDSNQNKSIMDQGFEIYS

SEQ ID NO: 16722 - DNA, 1017 bp, Glycine max
atatttacttatttctcttccgtcttctgtaaatggttgatgatcatgttcacttttctttcagccaagtgattctcttccccccttgatctgcctataaatccactaagcacacactcaaaggacacagtcacatttagatataaacaaaagaagaaaagaaagaaaataatgtcaatggaaatgatggcaaccgaacgtgtttgttatgttcactgcaacttctgcaacaccattttggcggttagtgttccatacagcagtttgctaaccatagtgacggttagatgtggacattgtgccaatttgctatcagttaacatgggagcgtcacttcaagcatttccccctcaagaccctcagtcacagaaacagcttctaagctttgaagaaccaagcagctgcaaggaactgggatcatcatcttcaaaatgtaacaaaatagcgccatttcacgaggcagtagagcatgaacaacctaggattcctcccattcgtcctacagagaagagacatcgtgttccttctgcttataatcgcttcattaaggaggaaattcaaaggattaaggctagtaatccagatatcagccacagggaggctttcagctcagcagccaaaaactgggcacatttccctcacattcactttgggttaaagaacttaaagctggatggcaacaagcaagaaaagttggaccagggggaaggagctgaaaagtctaatggattctactgatgatataaatggaagcctgtgagtatgagcttgtttttgttatgcttgacctaaatcagtgaaaaatatgaggttgatcaaatttcttcccaatatatcgtacaactggatgggagactcctgcaagttaacctcagcctctcacaccaatgtttaatagtactacatatatatgtattgcccttttctatatatcgttgttatgaaatgattgctattcttgtgattgcatttattgtgttgaatttgagcacttaagtaaacaacacgttcctctat

SEQ ID NO: 16723 - protein, 188 aa, Glycine max
MSMEMMATERVCYVHCNFCNTILAVSVPYSSLLTIVTVRCGHCANLLSVNMGASLQAFPPQDPQSQKQLLSFEEPSSCKELGSSSSKCNKIAPFHEAVEHEQPRIPPIRPTEKRHRVPSAYNRFIKEEIQRIKASNPDISHREAFSSAAKNWAHFPHIHFGLKNLKLDGNKQEKLDQGEGAEKSNGFY

SEQ ID NO: 16724 - protein, 186 aa, Glycine max
MEMMATERVCYVHCNFCNTILAVSVPYSSLLTIVTVRCGHCANLLSVNMGASLQAFPPQDPQSQKQLLSFEEPSSCKELGSSSSKCNKIAPFHEAVEHEQPRIPPIRPTEKRHRVPSAYNRFIKEEIQRIKASNPDISHREAFSSAAKNWAHFPHIHFGLKNLKLDGNKQEKLDQGEGAEKSNGFY

SEQ ID NO: 16725 - protein, 184 aa, Glycine max
MMATERVCYVHCNFCNTILAVSVPYSSLLTIVTVRCGHCANLLSVNMGASLQAFPPQDPQSQKQLLSFEEPSSCKELGSSSSKCNKIAPFHEAVEHEQPRIPPIRPTEKRHRVPSAYNRFIKEEIQRIKASNPDISHREAFSSAAKNWAHFPHIHFGLKNLKLDGNKQEKLDQGEGAEKSNGFY

SEQ ID NO: 16726 - DNA, 1212 bp, Glycine max
gaaacaatggaaaagaaatcacctgaaccacccgaagaagcatcacagtcacgagactcatcgcgagataaccagacctggataactgcacaaaacattctgagagaaaaactgatcacagaggactgtttcgcatggaaattacaagctggttccaaagaggaagaagcattgagatacgttggtggggttgacataagcttctcaaaggatgacccatcaagggcatgtggcacccttgtagtcttggacttccacactcttcaagttctctatcaagatttctctttggtcactcttcaagtcccttatgtgcctggctttctagcatttagagaggccccagttcttctgcagcttctagagaaaatgaaaaggagcaataatcctttctaccctcagctattaatggttgatggaaacggaatacttcatccccgaggttttgggctggcctgtcatattggagttgaggccaatctcccaacaattgggattggaaagaatttgcatcatgtggatggtcttactcattctagagtgagagaacttcttggagctgaagaaaactgttctgaagattttattaatttggtgggttgttctgggcatatatggggagtggccatgagatctacccagggttccataaaaccaatatttatatcaattggtcacaagatatcacttcagactgccattatgattgttcaaatgacatgcaagtaccgtgtgcctgagccaattaggcaggctgacataagatctagagactacattcggaaacttgaagcaaatgccaaagtaaagtaatttcactcatatggtttaagtttttatcctgttaaattatgaaatagctagccatgtgagatgacaataacaagtttggctgcaaggggctcaaatgaacttgatagaaccatcacaattcgtcaagtggttagaaacaatgccagtgccagtggatttgcttatagcttcattgaatgatccatttcacctcacaggattacataaggactcagcattccatccattagcataattatatctaaaccactcatgtaaaagagtgatgatatatgcacaaccaaatcactctcaaaatagaactatttgcgagctagcattctgtgtagtgtagaagcagaatttttatttctggttgctttgattgtctgatgagaagtgctagcaacattctttaat

SEQ ID NO: 16727 - protein, 270 aa, Glycine max
ETMEKKSPEPPEEASQSRDSSRDNQTWITAQNILREKLITEDCFAWKLQAGSKEEEALRYVGGVDISFSKDDPSRACGTLVVLDFHTLQVLYQDFSLVTLQVPYVPGFLAFREAPVLLQLLEKMKRSNNPFYPQLLMVDGNGILHPRGFGLACHIGVEANLPTIGIGKNLHHVDGLTHSRVRELLGAEENCSEDFINLVGCSGHIWGVAMRSTQGSIKPIFISIGHKISLQTAIMIVQMTCKYRVPEPIRQADIRSRDYIRKLEANAKVK

SEQ ID NO: 16728 - protein, 268 aa, Glycine max
MEKKSPEPPEEASQSRDSSRDNQTWITAQNILREKLITEDCFAWKLQAGSKEEEALRYVGGVDISFSKDDPSRACGTLVVLDFHTLQVLYQDFSLVTLQVPYVPGFLAFREAPVLLQLLEKMKRSNNPFYPQLLMVDGNGILHPRGFGLACHIGVEANLPTIGIGKNLHHVDGLTHSRVRELLGAEENCSEDFINLVGCSGHIWGVAMRSTQGSIKPIFISIGHKISLQTAIMIVQMTCKYRVPEPIRQADIRSRDYIRKLEANAKVK

SEQ ID NO: 16729 - protein, 147 aa, Glycine max
MKRSNNPFYPQLLMVDGNGILHPRGFGLACHIGVEANLPTIGIGKNLHHVDGLTHSRVRELLGAEENCSEDFINLVGCSGHIWGVAMRSTQGSIKPIFISIGHKISLQTAIMIVQMTCKYRVPEPIRQADIRSRDYIRKLEANAKVK

SEQ ID NO: 16730 - DNA, 1294 bp, Glycine max
gtttcatgctgttgcgctaaatctctctctgaactctgaactctgaactgcacaaagccgtaactaatttctcagttcagaaagatctgctactctctctctctctctctctacttttagagcgttataataaatataagctgcataagttgaagactcagcaccgattcttcttcgtctgctgcaaattcagaagtagagatggcaagtcgagtgaaggaagatgagaaaaatgaacgaataattcgaggtcttctcaaactcgcaccaaatcgaagatgcattaactgtaacagcttgggaccacaatatgtgtgcacaaatttctggacgtttgtttgcactaactgtagcggaatacaccgagagtttacacatcgggtaaaatcagtttcaatggctaaatttagtgcacaggaagttagtgcacttcaagaaggaggaaatcagcgtgcaaaggaaatctattttaaagaatgggatccacaacgtcattctttgcctgatagcagcaatattgacaggctccgggactttattaagcatgtttatgtggatagaagattcagcggtgagaggacttatgacaaacctccaagagtaaagggtgacaaggatgatttccatgaaaacaagaggacagagacttatcacagaagcccttcatatgaggacacacatgaacgtcgttacagtgacaggtctagtcctggtggaagaagtcctgtatatgatcaagaaaataggcaatatggtgattacaagaaaagccctggtcgtcctccaataatcaatgattggcgtcgagaagatagatttggggatggatggaaatttgaagatcatagaatatctgatggaaatcataatgtggaaagtacttctcctgagcaaaccaaggatctggattcttccagcccacctgcagtccgacctgttagagagatcttgggagaaaatgtagtacctcttcgaataagtgaaccacccaaaacaaacagtggacaggctactaatggctcagcactcacacaggtgaagttattactgatgatgttccatatgcttcaaccatctgtgttgggagttaggacatttaatacactgttataatagttagttagtaggaggggttttagttaggcggattttctaggtaaatagctaggaggagggtggaaaggaatgggattttgattaatatcttttttgtaaaatgagcaatgctctgtaagcatcaaacgaacatggtaagtggcaataagcatgaacatcaacatgttcatttataaag

SEQ ID NO: 16731 - protein, 303 aa, Glycine max
MASRVKEDEKNERIIRGLLKLAPNRRCINCNSLGPQYVCTNFWTFVCTNCSGIHREFTHRVKSVSMAKFSAQEVSALQEGGNQRAKEIYFKEWDPQRHSLPDSSNIDRLRDFIKHVYVDRRFSGERTYDKPPRVKGDKDDFHENKRTETYHRSPSYEDTHERRYSDRSSPGGRSPVYDQENRQYGDYKKSPGRPPIINDWRREDRFGDGWKFEDHRISDGNHNVESTSPEQTKDLDSSSPPAVRPVREILGENVVPLRISEPPKTNSGQATNGSALTQVKLLLMMFHMLQPSVLGVRTFNTLL

SEQ ID NO: 16732 - protein, 238 aa, Glycine max
MAKFSAQEVSALQEGGNQRAKEIYFKEWDPQRHSLPDSSNIDRLRDFIKHVYVDRRFSGERTYDKPPRVKGDKDDFHENKRTETYHRSPSYEDTHERRYSDRSSPGGRSPVYDQENRQYGDYKKSPGRPPIINDWRREDRFGDGWKFEDHRISDGNHNVESTSPEQTKDLDSSSPPAVRPVREILGENVVPLRISEPPKTNSGQATNGSALTQVKLLLMMFHMLQPSVLGVRTFNTLL

SEQ ID NO: 16733 - DNA, 1950 bp, Glycine max
tttttgagaaaagaggaagccgtttgtgtctgtgtgtgtttgtgaaatagtgtgttaatatgagtaactggttggggttctctctcactccacacttgaggattgatgaagaatttgagagagaaaaccaagagcgtggaggagggtaccatcatccttctccttcttgtcaccctcacttgtctgttatgccccttcgctctgatggctctctctgtgttgctgactcctttagtcactctgctgcatctcaagaatggagatatgatagtgcaataggtggagggaattccaatgaagaaggtccaaagcttgaagactttttgggttgctactcaaactcccccgctaaggtcttttgccaagactctcagcctgaccaaaaccaaagccagaacaatgtttccaaaatcaatgttaatgtggcaccaagcttttgcaccaacaattcagagattgaaactggggataatctcacaaatccttcttccttgctccattctttccatgcatataatgataactcacatgctcttatccccaccaatggcatgtacaagtcctggttggcacaaacccagttttcttctgatggaaaaccttcaaatgaggctaatgggtgcaatttccaatctttgtccctcactatgagccccagtgtgcaaaatggggtgggtgcaatttcctctgttcaagtgaatgaggatagtaggaaacgggtcatggcgaaatctcatgctagagaaccagttcctcgcaaatctattgacacttttgggcaaagaacatctcaatatcgtggtgttacaaggcatagatggactggaagatatgaggcccatttgtgggataatagttgcagaaaggaagggcaaacaaggaaaggaaggcaagtttaccttggtggttatgataaggaagaaaaagcagcaaaggcttacgacttagctgcactcaagtattggggtccaacaactcacataaatttccctttaagcacttatgagaaggaacttgaagagatgaagcacatgaccaggcaagaatttgtcgccaatttaagaaggaagagcagtggattttcaagaggggcatctgtgtatagaggtgtgacaagacaccatcaacatggaaggtggcaggcccgaataggaagggttgcaggaaacaaggacttgtatcttggtacatttagcacacaagaagaagctgctgaagcatatgatatagcagcaatcaagttcagaggaacaagtgctgtgaccaactttgacataagtaggtatgatgtgaagagaatctgctcaagctccactcttattgcaggagatcttgcaaaacggtctcctaaagaatcaccagctccggttcctgcctctgacttcaattcgtgcggttcatcgccgatgccgctggtgtctcagccacctcctttggctataactgatggtgaacattctgatgagttgtccaacatgatgtggaatgccaacaacagtgatgagcaagcacagaatgagagtggtggtgctgaattcaacaacaatgtaactgaatcatcatcatcacaacaggtttcaccaagcagcaacaaggatgctttgaaccctcaaagccccaatgagtttggagtcagtggagcagattatggacatggctacttcacccttgatggaccaaaatatgatgatgggaacaatgaaaatgaccacatgagcaccaacaggcttggaaatttgggattggttaatcaagttcccatgtttgctttgtggaatgaatgaagggaatgttatgttgatgagttgagattacaaaaaacattagcttagaaaaaaaaactaagatcagatggcagaattattgaatgattattatattgtagcttggtatggtaactttttattttatgttgaaagaaaggggatatgtcagtagtgctgattcctt

SEQ ID NO: 16734 - protein, 574 aa, Glycine max
MSNWLGFSLTPHLRIDEEFERENQERGGGYHHPSPSCHPHLSVMPLRSDGSLCVADSFSHSAASQEWRYDSAIGGGNSNEEGPKLEDFLGCYSNSPAKVFCQDSQPDQNQSQNNVSKINVNVAPSFCTNNSEIETGDNLTNPSSLLHSFHAYNDNSHALIPTNGMYKSWLAQTQFSSDGKPSNEANGCNFQSLSLTMSPSVQNGVGAISSVQVNEDSRKRVMAKSHAREPVPRKSIDTFGQRTSQYRGVTRHRWTGRYEAHLWDNSCRKEGQTRKGRQVYLGGYDKEEKAAKAYDLAALKYWGPTTHINFPLSTYEKELEEMKHMTRQEFVANLRRKSSGFSRGASVYRGVTRHHQHGRWQARIGRVAGNKDLYLGTFSTQEEAAEAYDIAAIKFRGTSAVTNFDISRYDVKRICSSSTLIAGDLAKRSPKESPAPVPASDFNSCGSSPMPLVSQPPPLAITDGEHSDELSNMMWNANNSDEQAQNESGGAEFNNNVTESSSSQQVSPSSNKDALNPQSPNEFGVSGADYGHGYFTLDGPKYDDGNNENDHMSTNRLGNLGLVNQVPMFALWNE

SEQ ID NO: 16735 - protein, 531 aa, Glycine max
MPLRSDGSLCVADSFSHSAASQEWRYDSAIGGGNSNEEGPKLEDFLGCYSNSPAKVFCQDSQPDQNQSQNNVSKINVNVAPSFCTNNSEIETGDNLTNPSSLLHSFHAYNDNSHALIPTNGMYKSWLAQTQFSSDGKPSNEANGCNFQSLSLTMSPSVQNGVGAISSVQVNEDSRKRVMAKSHAREPVPRKSIDTFGQRTSQYRGVTRHRWTGRYEAHLWDNSCRKEGQTRKGRQVYLGGYDKEEKAAKAYDLAALKYWGPTTHINFPLSTYEKELEEMKHMTRQEFVANLRRKSSGFSRGASVYRGVTRHHQHGRWQARIGRVAGNKDLYLGTFSTQEEAAEAYDIAAIKFRGTSAVTNFDISRYDVKRICSSSTLIAGDLAKRSPKESPAPVPASDFNSCGSSPMPLVSQPPPLAITDGEHSDELSNMMWNANNSDEQAQNESGGAEFNNNVTESSSSQQVSPSSNKDALNPQSPNEFGVSGADYGHGYFTLDGPKYDDGNNENDHMSTNRLGNLGLVNQVPMFALWNE

SEQ ID NO: 16736 - protein, 410 aa, Glycine max
MYKSWLAQTQFSSDGKPSNEANGCNFQSLSLTMSPSVQNGVGAISSVQVNEDSRKRVMAKSHAREPVPRKSIDTFGQRTSQYRGVTRHRWTGRYEAHLWDNSCRKEGQTRKGRQVYLGGYDKEEKAAKAYDLAALKYWGPTTHINFPLSTYEKELEEMKHMTRQEFVANLRRKSSGFSRGASVYRGVTRHHQHGRWQARIGRVAGNKDLYLGTFSTQEEAAEAYDIAAIKFRGTSAVTNFDISRYDVKRICSSSTLIAGDLAKRSPKESPAPVPASDFNSCGSSPMPLVSQPPPLAITDGEHSDELSNMMWNANNSDEQAQNESGGAEFNNNVTESSSSQQVSPSSNKDALNPQSPNEFGVSGADYGHGYFTLDGPKYDDGNNENDHMSTNRLGNLGLVNQVPMFALWNE

SEQ ID NO: 16737 - DNA, 1243 bp, Glycine max
gaggcaattatacatttaagttcatttcctcctctcctctctcttcattttatttttcttccatctgctaggaaaatgtctgtcagcgttgagggctctgcctttggggcactatttgaagaaaaaaatgtccattctgaagacagcaacgagcttgtgttgcatggtgcatttccattggctaaacatgagagacagaatggatttaatgccacagacatgaatgcatttggaaactccttcaggaactatgatgcagaaagtgaaaggcaaagaatggtggaggaattatataggatgcaacacatcaaccagacatatgactatgggaagagaatgagggaggagtatgggaaattggacaaattagaaatgggtatatgggagtgttgtgagctgctcaatgaagtgacggatgatagcgatcctgatttggatgaaccacaaatacaacatttgttgcagtccgctgaagccattagaaaagactatcctaatgaagattggttacatttaactgctcttattcatgatcttggaaagatccttatgcttccaagctttggtggccttcctcaatggtctgttgttggagatacatttcccctcggatgtgcttttgatgagtcaaatgttcaccacaagcatttcaaggacaatccggataacacaaatcctacttataacacgaaaaatggaatctacaaagaaggaattggactagacaatgttgtgatgtcatggggacatgatgagtatatgtatttggttgcaaaggaaaacggcaccactttgcctccagtagcattgttcattatcaaataccattctttttacgctttacatagggcaggagcatatacacatttgatgaatgaagaagatattgagaatttgaagtggctcaaaatatttagcaaatatgacctctacagcaagagtaaagttctagtagacatagaaaaagttaagccatactatatgtcgctcatcgagaagtatttcccagcaaagcttaggtggtgaaactcaaagacatacacatcgatatggaatcaaagtcatgggcaagctaaggatttaagtttatacttatgaattatgatcgttatgccgaacgtttaaggaattgtttttttcttttatcagattgaagttgttgcctaactttaaattattcttattaagctgtaccgaacgtttaccgtactagaagttgatgtatttacggtttggttgttcc

SEQ ID NO: 16738 - protein, 341 aa, Glycine max
EAIIHLSSFPPLLSLHFIFLPSARKMSVSVEGSAFGALFEEKNVHSEDSNELVLHGAFPLAKHERQNGFNATDMNAFGNSFRNYDAESERQRMVEELYRMQHINQTYDYGKRMREEYGKLDKLEMGIWECCELLNEVTDDSDPDLDEPQIQHLLQSAEAIRKDYPNEDWLHLTALIHDLGKILMLPSFGGLPQWSVVGDTFPLGCAFDESNVHHKHFKDNPDNTNPTYNTKNGIYKEGIGLDNVVMSWGHDEYMYLVAKENGTTLPPVALFIIKYHSFYALHRAGAYTHLMNEEDIENLKWLKIFSKYDLYSKSKVLVDIEKVKPYYMSLIEKYFPAKLRW

SEQ ID NO: 16739 - protein, 316 aa, Glycine max
MSVSVEGSAFGALFEEKNVHSEDSNELVLHGAFPLAKHERQNGFNATDMNAFGNSFRNYDAESERQRMVEELYRMQHINQTYDYGKRMREEYGKLDKLEMGIWECCELLNEVTDDSDPDLDEPQIQHLLQSAEAIRKDYPNEDWLHLTALIHDLGKILMLPSFGGLPQWSVVGDTFPLGCAFDESNVHHKHFKDNPDNTNPTYNTKNGIYKEGIGLDNVVMSWGHDEYMYLVAKENGTTLPPVALFIIKYHSFYALHRAGAYTHLMNEEDIENLKWLKIFSKYDLYSKSKVLVDIEKVKPYYMSLIEKYFPAKLRW

SEQ ID NO: 16740 - protein, 268 aa, Glycine max
MNAFGNSFRNYDAESERQRMVEELYRMQHINQTYDYGKRMREEYGKLDKLEMGIWECCELLNEVTDDSDPDLDEPQIQHLLQSAEAIRKDYPNEDWLHLTALIHDLGKILMLPSFGGLPQWSVVGDTFPLGCAFDESNVHHKHFKDNPDNTNPTYNTKNGIYKEGIGLDNVVMSWGHDEYMYLVAKENGTTLPPVALFIIKYHSFYALHRAGAYTHLMNEEDIENLKWLKIFSKYDLYSKSKVLVDIEKVKPYYMSLIEKYFPAKLRW

SEQ ID NO: 16741 - DNA, 1107 bp, Glycine max
ttttctctctctctctccccactttcatctgtaacaagttgtcaagggcgtgtgtttttgccccacttgggagttgggacactattctatttaatttaatttcacttctggtgagagggcctcaactcttctctacttctgtgctccaatttcctgttgcttcatgcatggctccctaagggaagaaagcttgtcatttgactcttattacgttatcctgtttgcaaatttatttgctctacaatctgcttcacaggtttctctctctgtttctgctggagttgttcaaatgggagaaagagttttattctctacgtagagtttggtagacaaagataatattttgagataatgctagttccacttgccccgtaccctccaccccctccaccagctccatatacgcctccaccaaatggtgcacagagtcaactagtctgttctgggtgtagaaaccttctgctctatccagttggagccacctctgtgtgctgtgctgtttgcaatgcagtcacaacagtgccacctcctggcacagaaatggcccagttagtttgtggaggctgtcacactttcctcatgtacatccgtggagccacaagtgtgcaatgctcttgctgtcacacggtcaatctagctttggaagcaaatctggtggcgcatgtcaactgtgggaactgtaagatgctactcaggtaccaatatggagcaagatccgtgaaatgtgccgtttgcagttttgtaacgtcagttggggcctcgacaagcaccactgagcagaaattcagcacctaaatcttactgtaaaattggtgacagacaccacgaccttggttttaatcaaatatcgcccttgaggaataacgagtgcatatgagatagctgaggaaattttcttaacatgtatagagctatttttcccttgagtgaaataattaaataaattttgtattattggtgtaccatgtaatgctttatttgtaagcagtgtaagcctctaaaggaatgagtagtggagtttatagttctccaatttcaattgcagtgtgccaaaaagctatttggaataactatatatgataagattattgattctgagtgcttttg

SEQ ID NO: 16742 - protein, 147 aa, Glycine max
MLVPLAPYPPPPPPAPYTPPPNGAQSQLVCSGCRNLLLYPVGATSVCCAVCNAVTTVPPPGTEMAQLVCGGCHTFLMYIRGATSVQCSCCHTVNLALEANLVAHVNCGNCKMLLRYQYGARSVKCAVCSFVTSVGASTSTTEQKFST

SEQ ID NO: 16743 - protein, 84 aa, Glycine max
MAQLVCGGCHTFLMYIRGATSVQCSCCHTVNLALEANLVAHVNCGNCKMLLRYQYGARSVKCAVCSFVTSVGASTSTTEQKFST

SEQ ID NO: 16744 - DNA, 1380 bp, Glycine max
atttttaggtgttcccaaggctatagcagggcttttctcagctgaggcccgggatattgctgttgctaggacaatagctccaggatttttagataacgatctgtttcgcattcaaacattgcaacatgtaatgaagatgacccgtacttgggactcaacaatgtcaatgataccaagaggaggagatactatatggggtggtcttgattggtcaccagaagaaggctatcaccctagccagagaaagcacagcaataacaatactcagttgaaagaccacgaaacaaatcaaacaaattttgtcaactatggaagaatgatatcatttggcagagatgtggctgaggcacactcccctgagattcagatgactgacttccggggtgctatcaagggtcgcagtattgcaaataccacttgtcgtgatgtgtggactgaataccatgaaatgggatttgaaggagtgagagcagttgctgaacataaagtttacacagctggctcagtcgttgacctccttcaatttgttgctccaaagatgatggctcgtggtagtgctcatttctcttatggaattgctgacaatttggatgaccctaaatataatcactacaagtattggtcaaaccccttggaaacaaaattaccaaatgctcctgatatggaaatcttctctatgtatggagttggcttacctactgaaagatcttatatttacaagttaactccctttgccgagtgttacattccttttgaaattgacaccacacaagatggtggtagcgatgaagatagctgtctgcaaggtggagtctacactgttgatggggatgagactgtgccggttctaagttcaggcttcatgtgtgctaaaggttggcgcggaaaaacaagattcaacccatccggtatccgcacctacgttagagaatatgatcattctcctccagccaaccttctagagggaaggggcacacaaagtggtgctcacgttgacatcatgggaaattttgcattgattgaggatgttataagagtggctgctggagccaaaggagaagatctaggaggtgataaagtgtattctgatatcttcaagtggtctgagaaaatcaagttacccctatgaatgaagcccaatgcacttccacagttccactcagacacttctcttgaacccctttaaggatcagatcaggctatatataatttttgcagtatattttcactgccaccagagttctgtaagttgcacttattagaattgctggttctgctgatcaaattccagttccatggaggggtgaactatgcgaattggttatattgtaagagcttgtattgaacatttttgttattaaagtaaggatttgatttgtc

SEQ ID NO: 16745 - protein, 375 aa, Glycine max
FLGVPKAIAGLFSAEARDIAVARTIAPGFLDNDLFRIQTLQHVMKMTRTWDSTMSMIPRGGDTIWGGLDWSPEEGYHPSQRKHSNNNTQLKDHETNQTNFVNYGRMISFGRDVAEAHSPEIQMTDFRGAIKGRSIANTTCRDVWTEYHEMGFEGVRAVAEHKVYTAGSVVDLLQFVAPKMMARGSAHFSYGIADNLDDPKYNHYKYWSNPLETKLPNAPDMEIFSMYGVGLPTERSYIYKLTPFAECYIPFEIDTTQDGGSDEDSCLQGGVYTVDGDETVPVLSSGFMCAKGWRGKTRFNPSGIRTYVREYDHSPPANLLEGRGTQSGAHVDIMGNFALIEDVIRVAAGAKGEDLGGDKVYSDIFKWSEKIKLPL

SEQ ID NO: 16746 - protein, 332 aa, Glycine max
MKMTRTWDSTMSMIPRGGDTIWGGLDWSPEEGYHPSQRKHSNNNTQLKDHETNQTNFVNYGRMISFGRDVAEAHSPEIQMTDFRGAIKGRSIANTTCRDVWTEYHEMGFEGVRAVAEHKVYTAGSVVDLLQFVAPKMMARGSAHFSYGIADNLDDPKYNHYKYWSNPLETKLPNAPDMEIFSMYGVGLPTERSYIYKLTPFAECYIPFEIDTTQDGGSDEDSCLQGGVYTVDGDETVPVLSSGFMCAKGWRGKTRFNPSGIRTYVREYDHSPPANLLEGRGTQSGAHVDIMGNFALIEDVIRVAAGAKGEDLGGDKVYSDIFKWSEKIKLPL

SEQ ID NO: 16747 - protein, 330 aa, Glycine max
MTRTWDSTMSMIPRGGDTIWGGLDWSPEEGYHPSQRKHSNNNTQLKDHETNQTNFVNYGRMISFGRDVAEAHSPEIQMTDFRGAIKGRSIANTTCRDVWTEYHEMGFEGVRAVAEHKVYTAGSVVDLLQFVAPKMMARGSAHFSYGIADNLDDPKYNHYKYWSNPLETKLPNAPDMEIFSMYGVGLPTERSYIYKLTPFAECYIPFEIDTTQDGGSDEDSCLQGGVYTVDGDETVPVLSSGFMCAKGWRGKTRFNPSGIRTYVREYDHSPPANLLEGRGTQSGAHVDIMGNFALIEDVIRVAAGAKGEDLGGDKVYSDIFKWSEKIKLPL

SEQ ID NO: 16748 - DNA, 1592 bp, Glycine max
attacacaattcaagcaccttcttctctcgtgtttcacaaactaaagaacaacaatatgcctccaatcttgccggatttctccaactcggtgaaactcaagtacgtgaaactagggtaccaatacctggtgaaccacattctgactctcactctcatacccatgatgatcgccatcttcatggagattctacgcttaggccctgaagagatcctgaacctctggcactccctccacttggaccttgtccaaatcctctgctccgccttcctcatcatcttcatcgccaccgtctacttcatgtccaaaccccgcaccatctacctcgtcgactacgcctgcttcaagccacccgtcacctgccgcgtccccttcgcaaccttcatggaacactccaggctcatccttaaagacaaccctaagagcgtcgagttccaaatgcgtattctcgaacgttccggtctcggtgaagaaacatgtctccccccagcaatccactacatccctcccaagcccaccatggaggccgcccgaggagaagccgaacttgttatcttctccgccatggattctttgttcaacaaaacaggtctcaagcctaaggacatagatattcttattgtcaattgcagtcttttttctcccactccttctttgtctgctatggtcatcaacaagtactagctcaggagcaacataaagagcttcaacctctccggcatgggttgcagtgatggcttgatatccgttgacttggctcgtgaccttctccaggttcaccctaactcaaacgccgtcgttgtaagcaccgagatcatcacccctaactactaccaaggcaaagagagagccatgcttcttcctaattgcctcttccgaatggggggtgctgctattctcttatccaaccgaacctccgaacgcaggagagccaagtacaggttggtgcacgttgttcgcactcacaaaggcgctgatgacaaagcctaccgttgcgtttttgaagaggaagacagagaagggaaagtggggatttcacttcagaaggatctcatggctattgcaggtgaggctctcaagtctaacattactactatgggtcctcttgttcttccggcttccgagcagttgctgttccttctcactctcattgggaggaaaatcttcaaccccaaatggaagccttatattcctgacttcaaacaagcctttgagcacttctgcatccacgctggtggacgtgctgtgattgatgagcttcagaagaatcttcagctttctactgaacacgttgaggcttctagaatgacccttcacaggtttgggaacacttcgtcttcttcgctgtggtatgagctcaactacattgagtccaaggggaggatgaagaagggtgatagggtgtggcagatagcgtttgggagtggctttaaatgcaacagtgctgtgtggaagtgcaacagaagcattaagacaccggttgatgggccttgggctgattgcattgatcgttacccggtcgatattcctgagatcgttaagctctaggatggagaattgttcaagaacaagaagataattgcttattttatg

SEQ ID NO: 16749 - protein, 275 aa, Glycine max
MGCSDGLISVDLARDLLQVHPNSNAVVVSTEIITPNYYQGKERAMLLPNCLFRMGGAAILLSNRTSERRRAKYRLVHVVRTHKGADDKAYRCVFEEEDREGKVGISLQKDLMAIAGEALKSNITTMGPLVLPASEQLLFLLTLIGRKIFNPKWKPYIPDFKQAFEHFCIHAGGRAVIDELQKNLQLSTEHVEASRMTLHRFGNTSSSSLWYELNYIESKGRMKKGDRVWQIAFGSGFKCNSAVWKCNRSIKTPVDGPWADCIDRYPVDIPEIVKL

SEQ ID NO: 16750 - protein, 231 aa, Glycine max
MLLPNCLFRMGGAAILLSNRTSERRRAKYRLVHVVRTHKGADDKAYRCVFEEEDREGKVGISLQKDLMAIAGEALKSNITTMGPLVLPASEQLLFLLTLIGRKIFNPKWKPYIPDFKQAFEHFCIHAGGRAVIDELQKNLQLSTEHVEASRMTLHRFGNTSSSSLWYELNYIESKGRMKKGDRVWQIAFGSGFKCNSAVWKCNRSIKTPVDGPWADCIDRYPVDIPEIVKL

SEQ ID NO: 16751 - protein, 226 aa, Glycine max
YTIQAPSSLVFHKLKNNNMPPILPDFSNSVKLKYVKLGYQYLVNHILTLTLIPMMIAIFMEILRLGPEEILNLWHSLHLDLVQILCSAFLIIFIATVYFMSKPRTIYLVDYACFKPPVTCRVPFATFMEHSRLILKDNPKSVEFQMRILERSGLGEETCLPPAIHYIPPKPTMEAARGEAELVIFSAMDSLFNKTGLKPKDIDILIVNCSLFSPTPSLSAMVINKY

SEQ ID NO: 16752 - DNA, 1193 bp, Glycine max
aatcccaagaaccacatccaagagaattggaggatccttgacttcttctctcactttccagaaagccttcacatgttcacctttttatttgatgatttgggtgttccacaagattacaggcatatggatggttttggagttaacacatatacgctgatcaacaaggctgggaaagcagtgtatgtgaaatttcactggaagaccactagtggtataaagtgtctattggaggaagaggccattaaggtgggaggagccaaccacagccatgccactcaagacctccatgattcaattgctgctggtaactatcctgagtggaaactgtttgttcagacaatagatcctgagcacgaagacaaatttgactttgaccctcttgatgttactaagacttggcctgaggacattatacccttgcagcctgttggtcgcttggtcctgaataagaacatagataatttctttgctgagaatgaacaacttgcattttgccctgccattgtggttcctggtgtatactactcagatgataagatgcttcaaaccaggatattctcttatgctgattcacaaaggcacagacttggaccaaactatctgcaacttcctgctaatgctcccaagtgtgctcaccacaacaatcatcatgaaggtttcatgaatttcattcacagggatgaggaggttaattacttcccttcaaggtatgatcctgttcgtcatgcagaaacgttccccatacctcctgctatctgcagtggaaggcgtgaaaagtgtggaattgagaaggagaacaactttaagcagcccggagagagataccgatcttgggcacctgacaggcaagatagatttaatcgccgatgggttgatgctttatctgacccacgggtcacccatgaaatccgcagtgtctggatatcttactggtctcaggctgaccgttctctaggccaaaagatagcatctcgtctgagcatgaggccaaatatttaatgttgttgccaaccccagaatgattgttagagttgcagacgtgcaaagagtacgataaggatgtgattttcgatcaatttgaaagaacttatccatttcttgcaattttagttgtgtacccataactccatgcatgcaactcgttgagctatctcaataaatgccgtatgtatgtgttagtatttaaaaaaaag

SEQ ID NO: 16753 - protein, 332 aa, Glycine max
NPKNHIQENWRILDFFSHFPESLHMFTFLFDDLGVPQDYRHMDGFGVNTYTLINKAGKAVYVKFHWKTTSGIKCLLEEEAIKVGGANHSHATQDLHDSIAAGNYPEWKLFVQTIDPEHEDKFDFDPLDVTKTWPEDIIPLQPVGRLVLNKNIDNFFAENEQLAFCPAIVVPGVYYSDDKMLQTRIFSYADSQRHRLGPNYLQLPANAPKCAHHNNHHEGFMNFIHRDEEVNYFPSRYDPVRHAETFPIPPAICSGRREKCGIEKENNFKQPGERYRSWAPDRQDRFNRRWVDALSDPRVTHEIRSVWISYWSQADRSLGQKIASRLSMRPNI

SEQ ID NO: 16754 - protein, 308 aa, Glycine max
MFTFLFDDLGVPQDYRHMDGFGVNTYTLINKAGKAVYVKFHWKTTSGIKCLLEEEAIKVGGANHSHATQDLHDSIAAGNYPEWKLFVQTIDPEHEDKFDFDPLDVTKTWPEDIIPLQPVGRLVLNKNIDNFFAENEQLAFCPAIVVPGVYYSDDKMLQTRIFSYADSQRHRLGPNYLQLPANAPKCAHHNNHHEGFMNFIHRDEEVNYFPSRYDPVRHAETFPIPPAICSGRREKCGIEKENNFKQPGERYRSWAPDRQDRFNRRWVDALSDPRVTHEIRSVWISYWSQADRSLGQKIASRLSMRPNI

SEQ ID NO: 16755 - protein, 291 aa, Glycine max
MDGFGVNTYTLINKAGKAVYVKFHWKTTSGIKCLLEEEAIKVGGANHSHATQDLHDSIAAGNYPEWKLFVQTIDPEHEDKFDFDPLDVTKTWPEDIIPLQPVGRLVLNKNIDNFFAENEQLAFCPAIVVPGVYYSDDKMLQTRIFSYADSQRHRLGPNYLQLPANAPKCAHHNNHHEGFMNFIHRDEEVNYFPSRYDPVRHAETFPIPPAICSGRREKCGIEKENNFKQPGERYRSWAPDRQDRFNRRWVDALSDPRVTHEIRSVWISYWSQADRSLGQKIASRLSMRPNI

SEQ ID NO: 16756 - DNA, 951 bp, Glycine max
ggtaaacatcccttctttcatctttcaactctctctctccccccctctttctctcacacacaaatgtctaaaataacaataacctctccaaaacactgtgctgacaaagaaggactaaaaatcaagaactacaagaagatctacttcactttctcagcatttttcatcacaatcctactactaatacttgttatatggctcatcctccaccctgcaaagcctcaattctccctcaaagaagtcgacatcttccaacttaacctttcaggcccaaacctcaactcctccatccaactcaccctcctctccaaaaacccaaaccagaaagttggcatttactacgacgagattcaactctatgcaacctacaagggccaacaaattactggtgatacccctgtgccacccttttatcaaggccaagaagagagtaatctcataacagcttctttggtgggaaatgctttacccgtggctccgtctcttggctatgaacttggtcgtgatcaaattgttggaagactagtcttgaatctcaaagccaatggaaagcttcgttggaaagtgggaacatgggtctctggacgttacaggttcaatgttaattgtgttgctatcaatgcctttggaccctctattcctgctgggcctctcacttcaaagcaaggggctcagtgttccaccacactttaaagttaaactcagcatgatcttcttactaacaacttcaacatataaatgatataaattataatctactattcatatatatcacggcgagtttttcaagttttcttgttagtagattttgttgcttggctttgtattgaagcgttattttgcagccactataagtgatttgtaaataataaaaatatatgtgaatgataggacaaaaagttacactttgtgagtgattatgaaaagaggatgcgtattagatggttaaat

SEQ ID NO: 16757 - protein, 230 aa, Glycine max
GKHPFFHLSTLSLPPSFSHTQMSKITITSPKHCADKEGLKIKNYKKIYFTFSAFFITILLLILVIWLILHPAKPQFSLKEVDIFQLNLSGPNLNSSIQLTLLSKNPNQKVGIYYDEIQLYATYKGQQITGDTPVPPFYQGQEESNLITASLVGNALPVAPSLGYELGRDQIVGRLVLNLKANGKLRWKVGTWVSGRYRFNVNCVAINAFGPSIPAGPLTSKQGAQCSTTL

SEQ ID NO: 16758 - protein, 209 aa, Glycine max
MSKITITSPKHCADKEGLKIKNYKKIYFTFSAFFITILLLILVIWLILHPAKPQFSLKEVDIFQLNLSGPNLNSSIQLTLLSKNPNQKVGIYYDEIQLYATYKGQQITGDTPVPPFYQGQEESNLITASLVGNALPVAPSLGYELGRDQIVGRLVLNLKANGKLRWKVGTWVSGRYRFNVNCVAINAFGPSIPAGPLTSKQGAQCSTTL

SEQ ID NO: 16759 - DNA, 1760 bp, Glycine max
ggaaaaaccctttcgtttcgtcttctccaaatccggttgaatattcaattcatactctgcttctcaactttcttcccctttccttcacttgcttactcccattcgcaaaccctaacggccaacgcagcaagttgaattttcagaatcgattcgtccaagtttgattcgaagcaaaaagaagcgaaattggagttttagggaaagaagaagggaaaaaaaaatggcgtacggtggtgcaggtcccgtaggtggttcgggttcggcatcgacaataaagcaagtcaaattggagagagaaagcgaactgagaatagaagttggtaacgacgcacctcttcgccttcgactccttaacggcactgctgagatttttggcaccgagcttccacccgaaatctggctcaattttcctcccaggctcaagtttgctgtgtttacttggtatggtgcaaccattgaaatggatggtgctactgaaactgattatactgcagatgagactccaatggttagttatgtaaatgtccatgctgtgctagatggaagaagaagtcgtgctaaagcctcatcaccagatgattctggttcttctcagggccctagggtcattgttgtaggacctactgattctggaaagagtaccttgtcgaggatgcttcttagttgggcagctaaacaaggttggaagcctacctttgttgatctggatattggccaagggtctataacaattcctggatgcattgctgccactccaattgaaatgcccattgatcctgtggaaggcattccacttgaaatgcctcttgtttactattatgggcacgcgactcctagtaacaatgtagaattgtataaagtgcttgttaaggagcttgcagggatgattgagaggcaatttactggaaatgctgaatctagagcttcaggcatggtgataaatactatgggatggatagagggtgtaggctatgatttgctcttgcatgcaattcgtacattcaaggccaatgttgtcttggttttgggtcaggaaaaactgtgcagcatgctcaaagatgtgctcaagagtgagcccaaagtagacgtagttaaacttcagaggtcaggtggagttgtatctaggaatgcaaaagtccgtcagaaggccagaagttataggataagggaatacttctatggcctttcaaatgatctttctccacattctaatattgcaaattttagtgatttgtttgtttatcgagttggtggtgggccacaggccccacgctcagccttgcccattggagcagaacctgctgcagatccaacaagagttgtacctgtaaatataaatcgtgatttgctccatttagtccttgctgtttcatttgccaaggaacctgatgagatcatttccagcaatgttgctgggtttatttatgtaacagacgttgacattcagagaaagaagataacatatcttgctccatctgctggagaacttccaagcaagtatttgataatgggatccttgacatggcttgaaacatgagctaatgaacagttttgtactggaaaatctcgctaaattcgttgctctggtttgtgtcgtgatcaaatgtaaatactaaatgtagtttacaacactgttgtgatggggattgtttgtcgtagtgagagaggctgacctttgtaacggaatatctaatattctgatttaaaatcttattatactcgttgagtagcaagttacttatgattcttgaagttgaaag

SEQ ID NO: 16760 - protein, 438 aa, Glycine max
MAYGGAGPVGGSGSASTIKQVKLERESELRIEVGNDAPLRLRLLNGTAEIFGTELPPEIWLNFPPRLKFAVFTWYGATIEMDGATETDYTADETPMVSYVNVHAVLDGRRSRAKASSPDDSGSSQGPRVIVVGPTDSGKSTLSRMLLSWAAKQGWKPTFVDLDIGQGSITIPGCIAATPIEMPIDPVEGIPLEMPLVYYYGHATPSNNVELYKVLVKELAGMIERQFTGNAESRASGMVINTMGWIEGVGYDLLLHAIRTFKANVVLVLGQEKLCSMLKDVLKSEPKVDVVKLQRSGGVVSRNAKVRQKARSYRIREYFYGLSNDLSPHSNIANFSDLFVYRVGGGPQAPRSALPIGAEPAADPTRVVPVNINRDLLHLVLAVSFAKEPDEIISSNVAGFIYVTDVDIQRKKITYLAPSAGELPSKYLIMGSLTWLET

SEQ ID NO: 16761 - protein, 358 aa, Glycine max
MDGATETDYTADETPMVSYVNVHAVLDGRRSRAKASSPDDSGSSQGPRVIVVGPTDSGKSTLSRMLLSWAAKQGWKPTFVDLDIGQGSITIPGCIAATPIEMPIDPVEGIPLEMPLVYYYGHATPSNNVELYKVLVKELAGMIERQFTGNAESRASGMVINTMGWIEGVGYDLLLHAIRTFKANVVLVLGQEKLCSMLKDVLKSEPKVDVVKLQRSGGVVSRNAKVRQKARSYRIREYFYGLSNDLSPHSNIANFSDLFVYRVGGGPQAPRSALPIGAEPAADPTRVVPVNINRDLLHLVLAVSFAKEPDEIISSNVAGFIYVTDVDIQRKKITYLAPSAGELPSKYLIMGSLTWLET

SEQ ID NO: 16762 - protein, 343 aa, Glycine max
MVSYVNVHAVLDGRRSRAKASSPDDSGSSQGPRVIVVGPTDSGKSTLSRMLLSWAAKQGWKPTFVDLDIGQGSITIPGCIAATPIEMPIDPVEGIPLEMPLVYYYGHATPSNNVELYKVLVKELAGMIERQFTGNAESRASGMVINTMGWIEGVGYDLLLHAIRTFKANVVLVLGQEKLCSMLKDVLKSEPKVDVVKLQRSGGVVSRNAKVRQKARSYRIREYFYGLSNDLSPHSNIANFSDLFVYRVGGGPQAPRSALPIGAEPAADPTRVVPVNINRDLLHLVLAVSFAKEPDEIISSNVAGFIYVTDVDIQRKKITYLAPSAGELPSKYLIMGSLTWLET

SEQ ID NO: 16763 - DNA, 1171 bp, Glycine max
accacacactcaggaccctttctctattctcttctgcatcaccattcaccgctgagagaacatcacaacacaacaaacaaaggagcctctcggtttccaatgtgaagagagcgaacatggctctaatcgctgccaggattctcggttccaattcgaggccggcggtcgcgctccaccgctggcagtggctggcgtactcctccgcctccgcggcggtggcggagccggagaccacggaggtgaaggactacgccgattaccggcgctccctgtacggacagatcacgcacaaggcgctcctcgtcgacgccgttggcacgctcgtcctcccttcgcagcccatggctcagatatatagaaagattggggagaagtatggagtggagtattcggaggatgagatactgttcagatacagaagagcgtatggtcagccttggggaaaatctcgtcttagatatgttaatgatggtaggcctttttggcaatacatagttagttattccactggctgttcagatcctcaatattttgaagaactttataactattatacaacggacaaggcatggcacctcaatgatactggtgcagaagaagtattcagagctcttagaaaatcaggtgtgaaattagctgttgtgtcaaactttgacactagattaagacctctcttgcgggcattaaattgtgacaattggtttgatgcagtagcagtgtcagctgaggttgcagcagagaaaccaaatccaactatatttctcaaagcatgtgaattattggatgtaaaacccgaggatgctgttcatgttggggatgaccgcagaaatgatatatggggtgccagggatgctggctgtgatgcttggctttggggaagcgatgttcactcctttaaggaggtagcacagaggattggggttcaggtctgaaagatgatctctttacaataagtttgatgttatgtatagagtcctttaggctttagctgtaaggctgtacatgttctgctcccttttacaatgtatgtatatatgtatgaaaaagatgtgaacctataaaaaccattaataggtgtaggtaggagcttttgtttttccattgatccgtgttttctacgaagtttattttaaaattataaataaaacaaatgaaaaaaaaagaaattaat

SEQ ID NO: 16764 - protein, 309 aa, Glycine max
HTLRTLSLFSSASPFTAERTSQHNKQRSLSVSNVKRANMALIAARILGSNSRPAVALHRWQWLAYSSASAAVAEPETTEVKDYADYRRSLYGQITHKALLVDAVGTLVLPSQPMAQIYRKIGEKYGVEYSEDEILFRYRRAYGQPWGKSRLRYVNDGRPFWQYIVSYSTGCSDPQYFEELYNYYTTDKAWHLNDTGAEEVFRALRKSGVKLAVVSNFDTRLRPLLRALNCDNWFDAVAVSAEVAAEKPNPTIFLKACELLDVKPEDAVHVGDDRRNDIWGARDAGCDAWLWGSDVHSFKEVAQRIGVQV

SEQ ID NO: 16765 - protein, 271 aa, Glycine max
MALIAARILGSNSRPAVALHRWQWLAYSSASAAVAEPETTEVKDYADYRRSLYGQITHKALLVDAVGTLVLPSQPMAQIYRKIGEKYGVEYSEDEILFRYRRAYGQPWGKSRLRYVNDGRPFWQYIVSYSTGCSDPQYFEELYNYYTTDKAWHLNDTGAEEVFRALRKSGVKLAVVSNFDTRLRPLLRALNCDNWFDAVAVSAEVAAEKPNPTIFLKACELLDVKPEDAVHVGDDRRNDIWGARDAGCDAWLWGSDVHSFKEVAQRIGVQV

SEQ ID NO: 16766 - protein, 196 aa, Glycine max
MAQIYRKIGEKYGVEYSEDEILFRYRRAYGQPWGKSRLRYVNDGRPFWQYIVSYSTGCSDPQYFEELYNYYTTDKAWHLNDTGAEEVFRALRKSGVKLAVVSNFDTRLRPLLRALNCDNWFDAVAVSAEVAAEKPNPTIFLKACELLDVKPEDAVHVGDDRRNDIWGARDAGCDAWLWGSDVHSFKEVAQRIGVQV

SEQ ID NO: 16767 - DNA, 1248 bp, Glycine max
ttgcacttccaagaaggagaagaattgcagtaacttggattctccaaacgataacagttgcactctcaaggagaagaattgcggtaacatggattctccaaacaacaacagtttcactcccgagaaggagaagaattgctgtaacatggattctccaatcgacaacagttgctcttccaagaagaagaattgcagtaacatggattctccaaccgatgttgtggttgagaagtctactgtggaggatttaccacctggatgggtgaaagaattaaagattaggaagaacagcaagggcattcggaaagatccgttttatatagatccagcgagtggatatgtattccgttccaagaaggatgtacttcggtatcttgaatctggtgatatacgttcatgtgcatttaagccaagtagaagacaagtccaagatgaagacaatttaactccaccacctgctgccaagagacagaaactgaagcagtctgcacccgaacaacagctttcttcagccacagaaattcttgataaaagcaacttagaattgctagatgctaacagctcaaggaaagggaaaaatgcaaatgtgtcatctggaatgatggttgcttctgttcccatgggtgaatctgttgaaaagatgcattcactggaggatggagctgcaaactcttctgaattgaagaaaacatctgacccaagtagctcagcacttttgaatgaatccttgaaagaatcagaacaagtactttctgcagatgatgtgcaagagaaggagcatgttgtgaatatgatggagaatgctattgaaaagaatcacagtaactatagcatatccaaaaacaggaaggagttcaatgtacctcaccggtcatcaccaagacttgctggaagtaaacctgtccagttggccaacaatgtgatgaatgaacagactctccaggttcctaaaagaaacttgaggaaaagtagaaacactctagatattgatatttctgaagaccaaacagtttctaaggaacaaccgcatcagcaagaagcagataaaatagaagacaaaaagccagaaattcaaattagctcaaacaaatcaagtaaaaagaaagagtaccaccttcctcgtcgggcttcaaaacgattagctgcaattgaacatgagtcaatgaactccaaagcaaaattgcagcaaagtgagtgtgggccagttacagtgcttgcagatcaagcaccaacaaatggaaagtcagc

SEQ ID NO: 16768 - protein, 415 aa, Glycine max
CTSKKEKNCSNLDSPNDNSCTLKEKNCGNMDSPNNNSFTPEKEKNCCNMDSPIDNSCSSKKKNCSNMDSPTDVVVEKSTVEDLPPGWVKELKIRKNSKGIRKDPFYIDPASGYVFRSKKDVLRYLESGDIRSCAFKPSRRQVQDEDNLTPPPAAKRQKLKQSAPEQQLSSATEILDKSNLELLDANSSRKGKNANVSSGMMVASVPMGESVEKMHSLEDGAANSSELKKTSDPSSSALLNESLKESEQVLSADDVQEKEHVVNMMENAIEKNHSNYSISKNRKEFNVPHRSSPRLAGSKPVQLANNVMNEQTLQVPKRNLRKSRNTLDIDISEDQTVSKEQPHQQEADKIEDKKPEIQISSNKSSKKKEYHLPRRASKRLAAIEHESMNSKAKLQQSECGPVTVLADQAPTNGKS

SEQ ID NO: 16769 - protein, 386 aa, Glycine max
MDSPNNNSFTPEKEKNCCNMDSPIDNSCSSKKKNCSNMDSPTDVVVEKSTVEDLPPGWVKELKIRKNSKGIRKDPFYIDPASGYVFRSKKDVLRYLESGDIRSCAFKPSRRQVQDEDNLTPPPAAKRQKLKQSAPEQQLSSATEILDKSNLELLDANSSRKGKNANVSSGMMVASVPMGESVEKMHSLEDGAANSSELKKTSDPSSSALLNESLKESEQVLSADDVQEKEHVVNMMENAIEKNHSNYSISKNRKEFNVPHRSSPRLAGSKPVQLANNVMNEQTLQVPKRNLRKSRNTLDIDISEDQTVSKEQPHQQEADKIEDKKPEIQISSNKSSKKKEYHLPRRASKRLAAIEHESMNSKAKLQQSECGPVTVLADQAPTNGKS

SEQ ID NO: 16770 - protein, 367 aa, Glycine max
MDSPIDNSCSSKKKNCSNMDSPTDVVVEKSTVEDLPPGWVKELKIRKNSKGIRKDPFYIDPASGYVFRSKKDVLRYLESGDIRSCAFKPSRRQVQDEDNLTPPPAAKRQKLKQSAPEQQLSSATEILDKSNLELLDANSSRKGKNANVSSGMMVASVPMGESVEKMHSLEDGAANSSELKKTSDPSSSALLNESLKESEQVLSADDVQEKEHVVNMMENAIEKNHSNYSISKNRKEFNVPHRSSPRLAGSKPVQLANNVMNEQTLQVPKRNLRKSRNTLDIDISEDQTVSKEQPHQQEADKIEDKKPEIQISSNKSSKKKEYHLPRRASKRLAAIEHESMNSKAKLQQSECGPVTVLADQAPTNGKS

SEQ ID NO: 16771 - DNA, 1210 bp, Glycine max
aaaaaataagaagatatacataaaaataaaacacaccctctacgtgtccacactctctgatcacaacacacccgcttaattaaatctctatatataaaccccttcaggcactccactatgacgggcaaagaaatttttcataagatgaaggaaaaagttttgggatcatctgatcccgattcaggtaaaggaaagagcaagatgaagaagcacataactcatggctttcacttggtaaagggaagatcaggtcatgccatggaagactatcttgttgctcaatttaagcaagttgacaacaaagagttgggtttatttgcaatatttgatggccactctggtcacagtgtacctgattacttgaagtctcatttgtttgataatatcttgaaagagcctaacttctggacagaacctgctgaggctgttaagagagcatatagtataactgattctactattttagacaaatcaggtgaattgggtagagggggttcaactgcggttacagcaatattgatcaactgttacaagctactagtggccaatattggggattcccgggctgtcttatgtaagaatggcgtagccaaacaactatcggtggatcatgaaccaagcatagaaagtgaagatataaaaaacagaggtggttttgtgtcaaacttcccaggggatgtgccacgtgtcgatggtcagttggcagtgtcaagggcatttggtgacaaaagcctgaagatacatttgagctcagaaccatatgtaactgtggagatgatagaagatgatgcagagtttcttatactagccagtgatgggttatggaaggtaatgtcaaatcaagaagcagttagtgctatcagagatgttaaggatgctagatctgcagcaaaggtgcttactgaagaagcaaagaacaggaaaagctcagatgatatctcttgcgttgttgtgaaatttcagtgatcagtaaactcacatagtatatttttatctacgaacttgaaagtgtaacatatactttagtgtaatgttgataccttttaggtgttattatgtcatgccattcagtgtgtgatatttaatcttctttaatttcatacaaatgaaactgctgagaacgtgttgtttgatgtaccaatgttcaaaaggatttagttttggattgtgtagaccaaaataattcgtatgaatgcaaggaagtttggtc

SEQ ID NO: 16772 - protein, 282 aa, Glycine max
MTGKEIFHKMKEKVLGSSDPDSGKGKSKMKKHITHGFHLVKGRSGHAMEDYLVAQFKQVDNKELGLFAIFDGHSGHSVPDYLKSHLFDNILKEPNFWTEPAEAVKRAYSITDSTILDKSGELGRGGSTAVTAILINCYKLLVANIGDSRAVLCKNGVAKQLSVDHEPSIESEDIKNRGGFVSNFPGDVPRVDGQLAVSRAFGDKSLKIHLSSEPYVTVEMIEDDAEFLILASDGLWKVMSNQEAVSAIRDVKDARSAAKVLTEEAKNRKSSDDISCVVVKFQ

SEQ ID NO: 16773 - protein, 273 aa, Glycine max
MKEKVLGSSDPDSGKGKSKMKKHITHGFHLVKGRSGHAMEDYLVAQFKQVDNKELGLFAIFDGHSGHSVPDYLKSHLFDNILKEPNFWTEPAEAVKRAYSITDSTILDKSGELGRGGSTAVTAILINCYKLLVANIGDSRAVLCKNGVAKQLSVDHEPSIESEDIKNRGGFVSNFPGDVPRVDGQLAVSRAFGDKSLKIHLSSEPYVTVEMIEDDAEFLILASDGLWKVMSNQEAVSAIRDVKDARSAAKVLTEEAKNRKSSDDISCVVVKFQ

SEQ ID NO: 16774 - protein, 254 aa, Glycine max
MKKHITHGFHLVKGRSGHAMEDYLVAQFKQVDNKELGLFAIFDGHSGHSVPDYLKSHLFDNILKEPNFWTEPAEAVKRAYSITDSTILDKSGELGRGGSTAVTAILINCYKLLVANIGDSRAVLCKNGVAKQLSVDHEPSIESEDIKNRGGFVSNFPGDVPRVDGQLAVSRAFGDKSLKIHLSSEPYVTVEMIEDDAEFLILASDGLWKVMSNQEAVSAIRDVKDARSAAKVLTEEAKNRKSSDDISCVVVKFQ

SEQ ID NO: 16775 - DNA, 1251 bp, Glycine max
tgtgcaagtaatgtttttcatttctgcaagcaaaaactttggagaaaacacagcttatattacagcaactaaaacatcagatacgtaaaggaattcctataataggagctggtgcttggactggtatatctgctaagtttgaagaagctggaggagttgatctaatagtattgtacaattcagggcgcttccgaatggctggaagaggttcattagctggattattacctttttccgatgctaatgctgtcgttcttgacatggccaatgaagttttgccagtggtggtaagtggagaaactaaacaatgaaatgtcaccaaatttgattggtagtctttaaggaagaaacctttttcaaaacaatgtacatcagtaggggggtgttgaagaggtgaagggaacagtaggatgttcagggtaaaggtccaatggctaaagcagaaagcaatttgggtctgggtcatcatcacaacttactggtagtaaagaaggttccagttcttgctggtgtatgtgcaactggtctcttccgtagaatggattatttccttaaacaggtggagtctactggattctctgggttacaaaattttcctacagttggattatttgatggaaattttagactaaatcttgaagaaacgggaatgggatatagcttggaagttgagatgatccagaaagcccataaaatgggtctctttacaaccccatatgctttcaatcaatatgaagctattgaaatggctaaagttggcgccgatattatagtggcccatatgggtctaactacaacaggctccataggtgcaaaaacatctgtttcacttaaagaaagtgtagttcatgtacaagctattgcagatgcagcacataggatcaatcctggtgtcatcgtgttgtgccatggaggtccaatatctggtccaaaagaggcagcatttgtattgaagagaaccaaaggagttcatgggttttatggggcttcaagtatggaaagacttccagtggagcaggctattacaaatacagtcaaacagtacaagtcaatttctattcattaaggtttaacatgtttgtacttttcatgccagtgtgctgtacgctacattgctaatatgactgtttttatttgtgattagtacctaccaaatttgtgaacattatagaatttactgatatacaattttggaaataatggattaaaagtaatgttcaagacattatgttttgatcctctaaaaaaaac

SEQ ID NO: 16776 - protein, 211 aa, Glycine max
MAKAESNLGLGHHHNLLVVKKVPVLAGVCATGLFRRMDYFLKQVESTGFSGLQNFPTVGLFDGNFRLNLEETGMGYSLEVEMIQKAHKMGLFTTPYAFNQYEAIEMAKVGADIIVAHMGLTTTGSIGAKTSVSLKESVVHVQAIADAAHRINPGVIVLCHGGPISGPKEAAFVLKRTKGVHGFYGASSMERLPVEQAITNTVKQYKSISIH

SEQ ID NO: 16777 - protein, 175 aa, Glycine max
MDYFLKQVESTGFSGLQNFPTVGLFDGNFRLNLEETGMGYSLEVEMIQKAHKMGLFTTPYAFNQYEAIEMAKVGADIIVAHMGLTTTGSIGAKTSVSLKESVVHVQAIADAAHRINPGVIVLCHGGPISGPKEAAFVLKRTKGVHGFYGASSMERLPVEQAITNTVKQYKSISIH

SEQ ID NO: 16778 - protein, 138 aa, Glycine max
MGYSLEVEMIQKAHKMGLFTTPYAFNQYEAIEMAKVGADIIVAHMGLTTTGSIGAKTSVSLKESVVHVQAIADAAHRINPGVIVLCHGGPISGPKEAAFVLKRTKGVHGFYGASSMERLPVEQAITNTVKQYKSISIH

SEQ ID NO: 16779 - DNA, 1157 bp, Glycine max
aatttctcatggaagatggctacagttttgaaggtttttgggaaaaaccacattttggtcaggctacttggatcttctttggaatttcaagtgagcaaatttgacattcgggtgagacagtcttggcaagatgacaagtggattatagttggaaagggttcttccagccatgaaaacagaaaacgttctagcgcccaacttcagaagatgtatacaaagacaaaactgtcaggttccgcttactatcgtcctgaaaagaaaaaactgagtattctggaatccaaactcgtttcttttaaaacattgaaacgaggaagcaattcacaagttgacgcatatgctaagcctcccccaaagtttagagcacgtgaaaatgaaggcagatgtcacagagcaagacttagaaatccacccacaccactcaaacaggtacagggtgtcagttttccaagagaagtgatcgctgaagaatgcatacctgcttctgtaaacaacagaaaaactgggatttctaatatggttgacatggagaggaggaaacagacaggagaaaacttagaatcaaatcatgcttatagtgttacatgctctgttggtagttgtagtatcactagcaggaattcctataaatcgcaatttcctgtatatgcaggtccttttgatgatgtagacagttcatttagtgatgctgagtctgtctgccagaggagtgatgaggaagggaattgttcccctcctacacaagaggaattggcggcagaaattcataggttagagttgcatgcctatcattgtacaattgaggcattgcatgcatcaggacccttaagttgggaacaggaagcattaatgacaaacctccgtctttcgctccacatatcaaacgatgaacacttaatggagctaagaaatttgatttcttctgaaaacagcattcctttcagatgacaggaatttttttcctcttcaatttaatactttttccctaggatagagtttcggaatagtttgatctcagcctcattcaactgtaagaagaaagatgaaatatttcggtccttcatttatgttttatgacttagtgatatagtttgatgtgaatgtacatgctaaacttcgtaaataagtgatcatttctgaactcttgttaatcaaag

SEQ ID NO: 16780 - protein, 315 aa, Glycine max
NFSWKMATVLKVFGKNHILVRLLGSSLEFQVSKFDIRVRQSWQDDKWIIVGKGSSSHENRKRSSAQLQKMYTKTKLSGSAYYRPEKKKLSILESKLVSFKTLKRGSNSQVDAYAKPPPKFRARENEGRCHRARLRNPPTPLKQVQGVSFPREVIAEECIPASVNNRKTGISNMVDMERRKQTGENLESNHAYSVTCSVGSCSITSRNSYKSQFPVYAGPFDDVDSSFSDAESVCQRSDEEGNCSPPTQEELAAEIHRLELHAYHCTIEALHASGPLSWEQEALMTNLRLSLHISNDEHLMELRNLISSENSIPFR

SEQ ID NO: 16781 - protein, 310 aa, Glycine max
MATVLKVFGKNHILVRLLGSSLEFQVSKFDIRVRQSWQDDKWIIVGKGSSSHENRKRSSAQLQKMYTKTKLSGSAYYRPEKKKLSILESKLVSFKTLKRGSNSQVDAYAKPPPKFRARENEGRCHRARLRNPPTPLKQVQGVSFPREVIAEECIPASVNNRKTGISNMVDMERRKQTGENLESNHAYSVTCSVGSCSITSRNSYKSQFPVYAGPFDDVDSSFSDAESVCQRSDEEGNCSPPTQEELAAEIHRLELHAYHCTIEALHASGPLSWEQEALMTNLRLSLHISNDEHLMELRNLISSENSIPFR

SEQ ID NO: 16782 - protein, 246 aa, Glycine max
MYTKTKLSGSAYYRPEKKKLSILESKLVSFKTLKRGSNSQVDAYAKPPPKFRARENEGRCHRARLRNPPTPLKQVQGVSFPREVIAEECIPASVNNRKTGISNMVDMERRKQTGENLESNHAYSVTCSVGSCSITSRNSYKSQFPVYAGPFDDVDSSFSDAESVCQRSDEEGNCSPPTQEELAAEIHRLELHAYHCTIEALHASGPLSWEQEALMTNLRLSLHISNDEHLMELRNLISSENSIPFR

SEQ ID NO: 16783 - DNA, 1206 bp, Glycine max
ggaagaacattgcacctgcaacttcaacttcacttctccgttctaacactcgccatgttccttatcaagacatggagacagacggctttcggtgtttttgggtacctgaatttcaccaaagctggcttccttgatcattctaagaaattcaacccagaggacatggaattacgaataccagggaagaattgcattgttactggagctaactctggaattggctatgcaacggctgagggtcttgcaaagcggtttacatctttctcctatgtttgtcttggaattttgtgtttttaagtttgaagttacatattatgattaataattttcactagtggcgcaactgtctatcttgtatgtcgtaataaggagagaggagaggctgctctttctgacattcaaactaaaactggcaatcagaatgtatatttggagatttgtgacctttcttctgtcaatgagatcaagtcattcgcttccaggttttctaaaaagaatgtgccagttcacgtgttggttaacaatgctggagtacttgagcaaaatcgagttaccacatcagaagggtttgagttgagctttgctgtaaatgtcttaggcacttacaccatgacagaattgatggtaccattactgggaaaagcttcccctgatgcacgtgtcattacagtttcttctggtggaatgtatactactcctttgaccaaagatctacagtattcagagagcaactttaatgggcttgaacagtatgctcgaaacaagcgtgttcaggttgcactaacagaaaagtgggccgaaacttacaagaacaaagggataggattttactcaatgcaccctggttgggctgagactcctggggttgcaaagagtatgccaagcttctctaaatcgctttcagggaagcttagaacaagtgaagaaggtgcagacacagttatctggttgacattacaaccaaaggagaaactggtatcaggtgcattttattttgatagagctgaagcctcgaagcaccttgcatttgctggtaccagtgattctcatgctatgatcgactatgttgttgatagtcttgattccatggcttctccttttgtctaatagtgtacttttaccctgacattaaaccctgaagttgtaaattttaattaatcgtagcacctagttgtgcatcatcaataccaatataacatttctacg

SEQ ID NO: 16784 - protein, 165 aa, Glycine max
MTELMVPLLGKASPDARVITVSSGGMYTTPLTKDLQYSESNFNGLEQYARNKRVQVALTEKWAETYKNKGIGFYSMHPGWAETPGVAKSMPSFSKSLSGKLRTSEEGADTVIWLTLQPKEKLVSGAFYFDRAEASKHLAFAGTSDSHAMIDYVVDSLDSMASPFV

SEQ ID NO: 16785 - protein, 161 aa, Glycine max
MVPLLGKASPDARVITVSSGGMYTTPLTKDLQYSESNFNGLEQYARNKRVQVALTEKWAETYKNKGIGFYSMHPGWAETPGVAKSMPSFSKSLSGKLRTSEEGADTVIWLTLQPKEKLVSGAFYFDRAEASKHLAFAGTSDSHAMIDYVVDSLDSMASPFV

SEQ ID NO: 16786 - protein, 140 aa, Glycine max
MYTTPLTKDLQYSESNFNGLEQYARNKRVQVALTEKWAETYKNKGIGFYSMHPGWAETPGVAKSMPSFSKSLSGKLRTSEEGADTVIWLTLQPKEKLVSGAFYFDRAEASKHLAFAGTSDSHAMIDYVVDSLDSMASPFV

SEQ ID NO: 16787 - DNA, 1325 bp, Glycine max
agggcaaaaacagaacagaaacagagatgggttgcaatagctccaaggctgagccaccaccgttggaaaacaccatgcatcatcatcatcatgcagacgttgcagagttccaaaaacccaaaaccctaaaagaagaagtagtgctacagattccaggatgcaaagttcatctgatggaccaaggcgaggccctcgaactcgcacaaggtcacttcacgatcatgaagatcatggagcagaacgtggcactagcaaccattataaaagttggaaacagtgttcaatggcctctaacgaaagacgagccggtggtgaaggtggatgctcttcactacctgttctctctgcctgtgaaagatggtggggagcctcttagctatggtgtcacctttccagaacagtgctatgggaacatggagatgttggattcttttctcaaggatcactcttgcttttctggtttggaaaggaataagaagagtgatcttaaatgggaggagtttgctccaagggttgaagattacaatcattttctggcaagggcaattgcaggagggactggccagattgttaagggtatcttcttgtgcagcaatgcttacaccaaccaggtccaaaaaggaggggaaacgatcctaaatactgctgcagaaaagaacaatggtggcatggtcacagaaagtatgaaccacaggagtgatgccacaaagaataatgcaacgaacgataacctcaaacgtgtgagaaagctgacaaatatgacagaaaggttaaccaaatctttgcttgatggtgttggaataatgagtggatcagtgatgactcctgtgctgaaatcccaaccaggacaggcattcctaaatatgctccctggagaggtgctgttggcttcccttgatgccgtcaatagagtttttgaagcagctgaagctgctgaaaaacaaaccttttctgccacctctcaagctgcaaccagaatggtttctaacaggtttggggaagaagcaggagaggctactgagcatgtgtttgcaactgcaggacatgctgttaacactgcttggaatgtctctaagatacggaaggccatcaatccagcctcttcagcaaatgctgcaggagcactgagaaattctgccaaaaatagaaatgttatatattaaattcctatcatgtactgctttatgtttgacaatggtgaaggcataaaattttgcctatacatattgcaatatcattttggttgttatatgtaagtattaatgtgtgtattggtcatcccaaagcagaccttagaagaaacaaactataaaaagtgtccacat

SEQ ID NO: 16788 - protein, 386 aa, Glycine max
GKNRTETEMGCNSSKAEPPPLENTMHHHHHADVAEFQKPKTLKEEVVLQIPGCKVHLMDQGEALELAQGHFTIMKIMEQNVALATIIKVGNSVQWPLTKDEPVVKVDALHYLFSLPVKDGGEPLSYGVTFPEQCYGNMEMLDSFLKDHSCFSGLERNKKSDLKWEEFAPRVEDYNHFLARAIAGGTGQIVKGIFLCSNAYTNQVQKGGETILNTAAEKNNGGMVTESMNHRSDATKNNATNDNLKRVRKLTNMTERLTKSLLDGVGIMSGSVMTPVLKSQPGQAFLNMLPGEVLLASLDAVNRVFEAAEAAEKQTFSATSQAATRMVSNRFGEEAGEATEHVFATAGHAVNTAWNVSKIRKAINPASSANAAGALRNSAKNRNVIY

SEQ ID NO: 16789 - protein, 378 aa, Glycine max
MGCNSSKAEPPPLENTMHHHHHADVAEFQKPKTLKEEVVLQIPGCKVHLMDQGEALELAQGHFTIMKIMEQNVALATIIKVGNSVQWPLTKDEPVVKVDALHYLFSLPVKDGGEPLSYGVTFPEQCYGNMEMLDSFLKDHSCFSGLERNKKSDLKWEEFAPRVEDYNHFLARAIAGGTGQIVKGIFLCSNAYTNQVQKGGETILNTAAEKNNGGMVTESMNHRSDATKNNATNDNLKRVRKLTNMTERLTKSLLDGVGIMSGSVMTPVLKSQPGQAFLNMLPGEVLLASLDAVNRVFEAAEAAEKQTFSATSQAATRMVSNRFGEEAGEATEHVFATAGHAVNTAWNVSKIRKAINPASSANAAGALRNSAKNRNVIY

SEQ ID NO: 16790 - protein, 362 aa, Glycine max
MHHHHHADVAEFQKPKTLKEEVVLQIPGCKVHLMDQGEALELAQGHFTIMKIMEQNVALATIIKVGNSVQWPLTKDEPVVKVDALHYLFSLPVKDGGEPLSYGVTFPEQCYGNMEMLDSFLKDHSCFSGLERNKKSDLKWEEFAPRVEDYNHFLARAIAGGTGQIVKGIFLCSNAYTNQVQKGGETILNTAAEKNNGGMVTESMNHRSDATKNNATNDNLKRVRKLTNMTERLTKSLLDGVGIMSGSVMTPVLKSQPGQAFLNMLPGEVLLASLDAVNRVFEAAEAAEKQTFSATSQAATRMVSNRFGEEAGEATEHVFATAGHAVNTAWNVSKIRKAINPASSANAAGALRNSAKNRNVIY

SEQ ID NO: 16791 - DNA, 1296 bp, Glycine max
ggtgccattcccttcacaccattctcacaaaacaactttcaaactctgagaaagaatggctgccaacacattgatgagtactgctatctcagccttcccatctctcctttcttcctcaaaatccagatttgccaccgcagttcctctttctagctttggtgtcaccaatgcctcttcttctcgcttttctatgagtgctgactggatgccaggccagcctagacctccttaccttgatggttcagcacctggtgactttggattcgaccctcttcgtcttggtgaagtaccagagaatcttgagaggttcaaagagtcagaactcattcactgcagatgggccatgcttgctgttccagggattttggttccagaggcattgggcttaggcaactgggtaaaggctcaggaatgggcagcagttcctgggggccaagcaacctacctaggcaatccagttccatggggcaccctacccaccattctggccattgaattccttgctatttcctttgtggagcaccaaaggagcatggagaaggacccagagaagaagaaataccctggtggtgcttttgatcctttgggatactctaaggaccctaaaacattccatgaatacaaagtcaaagaacttaagaatggacgtcttgttttgttggcttttgtgggattctgtgttcaacaatcagcttatcccggcactggacctttggagaacttggctgctcacttggctgacccatggcacaacaacattggaaacatcattattccacaatcgattttgccttgaaaaaaaaaaatcaaatatttgtttcaatagctacctgtataattccatgtaacattttgtaacgaatcgggttgctacgttggtatctctgtgttgtaattaaacttcgaattcaaactcatactctggcaactcgttggtatgacagaaaagcttgaaacaaacttccaagtccaagtttaaaacttgcattacatgattacatccatatctaatgatgaataaaacatgttttggaccaactgcagcctgcaaagtgccaatttccttgaatgcttcctaaagtattaggcatccggtgtattccagcaaatattatgtcagctaacgacttttcaacaacatttggttttgttaaaactgattttcctgcaaaataataagtcagctaaacttatatacatgtctcaaattcagcattcagaactaagggagtctaacttgagtagggtgcatgagtttttaaaccccttggtacctgtgtttgattcctacaagtc

SEQ ID NO: 16792 - protein, 246 aa, Glycine max
MAANTLMSTAISAFPSLLSSSKSRFATAVPLSSFGVTNASSSRFSMSADWMPGQPRPPYLDGSAPGDFGFDPLRLGEVPENLERFKESELIHCRWAMLAVPGILVPEALGLGNWVKAQEWAAVPGGQATYLGNPVPWGTLPTILAIEFLAISFVEHQRSMEKDPEKKKYPGGAFDPLGYSKDPKTFHEYKVKELKNGRLVLLAFVGFCVQQSAYPGTGPLENLAAHLADPWHNNIGNIIIPQSILP

SEQ ID NO: 16793 - protein, 240 aa, Glycine max
MSTAISAFPSLLSSSKSRFATAVPLSSFGVTNASSSRFSMSADWMPGQPRPPYLDGSAPGDFGFDPLRLGEVPENLERFKESELIHCRWAMLAVPGILVPEALGLGNWVKAQEWAAVPGGQATYLGNPVPWGTLPTILAIEFLAISFVEHQRSMEKDPEKKKYPGGAFDPLGYSKDPKTFHEYKVKELKNGRLVLLAFVGFCVQQSAYPGTGPLENLAAHLADPWHNNIGNIIIPQSILP

SEQ ID NO: 16794 - protein, 201 aa, Glycine max
MSADWMPGQPRPPYLDGSAPGDFGFDPLRLGEVPENLERFKESELIHCRWAMLAVPGILVPEALGLGNWVKAQEWAAVPGGQATYLGNPVPWGTLPTILAIEFLAISFVEHQRSMEKDPEKKKYPGGAFDPLGYSKDPKTFHEYKVKELKNGRLVLLAFVGFCVQQSAYPGTGPLENLAAHLADPWHNNIGNIIIPQSILP

SEQ ID NO: 16795 - DNA, 1390 bp, Glycine max
tggtcgatactaactggacaggaataatgcatcgcaattcacttaaaagatcaaatgatagtacccggattatcatcacagctattatgggaattgcctttggattttttattggtatttcaatttcatctgtgcatttgactaagcctgtagggaattcttttgatgtacctgtagctgaatctgaaatagacagattttcagctgaagtaaacagatctcctgctgttattgacgagtcttctggaaccaaaaatcttgaaaccctagggtcaattagattaccaaagatatttgttgcatcaaatcctcgtggagctgaatcactaccccctggaatcgttgtatcagaatcagatttttatttacgaagactatggggtgaacctagtgaggatctgaagaaaaagccgaagtatttagttacattcactgttggttatgaacaaaggcataatatcaatgctacagtgaaaaagttttctgatgattttgcaattttgctctttcattatgatggtcggactagtgaatgggatcaatttgagtggtcaaggaatgcaatccatgttagtgcaaggaaacaaactaaatggtggtatgctaaaagatttttgcaccctgatatagtatcagcttatgaatatatttttatttgggatgaagatcttggagtagaacacttcaatgcagacaagtatattcatttagtgaaaaaatatggtttggagatctctcaacctggtcttgagcctaataatggattgacatgggagatgacaaaaagaaggggtgacaaagaagttcacatggtgacagaagagaaaccaggctggtgtagtgatccacatttgcctccttgtgctgcatttgtggaaattatggcacctgtcttttctcgtgaagcttggcgttgtgtgtggcacatgattcagaatgatctagtgcatggatggggattggactttgctctcagaagatgtgtagagccagcacatgaaaaaattggtgtaattgattcacaatggattgttcatcaagtaattccttctcttgggaaccagggagagtctgacaaaggaaaaatgccatgggattcggtccgagccagatgcaaaagtgaatgggcccagtttcaacttcgcgtaaccaatgctgataagtcttatcttgaaggacataaacgtaatgggaaggattgatatgtggatccatctacctattgtatatgttttacgtacacactcggtggtagtatttgttttgcattgtttcctcccctcaggtgccatgcgaatttttgagccatatttttgaggaattaatctatagccatgtaaatcaatcacttttatgttattgaataacttttttatcagccgttagattg

SEQ ID NO: 16796 - protein, 399 aa, Glycine max
VDTNWTGIMHRNSLKRSNDSTRIIITAIMGIAFGFFIGISISSVHLTKPVGNSFDVPVAESEIDRFSAEVNRSPAVIDESSGTKNLETLGSIRLPKIFVASNPRGAESLPPGIVVSESDFYLRRLWGEPSEDLKKKPKYLVTFTVGYEQRHNINATVKKFSDDFAILLFHYDGRTSEWDQFEWSRNAIHVSARKQTKWWYAKRFLHPDIVSAYEYIFIWDEDLGVEHFNADKYIHLVKKYGLEISQPGLEPNNGLTWEMTKRRGDKEVHMVTEEKPGWCSDPHLPPCAAFVEIMAPVFSREAWRCVWHMIQNDLVHGWGLDFALRRCVEPAHEKIGVIDSQWIVHQVIPSLGNQGESDKGKMPWDSVRARCKSEWAQFQLRVTNADKSYLEGHKRNGKD

SEQ ID NO: 16797 - protein, 391 aa, Glycine max
MHRNSLKRSNDSTRIIITAIMGIAFGFFIGISISSVHLTKPVGNSFDVPVAESEIDRFSAEVNRSPAVIDESSGTKNLETLGSIRLPKIFVASNPRGAESLPPGIVVSESDFYLRRLWGEPSEDLKKKPKYLVTFTVGYEQRHNINATVKKFSDDFAILLFHYDGRTSEWDQFEWSRNAIHVSARKQTKWWYAKRFLHPDIVSAYEYIFIWDEDLGVEHFNADKYIHLVKKYGLEISQPGLEPNNGLTWEMTKRRGDKEVHMVTEEKPGWCSDPHLPPCAAFVEIMAPVFSREAWRCVWHMIQNDLVHGWGLDFALRRCVEPAHEKIGVIDSQWIVHQVIPSLGNQGESDKGKMPWDSVRARCKSEWAQFQLRVTNADKSYLEGHKRNGKD

SEQ ID NO: 16798 - protein, 371 aa, Glycine max
MGIAFGFFIGISISSVHLTKPVGNSFDVPVAESEIDRFSAEVNRSPAVIDESSGTKNLETLGSIRLPKIFVASNPRGAESLPPGIVVSESDFYLRRLWGEPSEDLKKKPKYLVTFTVGYEQRHNINATVKKFSDDFAILLFHYDGRTSEWDQFEWSRNAIHVSARKQTKWWYAKRFLHPDIVSAYEYIFIWDEDLGVEHFNADKYIHLVKKYGLEISQPGLEPNNGLTWEMTKRRGDKEVHMVTEEKPGWCSDPHLPPCAAFVEIMAPVFSREAWRCVWHMIQNDLVHGWGLDFALRRCVEPAHEKIGVIDSQWIVHQVIPSLGNQGESDKGKMPWDSVRARCKSEWAQFQLRVTNADKSYLEGHKRNGKD

SEQ ID NO: 16799 - DNA, 1371 bp, Glycine max
gaacaggagaagagaaaatgttgaggaaggaggagtggaggggaacggatctgctgggtgggactagataaagtgaagcaagctgacaagactaagggaagattggatggtggaaatggaatcggcagctgaaaaccctaattacccggcggtggactacaagcgaccttccatcttgtcatttcctcggaggcccgccctcagagttacatccgagttcgatagtgaaagcgcagtcttcttccataagatttcctgcaagttgttggacagccttgccaagttcaagttttcgttcaaccacagcggtaagggcggcgacatctccgaacctcaattcagctttgtctccaagcaccttagcctccactacgacctcgaagaccataatgctctcgttaagacctccatcgatcttgctcccagtttgcaactcactgcttctcatgatctcaaggctcaacaaggagaggttaccgtgcttgcaaacctcgccgatcctgcctattcacttcaactatctactccacttccatccgttggattgccaaaagctaccttcagatttcctctgggtgaactttcgctgcaggagaaacaagaggaggaagtcaataatttgttgtcagtcgatggggttcttaaaggacaattgtttaatgggctctgctctgcccattacaaggacgaagaactgaaattaagatatggctataaggacgatgaaatctcatttcttccaatactttcacttccttcaaatgccctgtcatttgcatttaagcgtcggtttggtccttccgacaaattaagttactggtacaattgcgattccaactattggagtgctgtctacaagcgcacctatggtaaagatttcaaatttaaagctggttatgattcagagattcgccttggctgggcatctctttgggttggagatgaaggtgggaaagccaaaacagctccgatgcagatgaaagttcaattcatgctacaagtgccacaggacgacataaaatcttctgctttgatgtttcggattaagaaaagatgggacttttaaggctctactggtgactttacctgttttttatatataaaaaatgggtatttgactttgggcagttccattgtgttttagtttgttgcatccacagtccactctttgcaaaagggggtattgactatttgacaggttgatatttctccaagtcagctaattgcttcgtggtgtgacaagtaagaacaattttcaatcgtacaaaatttgtaaagatgattttctgatttgtaagttggcagattatggttatcgaatgcagacagtgctgaaattggttatgcatttggctaaaggccattcaactt

SEQ ID NO: 16800 - protein, 319 aa, Glycine max
MVEMESAAENPNYPAVDYKRPSILSFPRRPALRVTSEFDSESAVFFHKISCKLLDSLAKFKFSFNHSGKGGDISEPQFSFVSKHLSLHYDLEDHNALVKTSIDLAPSLQLTASHDLKAQQGEVTVLANLADPAYSLQLSTPLPSVGLPKATFRFPLGELSLQEKQEEEVNNLLSVDGVLKGQLFNGLCSAHYKDEELKLRYGYKDDEISFLPILSLPSNALSFAFKRRFGPSDKLSYWYNCDSNYWSAVYKRTYGKDFKFKAGYDSEIRLGWASLWVGDEGGKAKTAPMQMKVQFMLQVPQDDIKSSALMFRIKKRWDF

SEQ ID NO: 16801 - protein, 316 aa, Glycine max
MESAAENPNYPAVDYKRPSILSFPRRPALRVTSEFDSESAVFFHKISCKLLDSLAKFKFSFNHSGKGGDISEPQFSFVSKHLSLHYDLEDHNALVKTSIDLAPSLQLTASHDLKAQQGEVTVLANLADPAYSLQLSTPLPSVGLPKATFRFPLGELSLQEKQEEEVNNLLSVDGVLKGQLFNGLCSAHYKDEELKLRYGYKDDEISFLPILSLPSNALSFAFKRRFGPSDKLSYWYNCDSNYWSAVYKRTYGKDFKFKAGYDSEIRLGWASLWVGDEGGKAKTAPMQMKVQFMLQVPQDDIKSSALMFRIKKRWDF

SEQ ID NO: 16802 - DNA, 1716 bp, Glycine max
aaggtcccgagtaagatgtttagatccattaatcataacaaggattttgaagtttcacttgcttatgaaagtgagaatcatttgcctcctggtgttacctctcctgaaattgctcgataccagatatctggtttgacagatgcaagtgagaaatactcatctcggaatctgtcatcccccatcaagacaaacatacatttttctcttagtagaagtggaattctttcactggatcgggctgatgctgttattgaaataacagagtgggtggaagttcctagaaagaatttgaccatagagaattcaaccgtttcatcaaatgtttcagctgaatctgctgcgggtaatagttctgaagaaaacaacgaaagcgtgcaaactgatagtgggattaataagacatccaacattagttcagaggagcaagctgctgctgagcctgctacagagaaaaagctgaaaaagcggacctttagggtaccattaaagattgtagagaagataactggatttggaatgtctctatcacaagattttcttgctgaagccaaaagaaaactacaagtactagataaaaaagatgcagacagaaaaagaacagctgagttaaaaaataatttagaaggatatatatatacaactaaggaaaagattgaaactcttgaggagtttgaaaaagtttctacaagtgaggaacgccagtccttcattgagaagcttgatcaggtgcaagattggttgtatacagatggtgaagatgccaatgccacagagtttcaagagcgtctagatcagttaaaagctgttggagatccaattttcttcaggttaaaagagcttacagctcggccagcagcagttgagcatgctaataaatacattgatgagttgaaacagattgttgaggagtggaaagcaaagaagtcttggcttccacaagaacgagtagacgaggtcataaaaagttctgaaaaattgaagaattggttggatgagaaagaagctgagcaaacaaagacttctggattcagtaagccagcatttacatctgaagaagtatatttgaaggtgcttgatctgcaaaccaaggttgccagtattaatagaattcccaagcccaaacctaaggttcagaagcccgtaaaaaatgaaaccgaaagcagtgagcagaatacagagaattctgattctaactcagctgatagttcctcttcaagtgattcatccgttaacagttcagaaggcacaagcgaagagacggtaactgagcaaactgaaggtcatgatgagctatgattaacctggcatacatgttaggccggtttgaatcatctacctgcaacgtttttatagtcagagatgtagactggtaatggtagaattaataggtgaaaaggaggcagtgtcggttctcggcgagcaggagaatagagttgaggcaacatttgctggttgagttctaaaattttgaggttagatggctactactgtagtagatgatttattacccttttatatttaagggggcaacttgtaatttgcagtcatatgaaagcttgtatttgccgaaacacaatgtgataggggaagaaaaaaaaagaaaaactcacgagatttgatttgctcagaacatataggaattttgcttgagtgactcgtagttctaaacgatttttgtttttaattaatttagcagatacatcttatcttattttt

SEQ ID NO: 16803 - protein, 431 aa, Glycine max
KVPSKMFRSINHNKDFEVSLAYESENHLPPGVTSPEIARYQISGLTDASEKYSSRNLSSPIKTNIHFSLSRSGILSLDRADAVIEITEWVEVPRKNLTIENSTVSSNVSAESAAGNSSEENNESVQTDSGINKTSNISSEEQAAAEPATEKKLKKRTFRVPLKIVEKITGFGMSLSQDFLAEAKRKLQVLDKKDADRKRTAELKNNLEGYIYTTKEKIETLEEFEKVSTSEERQSFIEKLDQVQDWLYTDGEDANATEFQERLDQLKAVGDPIFFRLKELTARPAAVEHANKYIDELKQIVEEWKAKKSWLPQERVDEVIKSSEKLKNWLDEKEAEQTKTSGFSKPAFTSEEVYLKVLDLQTKVASINRIPKPKPKVQKPVKNETESSEQNTENSDSNSADSSSSSDSSVNSSEGTSEETVTEQTEGHDEL

SEQ ID NO: 16804 - protein, 426 aa, Glycine max
MFRSINHNKDFEVSLAYESENHLPPGVTSPEIARYQISGLTDASEKYSSRNLSSPIKTNIHFSLSRSGILSLDRADAVIEITEWVEVPRKNLTIENSTVSSNVSAESAAGNSSEENNESVQTDSGINKTSNISSEEQAAAEPATEKKLKKRTFRVPLKIVEKITGFGMSLSQDFLAEAKRKLQVLDKKDADRKRTAELKNNLEGYIYTTKEKIETLEEFEKVSTSEERQSFIEKLDQVQDWLYTDGEDANATEFQERLDQLKAVGDPIFFRLKELTARPAAVEHANKYIDELKQIVEEWKAKKSWLPQERVDEVIKSSEKLKNWLDEKEAEQTKTSGFSKPAFTSEEVYLKVLDLQTKVASINRIPKPKPKVQKPVKNETESSEQNTENSDSNSADSSSSSDSSVNSSEGTSEETVTEQTEGHDEL

SEQ ID NO: 16805 - protein, 259 aa, Glycine max
MSLSQDFLAEAKRKLQVLDKKDADRKRTAELKNNLEGYIYTTKEKIETLEEFEKVSTSEERQSFIEKLDQVQDWLYTDGEDANATEFQERLDQLKAVGDPIFFRLKELTARPAAVEHANKYIDELKQIVEEWKAKKSWLPQERVDEVIKSSEKLKNWLDEKEAEQTKTSGFSKPAFTSEEVYLKVLDLQTKVASINRIPKPKPKVQKPVKNETESSEQNTENSDSNSADSSSSSDSSVNSSEGTSEETVTEQTEGHDEL

SEQ ID NO: 16806 - DNA, 1303 bp, Glycine max
aggagtcagccagacaagcaagccaccctctgctaccgcttctcatccatcatgtcgaatgaactaaaaaactatgatgtttttctcaattttcatggcaaagattccggttacaccttcactggtactctctataatgctttgcgcagcaagagaatcaagacctttttcacaaaacatgaatatggtcgtaaactacacactgatgacagccacattccaccctttactcttaaagcaattaaggaatcaaggatttcggtggttgttttgtcggaaaactatgcatcctcctcaagatgtcttgatgaacttgtggccatccttgagtgtaaaaggacgataaaccaactggtgtggcccatcttttacaaagtggatccgtcgcaagtaaggcaccagaaaggtagctatggagaacacatttgtaattttaaaaaaatttttagagattacaacgattccaatgagagggtgaagcaatggagagcagctttatctgaagtcagcaaattgagtggatggctttacaatgatcggaggtcccagtacgaatatgaattcatcgaaaggatcgtggaatcaaccgtgcaagccttgcccggatatgatgtttttctgagttttaccggagaggatacccgctacactttcacaggttttctctataatgcctttcgccgagagggattcaaaatcttcatggatgatgaggaattggagagtgggaaccaaatttcacagaagcttatgagagcaattgagagttcaaagatttcaattgttgtgctctctgaaaactatgcatattccacctggtgtcttgatgaacttgccaagatcattgagtgtatgaagaccaacaatcaaatggtttggccaatattttacaatgtgcaaaagtcggatgtatgcaatcaaacaaaaagttatggtgaagccatgactgaacatgaaaaaagatttggaaaggactctgagaaggtgcagaaatggaggtctgctttgtctgaaatcaaaaacttggaaggagaccatgtcaaacaaaatgagtaccaacatgaattaatcgaaaggattgtggaaaaggtcattaaaattgaaggtagcaagcatacagcaaatcctttccttttatccaatgacagctacgaggaagaatgagtgaaagagggtcaaatatatgctgtggagctgtgaaactaactgattgtaacctctataactgcccttgaattcatttgttcctatcaatgttgtttttacatccagttcaattcctaaggtttattgtattccttct

SEQ ID NO: 16807 - protein, 387 aa, Glycine max
RSQPDKQATLCYRFSSIMSNELKNYDVFLNFHGKDSGYTFTGTLYNALRSKRIKTFFTKHEYGRKLHTDDSHIPPFTLKAIKESRISVVVLSENYASSSRCLDELVAILECKRTINQLVWPIFYKVDPSQVRHQKGSYGEHICNFKKIFRDYNDSNERVKQWRAALSEVSKLSGWLYNDRRSQYEYEFIERIVESTVQALPGYDVFLSFTGEDTRYTFTGFLYNAFRREGFKIFMDDEELESGNQISQKLMRAIESSKISIVVLSENYAYSTWCLDELAKIIECMKTNNQMVWPIFYNVQKSDVCNQTKSYGEAMTEHEKRFGKDSEKVQKWRSALSEIKNLEGDHVKQNEYQHELIERIVEKVIKIEGSKHTANPFLLSNDSYEEE

SEQ ID NO: 16808 - protein, 370 aa, Glycine max
MSNELKNYDVFLNFHGKDSGYTFTGTLYNALRSKRIKTFFTKHEYGRKLHTDDSHIPPFTLKAIKESRISVVVLSENYASSSRCLDELVAILECKRTINQLVWPIFYKVDPSQVRHQKGSYGEHICNFKKIFRDYNDSNERVKQWRAALSEVSKLSGWLYNDRRSQYEYEFIERIVESTVQALPGYDVFLSFTGEDTRYTFTGFLYNAFRREGFKIFMDDEELESGNQISQKLMRAIESSKISIVVLSENYAYSTWCLDELAKIIECMKTNNQMVWPIFYNVQKSDVCNQTKSYGEAMTEHEKRFGKDSEKVQKWRSALSEIKNLEGDHVKQNEYQHELIERIVEKVIKIEGSKHTANPFLLSNDSYEEE

SEQ ID NO: 16809 - DNA, 816 bp, Glycine max
aagggaaaaatgacagaggagcaattaaaaaaggtggctcagactgagagtatttcccctaatcctgcacctgaacctgaacctgaacctgctgttccaaaagaggaagtggctgaggagaaatctgtaattccacaaccctcttcctctccttctgatgagtccaaagctcttgtcatagttgagaagactagtgaagttgctcaagagaaaccaattgaggggtctgtgaaccgagatgctgtccttgcgagagttgcaactgagaagaggctgtcactaatcaaagcatgggaagaaagtgaaaagtcaaaatcagagaacaagtctcacaaaaagctttcagtcatttcagcatgggagaacagtatgaaagctgcagcggaggcagaattgagaaagattgaagaacaactggagaagaaaaaagcagaatatggagagaaattgaaaaacaaaatagctacaatccaccgagaagctgaagaaaagagggcatttattgaggcccaaaaaggggaagatttcttgaaggcagaggagacagctgcaaagtacagggcaactggaacagccccaacgaaactctttggttgtttctaacaaccctgatcattaaaaaatgctgtattattattatggttattattattattatgtattttctttgatagttcatgtaacatgtgtggtttggttgtcttttgctgagttgtgttcatgttcatttattacgtgtgcatagtgatatgttggttcgaatataacaatttatctttgtgtatacacaagaaattgaattattcaatttggggt

SEQ ID NO: 16810 - protein, 200 aa, Glycine max
KGKMTEEQLKKVAQTESISPNPAPEPEPEPAVPKEEVAEEKSVIPQPSSSPSDESKALVIVEKTSEVAQEKPIEGSVNRDAVLARVATEKRLSLIKAWEESEKSKSENKSHKKLSVISAWENSMKAAAEAELRKIEEQLEKKKAEYGEKLKNKIATIHREAEEKRAFIEAQKGEDFLKAEETAAKYRATGTAPTKLFGCF

SEQ ID NO: 16811 - protein, 197 aa, Glycine max
MTEEQLKKVAQTESISPNPAPEPEPEPAVPKEEVAEEKSVIPQPSSSPSDESKALVIVEKTSEVAQEKPIEGSVNRDAVLARVATEKRLSLIKAWEESEKSKSENKSHKKLSVISAWENSMKAAAEAELRKIEEQLEKKKAEYGEKLKNKIATIHREAEEKRAFIEAQKGEDFLKAEETAAKYRATGTAPTKLFGCF

SEQ ID NO: 16812 - DNA, 1749 bp, Glycine max
gattcacacctccacactgtctctatcaccaatcccttatatcccccctccacttagcataccataattcaccgtcaatttccccattgatgatccatttggcatttcatcatatttcaccacttgtcctactccacttggataatttcctaacgtatagttttcaaaaatccttgttcttcatgagcttatagtttatgagtcctacgatttttggcaattcagcaacactatagatatatcttaggctaagagaagccttagcagcaactcaaatccaaaagtgtaagcctttcttcttgttattagtccatcttcaccaatggaagagaatatgaagtgtgaactagttggtctcattgatgagttaatgcaagggaaggagctagcaaagcagctttgtgaccatctagtctcattatcatcatcatcttctcatgaaacaaatgaagtcctaattgagaaaatactttccacctatgagaaagcacttgccatgctgaattgcaaggctaatgtaggagaaagtaaggccaacattaatggcagcatgatggattccccttgttctttcacaaatggtagccccaaaagtgaggtcatggagcctgagattaagaacaaagatgtctttaagaaaagaaagaccatgtcaacgtgcacagaacaagtgaaggtgtgcttgggaacggcgcatgaaggatctctggatgatggctatagttggagaaaatatggacagaaggatattctcggagctaagtttccaagaggatattacagatgcacatatagaaatgtacaaggatgtctggccacaaagcaggtgcaaaagtcagatgaagacccaatgatatgtgaaataacctacaaaggaagacacacatgcacccaagcaagtcacttaaacaaaacagtgatacccccatcaaagacaaaggtgaacttgttgggagaaaataagcaccaaacccatcaaattaagaatcaaccacggcaagagaaaatagaacaacaaccaccagagacatttttcacatttggatcatcatcaggtcttgaagttaaaatagaggacatcgaccacaaggagggcatattcccatcattttgcttttcttctccatcaatagtagggtcagaaaatggggacgacaacaacagcagcatattctcatacaccatgattgagaacaacttaatggaaagcttctctcctgccttcatatctccaacaacttcagatatagaatcaaacactttctgccactgggggagcactggactaggccaaagtgtgcaaagctcagggtctgatatcactgatatagtttcagcaccaacttcagtcaccaattcaccaataatggaccttgatttctttttcgataagatcgatttcgacacagatttccctttgagcaccatggaactttgcacttaataaattgtccccacttctaagtttacagcatatgtgatttctatgcggattaactgtgagttttgtagatcctgactagcaccataaccgagggaaggaagtctataataatcaccatagatcatgtccataaatgaagacaatgaaaaacttccctcttgtgctaattaagagagttttcatgtacctaggctgcaatgtgaaaataatttgtaggttgtagcttaatttggtgcatgtttggtttgcaatggaaattgttgtaatgcgcgttccaatgtagatcttatggataaaagtaaaac

SEQ ID NO: 16813 - protein, 373 aa, Glycine max
MEENMKCELVGLIDELMQGKELAKQLCDHLVSLSSSSSHETNEVLIEKILSTYEKALAMLNCKANVGESKANINGSMMDSPCSFTNGSPKSEVMEPEIKNKDVFKKRKTMSTCTEQVKVCLGTAHEGSLDDGYSWRKYGQKDILGAKFPRGYYRCTYRNVQGCLATKQVQKSDEDPMICEITYKGRHTCTQASHLNKTVIPPSKTKVNLLGENKHQTHQIKNQPRQEKIEQQPPETFFTFGSSSGLEVKIEDIDHKEGIFPSFCFSSPSIVGSENGDDNNSSIFSYTMIENNLMESFSPAFISPTTSDIESNTFCHWGSTGLGQSVQSSGSDITDIVSAPTSVTNSPIMDLDFFFDKIDFDTDFPLSTMELCT

SEQ ID NO: 16814 - protein, 369 aa, Glycine max
MKCELVGLIDELMQGKELAKQLCDHLVSLSSSSSHETNEVLIEKILSTYEKALAMLNCKANVGESKANINGSMMDSPCSFTNGSPKSEVMEPEIKNKDVFKKRKTMSTCTEQVKVCLGTAHEGSLDDGYSWRKYGQKDILGAKFPRGYYRCTYRNVQGCLATKQVQKSDEDPMICEITYKGRHTCTQASHLNKTVIPPSKTKVNLLGENKHQTHQIKNQPRQEKIEQQPPETFFTFGSSSGLEVKIEDIDHKEGIFPSFCFSSPSIVGSENGDDNNSSIFSYTMIENNLMESFSPAFISPTTSDIESNTFCHWGSTGLGQSVQSSGSDITDIVSAPTSVTNSPIMDLDFFFDKIDFDTDFPLSTMELCT

SEQ ID NO: 16815 - protein, 357 aa, Glycine max
MQGKELAKQLCDHLVSLSSSSSHETNEVLIEKILSTYEKALAMLNCKANVGESKANINGSMMDSPCSFTNGSPKSEVMEPEIKNKDVFKKRKTMSTCTEQVKVCLGTAHEGSLDDGYSWRKYGQKDILGAKFPRGYYRCTYRNVQGCLATKQVQKSDEDPMICEITYKGRHTCTQASHLNKTVIPPSKTKVNLLGENKHQTHQIKNQPRQEKIEQQPPETFFTFGSSSGLEVKIEDIDHKEGIFPSFCFSSPSIVGSENGDDNNSSIFSYTMIENNLMESFSPAFISPTTSDIESNTFCHWGSTGLGQSVQSSGSDITDIVSAPTSVTNSPIMDLDFFFDKIDFDTDFPLSTMELCT

SEQ ID NO: 16816 - DNA, 1455 bp, Glycine max
gacagatggatctgcaaaaccagagaacaagcagaagagtcttcttcgtttaacaacaacatcggagaaagaaacaaacacctgcggcgagcacacacacgtgcgttgtgagcactctccaatctcacacgcatgagtccgatgctgctgtaaccgtcgacgaagaagaagaaagaaaccgttgttgctgtgaccttgaagtgaagcaaaattcgcaaaccaaaccaaacaaaccctaaatgcgcggttactagtgagtgacgattcagatctgttgcgggattatcgaaattggttattggcggagggagatggaggggaactccggcggaggaggcggcggaaacgacgtggaattgctctgcaagacgctgcaggtggagcacaagctcttctacttcgatctgaaggagaaccctcgcggccgctaccttaagatttccgagaagacctccgccaccaggtccaccatcatcgtccccttctctggcatttcctggttcctcgatctcttcaattactacgtcaattccgatgatcaggacctcttcagcaaggaattgcagctcgacaccaaggttttctattttgacattggtgagaatcggaggggccgttttttgaaggtgtctgaagcttctgtcagcagaaaccgtagcactataattgttcctgctggaagctccagggatgaaggatgggcagcattcaggaacgttttggcagagatcaatgaagcctcaaggcttttcattctgcccaatcagcaaaattctgaatcctcagagcgtcttgttggactttcggatgatgttggtgctggcttcatatctggtcatagtactcaacctgccacttcttctgagttgaatgtggacaggtctgttgatttgccgcctcaggatgaaattgggaacttgggggtctcaaaagtaatcagggctgatcagaaaagattcttctttgatcttgggagcaataataggggtcatttcttaagaatatctgaggttgcgggttctgatagatcctccatcattcttcccctgtcagggcttaagcagtttcatgagattgttggtcactttgtggaaatcacaaaggaccgaattgagggaatgacagttgctaatgttcgcacagttgatccccctcaaagatgaatgctaacttggggtattcatggttaataattaatcccccttccaaggtttcaatgggataagaatgggtgttgtctttgagtctgatttgtgtattttattttccctcagcctccttctccttctcatattgttcttccattaatgcttttgaaataatgcaaactgtggttggtccgcagaataatttgaattgcttggcaaggttaatatgaataggaataatgtatttgtttggatagtttggcacccaagctacaatctgtaataatgtttgattgtttaaaaaaag

SEQ ID NO: 16817 - protein, 283 aa, Glycine max
MEGNSGGGGGGNDVELLCKTLQVEHKLFYFDLKENPRGRYLKISEKTSATRSTIIVPFSGISWFLDLFNYYVNSDDQDLFSKELQLDTKVFYFDIGENRRGRFLKVSEASVSRNRSTIIVPAGSSRDEGWAAFRNVLAEINEASRLFILPNQQNSESSERLVGLSDDVGAGFISGHSTQPATSSELNVDRSVDLPPQDEIGNLGVSKVIRADQKRFFFDLGSNNRGHFLRISEVAGSDRSSIILPLSGLKQFHEIVGHFVEITKDRIEGMTVANVRTVDPPQR

SEQ ID NO: 16818 - DNA, 1431 bp, Glycine max
gcgcagtgaagaagaagaagaagaagaagaagaagaagaagaagagatgagcgtggaagatcttcctgggaaagaggtaaacgtgctgaagggtcacgagggtggcgtgttagccgcgaggttcaacggcgatggcaattatgttctgagttgcggcaaagaccgtaccatacgcctttggaatcctcaccgtggcatccatatcaagacctataaatcccacgctcgcgaagtccgcgatgtccacgtcacacaggacaactccaagctatgttcctgtggtggagatcgacaaatattttattgggacgttgcaactggacgtgtaattaggaaatttcgtggccatgatggtgaggtaaatggtgtcaaattcaatgagtattcatctgttgtagtctctgctggctatgatcaatcattgcgtgcttgggactgcagatcccacagcacagagccaattcagattattgacacatttgcggatagtgtgatgtctgtttgtttaacaaaaactgaaattattggaggaagtgttgatggaactgttcgaacatttgacattcgtattggcagagaaacatctgataatttagggcaacctgtcaactgtgtatcaatgtcaaatgatggtaactgcattctagccggttgcttagactctacattgcgtcttttggacaggtcgacaggtgaactgttacaagaatataaaggacacactaataagtcttacaaattggattgctgccttaccaatacggatgctcatgtaactggtgtctctgaggatggcttcatttatttctgggatcttgtagatgcatctgttgtttcaagattcaaggctcatacctcagtggtaacaagtgttagttatcatccaaaggaaaactgcatggtaacttcttctgtggatggcaccattagagtatggaagacataagaacgaaatgcaaacactaagcttctatggtgtgtccacgcggtccatagcaataccaattaggataatgatgattacatgtccgattgcgtttggagttcacggacacgatgttacttccaagttatttataattcttcggcagattttgacctataatatgtgcttttcatgtggaagatggtaaacgcaaggtgagttagttggttgcagcatctatacggtcaaatctcacacattttttgactttttgtctccaaaagggatagggtattgtattattcacttgtgtccataaaaggaaaatgatttgtatactatccgttattttgtgaaaatgaggttgtattgtatccgttttggagtttttgatcttgggttttttttactggtatagttggaaaactagtggctgcgatgctcttatgtagttacaaatctatgctgtgattcaatccatggctggtgtttttccagtgatctag

SEQ ID NO: 16819 - protein, 314 aa, Glycine max
RSEEEEEEEEEEEEEMSVEDLPGKEVNVLKGHEGGVLAARFNGDGNYVLSCGKDRTIRLWNPHRGIHIKTYKSHAREVRDVHVTQDNSKLCSCGGDRQIFYWDVATGRVIRKFRGHDGEVNGVKFNEYSSVVVSAGYDQSLRAWDCRSHSTEPIQIIDTFADSVMSVCLTKTEIIGGSVDGTVRTFDIRIGRETSDNLGQPVNCVSMSNDGNCILAGCLDSTLRLLDRSTGELLQEYKGHTNKSYKLDCCLTNTDAHVTGVSEDGFIYFWDLVDASVVSRFKAHTSVVTSVSYHPKENCMVTSSVDGTIRVWKT

SEQ ID NO: 16820 - protein, 299 aa, Glycine max
MSVEDLPGKEVNVLKGHEGGVLAARFNGDGNYVLSCGKDRTIRLWNPHRGIHIKTYKSHAREVRDVHVTQDNSKLCSCGGDRQIFYWDVATGRVIRKFRGHDGEVNGVKFNEYSSVVVSAGYDQSLRAWDCRSHSTEPIQIIDTFADSVMSVCLTKTEIIGGSVDGTVRTFDIRIGRETSDNLGQPVNCVSMSNDGNCILAGCLDSTLRLLDRSTGELLQEYKGHTNKSYKLDCCLTNTDAHVTGVSEDGFIYFWDLVDASVVSRFKAHTSVVTSVSYHPKENCMVTSSVDGTIRVWKT

SEQ ID NO: 16821 - DNA, 1085 bp, Glycine max
agatcacattttaggttgttttgagaaagcaaaaagaaaatcagtaggcgtagagaacagcaaagaaagaggaataatggagcaggaagagcacgaagtgtacggtgcagacattcccgacgaggagattgacatggacgcagacgccgagcaacaagatgagcaacttgcccccaatcacacaaacaaggaactggaggacatgaagaagaggctgaaggagatcgaggaggaagctagcgcccttcgcgaaatgcaggccaaggtcgagaaagagatgggcgctgttcaagattcgtcgggcacttccgcaactcaagctgaaaaggaggaagtggatgctcggtcaatctatgttggtaatgttgactatgcatgtacgcctgaagaagtccagcagcattttcagtcctgtggaactgtgaacagggtgacaatactgacagacaaatttggtcaaccaaaagggtttgcttatgtagagtttgttgagattgatgccgtgcagaatgctctcctgttaaatgaatcagaattgcatggtcgacaactgaaggtgtctgccaagcgtacaaatgttcctggaatgaagcaatattttggaagaagacctgctggtttccgatctaggaggcctttcatgtctgctccattctttccaccatatggttatggaagggttccaaggtatagaagacccactcgatacaggccatactagtgcacattctcagtttaataggtgatcacatattaattatgatgagacagggcgttgttaatttgccattgtaataattttcgttggtggagcaagaacataagctttcgtttacacagaagttagatgtccttgcctgttaacgctgtagaatgtatgatgcgaacaaatgtagttttgatcacttggctacccatcttgaatgttgatagcactcggcactccggtttttacttatacagtgatggaggcaactatgcaggggggaatttcaatagtttgttagtttgaacatcaaaattagactattcagtgcaatgttggattttttaaagaattgatattaacagtgttggaattggtc

SEQ ID NO: 16822 - protein, 239 aa, Glycine max
DHILGCFEKAKRKSVGVENSKERGIMEQEEHEVYGADIPDEEIDMDADAEQQDEQLAPNHTNKELEDMKKRLKEIEEEASALREMQAKVEKEMGAVQDSSGTSATQAEKEEVDARSIYVGNVDYACTPEEVQQHFQSCGTVNRVTILTDKFGQPKGFAYVEFVEIDAVQNALLLNESELHGRQLKVSAKRTNVPGMKQYFGRRPAGFRSRRPFMSAPFFPPYGYGRVPRYRRPTRYRPY

SEQ ID NO: 16823 - protein, 214 aa, Glycine max
MEQEEHEVYGADIPDEEIDMDADAEQQDEQLAPNHTNKELEDMKKRLKEIEEEASALREMQAKVEKEMGAVQDSSGTSATQAEKEEVDARSIYVGNVDYACTPEEVQQHFQSCGTVNRVTILTDKFGQPKGFAYVEFVEIDAVQNALLLNESELHGRQLKVSAKRTNVPGMKQYFGRRPAGFRSRRPFMSAPFFPPYGYGRVPRYRRPTRYRPY

SEQ ID NO: 16824 - protein, 195 aa, Glycine max
MDADAEQQDEQLAPNHTNKELEDMKKRLKEIEEEASALREMQAKVEKEMGAVQDSSGTSATQAEKEEVDARSIYVGNVDYACTPEEVQQHFQSCGTVNRVTILTDKFGQPKGFAYVEFVEIDAVQNALLLNESELHGRQLKVSAKRTNVPGMKQYFGRRPAGFRSRRPFMSAPFFPPYGYGRVPRYRRPTRYRPY

SEQ ID NO: 16825 - DNA, 887 bp, Glycine max
aattaacactcacacccttttcagtttataccaaacaaatgatgttacagccttctttcttgtgcttctctttcatgtttctcatcacactccctcttggaaaaagctctaccaccttgaatgtacccaaggacataatcaatcaaacatgccaaaaatgtgccaaccaatccatcatcttgagctacaacctatgctccacttctcttccggcggttccggtgagtcactccgcgaatctcgaagggttggcgttggttgcaatggagctagcactagagaatgtgactagcactttggccaccatagagaagctattagacagcacaagccttgataactttgcgctggggtgcttggcagattgcttggagctgtactctgatgcagcatggacaatagtgaattctgtaggggttttcctctctgggaactatgatgtaactaggatttggatgagttcggttatggaagcagcatcaacgtgccaacaaggttttactgggagaggtgaagcttctcctttgacacaggagaactataatctctttcagttgtgtggtattgcactttgcattattcatttggccacacctggagtaccttctcaattaatccacagataaatttgccagtatatgctgtctttctcatcaataaagtgagagacattgtattagtatctcaaaatggacaatattagtgagtggtggaaacgttgtatcttaatagagatggaaattaagggaggaagacagagtagagatgctagtgctagacattaatagatatagaaattagaatgatctatgttttctttattttagtttttagtagagcgaaattttttgtagtagtgaaaaagaaagaaaggtgtattattatag

SEQ ID NO: 16826 - protein, 207 aa, Glycine max
LTLTPFSVYTKQMMLQPSFLCFSFMFLITLPLGKSSTTLNVPKDIINQTCQKCANQSIILSYNLCSTSLPAVPVSHSANLEGLALVAMELALENVTSTLATIEKLLDSTSLDNFALGCLADCLELYSDAAWTIVNSVGVFLSGNYDVTRIWMSSVMEAASTCQQGFTGRGEASPLTQENYNLFQLCGIALCIIHLATPGVPSQLIHR

SEQ ID NO: 16827 - protein, 195 aa, Glycine max
MMLQPSFLCFSFMFLITLPLGKSSTTLNVPKDIINQTCQKCANQSIILSYNLCSTSLPAVPVSHSANLEGLALVAMELALENVTSTLATIEKLLDSTSLDNFALGCLADCLELYSDAAWTIVNSVGVFLSGNYDVTRIWMSSVMEAASTCQQGFTGRGEASPLTQENYNLFQLCGIALCIIHLATPGVPSQLIHR

SEQ ID NO: 16828 - protein, 194 aa, Glycine max
MLQPSFLCFSFMFLITLPLGKSSTTLNVPKDIINQTCQKCANQSIILSYNLCSTSLPAVPVSHSANLEGLALVAMELALENVTSTLATIEKLLDSTSLDNFALGCLADCLELYSDAAWTIVNSVGVFLSGNYDVTRIWMSSVMEAASTCQQGFTGRGEASPLTQENYNLFQLCGIALCIIHLATPGVPSQLIHR

SEQ ID NO: 16829 - DNA, 1662 bp, Glycine max
attcatctctatcggtactcaatacacaggttttaattctttaagagcggagatgaacacgttttcacatgtaccaccaggctttcgatttcatccgaccgatgaagaacttgtcggttactaccttaggaaaaaggtagcgtctaaaaggattgatctagatgtcatcaaagatgtcgatctctataaaattgaaccatgggatctccaagaattatgcaaaataggaaccgatgaacaaagtgactggtatttctttagtcataaagataagaaatatccaactggaactcgcaccaatagagctacaaaagcaggattctggaaagccacgggaagagacaaggcaatatactctaagcattgcctcattggcatgagaaagactctcgtgttttacaaaggacgagccccaaatggacagaagtctgattggatcatgcatgagtacaggctagaaactaatgaaaatggaacaacttctcaggaagaagggtgggttgtgtgtagagtgtcagaagagaatgacaacaatgcagaaagtgggagagtatgatcaatcaccctgttggtacgatgagcaagtttccttcatgcaagatcttgaatcccccaggcgcagtatttctctgccttatgcatcataccaccaccaccaccaccctagctgcaagcctgagctcatggaattgcaatacaacaacattccccacgatgcattcctccaacttccacaacttgaaagccccaaagttactcaatcagcatgctcagttgtcccttatggctatgaaaacaacaacaacaacaacaacaacaacaatggaagcaccttgcagttctcatcactcactcaggaagaacagttacaatattgcaataaccaacaaagtcaccattctctctatggcagcaatgatcatgcggttgaccaggtcacagattggcgtgtacttgacaaatatgttgcttctcagctcagtcacaacaaccaagatgtcgtttccaaggaaaccagttattccaatgcacccattttcaatgtgacggaacaagtttctgtggttgcaaatggatccaaaaaggagcaagtttctcaggagtatgcttcaacgtctacctccagttaccagattgacctgtggaagtgaattttttttatacatatatatagtaactatataaataagatatcatatgatgcataatactaattataggaagtgcgtacaagtgaatgttggaaaaaaagaaaaagaccatagtgttgctccgtgttgttgtacataataaacctaaaatgtttaatatatcattagttgtattgaacctcttgaggctggagtatatggactgaaatgtatccattagtgttgcaattcttcagttgaaaaagacacgcctatatacagcaaacagattggtgcttcaaggtcaactcgatctacagcaagaagtgatctatatgatgggaagagttctatgaattaatgttacaggtgatttgttcactacagcttaatgttgcatttattataaaagttacatatgttttcagtttgtatttgaaatagccaattacttggatatatgattggatctaccagaagtttaagaatggagggatgagatttgagaatctaaactaagcatgcttctgat

SEQ ID NO: 16830 - protein, 228 aa, Glycine max
MKMEQLLRKKGGLCVECQKRMTTMQKVGEYDQSPCWYDEQVSFMQDLESPRRSISLPYASYHHHHHPSCKPELMELQYNNIPHDAFLQLPQLESPKVTQSACSVVPYGYENNNNNNNNNNGSTLQFSSLTQEEQLQYCNNQQSHHSLYGSNDHAVDQVTDWRVLDKYVASQLSHNNQDVVSKETSYSNAPIFNVTEQVSVVANGSKKEQVSQEYASTSTSSYQIDLWK

SEQ ID NO: 16831 - protein, 226 aa, Glycine max
MEQLLRKKGGLCVECQKRMTTMQKVGEYDQSPCWYDEQVSFMQDLESPRRSISLPYASYHHHHHPSCKPELMELQYNNIPHDAFLQLPQLESPKVTQSACSVVPYGYENNNNNNNNNNGSTLQFSSLTQEEQLQYCNNQQSHHSLYGSNDHAVDQVTDWRVLDKYVASQLSHNNQDVVSKETSYSNAPIFNVTEQVSVVANGSKKEQVSQEYASTSTSSYQIDLWK

SEQ ID NO: 16832 - protein, 208 aa, Glycine max
MTTMQKVGEYDQSPCWYDEQVSFMQDLESPRRSISLPYASYHHHHHPSCKPELMELQYNNIPHDAFLQLPQLESPKVTQSACSVVPYGYENNNNNNNNNNGSTLQFSSLTQEEQLQYCNNQQSHHSLYGSNDHAVDQVTDWRVLDKYVASQLSHNNQDVVSKETSYSNAPIFNVTEQVSVVANGSKKEQVSQEYASTSTSSYQIDLWK

SEQ ID NO: 16833 - DNA, 813 bp, Glycine max
aaccctaaaccctcacagtcctgacggtgccacaccgccactgtctttgttctttctcagctttcactgattattcgtcgaaggttccaacccaatttgttatctctctgcgatttctagaaaaagatgcctctgggactcatcttaggaataggaagggcatttcgaaggaagcggccatcttcactcgatattctatcatcaaaacgtgctcctcgtggttattataagggaaagaattgcaagcctactggtttccacactcgcaaaggtgggtatgtggtgatgcaagaaaaattgccaaattatgtagttcctgatttgactgatttcaagctcaaaccatacgtatctcagtgtcctatagaagcgaatacctctgaagcttcccaaacggctaaataaccaaattgagtagtgtaagatactttctttgtaactacagatgtttttccatgaagaggagttggcatgcccttcgttttgttgtttgttctctccttttgaactacgccttgagtaattattgaccggcacaaatatttgatagttcaataggatattaacctatcaatcaatatcattaacatatgtagtgcgctgaatgatttggactatcaaaactatcaataattttcatctgttgttccccgattagtttggttatgtttggatggatggagttgttaataatcgagtggaattgtaaaagctgaaaagaccttgagccattgtctgggtttttttattaatgaaaagagatgatcaaaggtggattcaaaccactttaaattactcaaaaaaaaaaaaaat

SEQ ID NO: 16834 - protein, 92 aa, Glycine max
MPLGLILGIGRAFRRKRPSSLDILSSKRAPRGYYKGKNCKPTGFHTRKGGYVVMQEKLPNYVVPDLTDFKLKPYVSQCPIEANTSEASQTAK

SEQ ID NO: 16835 - DNA, 1490 bp, Glycine max
acacccaaacccaatcctcttcctcttcccacaaatcgtgacacatttccctctttcccttctctattccgcgcgattcgcaaactcccagattgagacccgcccgcgcgcaaattgaagaagagaaggccaaaagatttgatctttcaatcgaggggtttctggggtgtccgaggatgaggctcaacggtgaaatctcaagtggagaagaagaggagaaacaaacgggaacgacgacgttttcgtcgcagaaagtggtcgttggctacgctttaacgtccaagaagaaaaagagctttctgcagccaagtttcactggcctcgcacgggggataaactttgttgctattgatctaaacaagccactgctagaacaaggtccttttgatattatcttgcataagttgtcaggggaggagtggtgtgagattattgagagttcatgctctcctcatcatgaatcatgatcagatagttgaaatcagtccccaagtgttcaaacaagattataggcaaaaacatccagaggtaactgtccttgatcctccggatgcaatccaacatttacacaatcgccaatccatgctgcaagatgtggtggatctgaacttatctgattgtcatggcaaggttggtgttccacgtcagctagttatcccaaaagagaaagacccctctagtatcccttacgaaatcactaaggctgggatgaagttgccattagttgcaaaaccactagttgtggatggcactgcaaagtcacatgaactatttcttgcttatgatgaattctctctttcagagcttgaacctccactagttctacaagagtttgtcaatcatggtggtcttcttttaagatttacattgttggggaaaccataaaggttgtgaagcgtttctctcttcctaacatcagtaagcatgaggtatcaaaagttgctggtgtattccgttttccaagagtttcatgtgcagccgcttctgcagatgatgctgatttagatcctaatatcgctgaacatccgccaagacctttattggagaggcttgcgagggagctccgccatcgattgggactgtgcttgttcaacatagatatgattcgaaaatatggaaccaaggatgtgttttacgtcattgacatcaactactttcccggatatggaaaaatgccagactatgagcacgtatttacagattttctacttagcctagtgcagagcaattgtaagaagaaacttgctacctaaactagagcaagttttagtagatcagatccattgagcagggctgttcttgctggtggctttcttaataatttatgcaaactactctggaatttcaatgaagccaccaaaatgttgaaaaaaaaggttgaaataggggctgtctgtctaatttccccctctctcaataatgagcgaaaaatgcctttattgtaagctatatatgcttatatccaaatcaatgcaaattttggtggtgct

SEQ ID NO: 16836 - protein, 142 aa, Glycine max
MNHDQIVEISPQVFKQDYRQKHPEVTVLDPPDAIQHLHNRQSMLQDVVDLNLSDCHGKVGVPRQLVIPKEKDPSSIPYEITKAGMKLPLVAKPLVVDGTAKSHELFLAYDEFSLSELEPPLVLQEFVNHGGLLLRFTLLGKP

SEQ ID NO: 16837 - protein, 100 aa, Glycine max
MLQDVVDLNLSDCHGKVGVPRQLVIPKEKDPSSIPYEITKAGMKLPLVAKPLVVDGTAKSHELFLAYDEFSLSELEPPLVLQEFVNHGGLLLRFTLLGKP

SEQ ID NO: 16838 - protein, 96 aa, Glycine max
MRLNGEISSGEEEEKQTGTTTFSSQKVVVGYALTSKKKKSFLQPSFTGLARGINFVAIDLNKPLLEQGPFDIILHKLSGEEWCEIIESSCSPHHES

SEQ ID NO: 16839 - DNA, 1461 bp, Glycine max
tatggtaaaacaagggaaaatatggagcagtgctttgaggaacttgctctaaaggtttaacttagactcttaaagtctcataaccgaacagttcaatgcagaaaagttctggaaatattataggccatttccttggaggtttatattgttatctaagaagatgcatgtttgccattttatccgtgggtcctgtgccaagtcatattgctttcatcatggatgggaatcgaaggtatgcaaagaagagaaacatggaagaaggtgatggccataaggctggatttactgctctcatgtccatccttagatactgttatgaattgggagtgaagtatgtcactgtctatgcattcagcattgataacttcaaaaggaagcctaatgaggttcagtccttgatggaattgatgcgggaaaagattgaagagttgcttcaacaagaaagtcttatcaatgaatatggtgttagattacatttcattggagacttgcaactattgactgagcctgtcatagcttctgtggaaaaggcaatgagagttactgctcacaacaaccagagagttcttttggtttgcatagcctatacttctcgtcacgagatggtgcatgctgttcaagaatgctgcaaggaaaaatggaatgaagttcaagcatcaaaagaagcaaaacttacaaatggtgcatttgcaagaattgatcagggcctgaaaggaaatggttttgatttgctttttcaagatttatgtaaagactatcaaaatgcaaccaaagcttgtaatagtgtacctaaacgagtggaacctgctgtagagaaagatggcatgttggagcatactgttgaaaaaggtaacgatagtgaagctgaaatcacatcatgcaatgagctggttgaaatgactgaagagagaaagtataaccagggtgatgttcctttaataaaactggtggatattgagaagcacatgtacatggcagtggcacctgatccagacatcttgatccgaacttctggagaggctcgactcagcaattttcttctttggcagactagtacctgccctttgtatgcaccaactgcactttggcctgaaataggcctaagacacttggtctgggcagtattgaactttcagagacaccatttttatttggaaaagaaaaggaagcagttttaactgtatccttattgtcaaaaattcatagtgtagttcatgtgatggcagtttcctttttataaagactagtttttgttttttttattttattttatttataagaattgttgaaattataagagtttaagtagcccaaggggataagaaagagaaaaaactttggatagtagaatgtaatattgatatgtgctgtgcaatgatgtcttatcaaatacaatgaacaagaacttatttatttcaagaattactataaatatgaaaattatggttgatcatttaaaat

SEQ ID NO: 16840 - protein, 360 aa, Glycine max
MQKSSGNIIGHFLGGLYCYLRRCMFAILSVGPVPSHIAFIMDGNRRYAKKRNMEEGDGHKAGFTALMSILRYCYELGVKYVTVYAFSIDNFKRKPNEVQSLMELMREKIEELLQQESLINEYGVRLHFIGDLQLLTEPVIASVEKAMRVTAHNNQRVLLVCIAYTSRHEMVHAVQECCKEKWNEVQASKEAKLTNGAFARIDQGLKGNGFDLLFQDLCKDYQNATKACNSVPKRVEPAVEKDGMLEHTVEKGNDSEAEITSCNELVEMTEERKYNQGDVPLIKLVDIEKHMYMAVAPDPDILIRTSGEARLSNFLLWQTSTCPLYAPTALWPEIGLRHLVWAVLNFQRHHFYLEKKRKQF

SEQ ID NO: 16841 - protein, 337 aa, Glycine max
MFAILSVGPVPSHIAFIMDGNRRYAKKRNMEEGDGHKAGFTALMSILRYCYELGVKYVTVYAFSIDNFKRKPNEVQSLMELMREKIEELLQQESLINEYGVRLHFIGDLQLLTEPVIASVEKAMRVTAHNNQRVLLVCIAYTSRHEMVHAVQECCKEKWNEVQASKEAKLTNGAFARIDQGLKGNGFDLLFQDLCKDYQNATKACNSVPKRVEPAVEKDGMLEHTVEKGNDSEAEITSCNELVEMTEERKYNQGDVPLIKLVDIEKHMYMAVAPDPDILIRTSGEARLSNFLLWQTSTCPLYAPTALWPEIGLRHLVWAVLNFQRHHFYLEKKRKQF

SEQ ID NO: 16842 - protein, 320 aa, Glycine max
MDGNRRYAKKRNMEEGDGHKAGFTALMSILRYCYELGVKYVTVYAFSIDNFKRKPNEVQSLMELMREKIEELLQQESLINEYGVRLHFIGDLQLLTEPVIASVEKAMRVTAHNNQRVLLVCIAYTSRHEMVHAVQECCKEKWNEVQASKEAKLTNGAFARIDQGLKGNGFDLLFQDLCKDYQNATKACNSVPKRVEPAVEKDGMLEHTVEKGNDSEAEITSCNELVEMTEERKYNQGDVPLIKLVDIEKHMYMAVAPDPDILIRTSGEARLSNFLLWQTSTCPLYAPTALWPEIGLRHLVWAVLNFQRHHFYLEKKRKQF
